United States Patent Application Publication US 2024/0327476 A1 - sequence listing, part 50

SEQ ID NO: 93770 - DNA, 1038 bp, synthetic construct
  misc_feature 1..1038: note = Description of Artificial Sequence: Synthetic coding sequence
  source 1..1038: mol_type = other DNA
atgggcgagggcgacgccttctgggcccccagcgtgctgccccacagcaccctgagcaccctgagccaccacccccagccccagttcggcagaagaatggagagcaaggtgagcgagggcggcctgaacgtgaccctgaccatcagactgctgatgcacggcaaggaggtgggcagcatcatcggcaagaagggcgagaccgtgaagaagatgagagaggagagcggcgccagaatcaacatcagcgagggcaactgccccgagagaatcgtgaccatcaccggccccaccgacgccatcttcaaggccttcgccatgatcgcctacaagttcgaggaggacatcatcaacagcatgagcaacagccccgccaccagcaagccccccgtgaccctgagactggtggtgcccgccagccagtgcggcagcctgatcggcaagggcggcagcaagatcaaggagatcagagagagcaccggcgcccaggtgcaggtggccggcgacatgctgcccaacagcaccgagagagccgtgaccatcagcggcacccccgacgccatcatccagtgcgtgaagcagatctgcgtggtgatgctggaggcctacaccatccagggccagtacgccatcccccaccccgacctgaccaagctgcaccagctggccatgcagcagacccccttcccccccctgggccagaccaaccccgccttccccggcgagaagctgcccctgcacagcagcgaggaggcccagaacctgatgggccagagcagcggcctggacgccagcccccccgccagcacccacgagctgaccatccccaacgacctgatcggctgcatcatcggcagacagggcaccaagatcaacgagatcagacagatgagcggcgcccagatcaagatcgccaacgccaccgagggcagcagcgagagacagatcaccatcaccggcacccccgccaacatcagcctggcccagtacctgatcaacgccagactgaccagcgaggtgaccggcatgggcaccctgtag

SEQ ID NO: 93771 - DNA, 1113 bp, synthetic construct
  misc_feature 1..1113: note = Description of Artificial Sequence: Synthetic coding sequence
  source 1..1113: mol_type = other DNA
atgggcgagggcgacgccttctgggcccccagcgtgctgccccacagcaccctgagcaccctgagccaccacccccagccccagttcggcagaagaatggagagcaaggtgagcgagggcggcctgaacgtgaccctgaccatcagactgctgatgcacggcaaggaggtgggcagcatcatcggcaagaagggcgagaccgtgaagaagatgagagaggagagcggcgccagaatcaacatcagcgagggcaactgccccgagagaatcgtgaccatcaccggccccaccgacgccatcttcaaggccttcgccatgatcgcctacaagttcgaggaggacatcatcaacagcatgagcaacagccccgccaccagcaagccccccgtgaccctgagactggtggtgcccgccagccagtgcggcagcctgatcggcaagggcggcagcaagatcaaggagatcagagagagcaccggcgcccaggtgcaggtggccggcgacatgctgcccaacagcaccgagagagccgtgaccatcagcggcacccccgacgccatcatccagtgcgtgaagcagatctgcgtggtgatgctggagagcccccccaagggcgccaccatcccctacagacccaagcccgccagcacccccgtgatcttcgccggcggccaggcctacaccatccagggccagtacgccatcccccaccccgacctgaccaagctgcaccagctggccatgcagcagacccccttcccccccctgggccagaccaaccccgccttccccggcgagaagctgcccctgcacagcagcgaggaggcccagaacctgatgggccagagcagcggcctggacgccagcccccccgccagcacccacgagctgaccatccccaacgacctgatcggctgcatcatcggcagacagggcaccaagatcaacgagatcagacagatgagcggcgcccagatcaagatcgccaacgccaccgagggcagcagcgagagacagatcaccatcaccggcacccccgccaacatcagcctggcccagtacctgatcaacgccagactgaccagcgaggtgaccggcatgggcaccctgtag

SEQ ID NO: 93772 - DNA, 1056 bp, synthetic construct
  misc_feature 1..1056: note = Description of Artificial Sequence: Synthetic coding sequence
  source 1..1056: mol_type = other DNA
atgggcgagggcgacgccttctgggcccccagcgtgctgccccacagcaccctgagcaccctgagccaccacccccagccccagttcggcagaagaatggagagcaaggtgagcgagggcggcctgaacgtgaccctgaccatcagactgctgatgcacggcaaggaggtgggcagcatcatcggcaagaagggcgagaccgtgaagaagatgagagaggagagcggcgccagaatcaacatcagcgagggcaactgccccgagagaatcgtgaccatcaccggccccaccgacgccatcttcaaggccttcgccatgatcgcctacaagttcgaggaggacatcatcaacagcatgagcaacagccccgccaccagcaagccccccgtgaccctgagactggtggtgcccgccagccagtgcggcagcctgatcggcaagggcggcagcaagatcaaggagatcagagagagcaccggcgcccaggtgcaggtggccggcgacatgctgcccaacagcaccgagagagccgtgaccatcagcggcacccccgacgccatcatccagtgcgtgaagcagatctgcgtggtgatgctggagagcccccccaagggcgccaccatcccctacagacccaagcccgccagcacccccgtgatcttcgccggcggccaggcctacaccatccagggccagtacgccatcccccaccccgaccagctgaccaagctgcaccagctggccatgcagcagacccccttcccccccctgggccagaccaaccccgccttccccggcctggacgccagcccccccgccagcacccacgagctgaccatccccaacgacctgatcggctgcatcatcggcagacagggcaccaagatcaacgagatcagacagatgagcggcgcccagatcaagatcgccaacgccaccgagggcagcagcgagagacagatcaccatcaccggcacccccgccaacatcagcctggcccagtacctgatcaacgccagactgaccagcgaggtgaccggcatgggcaccctgtag

SEQ ID NO: 93773 - DNA, 1116 bp, synthetic construct
  misc_feature 1..1116: note = Description of Artificial Sequence: Synthetic coding sequence
  source 1..1116: mol_type = other DNA
atgggcgagggcgacgccttctgggcccccagcgtgctgccccacagcaccctgagcaccctgagccaccacccccagccccagttcggcagaagaatggagagcaaggtgagcgagggcggcctgaacgtgaccctgaccatcagactgctgatgcacggcaaggaggtgggcagcatcatcggcaagaagggcgagaccgtgaagaagatgagagaggagagcggcgccagaatcaacatcagcgagggcaactgccccgagagaatcgtgaccatcaccggccccaccgacgccatcttcaaggccttcgccatgatcgcctacaagttcgaggaggacatcatcaacagcatgagcaacagccccgccaccagcaagccccccgtgaccctgagactggtggtgcccgccagccagtgcggcagcctgatcggcaagggcggcagcaagatcaaggagatcagagagagcaccggcgcccaggtgcaggtggccggcgacatgctgcccaacagcaccgagagagccgtgaccatcagcggcacccccgacgccatcatccagtgcgtgaagcagatctgcgtggtgatgctggagagcccccccaagggcgccaccatcccctacagacccaagcccgccagcacccccgtgatcttcgccggcggccaggcctacaccatccagggccagtacgccatcccccaccccgaccagctgaccaagctgcaccagctggccatgcagcagacccccttcccccccctgggccagaccaaccccgccttccccggcgagaagctgcccctgcacagcagcgaggaggcccagaacctgatgggccagagcagcggcctggacgccagcccccccgccagcacccacgagctgaccatccccaacgacctgatcggctgcatcatcggcagacagggcaccaagatcaacgagatcagacagatgagcggcgcccagatcaagatcgccaacgccaccgagggcagcagcgagagacagatcaccatcaccggcacccccgccaacatcagcctggcccagtacctgatcaacgccagactgaccagcgaggtgaccggcatgggcaccctgtag

SEQ ID NO: 93774 - DNA, 1116 bp, synthetic construct; identical to SEQ ID NO: 93773
  misc_feature 1..1116: note = Description of Artificial Sequence: Synthetic coding sequence
  source 1..1116: mol_type = other DNA

SEQ ID NO: 93775 - DNA, 18 bp, synthetic construct
  misc_feature 1..18: note = Description of Artificial Sequence: Synthetic coding sequence
  source 1..18: mol_type = other DNA
atggagagcaaggtgtag

SEQ ID NO: 93776 - DNA, 5070 bp, synthetic construct
  misc_feature 1..5070: note = Description of Artificial Sequence: Synthetic coding sequence
  source 1..5070: mol_type = other DNA
atgggcagcaagagaagaagagccaccagccccagcagcagcgtgagcggcgacttcgacgacggccaccacagcgtgagcacccccggccccagcagaaagagaagaagactgagcaacctgcccaccgtggaccccatcgccgtgtgccacgagctgtacaacaccatcagagactacaaggacgagcagggcagactgctgtgcgagctgttcatcagagcccccaagagaagaaaccagcccgactactacgaggtggtgagccagcccatcgacctgatgaagatccagcagaagctgaagatggaggagtacgacgacgtgaacctgctgaccgccgacttccagctgctgttcaacaacgccaagagctactacaagcccgacagccccgagtacaaggccgcctgcaagctgtgggacctgtacctgagaaccagaaacgagttcgtgcagaagggcgaggccgacgacgaggacgacgacgaggacggccaggacaaccagggcaccgtgaccgagggcagcagccccgcctacctgaaggagatcctggagcagctgctggaggccatcgtggtggccaccaaccccagcggcagactgatcagcgagctgttccagaagctgcccagcaaggtgcagtaccccgactactacgccatcatcaaggagcccatcgacctgaagaccatcgcccagagaatccagaacggcagctacaagagcatccacgccatggccaaggacatcgacctgctggccaagaacgccaagacctacaacgagcccggcagccaggtgttcaaggacgccaacagcatcaagaagatcttctacatgaagaaggccgagatcgagcaccacgagatggccaagagcagcctgagaatgagaacccccagcaacctggccgccgccagactgaccggccccagccacagcaagggcagcctgggcgaggagagaaaccccaccagcaagtactacagaaacaagagagccgtgcagggcggcagactgagcgccatcaccatggccctgcagtacggcagcgagagcgaggaggacgccgccctggccgccgccagatacgaggagggcgagagcgaggccgagagcatcaccagcttcatggacgtgagcaaccccttctaccagctgtacgacaccgtgagaagctgcagaaacaaccagggccagctgatcgccgagcccttctaccacctgcccagcaagaagaagtaccccgactactaccagcagatcaagatgcccatcagcctgcagcagatcagaaccaagctgaagaaccaggagtacgagaccctggaccacctggagtgcgacctgaacctgatgttcgagaacgccaagagatacaacgtgcccaacagcgccatctacaagagagtgctgaagctgcagcaggtgatgcaggccaagaagaaggagctggccagaagagacgacatcgaggacggcgacagcatgatcagcagcgccaccagcgacaccggcagcgccaagagaaagagcaagaagaacatcagaaagcagagaatgaagatcctgttcaacgtggtgctggaggccagagagcccggcagcggcagaagactgtgcgacctgttcatggtgaagcccagcaagaaggactaccccgactactacaagatcatcctggagcccatggacctgaagatcatcgagcacaacatcagaaacgacaagtacgccggcgaggagggcatgatcgaggacatgaagctgatgttcagaaacgccagacactacaacgaggagggcagccaggtgtacaacgacgcccacatcctggagaagctgctgaaggagaagagaaaggagctgggccccctgcccgacgacgacgacatggccagccccaagctgaagctgagcagaaagagcggcatcagccccaagaagagcaagtacatgacccccatgcagcagaagctgaacgaggtgtacgaggccgtgaagaactacaccgacaagagaggcagaagactgagcgccatcttcctgagactgcccagcagaagcgagctgcccgactactacctgaccatcaagaagcccatggacatggagaagatcagaagccacatgatggccaacaagtaccaggacatcgacagcatggtggaggacttcgtgatgatgttcaacaacgcctgcacctacaacgagcccgagagcctgatctacaaggacgccctggtgctgcacaaggtgctgctggagaccagaagagacctggagggcgacgaggacagccacgtgcccaacgtgaccctgctgatccaggagctgatccacaacctgttcgtgagcgtgatgagccaccaggacgacgagggcagatgctacagcgacagcctggccgagatccccgccgtggaccccaacttccccaacaagccccccctgaccttcgacatcatcagaaagaacgtggagaacaacagatacagaagactggacctgttccaggagcacatgttcgaggtgctggagagagccagaagaatgaacagaaccgacagcgagatctacgaggacgccgtggagctgcagcagttcttcatcaagatcagagacgagctgtgcaagaacggcgagatcctgctgagccccgccctgagctacaccaccaagcacctgcacaacgacgtggagaaggagagaaaggagaagctgcccaaggagatcgaggaggacaagctgaagagagaggaggagaagagagaggccgagaagagcgaggacagcagcggcgccgccggcctgagcggcctgcacagaacctacagccaggactgcagcttcaagaacagcatgtaccacgtgggcgactacgtgtacgtggagcccgccgaggccaacctgcagccccacatcgtgtgcatcgagagactgtgggaggacagcgccggcgagaagtggctgtacggctgctggttctacagacccaacgagaccttccacctggccaccagaaagttcctggagaaggaggtgttcaagagcgactactacaacaaggtgcccgtgagcaagatcctgggcaagtgcgtggtgatgttcgtgaaggagtacttcaagctgtgccccgagaacttcagagacgaggacgtgttcgtgtgcgagagcagatacagcgccaagaccaagagcttcaagaagatcaagctgtggaccatgcccatcagcagcgtgagattcgtgcccagagacgtgcccctgcccgtggtgagagtggccagcgtgttcgccaacgccgacaagggcgacgacgagaagaacaccgacaacagcgaggacagcagagccgaggacaacttcaacctggagaaggagaaggaggacgtgcccgtggagatgagcaacggcgagcccggctgccactacttcgagcagctgcactacaacgacatgtggctgaaggtgggcgactgcgtgttcatcaagagccacggcctggtgagacccagagtgggcagaatcgagaaggtgtgggtgagagacggcgccgcctacttctacggccccatcttcatccaccccgaggagaccgagcacgagcccaccaagatgttctacaagaaggaggtgttcctgagcaacctggaggagacctgccccatgacctgcatcctgggcaagtgcgccgtgctgagcttcaaggacttcctgagctgcagacccaccgagatccccgagaacgacatcctgctgtgcgagagcagatacaacgagagcgacaagcagatgaagaagttcaagggcctgaagagattcagcctgagcgccaaggtggtggacgacgagatctactacttcagaaagcccatcgtgccccagaaggagcccagccccctgctggagaagaagatccagctgctggaggccaagttcgccgagctggagggcggcgacgacgacatcgaggagatgggcgaggaggacagcgaggtgatcgagccccccagcctgccccagctgcagacccccctggccagcgagctggacctgatgccctacacccccccccagagcacccccaagagcgccaagggcagcgccaagaaggagggcagcaagagaaagatcaacatgagcggctacatcctgttcagcagcgagatgagagccgtgatcaaggcccagcaccccgactacagcttcggcgagctgagcagactggtgggcaccgagtggagaaacctggagaccgccaagaaggccgagtacgaggagagagccgccaaggtggccgagcagcaggagagagagagagccgcccagcagcagcagcccagcgccagccccagagccggcacccccgtgggcgccctgatgggcgtggtgcccccccccacccccatgggcatgctgaaccagcagctgacccccgtggccggcatgatgggcggctacccccccggcctgccccccctgcagggccccgtggacggcctggtgagcatgggcagcatgcagcccctgcaccccggcggcccccccccccaccacctgccccccggcgtgcccggcctgcccggcatccccccccccggcgtgatgaaccagggcgtggcccccatggtgggcacccccgcccccggcggcagcccctacggccagcaggtgggcgtgctgggcccccccggccagcaggccccccccccctaccccggcccccaccccgccggcccccccgtgatccagcagcccaccacccccatgttcgtggcccccccccccaagacccagagactgctgcacagcgaggcctacctgaagtacatcgagggcctgagcgccgagagcaacagcatcagcaagtgggaccagaccctggccgccagaagaagagacgtgcacctgagcaaggagcaggagagcagactgcccagccactggctgaagagcaagggcgcccacaccaccatggccgacgccctgtggagactgagagacctgatgctgagagacaccctgaacatcagacaggcctacaacctggagaacgtgtag

SEQ ID NO: 93777 - DNA, 4749 bp, synthetic construct
  misc_feature 1..4749: note = Description of Artificial Sequence: Synthetic coding sequence
  source 1..4749: mol_type = other DNA
atgggcagcaagagaagaagagccaccagccccagcagcagcgtgagcggcgacttcgacgacggccaccacagcgtgagcacccccggccccagcagaaagagaagaagactgagcaacctgcccaccgtggaccccatcgccgtgtgccacgagctgtacaacaccatcagagactacaaggacgagcagggcagactgctgtgcgagctgttcatcagagcccccaagagaagaaaccagcccgactactacgaggtggtgagccagcccatcgacctgatgaagatccagcagaagctgaagatggaggagtacgacgacgtgaacctgctgaccgccgacttccagctgctgttcaacaacgccaagagctactacaagcccgacagccccgagtacaaggccgcctgcaagctgtgggacctgtacctgagaaccagaaacgagttcgtgcagaagggcgaggccgacgacgaggacgacgacgaggacggccaggacaaccagggcaccgtgaccgagggcagcagccccgcctacctgaaggagatcctggagcagctgctggaggccatcgtggtggccaccaaccccagcggcagactgatcagcgagctgttccagaagctgcccagcaaggtgcagtaccccgactactacgccatcatcaaggagcccatcgacctgaagaccatcgcccagagaatccagaacggcagctacaagagcatccacgccatggccaaggacatcgacctgctggccaagaacgccaagacctacaacgagcccggcagccaggtgttcaaggacgccaacagcatcaagaagatcttctacatgaagaaggccgagatcgagcaccacgagatggccaagagcagcctgagaatgagaacccccagcaacctggccgccgccagactgaccggccccagccacagcaagggcagcctgggcgaggagagaaaccccaccagcaagtactacagaaacaagagagccgtgcagggcggcagactgagcgccatcaccatggccctgcagtacggcagcgagagcgaggaggacgccgccctggccgccgccagatacgaggagggcgagagcgaggccgagagcatcaccagcttcatggacgtgagcaaccccttctaccagctgtacgacaccgtgagaagctgcagaaacaaccagggccagctgatcgccgagcccttctaccacctgcccagcaagaagaagtaccccgactactaccagcagatcaagatgcccatcagcctgcagcagatcagaaccaagctgaagaaccaggagtacgagaccctggaccacctggagtgcgacctgaacctgatgttcgagaacgccaagagatacaacgtgcccaacagcgccatctacaagagagtgctgaagctgcagcaggtgatgcaggccaagaagaaggagctggccagaagagacgacatcgaggacggcgacagcatgatcagcagcgccaccagcgacaccggcagcgccaagagaaagagcaagaagaacatcagaaagcagagaatgaagatcctgttcaacgtggtgctggaggccagagagcccggcagcggcagaagactgtgcgacctgttcatggtgaagcccagcaagaaggactaccccgactactacaagatcatcctggagcccatggacctgaagatcatcgagcacaacatcagaaacgacaagtacgccggcgaggagggcatgatcgaggacatgaagctgatgttcagaaacgccagacactacaacgaggagggcagccaggtgtacaacgacgcccacatcctggagaagctgctgaaggagaagagaaaggagctgggccccctgcccgacgacgacgacatggccagccccaagctgaagctgagcagaaagagcggcatcagccccaagaagagcaagtacatgacccccatgcagcagaagctgaacgaggtgtacgaggccgtgaagaactacaccgacaagagaggcagaagactgagcgccatcttcctgagactgcccagcagaagcgagctgcccgactactacctgaccatcaagaagcccatggacatggagaagatcagaagccacatgatggccaacaagtaccaggacatcgacagcatggtggaggacttcgtgatgatgttcaacaacgcctgcacctacaacgagcccgagagcctgatctacaaggacgccctggtgctgcacaaggtgctgctggagaccagaagagacctggagggcgacgaggacagccacgtgcccaacgtgaccctgctgatccaggagctgatccacaacctgttcgtgagcgtgatgagccaccaggacgacgagggcagatgctacagcgacagcctggccgagatccccgccgtggaccccaacttccccaacaagccccccctgaccttcgacatcatcagaaagaacgtggagaacaacagatacagaagactggacctgttccaggagcacatgttcgaggtgctggagagagccagaagaatgaacagaaccgacagcgagatctacgaggacgccgtggagctgcagcagttcttcatcaagatcagagacgagctgtgcaagaacggcgagatcctgctgagccccgccctgagctacaccaccaagcacctgcacaacgacgtggagaaggagagaaaggagaagctgcccaaggagatcgaggaggacaagctgaagagagaggaggagaagagagaggccgagaagagcgaggacagcagcggcgccgccggcctgagcggcctgcacagaacctacagccaggactgcagcttcaagaacagcatgtaccacgtgggcgactacgtgtacgtggagcccgccgaggccaacctgcagccccacatcgtgtgcatcgagagactgtgggaggacagcgccggcgagaagtggctgtacggctgctggttctacagacccaacgagaccttccacctggccaccagaaagttcctggagaaggaggtgttcaagagcgactactacaacaaggtgcccgtgagcaagatcctgggcaagtgcgtggtgatgttcgtgaaggagtacttcaagctgtgccccgagaacttcagagacgaggacgtgttcgtgtgcgagagcagatacagcgccaagaccaagagcttcaagaagatcaagctgtggaccatgcccatcagcagcgtgagattcgtgcccagagacgtgcccctgcccgtggtgagagtggccagcgtgttcgccaacgccgacaagggcgacgacgagaagaacaccgacaacagcgaggacagcagagccgaggacaacttcaacctggagaaggagaaggaggacgtgcccgtggagatgagcaacggcgagcccggctgccactacttcgagcagctgcactacaacgacatgtggctgaaggtgggcgactgcgtgttcatcaagagccacggcctggtgagacccagagtgggcagaatcgagaaggtgtgggtgagagacggcgccgcctacttctacggccccatcttcatccaccccgaggagaccgagcacgagcccaccaagatgttctacaagaaggaggtgttcctgagcaacctggaggagacctgccccatgacctgcatcctgggcaagtgcgccgtgctgagcttcaaggacttcctgagctgcagacccaccgagatccccgagaacgacatcctgctgtgcgagagcagatacaacgagagcgacaagcagatgaagaagttcaagggcctgaagagattcagcctgagcgccaaggtggtggacgacgagatctactacttcagaaagcccatcgtgccccagaaggagcccagccccctgctggagaagaagatccagctgctggaggccaagttcgccgagctggagggcggcgacgacgacatcgaggagatgggcgaggaggacagcgaggtgatcgagccccccagcctgccccagctgcagacccccctggccagcgagctggacctgatgccctacacccccccccagagcacccccaagagcgccaagggcagcgccaagaaggagggcagcaagagaaagatcaacatgagcggctacatcctgttcagcagcgagatgagagccgtgatcaaggcccagcaccccgactacagcttcggcgagctgagcagactggtgggcaccgagtggagaaacctggagaccgccaagaaggccgagtacgagggcgtgatgaaccagggcgtggcccccatggtgggcacccccgcccccggcggcagcccctacggccagcaggtgggcgtgctgggcccccccggccagcaggccccccccccctaccccggcccccaccccgccggcccccccgtgatccagcagcccaccacccccatgttcgtggcccccccccccaagacccagagactgctgcacagcgaggcctacctgaagtacatcgagggcctgagcgccgagagcaacagcatcagcaagtgggaccagaccctggccgccagaagaagagacgtgcacctgagcaaggagcaggagagcagactgcccagccactggctgaagagcaagggcgcccacaccaccatggccgacgccctgtggagactgagagacctgatgctgagagacaccctgaacatcagacaggcctacaacctggagaacgtgtag

SEQ ID NO: 93778 - DNA, 4809 bp, synthetic construct
  misc_feature 1..4809: note = Description of Artificial Sequence: Synthetic coding sequence
  source 1..4809: mol_type = other DNA
atgggcagcaagagaagaagagccaccagccccagcagcagcgtgagcggcgacttcgacgacggccaccacagcgtgagcacccccggccccagcagaaagagaagaagactgagcaacctgcccaccgtggaccccatcgccgtgtgccacgagctgtacaacaccatcagagactacaaggacgagcagggcagactgctgtgcgagctgttcatcagagcccccaagagaagaaaccagcccgactactacgaggtggtgagccagcccatcgacctgatgaagatccagcagaagctgaagatggaggagtacgacgacgtgaacctgctgaccgccgacttccagctgctgttcaacaacgccaagagctactacaagcccgacagccccgagtacaaggccgcctgcaagctgtgggacctgtacctgagaaccagaaacgagttcgtgcagaagggcgaggccgacgacgaggacgacgacgaggacggccaggacaaccagggcaccgtgaccgagggcagcagccccgcctacctgaaggagatcctggagcagctgctggaggccatcgtggtggccaccaaccccagcggcagactgatcagcgagctgttccagaagctgcccagcaaggtgcagtaccccgactactacgccatcatcaaggagcccatcgacctgaagaccatcgcccagagaatccagaacggcagctacaagagcatccacgccatggccaaggacatcgacctgctggccaagaacgccaagacctacaacgagcccggcagccaggtgttcaaggacgccaacagcatcaagaagatcttctacatgaagaaggccgagatcgagcaccacgagatggccaagagcagcctgagaatgagcaacaagagagccgtgcagggcggcagactgagcgccatcaccatggccctgcagtacggcagcgagagcgaggaggacgccgccctggccgccgccagatacgaggagggcgagagcgaggccgagagcatcaccagcttcatggacgtgagcaaccccttctaccagctgtacgacaccgtgagaagctgcagaaacaaccagggccagctgatcgccgagcccttctaccacctgcccagcaagaagaagtaccccgactactaccagcagatcaagatgcccatcagcctgcagcagatcagaaccaagctgaagaaccaggagtacgagaccctggaccacctggagtgcgacctgaacctgatgttcgagaacgccaagagatacaacgtgcccaacagcgccatctacaagagagtgctgaagctgcagcaggtgatgcaggccaagaagaaggagctggccagaagagacgacatcgaggacggcgacagcatgatcagcagcgccaccagcgacaccggcagcgccaagagaaagagcaagaagaacatcagaaagcagagaatgaagatcctgttcaacgtggtgctggaggccagagagcccggcagcggcagaagactgtgcgacctgttcatggtgaagcccagcaagaaggactaccccgactactacaagatcatcctggagcccatggacctgaagatcatcgagcacaacatcagaaacgacaagtacgccggcgaggagggcatgatcgaggacatgaagctgatgttcagaaacgccagacactacaacgaggagggcagccaggtgtacaacgacgcccacatcctggagaagctgctgaaggagaagagaaaggagctgggccccctgcccgacgacgacgacatggccagccccaagctgaagctgagcagaaagagcggcatcagccccaagaagagcaagtacatgacccccatgcagcagaagctgaacgaggtgtacgaggccgtgaagaactacaccgacaagagaggcagaagactgagcgccatcttcctgagactgcccagcagaagcgagctgcccgactactacctgaccatcaagaagcccatggacatggagaagatcagaagccacatgatggccaacaagtaccaggacatcgacagcatggtggaggacttcgtgatgatgttcaacaacgcctgcacctacaacgagcccgagagcctgatctacaaggacgccctggtgctgcacaaggtgctgctggagaccagaagagacctggagggcgacgaggacagccacgtgcccaacgtgaccctgctgatccaggagctgatccacaacctgttcgtgagcgtgatgagccaccaggacgacgagggcagatgctacagcgacagcctggccgagatccccgccgtggaccccaacttccccaacaagccccccctgaccttcgacatcatcagaaagaacgtggagaacaacagatacagaagactggacctgttccaggagcacatgttcgaggtgctggagagagccagaagaatgaacagaaccgacagcgagatctacgaggacgccgtggagctgcagcagttcttcatcaagatcagagacgagctgtgcaagaacggcgagatcctgctgagccccgccctgagctacaccaccaagcacctgcacaacgacgtggagaaggagagaaaggagaagctgcccaaggagatcgaggaggacaagctgaagagagaggaggagaagagagaggccgagaagagcgaggacagcagcggcgccgccggcctgagcggcctgcacagaacctacagccaggactgcagcttcaagaacagcatgtaccacgtgggcgactacgtgtacgtggagcccgccgaggccaacctgcagccccacatcgtgtgcatcgagagactgtgggaggacagcgccggcgagaagtggctgtacggctgctggttctacagacccaacgagaccttccacctggccaccagaaagttcctggagaaggaggtgttcaagagcgactactacaacaaggtgcccgtgagcaagatcctgggcaagtgcgtggtgatgttcgtgaaggagtacttcaagctgtgccccgagaacttcagagacgaggacgtgttcgtgtgcgagagcagatacagcgccaagaccaagagcttcaagaagatcaagctgtggaccatgcccatcagcagcgtgagattcgtgcccagagacgtgcccctgcccgtggtgagagtggccagcgtgttcgccaacgccgacaagggcgacgacgagaagaacaccgacaacagcgaggacagcagagccgaggacaacttcaacctggagaaggagaaggaggacgtgcccgtggagatgagcaacggcgagcccggctgccactacttcgagcagctgcactacaacgacatgtggctgaaggtgggcgactgcgtgttcatcaagagccacggcctggtgagacccagagtgggcagaatcgagaaggtgtgggtgagagacggcgccgcctacttctacggccccatcttcatccaccccgaggagaccgagcacgagcccaccaagatgttctacaagaaggaggtgttcctgagcaacctggaggagacctgccccatgacctgcatcctgggcaagtgcgccgtgctgagcttcaaggacttcctgagctgcagacccaccgagatccccgagaacgacatcctgctgtgcgagagcagatacaacgagagcgacaagcagatgaagaagttcaagggcctgaagagattcagcctgagcgccaaggtggtggacgacgagatctactacttcagaaagcccatcgtgccccagaaggagcccagccccctgctggagaagaagatccagctgctggaggccaagttcgccgagctggagggcggcgacgacgacatcgaggagatgggcgaggaggacagcgaggtgatcgagccccccagcctgccccagctgcagacccccctggccagcgagctggacctgatgccctacacccccccccagagcacccccaagagcgccaagggcagcgccaagaaggagggcagcaagagaaagatcaacatgagcggctacatcctgttcagcagcgagatgagagccgtgatcaaggcccagcaccccgactacagcttcggcgagctgagcagactggtgggcaccgagtggagaaacctggagaccgccaagaaggccgagtacgagggcatgatgggcggctacccccccggcctgccccccctgcagggccccgtggacggcctggtgagcatgggcagcatgcagcccctgcaccccggcggcccccccccccaccacctgccccccggcgtgcccggcctgcccggcatccccccccccggcgtgatgaaccagggcgtggcccccatggtgggcacccccgcccccggcggcagcccctacggccagcaggtgggcgtgctgggcccccccggccagcaggccccccccccctaccccggcccccaccccgccggcccccccgtgatccagcagcccaccacccccatgttcgtggcccccccccccaagacccagagactgctgcacagcgaggcctacctgaagtacatcgagggcctgagcgccgagagcaacagcatcagcaagtgggaccagaccctggccgccagaagaagagacgtgcacctgagcaaggagcaggagagcagactgcccagccactggctgaagagcaagggcgcccacaccaccatggccgacgccctgtggagactgagagacctgatgctgagagacaccctgaacatcagacaggcctacaacctggagaacgtgtag

SEQ ID NO: 93779 - DNA, 4749 bp, synthetic construct
  misc_feature 1..4749: note = Description of Artificial Sequence: Synthetic coding sequence
  source 1..4749: mol_type = other DNA
atgggcagcaagagaagaagagccaccagccccagcagcagcgtgagcggcgacttcgacgacggccaccacagcgtgagcacccccggccccagcagaaagagaagaagactgagcaacctgcccaccgtggaccccatcgccgtgtgccacgagctgtacaacaccatcagagactacaaggacgagcagggcagactgctgtgcgagctgttcatcagagcccccaagagaagaaaccagcccgactactacgaggtggtgagccagcccatcgacctgatgaagatccagcagaagctgaagatggaggagtacgacgacgtgaacctgctgaccgccgacttccagctgctgttcaacaacgccaagagctactacaagcccgacagccccgagtacaaggccgcctgcaagctgtgggacctgtacctgagaaccagaaacgagttcgtgcagaagggcgaggccgacgacgaggacgacgacgaggacggccaggacaaccagggcaccgtgaccgagggcagcagccccgcctacctgaaggagatcctggagcagctgctggaggccatcgtggtggccaccaaccccagcggcagactgatcagcgagctgttccagaagctgcccagcaaggtgcagtaccccgactactacgccatcatcaaggagcccatcgacctgaagaccatcgcccagagaatccagaacggcagctacaagagcatccacgccatggccaaggacatcgacctgctggccaagaacgccaagacctacaacgagcccggcagccaggtgttcaaggacgccaacagcatcaagaagatcttctacatgaagaaggccgagatcgagcaccacgagatggccaagagcagcctgagaatgagaacccccagcaacctggccgccgccagactgaccggccccagccacagcaagggcagcctgggcgaggagagaaaccccaccagcaagtactacagaaacaagagagccgtgcagggcggcagactgagcgccatcaccatggccctgcagtacggcagcgagagcgaggaggacgccgccctggccgccgccagatacgaggagggcgagagcgaggccgagagcatcaccagcttcatggacgtgagcaaccccttctaccagctgtacgacaccgtgagaagctgcagaaacaaccagggccagctgatcgccgagcccttctaccacctgcccagcaagaagaagtaccccgactactaccagcagatcaagatgcccatcagcctgcagcagatcagaaccaagctgaagaaccaggagtacgagaccctggaccacctggagtgcgacctgaacctgatgttcgagaacgccaagagatacaacgtgcccaacagcgccatctacaagagagtgctgaagctgcagcaggtgatgcaggccaagaagaaggagctggccagaagagacgacatcgaggacggcgacagcatgatcagcagcgccaccagcgacaccggcagcgccaagagaaagagcaagaagaacatcagaaagcagagaatgaagatcctgttcaacgtggtgctggaggccagagagcccggcagcggcagaagactgtgcgacctgttcatggtgaagcccagcaagaaggactaccccgactactacaagatcatcctggagcccatggacctgaagatcatcgagcacaacatcagaaacgacaagtacgccggcgaggagggcatgatcgaggacatgaagctgatgttcagaaacgccagacactacaacgaggagggcagccaggtgtacaacgacgcccacatcctggagaagctgctgaaggagaagagaaaggagctgggccccctgcccgacgacgacgacatggccagccccaagctgaagctgagcagaaagagcggcatcagccccaagaagagcaagtacatgacccccatgcagcagaagctgaacgaggtgtacgaggccgtgaagaactacaccgacaagagaggcagaagactgagcgccatcttcctgagactgcccagcagaagcgagctgcccgactactacctgaccatcaagaagcccatggacatggagaagatcagaagccacatgatggccaacaagtaccaggacatcgacagcatggtggaggacttcgtgatgatgttcaacaacgcctgcacctacaacgagcccgagagcctgatctacaaggacgccctggtgctgcacaaggtgctgctggagaccagaagagacctggagggcgacgaggacagccacgtgcccaacgtgaccctgctgatccaggagctgatccacaacctgttcgtgagcgtgatgagccaccaggacgacgagggcagatgctacagcgacagcctggccgagatccccgccgtggaccccaacttccccaacaagccccccctgaccttcgacatcatcagaaagaacgtggagaacaacagatacagaagactggacctgttccaggagcacatgttcgaggtgctggagagagccagaagaatgaacagaaccgacagcgagatctacgaggacgccgtggagctgcagcagttcttcatcaagatcagagacgagctgtgcaagaacggcgagatcctgctgagccccgccctgagctacaccaccaagcacctgcacaacgacgtggagaaggagagaaaggagaagctgcccaaggagatcgaggaggacaagctgaagagagaggaggagaagagagaggccgagaagagcgaggacagcagcggcgccgccggcctgagcggcctgcacagaacctacagccaggactgcagcttcaagaacagcatgtaccacgtgggcgactacgtgtacgtggagcccgccgaggccaacctgcagccccacatcgtgtgcatcgagagactgtgggaggacagcgccgagaaggaggtgttcaagagcgactactacaacaaggtgcccgtgagcaagatcctgggcaagtgcgtggtgatgttcgtgaaggagtacttcaagctgtgccccgagaacttcagagacgaggacgtgttcgtgtgcgagagcagatacagcgccaagaccaagagcttcaagaagatcaagctgtggaccatgcccatcagcagcgtgagattcgtgcccagagacgtgcccctgcccgtggtgagagtggccagcgtgttcgccaacgccgacaagggcgacgacgagaagaacaccgacaacagcgaggacagcagagccgaggacaacttcaacctggagaaggagaaggaggacgtgcccgtggagatgagcaacggcgagcccggctgccactacttcgagcagctgcactacaacgacatgtggctgaaggtgggcgactgcgtgttcatcaagagccacggcctggtgagacccagagtgggcagaatcgagaaggtgtgggtgagagacggcgccgcctacttctacggccccatcttcatccaccccgaggagaccgagcacgagcccaccaagatgttctacaagaaggaggtgttcctgagcaacctggaggagacctgccccatgacctgcatcctgggcaagtgcgccgtgctgagcttcaaggacttcctgagctgcagacccaccgagatccccgagaacgacatcctgctgtgcgagagcagatacaacgagagcgacaagcagatgaagaagttcaagggcctgaagagattcagcctgagcgccaaggtggtggacgacgagatctactacttcagaaagcccatcgtgccccagaaggagcccagccccctgctggagaagaagatccagctgctggaggccaagttcgccgagctggagggcggcgacgacgacatcgaggagatgggcgaggaggacagcgagagcacccccaagagcgccaagggcagcgccaagaaggagggcagcaagagaaagatcaacatgagcggctacatcctgttcagcagcgagatgagagccgtgatcaaggcccagcaccccgactacagcttcggcgagctgagcagactggtgggcaccgagtggagaaacctggagaccgccaagaaggccgagtacgagggcatgatgggcggctacccccccggcctgccccccctgcagggccccgtggacggcctggtgagcatgggcagcatgcagcccctgcaccccggcggcccccccccccaccacctgccccccggcgtgcccggcctgcccggcatccccccccccggcgtgatgaaccagggcgtggcccccatggtgggcacccccgcccccggcggcagcccctacggccagcaggtgggcgtgctgggcccccccggccagcaggccccccccccctaccccggcccccaccccgccggcccccccgtgatccagcagcccaccacccccatgttcgtggcccccccccccaagacccagagactgctgcacagcgaggcctacctgaagtacatcgagggcctgagcgccgagagcaacagcatcagcaagtgggaccagaccctggccgccagaagaagagacgtgcacctgagcaaggagcaggagagcagactgcccagccactggctgaagagcaagggcgcccacaccaccatggccgacgccctgtggagactgagagacctgatgctgagagacaccctgaacatcagacaggcctacaacctggagaacgtgtag

SEQ ID NO: 93780 - DNA, 4905 bp, synthetic construct
  misc_feature 1..4905: note = Description of Artificial Sequence: Synthetic coding sequence
  source 1..4905: mol_type = other DNA
atgggcagcaagagaagaagagccaccagccccagcagcagcgtgagcggcgacttcgacgacggccaccacagcgtgagcacccccggccccagcagaaagagaagaagactgagcaacctgcccaccgtggaccccatcgccgtgtgccacgagctgtacaacaccatcagagactacaaggacgagcagggcagactgctgtgcgagctgttcatcagagcccccaagagaagaaaccagcccgactactacgaggtggtgagccagcccatcgacctgatgaagatccagcagaagctgaagatggaggagtacgacgacgtgaacctgctgaccgccgacttccagctgctgttcaacaacgccaagagctactacaagcccgacagccccgagtacaaggccgcctgcaagctgtgggacctgtacctgagaaccagaaacgagttcgtgcagaagggcgaggccgacgacgaggacgacgacgaggacggccaggacaaccagggcaccgtgaccgagggcagcagccccgcctacctgaaggagatcctggagcagctgctggaggccatcgtggtggccaccaaccccagcggcagactgatcagcgagctgttccagaagctgcccagcaaggtgcagtaccccgactactacgccatcatcaaggagcccatcgacctgaagaccatcgcccagagaatccagaacggcagctacaagagcatccacgccatggccaaggacatcgacctgctggccaagaacgccaagacctacaacgagcccggcagccaggtgttcaaggacgccaacagcatcaagaagatcttctacatgaagaaggccgagatcgagcaccacgagatggccaagagcagcctgagaatgagaacccccagcaacctggccgccgccagactgaccggccccagccacagcaagggcagcctgggcgaggagagaaaccccaccagcaagtactacagaaacaagagagccgtgcagggcggcagactgagcgccatcaccatggccctgcagtacggcagcgagagcgaggaggacgccgccctggccgccgccagatacgaggagggcgagagcgaggccgagagcatcaccagcttcatggacgtgagcaaccccttctaccagctgtacgacaccgtgagaagctgcagaaacaaccagggccagctgatcgccgagcccttctaccacctgcccagcaagaagaagtaccccgactactaccagcagatcaagatgcccatcagcctgcagcagatcagaaccaagctgaagaaccaggagtacgagaccctggaccacctggagtgcgacctgaacctgatgttcgagaacgccaagagatacaacgtgcccaacagcgccatctacaagagagtgctgaagctgcagcaggtgatgcaggccaagaagaaggagctggccagaagagacgacatcgaggacggcgacagcatgatcagcagcgccaccagcgacaccggcagcgccaagagaaagagcaagaagaacatcagaaagcagagaatgaagatcctgttcaacgtggtgctggaggccagagagcccggcagcggcagaagactgtgcgacctgttcatggtgaagcccagcaagaaggactaccccgactactacaagatcatcctggagcccatggacctgaagatcatcgagcacaacatcagaaacgacaagtacgccggcgaggagggcatgatcgaggacatgaagctgatgttcagaaacgccagacactacaacgaggagggcagccaggtgtacaacgacgcccacatcctggagaagctgctgaaggagaagagaaaggagctgggccccctgcccgacgacgacgacatggccagccccaagctgaagctgagcagaaagagcggcatcagccccaagaagagcaagtacatgacccccatgcagcagaagctgaacgaggtgtacgaggccgtgaagaactacaccgacaagagaggcagaagactgagcgccatcttcctgagactgcccagcagaagcgagctgcccgactactacctgaccatcaagaagcccatggacatggagaagatcagaagccacatgatggccaacaagtaccaggacatcgacagcatggtggaggacttcgtgatgatgttcaacaacgcctgcacctacaacgagcccgagagcctgatctacaaggacgccctggtgctgcacaaggtgctgctggagaccagaagagacctggagggcgacgaggacagccacgtgcccaacgtgaccctgctgatccaggagctgatccacaacctgttcgtgagcgtgatgagccaccaggacgacgagggcagatgctacagcgacagcctggccgagatccccgccgtggaccccaacttccccaacaagccccccctgaccttcgacatcatcagaaagaacgtggagaacaacagatacagaagactggacctgttccaggagcacatgttcgaggtgctggagagagccagaagaatgaacagaaccgacagcgagatctacgaggacgccgtggagctgcagcagttcttcatcaagatcagagacgagctgtgcaagaacggcgagatcctgctgagccccgccctgagctacaccaccaagcacctgcacaacgacgtggagaaggagagaaaggagaagctgcccaaggagatcgaggaggacaagctgaagagagaggaggagaagagagaggccgagaagagcgaggacagcagcggcgccgccggcctgagcggcctgcacagaacctacagccaggactgcagcttcaagaacagcatgtaccacgtgggcgactacgtgtacgtggagcccgccgaggccaacctgcagccccacatcgtgtgcatcgagagactgtgggaggacagcgccggcgagaagtggctgtacggctgctggttctacagacccaacgagaccttccacctggccaccagaaagttcctggagaaggaggtgttcaagagcgactactacaacaaggtgcccgtgagcaagatcctgggcaagtgcgtggtgatgttcgtgaaggagtacttcaagctgtgccccgagaacttcagagacgaggacgtgttcgtgtgcgagagcagatacagcgccaagaccaagagcttcaagaagatcaagctgtggaccatgcccatcagcagcgtgagattcgtgcccagagacgtgcccctgcccgtggtgagagtggccagcgtgttcgccaacgccgacaagggcgacgacgagaagaacaccgacaacagcgaggacagcagagccgaggacaacttcaacctggagaaggagaaggaggacgtgcccgtggagatgagcaacggcgagcccggctgccactacttcgagcagctgcactacaacgacatgtggctgaaggtgggcgactgcgtgttcatcaagagccacggcctggtgagacccagagtgggcagaatcgagaaggtgtgggtgagagacggcgccgcctacttctacggccccatcttcatccaccccgaggagaccgagcacgagcccaccaagatgttctacaagaaggaggtgttcctgagcaacctggaggagacctgccccatgacctgcatcctgggcaagtgcgccgtgctgagcttcaaggacttcctgagctgcagacccaccgagatccccgagaacgacatcctgctgtgcgagagcagatacaacgagagcgacaagcagatgaagaagttcaagggcctgaagagattcagcctgagcgccaaggtggtggacgacgagatctactacttcagaaagcccatcgtgccccagaaggagcccagccccctgctggagaagaagatccagctgctggaggccaagttcgccgagctggagggcggcgacgacgacatcgaggagatgggcgaggaggacagcgaggtgatcgagccccccagcctgccccagctgcagacccccctggccagcgagctggacctgatgccctacacccccccccagagcacccccaagagcgccaagggcagcgccaagaaggagggcagcaagagaaagatcaacatgagcggctacatcctgttcagcagcgagatgagagccgtgatcaaggcccagcaccccgactacagcttcggcgagctgagcagactggtgggcaccgagtggagaaacctggagaccgccaagaaggccgagtacgagggcatgatgggcggctacccccccggcctgccccccctgcagggccccgtggacggcctggtgagcatgggcagcatgcagcccctgcaccccggcggcccccccccccaccacctgccccccggcgtgcccggcctgcccggcatccccccccccggcgtgatgaaccagggcgtggcccccatggtgggcacccccgcccccggcggcagcccctacggccagcaggtgggcgtgctgggcccccccggccagcaggccccccccccctaccccggcccccaccccgccggcccccccgtgatccagcagcccaccacccccatgttcgtggcccccccccccaagacccagagactgctgcacagcgaggcctacctgaagtacatcgagggcctgagcgccgagagcaacagcatcagcaagtgggaccagaccctggccgccagaagaagagacgtgcacctgagcaaggagcaggagagcagactgcccagccactggctgaagagcaagggcgcccacaccaccatggccgacgccctgtggagactgagagacctgatgctgagagacaccctgaacatcagacaggcctacaacctggagaacgtgtag

SEQ ID NO: 93781 - DNA, 459 bp, synthetic construct
  misc_feature 1..459: note = Description of Artificial Sequence: Synthetic coding sequence
  source 1..459: mol_type = other DNA
atgggcagcaagagaagaagagccaccagccccagcagcagcgtgagcggcgacttcgacgacggccaccacagcgtgagcacccccggccccagcagaaagagaagaagactgagcaacctgcccaccgtggaccccatcgccgtgtgccacgagctgtacaacaccatcagagactacaaggacgagcagggcagactgctgtgcgagctgttcatcagagcccccaagagaagaaaccagcccgactactacgaggtggtgagccagcccatcgacctgatgaagatccagcagaagctgaagatggaggagtacgacgacgtgaacctgctgaccgccgacttccagctgctgttcaacaacgccaagagctactacaagcccgacagccccgagtacaaggccgcctgcaagctgtgggacctgtacctgagaaccagaaacgagttcgtgtag

SEQ ID NO: 93782 - DNA, 81 bp, synthetic construct
  misc_feature 1..81: note = Description of Artificial Sequence: Synthetic coding sequence
  source 1..81: mol_type = other DNA
atgggcagcaagagaagaagagccaccagccccagcagcagcgtgagcggcgacttcgacgacggccaccacagcgtgtag

SEQ ID NO: 93783 - DNA, 693 bp, synthetic construct
  misc_feature 1..693: note = Description of Artificial Sequence: Synthetic coding sequence
  source 1..693: mol_type = other DNA
atgggcagcaagagaagaagagccaccagccccagcagcagcgtgagcggcgacttcgacgacggccaccacagcgtgagcacccccggccccagcagaaagagaagaagactgagcaacctgcccaccgtggaccccatcgccgtgtgccacgagctgtacaacaccatcagagactacaaggacgagcagggcagactgctgtgcgagctgttcatcagagcccccaagagaagaaaccagcccgactactacgaggtggtgagccagcccatcgacctgatgaagatccagcagaagctgaagatggaggagtacgacgacgtgaacctgctgaccgccgacttccagctgctgttcaacaacgccaagagctactacaagcccgacagccccgagtacaaggccgcctgcaagctgtgggacctgtacctgagaaccagaaacgagttcgtgcagaagggcgaggccgacgacgaggacgacgacgaggacggccaggacaaccagggcaccgtgaccgagggcagcagccccgcctacctgaaggagatcctggagcagctgctggaggccatcgtggtggccaccaaccccagcggcagactgatcagcgagctgttccagaagctgcccagcaaggtgcagtaccccgactactacgccatcatcaaggagcccatcgacctgtag

SEQ ID NO: 93784 - DNA, 132 bp, synthetic construct
  misc_feature 1..132: note = Description of Artificial Sequence: Synthetic coding sequence
  source 1..132: mol_type = other DNA
atgggcagcaagagaagaagagccaccagccccagcagcagcgtgagcggcgacttcgacgacggccaccacagcgtgagcacccccggccccagcagaaagagaagaagactgagcaacctgcccacctag

SEQ ID NO: 93785 - DNA, 357 bp, synthetic construct
  misc_feature 1..357: note = Description of Artificial Sequence: Synthetic coding sequence
  source 1..357: mol_type = other DNA
atgggcagcaagagaagaagagccaccagccccagcagcagcgtgagcggcgacttcgacgacggccaccacagcgtgagcacccccggccccagcagaaagagaagaagactgagcaacctgcccaccgtggaccccatcgccgtgtgccacgagctgtacaacaccatcagagactacaaggacgagcagggcagactgctgtgcgagctgttcatcagagcccccaagagaagaaaccagcccgactactacgaggtggtgagccagcccatcgacctgatgaagatccagcagaagctgaagatggaggagtacgacgacgtgaacctgctgaccgccgacttccagctgtag

SEQ ID NO: 93786 - DNA, 264 bp, synthetic construct
  misc_feature 1..264: note = Description of Artificial Sequence: Synthetic coding sequence
  source 1..264: mol_type = other DNA
atgggcagcaagagaagaagagccaccagccccagcagcagcgtgagcggcgacttcgacgacggccaccacagcgtgagcacccccggccccagcagaaagagaagaagactgagcaacctgcccaccgtggaccccatcgccgtgtgccacgagctgtacaacaccatcagagactacaaggacgagcagggcagactgctgtgcgagctgttcatcagagcccccaagagaagaaaccagcccgactactacgaggtgtag

SEQ ID NO: 93787 - DNA, 132 bp, synthetic construct; identical to SEQ ID NO: 93784
  misc_feature 1..132: note = Description of Artificial Sequence: Synthetic coding sequence
  source 1..132: mol_type = other DNA

SEQ ID NO: 93788 - DNA, 828 bp, synthetic construct
  misc_feature 1..828: note = Description of Artificial Sequence: Synthetic coding sequence
  source 1..828: mol_type = other DNA
atggagggcgtggccgtggtgaccgccggcagcgtgggcgccgccaagaccgagggcgccgccgccctgcccccccccccccccgtgagcccccccgccctgacccccgcccccgccgccggcgaggagggccccgcccccctgagcgagaccggcgcccccggctgcagcggcagcagaccccccgagctggagcccgagagaagcctgggcagattcagaggcagattcgaggacgaggacgaggagctggaggaggaggaggagctggaggaggaggaggaggaggaggaggaggacatgagccacttcagcctgagactggagggcggcagacaggacagcgaggacgaggaggagagactgatcaacctgagcgagctgaccccctacatcctgtgcagcatctgcaagggctacctgatcgacgccaccaccatcaccgagtgcctgcacaccttctgcaagagctgcatcgtgagacacttctactacagcaacagatgccccaagtgcaacatcgtggtgcaccagacccagcccctgtacaacatcagcgccaacgagggcaccggccacttcaagcccctggagaagaagttcgtgagagtgagcggcgaggccaccatcggccacgtggagaagttcctgagaagaaagatgggcctggaccccgcctgccaggtggacatcatctgcggcgaccacctgctggagcagtaccagaccctgagagagatcagaagagccatcggcgacgccgccatgcaggacggcctgctggtgctgcactacggcctggtggtgagccccctgaagatcacctag

SEQ ID NO: 93789 - DNA, 1053 bp, synthetic construct
  misc_feature 1..1053: note = Description of Artificial Sequence: Synthetic coding sequence
  source 1..1053: mol_type = other DNA
atggagggcgtggccgtggtgaccgccggcagcgtgggcgccgccaagaccgagggcgccgccgccctgcccccccccccccccgtgagcccccccgccctgacccccgcccccgccgccggcgaggagggccccgcccccctgagcgagaccggcgcccccggctgcagcggcagcagaccccccgagctggagcccgagagaagcctgggcagattcagaggcagattcgaggacgaggacgaggagctggaggaggaggaggagctggaggaggaggaggaggaggaggaggaggacatgagccacttcagcctgagactggagggcggcagacaggacagcgaggacgaggaggagagactgatcaacctgagcgagctgaccccctacatcctgtgcagcatctgcaagggctacctgatcgacgccaccaccatcaccgagtgcctgcacaccttctgcaagagctgcatcgtgagacacttctactacagcaacagatgccccaagtgcaacatcgtggtgcaccagacccagcccctgtacaacatcagactggacagacagctgcaggacatcgtgtacaagctggtgatcaacctggaggagagagagaagaagcagatgcacgacttctacaaggagagaggcctggaggtgcccaagcccgccgtgccccagcccgtgcccagcagcaagggcagaagcaagaaggtgctggagagcgtgttcagaatcccccccgagctggacatgagcctgctgctggagttcatcggcgccaacgagggcaccggccacttcaagcccctggagaagaagttcgtgagagtgagcggcgaggccaccatcggccacgtggagaagttcctgagaagaaagatgggcctggaccccgcctgccaggtggacatcatctgcggcgaccacctgctggagcagtaccagaccctgagagagatcagaagagccatcggcgacgccgccatgcaggacggcctgctggtgctgcactacggcctggtggtgagccccctgaagatcacctag

SEQ ID NO: 93790 - DNA, 10191 bp, synthetic construct
  misc_feature 1..10191: note = Description of Artificial Sequence: Synthetic coding sequence
  source 1..10191: mol_type = other DNA
atgaccgcctggctgatcagcctgatgagcatcgaggtgctgctgctggccgtgagacacctgagcctgcacatcgagcccgaggagggcagcctggccggcggcacctggatcaccgtgatcttcgacggcctggagctgggcgtgctgtaccccaacaacggcagccagctggagatccacctggtgaacgtgaacatggtggtgcccgccctgagaagcgtgccctgcgacgtgttccccgtgttcctggacctgcccgtggtgacctgcagaaccagaagcgtgctgagcgaggcccacgagggcctgtacttcctggaggcctacttcggcggccagctggtgagcagccccaaccccggccccagagacagctgcaccttcaagttcagcaaggcccagacccccatcgtgcaccaggtgtacccccccagcggcgtgcccggcaagctgatccacgtgtacggctggatcatcaccggcagactggagaccttcgacttcgacgccgagtacatcgacagccccgtgatcctggaggcccagggcgacaagtgggtgaccccctgcagcctgatcaacagacagatgggcagctgctaccccatccaggaggaccacggcctgggcaccctgcagtgccacgtggagggcgactacatcggcagccagaacgtgagcttcagcgtgttcaacaagggcaagagcatggtgcacaagaaggcctggctgatcagcgccaagcaggacctgttcctgtaccagacccacagcgagatcctgagcgtgttccccgagaccggcagcctgggcggcagaaccaacatcaccatcaccggcgacttcttcgacaacagcgcccaggtgaccatcgccggcatcccctgcgacatcagacacgtgagccccagaaagatcgagtgcaccaccagagcccccggcaaggacgtgagactgaccaccccccagcccggcaacagaggcctgctgttcgaggtgggcgacgccgtggagggcctggagctgaccgaggccacccccggctacagatggcagatcgtgcccaacgccagcagccccttcggcttctggagccaggagggccagcccttcagagccagactgagcggcttcttcgtggcccccgagaccaacaactacaccttctggatccaggccgacagccaggccagcctgcacttcagctggagcgaggagcccagaaccaaggtgaaggtggccagcatcagcgtgggcaccgccgactggttcgacagctgggagcagaacagagacgagggcacctggcagcagaagacccccaagctggagctgctgggcggcgccatgtactacctggaggccgagcaccacggcatcgcccccagcagaggcatgagaatcggcgtgcagatccacaacacctggctgaaccccgacgtggtgaccacctacctgagagagaagcaccagatcagagtgagagcccagagactgcccgaggtgcaggtgctgaacgtgagcggcagaggcaacttcttcctgacctgggacaacgtgagcagccagcccatccccgccaacgccaccgcccacctgatccagaccaccatcgaggagctgctggccgtgaagtgcaagctggagcccctgtggagcaacatcctgctgagactgggcttcgagagaggccccgaggtgagcaacagcgacggcgacctgaccagcggcaccgagcccttctgcggcagattcagcctgagacagcccagacacctggtgctgaccccccccgccgcccagaagggctacagactggaccagtacacccacctgtgcctggcctacaagggccacatgaacaagatcctgaagatgatcgtgagcttcaccatcggcttccagaacatggtgaagaacaccacctgcgactggagcctgaccagaaccagccccgagagctggcagttcgactgcaccgacctgtgggagacctgcgtgagatgcttcggcgacctgcagcccccccccgccaacagccccgtgctggtgcaccagatcaacctgctgcccctggcccaggagaccggcctgttctacgtggacgagatcatcatcgccgacaccaacgtgaccgtgagccaggccgacagcggcaccgccagacccggcggcaacctggtggagagcgtgagcgtggtgggcagcccccccgtgtacagcgtgaccagctggctggccggctgcggcaccgagctgcccctgatcaccgccagaagcgtgcccaccgagggcaccgaggagggcagcggcctggtgctggtgaccacccagagaagacagagaaccagcccccccctgggcggccacttcagaatccagctgcccaacaccgtgatcagcgacgtgcccgtgcagatcagcgcccaccacctgcaccagctgctgcagaacaacgccgacgacttcaccagcagatacctgaacgccagcgacttcaccgtgaaggaggacctgtacacctgctacgagcacgtgtggaccctgagctggagcacccagatcggcgacctgcccaacttcatcagagtgagcgacgagaacctgaccggcgtgaaccccgccgccgccaccagagtggtgtacgacggcggcgtgttcctgggccccatcttcggcgacatgctggccaccgccaaccagcacacccaggtggtggtgagagtgaacgacgtgcccgcccactgccccggcagctgcagcttccagtacctgcagggcagcaccccctgcgtgcacagcgtgtggtacagcatcgacggcgacatcaacctgatgatctacatcaccggcaccggcttcagcggcgacagccagttcctgcaggtgaccgtgaacaagaccagctgcaaggtgatcttcagcaaccagaccaacgtggtgtgccagaccgacctgctgcccgtgggcatgcacagaatcctgatgctggtgagacccagcggcctggccatcagcgccaccggcgaggacctgttcctgaacgtgaagcccagactggacatggtggagcccagcagagccgccgacatcggcggcctgtgggccaccatcagaggcagcagcctggagggcgtgagcctgatcctgttcggcagctacagctgcgccatcaacgtggccaccagcaacagcagcagaatccagtgcaaggtgccccccagaggcaaggacggcagaatcgtgaacgtgaccgtgatcagaggcgactacagcgccgtgctgcccagagccttcacctacgtgagcagcctgaaccccgtgatcgtgaccctgagcagaaacatcagcaacatcgccggcggcgagaccctggtgatcggcgtggccagactgatgaactacaccgacctggacgtggaggtgcacgtgcaggacgccctggcccccgtgcacacccagagcgcctggggcctggaggtggccctgccccccctgcccgccggcctgcacagaatcagcgtgagcatcaacggcgtgagcatccacagccagggcgtggacctgcacatccagtacctgaccgaggtgttcagcatcgagccctgctgcggcagcctgctgggcggcaccatcctgagcatcagcggcatcggcttcagcagagaccccgccctggtgtgggtgctggtgggcaacagaagctgcgacatcgtgaacctgaccgaggccagcatctggtgcgagaccctgcccgccccccagatccccgacgccggcgcccccaccgtgcccgccgccgtggaggtgtgggccggcaacagattcttcgccagaggccccagccccagcctggtgggcaagggcttcaccttcatgtacgaggccgccgccacccccgtggtgaccgccatgcagggcgagatcaccaacagcagcctgagcctgcacgtgggcggcagcaacctgagcaacagcgtgatcctgctgggcaacctgaactgcgacgtggagacccagagcttccagggcaacgtgagcctgagcggctgcagcatccccctgcacagcctggaggccggcatctaccccctgcaggtgagacagaagcagatgggcttcgccaacatgagcgtggtgctgcagcagttcgccgtgatgcccagaatcatggccatcttccccagccagggcagcgcctgcggcggcaccatcctgaccgtgagaggcctgctgctgaacagcagaagaagaagcgtgagagtggacctgagcggccccttcacctgcgtgatcctgagcctgggcgaccacaccatcctgtgccaggtgagcctggagggcgaccccctgcccggcgccagcttcagcctgaacgtgaccgtgctggtgaacggcctgaccagcgagtgccagggcaactgcaccctgttcatcagagaggaggccagccccgtgatggacgccctgagcaccaacaccagcggcagcctgaccaccgtgctgatcagaggccagagactggccaccaccgccgacgagcccatggtgttcgtggacgaccagctgccctgcaacgtgaccttcttcaacgccagccacgtggtgtgccagaccagagacctggcccccggcccccactacctgagcgtgttctacaccagaaacggctacgcctgcagcggcaacgtgagcagacacttctacatcatgccccaggtgttccactacttccccaagaacttcagcctgcacggcggcagcctgctgaccatcgagggcaccggcctgagaggccagaacaccaccagcgtgtacatcgaccagcagacctgcctgaccgtgaacatcggcgccgagctgatcagatgcatcgtgcccaccggcaacggcagcgtggccctggagatcgaggtggacggcctgtggtaccacatcggcgtgatcggctacaacaaggccttcacccccgagctgatcagcatcagccagagcgacgacatcctgaccttcgccgtggcccagatcagcggcgccgccaacatcgacatcttcatcggcatgagcccctgcgtgggcgtgagcggcaaccacaccgtgctgcagtgcgtggtgcccagcctgcccgccggcgagtaccacgtgagaggctacgactgcatcagaggctgggccagcagcgccctggtgttcaccagcagagtgatcatcaccgccgtgaccgagaacttcggctgcctgggcggcagactggtgcacgtgttcggcgccggcttcagccccggcaacgtgagcgccgccgtgtgcggcgccccctgcagagtgctggccaacgccaccgtgagcgccttcagctgcctggtgctgcccctggacgtgagcctggccttcctgtgcggcctgaagagagaggaggacagctgcgaggccgccagacacacctacgtgcagtgcgacctgaccgtggccatggccaccgagcagctgctggagagctggccctacctgtacatctgcgaggagagcagccagtgcctgttcgtgcccgaccactgggccgagagcatgttccccagcttcagcggcctgttcatcagccccaagctggagagagacgaggtgctgatctacaacagcagctgcaacatcaccatggagaccgaggccgagatggagtgcgagacccccaaccagcccatcaccgtgaagatcaccgagatcagaaagagatggggccagaacacccagggcaacttcagcctgcagttctgcagaagatggagcagaacccacagctggttccccgagagactgccccaggacggcgacaacgtgaccgtggagaacggccagctgctgctgctggacaccaacaccagcatcctgaacctgctgcacatcaagggcggcaagctgatcttcatggcccccggccccatcgagctgagagcccacgccatcctggtgagcgacggcggcgagctgagaatcggcagcgaggacaagcccttccagggcagagcccagatcaccctgtacggcagcagctacagcacccccttcttcccctacggcgtgaagttcctggccgtgagaaacggcaccctgagcctgcacggcagcctgcccgaggtgatcgtgacctgcctgagagccaccgcccacgccctggacaccgtgctggccctggaggacgccgtggactggaaccccggcgacgaggtggtgatcatcagcggcaccggcgtgaagggcgccaagcccatggaggagatcgtgaccgtggagaccgtgcaggacaccgacctgtacctgaagagccccctgagatacagccacaacttcaccgagaactgggtggccggcgagcaccacatcctgaaggccaccgtggccctgctgagcagaagcatcaccatccagggcaacctgaccaacgagagagagaagctgctggtgagctgccaggaggccaacgcccccgagggcaacctgcagcactgcctgtacagcatgagcgagaagatgctgggcagcagagacatgggcgccagagtgatcgtgcagagcttccccgaggagcccagccaggtgcagctgaagggcgtgcagttccaggtgctgggccaggccttccacaagcacctgagcagcctgaccctggtgggcgccatgagagagagcttcatccagggctgcaccgtgagaaacagcttcagcagaggcctgagcatgtgcggcaccctgggcctgaaggtggacagcaacgtgttctacaacatcctgggccacgccctgctggtgggcacctgcaccgagatgagatacatcagctgggaggccatccacggcagaaaggacgactggagcggccacggcaacatcatcagaaacaacgtgatcatccaggtgagcggcgccgagggcctgagcaaccccgagatgctgacccccagcggcatctacatctgcagccccaccaacgtgatcgagggcaacagagtgtgcggcgccggctacggctacttcttccacctgatgaccaaccagaccagccaggcccccctgctgagcttcacccagaacatcgcccacagctgcaccagatacggcctgttcgtgtaccccaagttccagcccccctgggacaacgtgaccggcaccaccctgttccagagcttcaccgtgtgggagagcgccggcggcgcccagatcttcagaagcagcaacctgagactgaagaacttcaaggtgtacagctgcagagacttcggcatcgacgtgctggagagcgacgccaacaccagcgtgaccgacagcctgctgctgggccacttcgcccacaagggcagcctgtgcatgagcagcggcatcaagacccccaagagatgggagctgatggtgagcaacaccaccttcgtgaacttcgacctgatcaactgcgtggccatcagaacctgcagcgactgcagccagggccagggcggcttcaccgtgaagaccagccagctgaagttcaccaacagcagcaacctggtggccttccccttcccccacgccgccatcctggaggacctggacggcagcctgagcggcaagaacagaagccacatcctggccagcatggagaccctgagcgccagctgcctggtgaacagcagcttcggcagagtggtgcacggcagcgcctgcggcggcggcgtgctgttccacagaatgagcatcggcctggccaacacccccgaggtgagctacgacctgaccatgaccgacagcagaaacaagaccaccaccgtgaactacgtgagagacaccctgagcaaccccagaggctggatggccctgctgctggaccaggagacctacagcctgcagagcgagaacctgtggatcaacagaagcctgcagtacagcgccaccttcgacaacttcgcccccggcaactacctgctgctggtgcacaccgacctgcccccctaccccgacatcctgctgagatgcggcagcagagtgggcctgagcttccccttcctgcccagccccggccagaaccagggctgcgactggttcttcaacagccagctgagacagctgacctacctggtgagcggcgagggccaggtgcaggtgatcctgagagtgaaggagggcatgccccccaccatcagcgccagcaccagcgcccccgagagcgccctgaagtggagcctgcccgagacctggcagggcgtggaggagggctggggcggctacaacaacaccatccccggccccggcgacgacgtgctgatcctgcccaacagaaccgtgctggtggacaccgacctgcccttcttcaagggcctgtacgtgatgggcaccctggacttccccgtggacagaagcaacgtgctgagcgtggcctgcatggtgatcgccggcggcgagctgaaggtgggcaccctggagaaccccctggagaaggagcagaagctgctgatcctgctgagagccagcgagggcgtgttctgcgacagaatgaacggcatccacatcgaccccggcaccatcggcgtgtacggcaaggtgcacctgtacagcgcctaccccaagaacagctggacccacctgggcgccgacatcgccagcggcaacgagagaatcatcgtggaggacgccgtggactggagaccccacgacaagatcgtgctgagcagcagcagctacgagccccacgaggccgaggtgctgaccgtgaaggaggtgaagggccaccacgtgagaatctacgagagactgaagcacagacacatcggcagcgtgcacgtgaccgaggacggcagacacatcagactggccgccgaggtgggcctgctgaccagaaacatccagatccagcccgacgtgagctgcagaggcagactgttcgtgggcagcttcagaaagagcagcagagaggagttcagcggcgtgctgcagctgctgaacgtggagatccagaacttcggcagccccctgtacagcagcgtggagttcagcaacgtgagcgccggcagctggatcatcagcagcaccctgcaccagagctgcggcggcggcatccacgccgccgccagccacggcgtgctgctgaacgacaacatcgtgttcggcaccgccggccacggcatcgacctggagggccaggcctacaccgtgaccaacaacctggtggtgctgatgacccagcccgcctggagcaccatctgggtggccggcatcaaggtgaaccaggtgaaggacatcaacctgcacggcaacgtggtggccggcagcgagagactgggcttccacatcagaggccacaagtgcagcagctgcgagctgctgtggagcgacaacgtggcccacagcagcctgcacggcctgcacctgtacaaggagagcggcctggacaactgcaccagaatcagcggcttcctggccttcaagaacttcgactacggcgccatgctgcacgtggagaacagcgtggagatcgagaacatcaccctggtggacaacaccatcggcctgctggccgtggtgtacgtgttcagcgccccccagaacagcgtgaagaaggtgcagatcgtgctgagaaacagcgtgatcgtggccaccagcagcagcttcgactgcatccaggacaaggtgaagccccacagcgccaacctgaccagcaccgacagagcccccagcaaccccagaggcggcagaatcggcatcctgtggcccgtgttcaccagcgagcccaaccagtggccccaggagccctggcacaaggtgagaaacgaccacagcatcagcggcatcatgaagctgcaggacgtgaccttcagcagcttcgtgaagagctgctacagcgacgacctggacgtgtgcatcctgcccaacgccgagaacagcggcatcatgcaccccatcaccgccgagagaaccagaatgctgaagatcaaggacaagaacaagttctacttccccagcctgcagcccagaaaggacctgggcaaggtggtgtgccccgagctggactgcgccagccccagaaagtacctgttcaaggacctggacggcagagccctgggcctgcccccccccgtgagcgtgttccccaagaccgaggccgagtggaccgccagcttcttcaacgccgtgaccaccgagcaggccctgaagatcagcgagtag

SEQ ID NO: 93791 - DNA, 12225 bp, synthetic construct
  misc_feature 1..12225: note = Description of Artificial Sequence: Synthetic coding sequence
  source 1..12225: mol_type = other DNA
atgaccgcctggctgatcagcctgatgagcatcgaggtgctgctgctggccgtgagacacctgagcctgcacatcgagcccgaggagggcagcctggccggcggcacctggatcaccgtgatcttcgacggcctggagctgggcgtgctgtaccccaacaacggcagccagctggagatccacctggtgaacgtgaacatggtggtgcccgccctgagaagcgtgccctgcgacgtgttccccgtgttcctggacctgcccgtggtgacctgcagaaccagaagcgtgctgagcgaggcccacgagggcctgtacttcctggaggcctacttcggcggccagctggtgagcagccccaaccccggccccagagacagctgcaccttcaagttcagcaaggcccagacccccatcgtgcaccaggtgtacccccccagcggcgtgcccggcaagctgatccacgtgtacggctggatcatcaccggcagactggagaccttcgacttcgacgccgagtacatcgacagccccgtgatcctggaggcccagggcgacaagtgggtgaccccctgcagcctgatcaacagacagatgggcagctgctaccccatccaggaggaccacggcctgggcaccctgcagtgccacgtggagggcgactacatcggcagccagaacgtgagcttcagcgtgttcaacaagggcaagagcatggtgcacaagaaggcctggctgatcagcgccaagcaggacctgttcctgtaccagacccacagcgagatcctgagcgtgttccccgagaccggcagcctgggcggcagaaccaacatcaccatcaccggcgacttcttcgacaacagcgcccaggtgaccatcgccggcatcccctgcgacatcagacacgtgagccccagaaagatcgagtgcaccaccagagcccccggcaaggacgtgagactgaccaccccccagcccggcaacagaggcctgctgttcgaggtgggcgacgccgtggagggcctggagctgaccgaggccacccccggctacagatggcagatcgtgcccaacgccagcagccccttcggcttctggagccaggagggccagcccttcagagccagactgagcggcttcttcgtggcccccgagaccaacaactacaccttctggatccaggccgacagccaggccagcctgcacttcagctggagcgaggagcccagaaccaaggtgaaggtggccagcatcagcgtgggcaccgccgactggttcgacagctgggagcagaacagagacgagggcacctggcagcagaagacccccaagctggagctgctgggcggcgccatgtactacctggaggccgagcaccacggcatcgcccccagcagaggcatgagaatcggcgtgcagatccacaacacctggctgaaccccgacgtggtgaccacctacctgagagagaagcaccagatcagagtgagagcccagagactgcccgaggtgcaggtgctgaacgtgagcggcagaggcaacttcttcctgacctgggacaacgtgagcagccagcccatccccgccaacgccaccgcccacctgatccagaccaccatcgaggagctgctggccgtgaagtgcaagctggagcccctgtggagcaacatcctgctgagactgggcttcgagagaggccccgaggtgagcaacagcgacggcgacctgaccagcggcaccgagcccttctgcggcagattcagcctgagacagcccagacacctggtgctgaccccccccgccgcccagaagggctacagactggaccagtacacccacctgtgcctggcctacaagggccacatgaacaagatcctgaagatgatcgtgagcttcaccatcggcttccagaacatggtgaagaacaccacctgcgactggagcctgaccagaaccagccccgagagctggcagttcgactgcaccgacctgtgggagacctgcgtgagatgcttcggcgacctgcagcccccccccgccaacagccccgtgctggtgcaccagatcaacctgctgcccctggcccaggagaccggcctgttctacgtggacgagatcatcatcgccgacaccaacgtgaccgtgagccaggccgacagcggcaccgccagacccggcggcaacctggtggagagcgtgagcgtggtgggcagcccccccgtgtacagcgtgaccagctggctggccggctgcggcaccgagctgcccctgatcaccgccagaagcgtgcccaccgagggcaccgaggagggcagcggcctggtgctggtgaccacccagagaagacagagaaccagcccccccctgggcggccacttcagaatccagctgcccaacaccgtgatcagcgacgtgcccgtgcagatcagcgcccaccacctgcaccagctgctgcagaacaacgccgacgacttcaccagcagatacctgaacgccagcgacttcaccgtgaaggaggacctgtacacctgctacgagcacgtgtggaccctgagctggagcacccagatcggcgacctgcccaacttcatcagagtgagcgacgagaacctgaccggcgtgaaccccgccgccgccaccagagtggtgtacgacggcggcgtgttcctgggccccatcttcggcgacatgctggccaccgccaaccagcacacccaggtggtggtgagagtgaacgacgtgcccgcccactgccccggcagctgcagcttccagtacctgcagggcagcaccccctgcgtgcacagcgtgtggtacagcatcgacggcgacatcaacctgatgatctacatcaccggcaccggcttcagcggcgacagccagttcctgcaggtgaccgtgaacaagaccagctgcaaggtgatcttcagcaaccagaccaacgtggtgtgccagaccgacctgctgcccgtgggcatgcacagaatcctgatgctggtgagacccagcggcctggccatcagcgccaccggcgaggacctgttcctgaacgtgaagcccagactggacatggtggagcccagcagagccgccgacatcggcggcctgtgggccaccatcagaggcagcagcctggagggcgtgagcctgatcctgttcggcagctacagctgcgccatcaacgtggccaccagcaacagcagcagaatccagtgcaaggtgccccccagaggcaaggacggcagaatcgtgaacgtgaccgtgatcagaggcgactacagcgccgtgctgcccagagccttcacctacgtgagcagcctgaaccccgtgatcgtgaccctgagcagaaacatcagcaacatcgccggcggcgagaccctggtgatcggcgtggccagactgatgaactacaccgacctggacgtggaggtgcacgtgcaggacgccctggcccccgtgcacacccagagcgcctggggcctggaggtggccctgccccccctgcccgccggcctgcacagaatcagcgtgagcatcaacggcgtgagcatccacagccagggcgtggacctgcacatccagtacctgaccgaggtgttcagcatcgagccctgctgcggcagcctgctgggcggcaccatcctgagcatcagcggcatcggcttcagcagagaccccgccctggtgtgggtgctggtgggcaacagaagctgcgacatcgtgaacctgaccgaggccagcatctggtgcgagaccctgcccgccccccagatccccgacgccggcgcccccaccgtgcccgccgccgtggaggtgtgggccggcaacagattcttcgccagaggccccagccccagcctggtgggcaagggcttcaccttcatgtacgaggccgccgccacccccgtggtgaccgccatgcagggcgagatcaccaacagcagcctgagcctgcacgtgggcggcagcaacctgagcaacagcgtgatcctgctgggcaacctgaactgcgacgtggagacccagagcttccagggcaacgtgagcctgagcggctgcagcatccccctgcacagcctggaggccggcatctaccccctgcaggtgagacagaagcagatgggcttcgccaacatgagcgtggtgctgcagcagttcgccgtgatgcccagaatcatggccatcttccccagccagggcagcgcctgcggcggcaccatcctgaccgtgagaggcctgctgctgaacagcagaagaagaagcgtgagagtggacctgagcggccccttcacctgcgtgatcctgagcctgggcgaccacaccatcctgtgccaggtgagcctggagggcgaccccctgcccggcgccagcttcagcctgaacgtgaccgtgctggtgaacggcctgaccagcgagtgccagggcaactgcaccctgttcatcagagaggaggccagccccgtgatggacgccctgagcaccaacaccagcggcagcctgaccaccgtgctgatcagaggccagagactggccaccaccgccgacgagcccatggtgttcgtggacgaccagctgccctgcaacgtgaccttcttcaacgccagccacgtggtgtgccagaccagagacctggcccccggcccccactacctgagcgtgttctacaccagaaacggctacgcctgcagcggcaacgtgagcagacacttctacatcatgccccaggtgttccactacttccccaagaacttcagcctgcacggcggcagcctgctgaccatcgagggcaccggcctgagaggccagaacaccaccagcgtgtacatcgaccagcagacctgcctgaccgtgaacatcggcgccgagctgatcagatgcatcgtgcccaccggcaacggcagcgtggccctggagatcgaggtggacggcctgtggtaccacatcggcgtgatcggctacaacaaggccttcacccccgagctgatcagcatcagccagagcgacgacatcctgaccttcgccgtggcccagatcagcggcgccgccaacatcgacatcttcatcggcatgagcccctgcgtgggcgtgagcggcaaccacaccgtgctgcagtgcgtggtgcccagcctgcccgccggcgagtaccacgtgagaggctacgactgcatcagaggctgggccagcagcgccctggtgttcaccagcagagtgatcatcaccgccgtgaccgagaacttcggctgcctgggcggcagactggtgcacgtgttcggcgccggcttcagccccggcaacgtgagcgccgccgtgtgcggcgccccctgcagagtgctggccaacgccaccgtgagcgccttcagctgcctggtgctgcccctggacgtgagcctggccttcctgtgcggcctgaagagagaggaggacagctgcgaggccgccagacacacctacgtgcagtgcgacctgaccgtggccatggccaccgagcagctgctggagagctggccctacctgtacatctgcgaggagagcagccagtgcctgttcgtgcccgaccactgggccgagagcatgttccccagcttcagcggcctgttcatcagccccaagctggagagagacgaggtgctgatctacaacagcagctgcaacatcaccatggagaccgaggccgagatggagtgcgagacccccaaccagcccatcaccgtgaagatcaccgagatcagaaagagatggggccagaacacccagggcaacttcagcctgcagttctgcagaagatggagcagaacccacagctggttccccgagagactgccccaggacggcgacaacgtgaccgtggagaacggccagctgctgctgctggacaccaacaccagcatcctgaacctgctgcacatcaagggcggcaagctgatcttcatggcccccggccccatcgagctgagagcccacgccatcctggtgagcgacggcggcgagctgagaatcggcagcgaggacaagcccttccagggcagagcccagatcaccctgtacggcagcagctacagcacccccttcttcccctacggcgtgaagttcctggccgtgagaaacggcaccctgagcctgcacggcagcctgcccgaggtgatcgtgacctgcctgagagccaccgcccacgccctggacaccgtgctggccctggaggacgccgtggactggaaccccggcgacgaggtggtgatcatcagcggcaccggcgtgaagggcgccaagcccatggaggagatcgtgaccgtggagaccgtgcaggacaccgacctgtacctgaagagccccctgagatacagccacaacttcaccgagaactgggtggccggcgagcaccacatcctgaaggccaccgtggccctgctgagcagaagcatcaccatccagggcaacctgaccaacgagagagagaagctgctggtgagctgccaggaggccaacgcccccgagggcaacctgcagcactgcctgtacagcatgagcgagaagatgctgggcagcagagacatgggcgccagagtgatcgtgcagagcttccccgaggagcccagccaggtgcagctgaagggcgtgcagttccaggtgctgggccaggccttccacaagcacctgagcagcctgaccctggtgggcgccatgagagagagcttcatccagggctgcaccgtgagaaacagcttcagcagaggcctgagcatgtgcggcaccctgggcctgaaggtggacagcaacgtgttctacaacatcctgggccacgccctgctggtgggcacctgcaccgagatgagatacatcagctgggaggccatccacggcagaaaggacgactggagcggccacggcaacatcatcagaaacaacgtgatcatccaggtgagcggcgccgagggcctgagcaaccccgagatgctgacccccagcggcatctacatctgcagccccaccaacgtgatcgagggcaacagagtgtgcggcgccggctacggctacttcttccacctgatgaccaaccagaccagccaggcccccctgctgagcttcacccagaacatcgcccacagctgcaccagatacggcctgttcgtgtaccccaagttccagcccccctgggacaacgtgaccggcaccaccctgttccagagcttcaccgtgtgggagagcgccggcggcgcccagatcttcagaagcagcaacctgagactgaagaacttcaaggtgtacagctgcagagacttcggcatcgacgtgctggagagcgacgccaacaccagcgtgaccgacagcctgctgctgggccacttcgcccacaagggcagcctgtgcatgagcagcggcatcaagacccccaagagatgggagctgatggtgagcaacaccaccttcgtgaacttcgacctgatcaactgcgtggccatcagaacctgcagcgactgcagccagggccagggcggcttcaccgtgaagaccagccagctgaagttcaccaacagcagcaacctggtggccttccccttcccccacgccgccatcctggaggacctggacggcagcctgagcggcaagaacagaagccacatcctggccagcatggagaccctgagcgccagctgcctggtgaacagcagcttcggcagagtggtgcacggcagcgcctgcggcggcggcgtgctgttccacagaatgagcatcggcctggccaacacccccgaggtgagctacgacctgaccatgaccgacagcagaaacaagaccaccaccgtgaactacgtgagagacaccctgagcaaccccagaggctggatggccctgctgctggaccaggagacctacagcctgcagagcgagaacctgtggatcaacagaagcctgcagtacagcgccaccttcgacaacttcgcccccggcaactacctgctgctggtgcacaccgacctgcccccctaccccgacatcctgctgagatgcggcagcagagtgggcctgagcttccccttcctgcccagccccggccagaaccagggctgcgactggttcttcaacagccagctgagacagctgacctacctggtgagcggcgagggccaggtgcaggtgatcctgagagtgaaggagggcatgccccccaccatcagcgccagcaccagcgcccccgagagcgccctgaagtggagcctgcccgagacctggcagggcgtggaggagggctggggcggctacaacaacaccatccccggccccggcgacgacgtgctgatcctgcccaacagaaccgtgctggtggacaccgacctgcccttcttcaagggcctgtacgtgatgggcaccctggacttccccgtggacagaagcaacgtgctgagcgtggcctgcatggtgatcgccggcggcgagctgaaggtgggcaccctggagaaccccctggagaaggagcagaagctgctgatcctgctgagagccagcgagggcgtgttctgcgacagaatgaacggcatccacatcgaccccggcaccatcggcgtgtacggcaaggtgcacctgtacagcgcctaccccaagaacagctggacccacctgggcgccgacatcgccagcggcaacgagagaatcatcgtggaggacgccgtggactggagaccccacgacaagatcgtgctgagcagcagcagctacgagccccacgaggccgaggtgctgaccgtgaaggaggtgaagggccaccacgtgagaatctacgagagactgaagcacagacacatcggcagcgtgcacgtgaccgaggacggcagacacatcagactggccgccgaggtgggcctgctgaccagaaacatccagatccagcccgacgtgagctgcagaggcagactgttcgtgggcagcttcagaaagagcagcagagaggagttcagcggcgtgctgcagctgctgaacgtggagatccagaacttcggcagccccctgtacagcagcgtggagttcagcaacgtgagcgccggcagctggatcatcagcagcaccctgcaccagagctgcggcggcggcatccacgccgccgccagccacggcgtgctgctgaacgacaacatcgtgttcggcaccgccggccacggcatcgacctggagggccaggcctacaccgtgaccaacaacctggtggtgctgatgacccagcccgcctggagcaccatctgggtggccggcatcaaggtgaaccaggtgaaggacatcaacctgcacggcaacgtggtggccggcagcgagagactgggcttccacatcagaggccacaagtgcagcagctgcgagctgctgtggagcgacaacgtggcccacagcagcctgcacggcctgcacctgtacaaggagagcggcctggacaactgcaccagaatcagcggcttcctggccttcaagaacttcgactacggcgccatgctgcacgtggagaacagcgtggagatcgagaacatcaccctggtggacaacaccatcggcctgctggccgtggtgtacgtgttcagcgccccccagaacagcgtgaagaaggtgcagatcgtgctgagaaacagcgtgatcgtggccaccagcagcagcttcgactgcatccaggacaaggtgaagccccacagcgccaacctgaccagcaccgacagagcccccagcaaccccagaggcggcagaatcggcatcctgtggcccgtgttcaccagcgagcccaaccagtggccccaggagccctggcacaaggtgagaaacgaccacagcatcagcggcatcatgaagctgcaggacgtgaccttcagcagcttcgtgaagagctgctacagcgacgacctggacgtgtgcatcctgcccaacgccgagaacagcggcatcatgcaccccatcaccgccgagagaaccagaatgctgaagatcaaggacaagaacaagttctacttccccagcctgcagcccagaaaggacctgggcaaggtggtgtgccccgagctggactgcgccagccccagaaagtacctgttcaaggacctggacggcagagccctgggcctgcccccccccgtgagcgtgttccccaagaccgaggccgagtggaccgccagcttcttcaacgccggcaccttcagagaggagcagaagtgcacctaccagttcctgatgcagggcttcatctgcaagcagaccgaccaggtggtgctgatcctggacagcgccgacgccatctgggccatccagaagctgtaccccgtggtgagcgtgaccagcggcttcgtggacgtgttcagcagcgtgaacgccaacatcccctgcagcaccagcggcagcgtgagcaccttctacagcatcctgcccatcagacagatcaccaaggtgtgcttcatggaccagaccccccaggtgctgagattcttcctgctgggcaacaagagcaccagcaagctgctgctggccgtgttctaccacgagctgcagagcccccacgtgttcctgggcgagagcttcatcccccccaccctggtgcagagcgccagcctgctgctgaacgagagcatcggcgccaactacttcaacatcatggacaacctgctgtacgtggtgctgcagggcgaggagcccatcgagatcagaagcggcgtgagcatccacctggccctgaccgtgatggtgagcgtgctggagaagggctgggagatcgtgatcctggagagactgaccaacttcctgcagatcggccagaaccagatcagattcatccacgagatgcccggccacgaggagaccctgaaggccatcgccgacagcagagccaagagaaagagaaactgccccaccgtgacctgcaccagccactacagaagagtgggccagagaagacccctgatgatggagatgaacagccacagagccagcccccccatgaccgtggagaccatcagcaaggtgatcgtgatcgagatcggcgacagccccaccgtgagaagcaccggcatgatcagcagcctgagcagcaacaagctgcagaacctggcccacagagtgatcaccgcccagcagaccggcgtgctggagaacgtgctgaacatgaccatcggcgccctgctggtgacccagagcaagggcgtgatcggctacggcaacaccagcagcttcaagaccggcaacctgatctacatcagaccctacgccctgagcatcctggtgcagcccagcgacggcgaggtgggcaacgagctgcccgtgcagccccagctggtgttcctggacgagcagaacagaagagtggagagcctgggcccccccagcgagccctggaccatcagcgccagcctggagggcgccagcgacagcgtgctgaagggctgcacccaggccgagacccaggacggctacgtgagcttctacaacctggccgtgctgatcagcggcagcaactggcacttcatcttcaccgtgaccagcccccccggcgtgaacttcaccgccagaagcaagcccttcgccgtgctgcccgtgaccagaaaggagaagagcaccatcatcctggccgccagcctgagcagcgtggccagctggctggccctgagctgcctggtgtgctgctggctgaagagaagcaagagcagaaagaccaagcccgaggagatccccgagagccagaccaacaaccagaacatccacatccacatcagcagcaagagaagagagagccagggccccaagaaggaggacaccgtggtgggcgaggacatgagaatgaaggtgatgctgggcaaggtgaaccagtgcccccaccagctgatgaacggcgtgagcagaagaaaggtgagcagacacatcgtgagagaggaggaggccgccgtgcccgcccccggcaccaccggcatcaccagccacggccacatctgcgcccccggcgcccccgcccagcaggtgtacctgcaggagaccggcaactggaaggagggccaggagcagctgctgagataccagctggccggccagaaccagctgctgctgctgtgccccgacttcagacaggagagacagcagctgcccggccagagcagactgagcaagcagagcggcagcctgggcctgagccaggagaagaaggccagctgcggcgccaccgaggccttctgcctgcacagcgtgcaccccgagaccatccaggagcagctgtag

SEQ ID NO: 93792 - DNA, 10191 bp, synthetic construct
  misc_feature 1..10191: note = Description of Artificial Sequence: Synthetic coding sequence
  source 1..10191: mol_type = other DNA
atgaccgcctggctgatcagcctgatgagcatcgaggtgctgctgctggccgtgagacacctgagcctgcacatcgagcccgaggagggcagcctggccggcggcacctggatcaccgtgatcttcgacggcctggagctgggcgtgctgtaccccaacaacggcagccagctggagatccacctggtgaacgtgaacatggtggtgcccgccctgagaagcgtgccctgcgacgtgttccccgtgttcctggacctgcccgtggtgacctgcagaaccagaagcgtgctgagcgaggcccacgagggcctgtacttcctggaggcctacttcggcggccagctggtgagcagccccaaccccggccccagagacagctgcaccttcaagttcagcaaggcccagacccccatcgtgcaccaggtgtacccccccagcggcgtgcccggcaagctgatccacgtgtacggctggatcatcaccggcagactggagaccttcgacttcgacgccgagtacatcgacagccccgtgatcctggaggcccagggcgacaagtgggtgaccccctgcagcctgatcaacagacagatgggcagctgctaccccatccaggaggaccacggcctgggcaccctgcagtgccacgtggagggcgactacatcggcagccagaacgtgagcttcagcgtgttcaacaagggcaagagcatggtgcacaagaaggcctggctgatcagcgccaagcaggacctgttcctgtaccagacccacagcgagatcctgagcgtgttccccgagaccggcagcctgggcggcagaaccaacatcaccatcaccggcgacttcttcgacaacagcgcccaggtgaccatcgccggcatcccctgcgacatcagacacgtgagccccagaaagatcgagtgcaccaccagagcccccggcaaggacgtgagactgaccaccccccagcccggcaacagaggcctgctgttcgaggtgggcgacgccgtggagggcctggagctgaccgaggccacccccggctacagatggcagatcgtgcccaacgccagcagccccttcggcttctggagccaggagggccagcccttcagagccagactgagcggcttcttcgtggcccccgagaccaacaactacaccttctggatccaggccgacagccaggccagcctgcacttcagctggagcgaggagcccagaaccaaggtgaaggtggccagcatcagcgtgggcaccgccgactggttcgacagctgggagcagaacagagacgagggcacctggcagcagaagacccccaagctggagctgctgggcggcgccatgtactacctggaggccgagcaccacggcatcgcccccagcagaggcatgagaatcggcgtgcagatccacaacacctggctgaaccccgacgtggtgaccacctacctgagagagaagcaccagatcagagtgagagcccagagactgcccgaggtgcaggtgctgaacgtgagcggcagaggcaacttcttcctgacctgggacaacgtgagcagccagcccatccccgccaacgccaccgcccacctgatccagaccaccatcgaggagctgctggccgtgaagtgcaagctggagcccctgtggagcaacatcctgctgagactgggcttcgagagaggccccgaggtgagcaacagcgacggcgacctgaccagcggcaccgagcccttctgcggcagattcagcctgagacagcccagacacctggtgctgaccccccccgccgcccagaagggctacagactggaccagtacacccacctgtgcctggcctacaagggccacatgaacaagatcctgaagatgatcgtgagcttcaccatcggcttccagaacatggtgaagaacaccacctgcgactggagcctgaccagaaccagccccgagagctggcagttcgactgcaccgacctgtgggagacctgcgtgagatgcttcggcgacctgcagcccccccccgccaacagccccgtgctggtgcaccagatcaacctgctgcccctggcccaggagaccggcctgttctacgtggacgagatcatcatcgccgacaccaacgtgaccgtgagccaggccgacagcggcaccgccagacccggcggcaacctggtggagagcgtgagcgtggtgggcagcccccccgtgtacagcgtgaccagctggctggccggctgcggcaccgagctgcccctgatcaccgccagaagcgtgcccaccgagggcaccgaggagggcagcggcctggtgctggtgaccacccagagaagacagagaaccagcccccccctgggcggccacttcagaatccagctgcccaacaccgtgatcagcgacgtgcccgtgcagatcagcgcccaccacctgcaccagctgctgcagaacaacgccgacgacttcaccagcagatacctgaacgccagcgacttcaccgtgaaggaggacctgtacacctgctacgagcacgtgtggaccctgagctggagcacccagatcggcgacctgcccaacttcatcagagtgagcgacgagaacctgaccggcgtgaaccccgccgccgccaccagagtggtgtacgacggcggcgtgttcctgggccccatcttcggcgacatgctggccaccgccaaccagcacacccaggtggtggtgagagtgaacgacgtgcccgcccactgccccggcagctgcagcttccagtacctgcagggcagcaccccctgcgtgcacagcgtgtggtacagcatcgacggcgacatcaacctgatgatctacatcaccggcaccggcttcagcggcgacagccagttcctgcaggtgaccgtgaacaagaccagctgcaaggtgatcttcagcaaccagaccaacgtggtgtgccagaccgacctgctgcccgtgggcatgcacagaatcctgatgctggtgagacccagcggcctggccatcagcgccaccggcgaggacctgttcctgaacgtgaagcccagactggacatggtggagcccagcagagccgccgacatcggcggcctgtgggccaccatcagaggcagcagcctggagggcgtgagcctgatcctgttcggcagctacagctgcgccatcaacgtggccaccagcaacagcagcagaatccagtgcaaggtgccccccagaggcaaggacggcagaatcgtgaacgtgaccgtgatcagaggcgactacagcgccgtgctgcccagagccttcacctacgtgagcagcctgaaccccgtgatcgtgaccctgagcagaaacatcagcaacatcgccggcggcgagaccctggtgatcggcgtggccagactgatgaactacaccgacctggacgtggaggtgcacgtgcaggacgccctggcccccgtgcacacccagagcgcctggggcctggaggtggccctgccccccctgcccgccggcctgcacagaatcagcgtgagcatcaacggcgtgagcatccacagccagggcgtggacctgcacatccagtacctgaccgaggtgttcagcatcgagccctgctgcggcagcctgctgggcggcaccatcctgagcatcagcggcatcggcttcagcagagaccccgccctggtgtgggtgctggtgggcaacagaagctgcgacatcgtgaacctgaccgaggccagcatctggtgcgagaccctgcccgccccccagatccccgacgccggcgcccccaccgtgcccgccgccgtggaggtgtgggccggcaacagattcttcgccagaggccccagccccagcctggtgggcaagggcttcaccttcatgtacgaggccgccgccacccccgtggtgaccgccatgcagggcgagatcaccaacagcagcctgagcctgcacgtgggcggcagcaacctgagcaacagcgtgatcctgctgggcaacctgaactgcgacgtggagacccagagcttccagggcaacgtgagcctgagcggctgcagcatccccctgcacagcctggaggccggcatctaccccctgcaggtgagacagaagcagatgggcttcgccaacatgagcgtggtgctgcagcagttcgccgtgatgcccagaatcatggccatcttccccagccagggcagcgcctgcggcggcaccatcctgaccgtgagaggcctgctgctgaacagcagaagaagaagcgtgagagtggacctgagcggccccttcacctgcgtgatcctgagcctgggcgaccacaccatcctgtgccaggtgagcctggagggcgaccccctgcccggcgccagcttcagcctgaacgtgaccgtgctggtgaacggcctgaccagcgagtgccagggcaactgcaccctgttcatcagagaggaggccagccccgtgatggacgccctgagcaccaacaccagcggcagcctgaccaccgtgctgatcagaggccagagactggccaccaccgccgacgagcccatggtgttcgtggacgaccagctgccctgcaacgtgaccttcttcaacgccagccacgtggtgtgccagaccagagacctggcccccggcccccactacctgagcgtgttctacaccagaaacggctacgcctgcagcggcaacgtgagcagacacttctacatcatgccccaggtgttccactacttccccaagaacttcagcctgcacggcggcagcctgctgaccatcgagggcaccggcctgagaggccagaacaccaccagcgtgtacatcgaccagcagacctgcctgaccgtgaacatcggcgccgagctgatcagatgcatcgtgcccaccggcaacggcagcgtggccctggagatcgaggtggacggcctgtggtaccacatcggcgtgatcggctacaacaaggccttcacccccgagctgatcagcatcagccagagcgacgacatcctgaccttcgccgtggcccagatcagcggcgccgccaacatcgacatcttcatcggcatgagcccctgcgtgggcgtgagcggcaaccacaccgtgctgcagtgcgtggtgcccagcctgcccgccggcgagtaccacgtgagaggctacgactgcatcagaggctgggccagcagcgccctggtgttcaccagcagagtgatcatcaccgccgtgaccgagaacttcggctgcctgggcggcagactggtgcacgtgttcggcgccggcttcagccccggcaacgtgagcgccgccgtgtgcggcgccccctgcagagtgctggccaacgccaccgtgagcgccttcagctgcctggtgctgcccctggacgtgagcctggccttcctgtgcggcctgaagagagaggaggacagctgcgaggccgccagacacacctacgtgcagtgcgacctgaccgtggccatggccaccgagcagctgctggagagctggccctacctgtacatctgcgaggagagcagccagtgcctgttcgtgcccgaccactgggccgagagcatgttccccagcttcagcggcctgttcatcagccccaagctggagagagacgaggtgctgatctacaacagcagctgcaacatcaccatggagaccgaggccgagatggagtgcgagacccccaaccagcccatcaccgtgaagatcaccgagatcagaaagagatggggccagaacacccagggcaacttcagcctgcagttctgcagaagatggagcagaacccacagctggttccccgagagactgccccaggacggcgacaacgtgaccgtggagaacggccagctgctgctgctggacaccaacaccagcatcctgaacctgctgcacatcaagggcggcaagctgatcttcatggcccccggccccatcgagctgagagcccacgccatcctggtgagcgacggcggcgagctgagaatcggcagcgaggacaagcccttccagggcagagcccagatcaccctgtacggcagcagctacagcacccccttcttcccctacggcgtgaagttcctggccgtgagaaacggcaccctgagcctgcacggcagcctgcccgaggtgatcgtgacctgcctgagagccaccgcccacgccctggacaccgtgctggccctggaggacgccgtggactggaaccccggcgacgaggtggtgatcatcagcggcaccggcgtgaagggcgccaagcccatggaggagatcgtgaccgtggagaccgtgcaggacaccgacctgtacctgaagagccccctgagatacagccacaacttcaccgagaactgggtggccggcgagcaccacatcctgaaggccaccgtggccctgctgagcagaagcatcaccatccagggcaacctgaccaacgagagagagaagctgctggtgagctgccaggaggccaacgcccccgagggcaacctgcagcactgcctgtacagcatgagcgagaagatgctgggcagcagagacatgggcgccagagtgatcgtgcagagcttccccgaggagcccagccaggtgcagctgaagggcgtgcagttccaggtgctgggccaggccttccacaagcacctgagcagcctgaccctggtgggcgccatgagagagagcttcatccagggctgcaccgtgagaaacagcttcagcagaggcctgagcatgtgcggcaccctgggcctgaaggtggacagcaacgtgttctacaacatcctgggccacgccctgctggtgggcacctgcaccgagatgagatacatcagctgggaggccatccacggcagaaaggacgactggagcggccacggcaacatcatcagaaacaacgtgatcatccaggtgagcggcgccgagggcctgagcaaccccgagatgctgacccccagcggcatctacatctgcagccccaccaacgtgatcgagggcaacagagtgtgcggcgccggctacggctacttcttccacctgatgaccaaccagaccagccaggcccccctgctgagcttcacccagaacatcgcccacagctgcaccagatacggcctgttcgtgtaccccaagttccagcccccctgggacaacgtgaccggcaccaccctgttccagagcttcaccgtgtgggagagcgccggcggcgcccagatcttcagaagcagcaacctgagactgaagaacttcaaggtgtacagctgcagagacttcggcatcgacgtgctggagagcgacgccaacaccagcgtgaccgacagcctgctgctgggccacttcgcccacaagggcagcctgtgcatgagcagcggcatcaagacccccaagagatgggagctgatggtgagcaacaccaccttcgtgaacttcgacctgatcaactgcgtggccatcagaacctgcagcgactgcagccagggccagggcggcttcaccgtgaagaccagccagctgaagttcaccaacagcagcaacctggtggccttccccttcccccacgccgccatcctggaggacctggacggcagcctgagcggcaagaacagaagccacatcctggccagcatggagaccctgagcgccagctgcctggtgaacagcagcttcggcagagtggtgcacggcagcgcctgcggcggcggcgtgctgttccacagaatgagcatcggcctggccaacacccccgaggtgagctacgacctgaccatgaccgacagcagaaacaagaccaccaccgtgaactacgtgagagacaccctgagcaaccccagaggctggatggccctgctgctggaccaggagacctacagcctgcagagcgagaacctgtggatcaacagaagcctgcagtacagcgccaccttcgacaacttcgcccccggcaactacctgctgctggtgcacaccgacctgcccccctaccccgacatcctgctgagatgcggcagcagagtgggcctgagcttccccttcctgcccagccccggccagaaccagggctgcgactggttcttcaacagccagctgagacagctgacctacctggtgagcggcgagggccaggtgcaggtgatcctgagagtgaaggagggcatgccccccaccatcagcgccagcaccagcgcccccgagagcgccctgaagtggagcctgcccgagacctggcagggcgtggaggagggctggggcggctacaacaacaccatccccggccccggcgacgacgtgctgatcctgcccaacagaaccgtgctggtggacaccgacctgcccttcttcaagggcctgtacgtgatgggcaccctggacttccccgtggacagaagcaacgtgctgagcgtggcctgcatggtgatcgccggcggcgagctgaaggtgggcaccctggagaaccccctggagaaggagcagaagctgctgatcctgctgagagccagcgagggcgtgttctgcgacagaatgaacggcatccacatcgaccccggcaccatcggcgtgtacggcaaggtgcacctgtacagcgcctaccccaagaacagctggacccacctgggcgccgacatcgccagcggcaacgagagaatcatcgtggaggacgccgtggactggagaccccacgacaagatcgtgctgagcagcagcagctacgagccccacgaggccgaggtgctgaccgtgaaggaggtgaagggccaccacgtgagaatctacgagagactgaagcacagacacatcggcagcgtgcacgtgaccgaggacggcagacacatcagactggccgccgaggtgggcctgctgaccagaaacatccagatccagcccgacgtgagctgcagaggcagactgttcgtgggcagcttcagaaagagcagcagagaggagttcagcggcgtgctgcagctgctgaacgtggagatccagaacttcggcagccccctgtacagcagcgtggagttcagcaacgtgagcgccggcagctggatcatcagcagcaccctgcaccagagctgcggcggcggcatccacgccgccgccagccacggcgtgctgctgaacgacaacatcgtgttcggcaccgccggccacggcatcgacctggagggccaggcctacaccgtgaccaacaacctggtggtgctgatgacccagcccgcctggagcaccatctgggtggccggcatcaaggtgaaccaggtgaaggacatcaacctgcacggcaacgtggtggccggcagcgagagactgggcttccacatcagaggccacaagtgcagcagctgcgagctgctgtggagcgacaacgtggcccacagcagcctgcacggcctgcacctgtacaaggagagcggcctggacaactgcaccagaatcagcggcttcctggccttcaagaacttcgactacggcgccatgctgcacgtggagaacagcgtggagatcgagaacatcaccctggtggacaacaccatcggcctgctggccgtggtgtacgtgttcagcgccccccagaacagcgtgaagaaggtgcagatcgtgctgagaaacagcgtgatcgtggccaccagcagcagcttcgactgcatccaggacaaggtgaagccccacagcgccaacctgaccagcaccgacagagcccccagcaaccccagaggcggcagaatcggcatcctgtggcccgtgttcaccagcgagcccaaccagtggccccaggagccctggcacaaggtgagaaacgaccacagcatcagcggcatcatgaagctgcaggacgtgaccttcagcagcttcgtgaagagctgctacagcgacgacctggacgtgtgcatcctgcccaacgccgagaacagcggcatcatgcaccccatcaccgccgagagaaccagaatgctgaagatcaaggacaagaacaagttctacttccccagcctgcagcccagaaaggacctgggcaaggtggtgtgccccgagctggactgcgccagccccagaaagtacctgttcaaggacctggacggcagagccctgggcctgcccccccccgtgagcgtgttccccaagaccgaggccgagtggaccgccagcttcttcaacgccggcaccaaggagcagagcatcgagatcaacgtgtag

SEQ ID NO: 93793 - DNA, 12732 bp, synthetic construct
  misc_feature 1..12732: note = Description of Artificial Sequence: Synthetic coding sequence
  source 1..12732: mol_type = other DNA
atgggccacctgtggctgctgggcatctggggcctgtgcggcctgctgctgtgcgccgccgaccccagcaccgacggcagccagatcatccccaaggtgaccgagatcatccccaagtacggcagcatcaacggcgccaccagactgaccatcagaggcgagggcttcagccaggccaaccagttcaactacggcgtggacaacgccgagctgggcaacagcgtgcagctgatcagcagcttccagagcatcacctgcgacgtggagaaggacgccagccacagcacccagatcacctgctacaccagagccatgcccgaggacagctacaccgtgagagtgagcgtggacggcgtgcccgtgaccgagaacaacacctgcaagggccacatcaacagctgggagtgcaccttcaacgccaagagcttcagaacccccaccatcagaagcatcacccccctgagcggcacccccggcaccctgatcaccatccagggcagaatcttcaccgacgtgtacggcagcaacatcgccctgagcagcaacggcaagaacgtgagaatcctgagagtgtacatcggcggcatgccctgcgagctgctgatcccccagagcgacaacctgtacggcctgaagctggaccaccccaacggcgacatgggcagcatggtgtgcaagaccaccggcaccttcatcggccaccacaacgtgagcttcatcctggacaacgactacggcagaagcttcccccagaagatggcctacttcgtgagcagcctgaacaagatcgccatgttccagacctacgccgaggtgaccatgatcttccccagccagggcagcatcagaggcggcaccaccctgaccatcagcggcagattcttcgaccagaccgacttccccgtgagagtgctggtgggcggcgagccctgcgacatcctgaacgtgaccgagaacagcatctgctgcaagaccccccccaagccccacatcctgaagaccgtgtaccccggcggcagaggcctgaagctggaggtgtggaacaacagcagacccatcagactggaggagatcctggagtacaacgagaagacccccggctacatgggcgccagctgggtggacagcgccagctacatctggctgatggagcaggacaccttcgtggccagattcagcggcttcctggtggcccccgacagcgacgtgtacagattctacatcaagggcgacgacagatacgccatctacttcagccagaccggcctgcccgaggacaaggtgagaatcgcctaccacagcgccaacgccaacagctacttcagcagccccacccagagaagcgacgacatccacctgcagaagggcaaggagtactacatcgagatcctgctgcaggagtacagactgagcgccttcgtggacgtgggcctgtaccagtacagaaacgtgtacaccgagcagcagaccggcgacgccgtgaacgaggagcaggtgatcaagagccagagcaccatcctgcaggaggtgcaggtgatcaccctggagaactgggagaccaccaacgccatcaacgaggtgcagaagatcaaggtgaccagcccctgcgtggaggccaacagctgcagcctgtaccagtacagactgatctacaacatggagaagaccgtgttcctgcccgccgacgccagcgagttcatcctgcagagcgccctgaacgacctgtggagcatcaagcccgacaccgtgcaggtgatcagaacccagaacccccagagctacgtgtacatggtgaccttcatcagcaccagaggcgacttcgacctgctgggctacgaggtggtggagggcaacaacgtgaccctggacatcaccgagcagaccaagggcaagcccaacctggagaccttcaccctgaactgggacggcatcgccagcaagcccctgaccctgtggagcagcgaggccgagttccagggcgccgtggaggagatggtgagcaccaagtgccccccccagatcgccaacttcgaggagggcttcgtggtgaagtacttcagagactacgagaccgacttcaacctggagcacatcaacagaggccagaagaccgccgagaccgacgcctactgcggcagatacagcctgaagaaccccgccgtgctgttcgacagcgccgacgtgaagcccaacagaagaccctacggcgacatcctgctgttcccctacaaccagctgtgcctggcctacaagggcttcctggccaactacatcggcctgaagttccagtaccaggacaacagcaagatcaccagaagcaccgacacccagttcacctacaacttcgcctacggcaacaactggacctacacctgcatcgacctgctggacctggtgagaaccaagtacaccggcaccaacgtgagcctgcagagaatcagcctgcacaaggccagcgagagccagagcttctacgtggacgtggtgtacatcggccacaccagcaccatcagcaccctggacgagatgcccaagagaagactgcccgccctggccaacaagggcatcttcctggagcacttccaggtgaaccagaccaagaccaacggccccaccatgaccaaccagtacagcgtgaccatgaccagctacaactgcagctacaacatccccatgatggccgtgagcttcggccagatcatcacccacgagaccgagaacgagttcgtgtacagaggcaacaactggcccggcgagagcaagatccacatccagagaatccaggccgccagcccccccctgagcggcagcttcgacatccaggcctacggccacatcctgaagggcctgcccgccgccgtgagcgccgccgacctgcagttcgccctgcagagcctggagggcatgggcagaatcagcgtgaccagagagggcacctgcgccggctacgcctggaacatcaagtggagaagcacctgcggcaagcagaacctgctgcagatcaacgacagcaacatcatcggcgagaaggccaacatgaccgtgaccagaatcaaggagggcggcctgttcagacagcacgtgctgggcgacctgctgagaacccccagccagcagccccaggtggaggtgtacgtgaacggcatccccgccaagtgcagcggcgactgcggcttcacctgggacagcaacatcacccccctggtgctggccatcagccccagccagggcagctacgaggagggcaccatcctgaccatcgtgggcagcggcttcagccccagcagcgccgtgaccgtgagcgtgggccccgtgggctgcagcctgctgagcgtggacgagaaggagctgaagtgccagatcctgaacggcagcgccggccacgcccccgtggccgtgagcatggccgacgtgggcctggcccagaacgtgggcggcgaggagttctacttcgtgtaccagagccagatcagccacatctggcccgacagcggcagcatcgccggcggcaccctgctgaccctgagcggcttcggcttcaacgagaacagcaaggtgctggtgggcaacgagacctgcaacgtgatcgagggcgacctgaacagaatcacctgcagaacccccaagaagaccgagggcaccgtggacatcagcgtgaccaccaacggcttccaggccaccgccagagacgccttcagctacaactgcctgcagacccccatcatcaccgacttcagccccaaggtgagaaccatcctgggcgaggtgaacctgaccatcaagggctacaacttcggcaacgagctgacccagaacatggccgtgtacgtgggcggcaagacctgccagatcctgcactggaacttcaccgacatcagatgcctgctgcccaagctgagccccggcaagcacgacatctacgtggaggtgagaaactggggcttcgccagcaccagagacaagctgaacagcagcatccagtacgtgctggaggtgaccagcatgttcccccagagaggcagcctgttcggcggcaccgagatcaccatcagaggcttcggcttcagcaccatccccgccgagaacaccgtgctgctgggcagcatcccctgcaacgtgaccagcagcagcgagaacgtgatcaagtgcatcctgcacagcaccggcaacatcttcagaatcaccaacaacggcaaggacagcgtgcacggcctgggctacgcctggagcccccccgtgctgaacgtgagcgtgggcgacaccgtggcctggcactggcagacccaccccttcctgagaggcatcggctacagaatcttcagcgtgagcagccccggcagcgtgatctacgacggcaagggcttcaccagcggcagacagaagagcaccagcggcagcttcagctaccagttcaccagccccggcatccactactacagcagcggctacgtggacgaggcccacagcatcttcctgcagggcgtgatcaacgtgctgcccgccgagaccagacacatccccctgcacctgttcgtgggcagaagcgaggccacctacgcctacggcggccccgagaacctgcacctgggcagcagcgtggccggctgcctggccaccgagcccctgtgcagcctgaacaacaccagagtgaagaacagcaagagactgctgttcgaggtgagcagctgcttcagccccagcatcagcaacatcacccccagcaccggcaccgtgaacgagctgatcaccatcatcggccacggcttcagcaacctgccctgggccaacaaggtgaccatcggcagctacccctgcgtggtggaggagagcagcgaggacagcatcacctgccacatcgacccccagaacagcatggacgtgggcatcagagagaccgtgaccctgaccgtgtacaacctgggcaccgccatcaacaccctgagcaacgagttcgacagaagattcgtgctgctgcccaacatcgacctggtgctgcccaacgccggcagcaccaccggcatgaccagcgtgaccatcaagggcagcggcttcgccgtgagcagcgccggcgtgaaggtgctgatgggccacttcccctgcaaggtgctgagcgtgaactacaccgccatcgagtgcgagaccagccccgccgcccagcagctggtggacgtggacctgctgatccacggcgtgcccgcccagtgccagggcaactgcaccttcagctacctggagagcatcaccccctacatcaccggcgtgttccccaacagcgtgatcggcagcgtgaaggtgctgatcgagggcgagggcctgggcaccgtgctggaggacatcgccgtgttcatcggcaaccagcagttcagagccatcgaggtgaacgagaacaacatcaccgccctggtgacccccctgcccgtgggccaccacagcgtgagcgtggtggtgggcagcaagggcctggccctgggcaacctgaccgtgagcagcccccccgtggccagcctgagccccaccagcggcagcatcggcggcggcaccaccctggtgatcaccggcaacggcttctaccccggcaacaccaccgtgaccatcggcgacgagccctgccagatcatcagcatcaaccccaacgaggtgtactgcagaacccccgccggcaccaccggcatggtggacgtgaagatcttcgtgaacaccatcgcctacccccccctgctgttcacctacgccctggaggacacccccttcctgagaggcatcatccccagcagaggcccccccggcaccgagatcgagatcaccggcagcaacttcggcttcgagatcctggagatcagcgtgatgatcaacaacatccagtgcaacgtgaccatggccaacgacagcgtggtgcagtgcatcgtgggcgaccacgccggcggcaccttccccgtgatgatgcaccacaagaccaagggcagcgccatgagcaccgtggtgttcgagtaccccctgaacatccagaacatcaaccccagccagggcagcttcggcggcggccagaccatgaccgtgaccggcaccggcttcaacccccagaacagcatcatcctggtgtgcggcagcgagtgcgccatcgacagactgagaagcgactacaccaccctgctgtgcgagatccccagcaacaacggcaccggcgccgagcaggcctgcgaggtgagcgtggtgaacggcaaggacctgagccagagcatgacccccttcacctacgccgtgagcctgacccccctgatcaccgccgtgagccccaagagaggcagcaccgccggcggcaccagactgaccgtggtgggcagcggcttcagcgagaacatggaggacgtgcacatcaccatcgccgaggccaagtgcgacgtggagtacagcaacaagacccacatcatctgcatgaccgacgcccacaccctgagcggctgggcccccgtgtgcgtgcacatcagaggcgtgggcatggccaagctggacaacgccgacttcctgtacgtggacgcctggagcagcaacttcagctggggcggcaagagcccccccgaggagggcagcctggtggtgatcaccaagggccagaccatcctgctggaccagagcacccccatcctgaagatgctgctgatccagggcggcaccctgatcttcgacgaggccgacatcgagctgcaggccgagaacatcctgatcaccgacggcggcgtgctgcagatcggcaccgagaccagccccttccagcacaaggccgtgatcaccctgcacggccacctgagaagccccgagctgcccgtgtacggcgccaagaccctggccgtgagagagggcatcctggacctgcacggcgtgcccgtgcccgtgacctggaccagactggcccacaccgccaaggccggcgagagaatcctgatcctgcaggaggccgtgacctggaagcccggcgacaacatcgtgatcgccagcaccggccacagacacagccagggcgagaacgagaagatgaccatcgccagcgtgagcgccgacggcatcaacatcaccctgagcaaccccctgaactacacccacctgggcatcaccgtgaccctgcccgacggcaccctgttcgaggccagagccgaggtgggcatcctgaccagaaacatcctgatcagaggcagcgacaacgtggagtggaacaacaagatccccgcctgccccgacggcttcgacaccggcgagttcgccacccagacctgcctgcagggcaagttcggcgaggagatcggcagcgaccagttcggcggctgcgtgatgttccacgcccccgtgcccggcgccaacatggtgaccggcagaatcgagtacgtggaggtgttccacgccggccaggccttcagactgggcagataccccatccactggcacctgctgggcgacctgcagttcaagagctacgtgagaggctgcgccatccaccaggcctacaacagagccgtgaccatccacaacacccaccacctgctggtggagagaaacatcatctacgacatcaagggcggcgccttcttcatcgaggacggcatcgagcacggcaacatcctgcagtacaacctggccgtgttcgtgcagcagagcaccagcctgctgaacgacgacgtgacccccgccgccttctgggtgaccaaccccaacaacaccatcagacacaacgccgtggccggcggcacccacttcggcttctggtacagaatgaacaaccaccccgacggccccagctacgacagaaacatctgccagaagagagtgcccctgggcgagttcttcaacaacaccgtgcacagccagggctggttcggcatgtggatcttcgaggagtacttccccatgcagaccggcagctgcaccagcaccgtgcccgcccccgccatcttcaacagcctgaccacctggaactgccagaagggcgccgagtgggtgaacggcggcgccctgcagttccacaacttcgtgatggtgaacaactacgaggccggcatcgagaccaagagaatcctggccccctacgtgggcggctggggcgagaccaacggcgccgtgatcaagaacgccaagatcgtgggccacctggacgagctgggcatgggcagcgccttctgcaccgccaagggcctggtgctgcccttcagcgagggcctgaccgtgagcagcgtgcacttcatgaacttcgacagacccaactgcgtggccctgggcgtgaccagcatcagcggcgtgtgcaacgacagatgcggcggctggagcgccaagttcgtggacgtgcagtacagccacacccccaacaaggccggcttcagatgggagcacgagatggtgatgatcgacgtggacggcagcctgaccggccacaagggccacaccgtgatcccccacagcagcctgctggaccccagccactgcacccaggaggccgagtggagcatcggcttccccggcagcgtgtgcgacgccagcgtgagcttccacagactggccttcaaccagcccagccccgtgagcctgctggagaaggacgtggtgctgagcgacagcttcggcaccagcatcatccccttccagaagaagagactgacccacatgagcggctggatggccctgatccccaacgccaaccacatcaactggtacttcaagggcgtggaccacatcaccaacatcagctacaccagcaccttctacggcttcaaggaggaggactacgtgatcatcagccacaacttcacccagaaccccgacatgttcaacatcatcgacatgagaaacggcagcagcaaccccctgaactggaacaccagcaagaacggcgactggcacctggaggccaacaccagcaccctgtactacctggtgagcggcagaaacgacctgcaccagagccagctgatcagcggcaacctggaccccgacgtgaaggacgtggtgatcaacttccaggcctactgctgcatcctgcaggactgcttccccgtgcacccccccagcagaaagcccatccccaagaagagacccgccacctacaacctgtggagcaacgacagcttctggcagagcagcagagagaacaactacaccgtgccccaccccggcgccaacgtgatcatccccgagggcacctggatcgtggccgacatcgacatgcccagcatggagagactgatcatctggggcgtgctggagctggaggacaagtacaacgtgggcgccgccgagagcagctacagagaggtggtgctgaacgccacctacatcagcctgcagggcggcagactgatcggcggctgggaggacaaccccttcaagggcgacctgaagatcgtgctgagaggcaaccacaccacccaggactgggccctgcccgagggccccaaccagggcgccaaggtgctgggcgtgttcggcgagctggacctgcacggcatcccccacagcatctacaagaccaagctgagcgagaccgccttcgccggcagcaaggtgctgagcctgatggacgccgtggactggcaggagggcgaggagatcgtgatcaccaccaccagctacgacttccaccagaccgagaccagaagcatcgtgaagatcctgcacgaccacaagatcctgatcctgaacgacagcctgagctacacccacttcgccgagaagtaccacgtgcccggcaccggcgagagctacaccctggccgccgacgtgggcatcctgagcagaaacatcaagatcgtgggcgaggactaccccggctggagcgaggacagcttcggcgccagagtgctggtgggcagcttcaccgagaacatgatgaccttcaagggcaacgccagaatcagcaacgtggagttctaccacagcggccaggagggcttcagagacagcaccgaccccagatacgccgtgaccttcctgaacctgggccagatccaggagcacggcagcagctacatcagaggctgcgccttccaccacggcttcagccccgccatcggcgtgttcggcaccgacggcctggacatcgacgacaacatcatccacttcaccgtgggcgagggcatcagaatctggggcaacgccaacagagtgagaggcaacctgatcgccctgagcgtgtggcccggcacctaccagaacagaaaggacctgagcagcaccctgtggcacgccgccatcgagatcaacagaggcaccaacaccgtgctgcagaacaacgtggtggccggcttcggcagagccggctacagaatcgacggcgagccctgccccggccagttcaaccccgtggagaagtggttcgacaacgaggcccacggcggcctgtacggcatctacatgaaccaggacggcctgcccggctgcagcctgatccagggcttcaccatctggacctgctgggactacggcatctacttccagaccaccgagagcgtgcacatctacaacgtgaccctggtggacaacggcatggccatcttccccatgatctacatgcccgccgccatcagccacaagatcagcagcaagaacgtgcagatcaagagcagcctgatcgtgggcagcagccccggcttcaactgcagcgacgtgctgaccaacgacgaccccaacatcgagctgaccgccgcccacagaagccccagaagccccagcggcggcagaagcggcatctgctggcccaccttcgccagcgcccacaacatggcccccagaaagccccacgccggcatcatgagctacaacgccatcagcggcctgctggacatcagcggcagcaccttcgtgggcttcaagaacgtgtgcagcggcgagaccaacgtgatcttcatcaccaaccccctgaacgaggacctgcagcaccccatccacgtgaagaacatcaagctggtggacaccaccgagcagagcaagatcttcatccacagacccgacatcagcaaggtgaaccccagcgactgcgtggacatggtgtgcgacgccaagagaaagagcttcctgagagacatcgacggcagcttcctgggcaacgccggcagcgtgatcccccaggccgagtacgagtgggacggcaacagccaggtgggcatcggcgactacagaatccccaaggccatgctgaccttcctgaacggcagcagaatccccgtgaccgagaaggccccccacaagggcatcatcagagacagcacctgcaagtacctgcccgagtggcagagctaccagtgcttcggcatggagtacgccatgatggtgatcgagagcctggaccccgacaccgagaccagaagactgagccccgtggccatcatgggcaacggctacgtggacctgatcaacggcccccaggaccacggctggtgcgccggctacacctgccagagaagactgagcctgttccacagcatcgtggccctgaacaagagctacgaggtgtacttcaccggcaccagcccccagaacctgagactgatgctgctgaacgtggaccacaacaaggccgtgctggtgggcatcttcttcagcaccctgcagagactggacgtgtacgtgaacaacctgctggtgtgccccaagaccaccatctggaacgcccagcagaagcactgcgagctgaacaaccacctgtacaaggaccagttcctgcccaacctggacagcaccgtgctgggcgagaactacttcgacggcacctaccagatgctgtacctgctggtgaagggcaccatccccgtggagatccacaccgccaccgtgatcttcgtgagcttccagctgagcgtggccaccgaggacgacttctacaccagccacaacctggtgaagaacctggccctgttcctgaagatccccagcgacaagatcagaatcagcaagatcagaggcaagagcctgagaagaaagagaagcatgggcttcatcatcgagatcgagatcggcgacccccccatccagttcatcagcaacggcaccaccggccagatgcagctgagcgagctgcaggagatcgccggcagcctgggccaggccgtgatcctgggcaacatcagcagcatcctgggcttcaacatcagcagcatgagcatcaccaaccccctgcccagccccagcgacagcggctggatcaaggtgaccgcccagcccgtggagagaagcgccttccccgtgcaccacgtggccttcgtgagcagcctgctggtgatcacccagcccgtggccgcccagcccggccagcccttcccccagcagcccagcgtgaaggccaccgacagcgacggcaactgcgtgagcgtgggcatcaccgccctgaccctgagagccatcctgaaggacagcaacaacaaccaggtgaacggcctgagcggcaacaccaccatccccttcagcagctgctgggccaactacaccgacctgacccccctgagaaccggcaagaactacaagatcgagttcatcctggacaacgtggtgggcgtggagagcagaaccttcagcctgctggccgagagcgtgagcagcagcggcagcagcagcagcagcaacagcaaggccagcaccgtgggcacctacgcccagatcatgaccgtggtgatcagctgcctggtgggcagaatgtggctgctggagatcttcatggccgccgtgagcaccctgaacatcaccctgagaagctactag

SEQ ID NO: 93794 - DNA, 6762 bp, synthetic construct
  misc_feature 1..6762: note = Description of Artificial Sequence: Synthetic coding sequence
  source 1..6762: mol_type = other DNA
atgagacccggccccgccctgctgctgctgggcgtgggcctgagcctgagcgtgggcagactgcccctgccccccgtgcccagaggcgcccaggccgccgtgagcggcgcccccggcggcctgctgagaggcgcccccggcctgggcgtgagaggcggcagagccctgctgagcctgagacccagcgccgtgagagccggcggcgccgtgctgagcggcagaggcagcctgtgcttcccccacggcggcaccggcagaagatggtactgcctggacctgagagtgctgctgagcgcccagagactgccctggcccgccgcccccgccctggccctggtggacctgcagctgagcgccagaggcggcagactgagcctgacctggagcgtgagactgcccagaagccccggcagactggcctgggccttcagactgagactgctgggccccggcgccgccagacccgccagccccgccgccagagtgagccccagaagcgccgcccccggccccagaccccagcagggcttcgtggccagaaccgagtgccccaccgacggccccgccagagtgatgctgcaggccgtgaacagcagcagccacagagccgtggagagcagcgtgagctgccagatcaacgcctgcgtgatccagagagtgagaatcaacaccgaccagaagggcgcccccgtgagactgagcatgcaggccgaggccaccatcaacgccagcgtgcagctggactgccccgccgccagagccatcgcccagtactggcaggtgttcagcgtgcccgccgtgggccaggcccccgactggacccagcccctggacctgccccagctggagatcagaaacagccccctgttcatccacatccccaacaacagcctgcagtggggcgtgtacgtgttcaacttcaccgtgagcatcaccaccggcaaccccaagatgcccgaggtgaaggacagcgacgccgtgtacgtgtggatcgtgagaagcagcctgcaggccgtgatgctgggcgacgccaacatcaccgccaacttcaccgagcagctgatcctggacggcagcaccagcagcgaccccgacgccgacagccccctgcagggcctgcagttcttctggtactgcaccaccgaccccagaaactacggcggcgacagaatcatcctgggcagcaaggaggtgtgccaccccgagcaggccaacctgaagtggccctgggccagcggccccgtgctgaccctgctgcccgagaccctgaagggcgaccacgtgtacttcttcagaatggtgatcagaaaggacagcagaaccgccttcagcgacaagagagtgcacgtgctgcagggccccaaggccatcgcccacatcacctgcatcgagaactgcgagagaaacttcatcgtgagcgacagattcagcctgttcctgaactgcaccaactgcgccagcagagacttctacaagtggagcatcctgagcagcagcggcggcgagatgctgttcgactggatgggcgagaccgtgaccggcagaaacggcgcctacctgagcatcaaggccttcgccttcagacacttcctggaggccgagttcagcatcagcctgtacctggcctgctggagcggcgtgaccagcgtgttcagacacagcttcatcatcaaccacggcccccagatcggcgagtgcaagatcaaccccgccaagggcatcgccctgatcaccaagttcgtggtgcagtgcagcaacttcagagacaagcacgtgcccctgacctacaagatcatcgtgagcgacctgcacagcgtgggcgagatcagcagcgtgaaggagaacaccctgggcaccatcctgtacctgggcccccagagcaccgtgccccccagcttcctgcccgtgggcatgctggccagccagtacggcctgaagatctacgcccaggtgtacgacagcctgggcgccttcagccaggtgaccctgcacgccaccgcccaggcccccaccgacaagaacagcagcaagaccgtgctgaaccagctgctgagcttcaccgtgggccccagcagcctgctgagcaccctgatccagaagaaggacttcctgcccgccggctacctgctgtacatcgtggccagcgtgctgaacaacatgaagaccgagctgcccctgagagacgacagagtgaacctgagaaagcacctgatcgaccagagcttcctgctgcccgtgagcaccctggtggagatcggccaggtggtgatgaccatcaccaagctgacccagaagcccagcgagttcacctgggacgcccagaagagagccaccatgagagtgtggcaggccaaccaggccctgcaggagtaccagcagaaggacaagagattcagaagcgagcagatcgagatcgtgagcaccggcatcctgatgagcctgagcaacatcctgaagatgaccagcccccaccaggtggtgaaggaccccttctacgtgatcgagagcctgagcgacaccatcctggccaacaaggtgcccggcaacaagaccaccagcatgagaacccccaacttcaacatgtacgtgaagaaggtggagaagtggggcatcaaccagctgttcagaaacgagaagcactgcagaaactgcttctaccccaccctgaacgtgagcagcgtgcccggcctgagcgccaacggccccatcagcaccatgttctgcgacttcaccaacgacctgttcccctggctgaacgaccaggagaacaccagcgtggaggtgagcggcttcagaatgaccggcgtggccgacaacggcagcgtgctggagatcacccccgacgtggccgaggtgtacctggtgagaaagaacctgaccttcgccgccttcaacctgaccgtgggccccaacagcgaggtggacggcagcctgaagaagaccaccggcggcttcagcttccaggtggacagcaccgtgctgagagaggtgctggtgcacatcgtgaccgaggtgatggtgctgttcaccgtgctggtgtacaccggcagccagatcacccccaccgccctggtggccaccttcctggtgccccacgacatcccccccttcgccagccagagcgccctgttcgaccccgcctgcaccgtgaagaaggccagagtggtgtgcctgcccgtgagcctgctgcagctgatcgcccagcacagccacagcccccactgcaccgtgagcatcgtgctgcaggcccccagattcgtgatgaagctgaacgacaagctggtgagaatcagcatcttcagcgtgcagtgcctggacatgtacggcatccagagcgagtggagagagggctactgcatcctgggcgagaagaccagctggtacgaggtgcactgcatctgcaagaacgtggtgagagccagaagacagctgggcaccatcggcctgaccggcatccacctgcacacccactacgtgatggccaaggtgatcgtgatccccaaccccgtggacctgagactgaacatcatcaagagcctgcaccagaaccccgtgaccctgttcaccgtgctgttcatcatcctgctgtacgtgggcctggccttctgggccctgtacagagacgagatggaccagcacctgagaggccacgtgatcgtgctgcccgacaacgacccctacgacaacctgtgctacctggtgaccatcttcaccggcagcagatggggcagcggcaccagagccaacgtgttcgtgcagctgagaggcaccgtgagcaccagcgacgtgcactgcctgagccacccccacttcaccaccctgtacagaggcagcatcaacaccttcctgctgaccaccaagagcgacctgggcgacatccacagcatcagagtgtggcacaacaacgagggcagaagccccagctggtacctgagcagaatcaaggtggagaacctgttcagcagacacatctggctgttcatctgccagaagtggctgagcgtggacaccaccctggacagaaccttccacgtgacccaccccgacgagagactgaccagaaaggacttcttcttcatcgacgtgagcagcaacctgagaaagaaccacatgtggttcagcatcttcgccagcgtggtggccaagaccttcaacagactgcagagactgagctgctgcctggccatgctgctgagcagcctgctgtgcaacatcatgttcttcaacctgaacagacaggagcagaccgagagcagagagagaaagtacatgagaagcatgatgatcggcatcgagagcgtgctgatcaccatccccgtgcagctgctgatcaccttcctgttcacctgcagccagagaaagccccaggccgacctgaaggaggtgagcccccagaagcaccccctgatgagcgaggccagcgagcactgggaggagtacctgagaaagtggcacgcctacgagaccgccaaggtgcaccccagagaggtggccaagcccgccagcaagggcaagcccagactgcccaaggccagccccaaggccaccagcaagcccaagcacagacacagaaaggcccagatcaagacccccgagaccctgggccccaacaccaacagcaacaacaacatcgaggacgaccaggacgtgcacagcgagcagcaccccagccagaaggacctgcagcagctgaagaagaagcccagaatcgtgctgccctggtggtgcgtgtacgtggcctggttcctggtgttcgccaccagcagcatcagcagcttcttcatcgtgttctacggcctgacctacggctacgacaagagcatcgagtggctgttcgccagcttctgcagcttctgccagagcgtgctgctggtgcagcccagcaagatcatcctgctgagcggcttcagaaccaacaagcccaagtactgcaagaacctgagctggagcaccaagtacaagtacaccgagatcagactggacggcatgagaatgcaccccgaggagatgcagagaatccacgaccagatcgtgagaatcagaggcaccagaatgtaccagcccctgaccgaggacgagatcagaatcttcaagagaaagaagagaatcaagagaagagccctgctgttcctgagctacatcctgacccacttcatcttcctggccctgctgctgatcctgatcgtgctgctgagacacaccgactgcttctactacaaccagttcatcagagacagattcagcatggacctggccaccgtgaccaagctggaggacatctacagatggctgaacagcgtgctgctgcccctgctgcacaacgacctgaaccccaccttcctgcccgagagcagcagcaagatcctgggcctgcccctgatgagacaggtgagagccaagagcagcgagaagatgtgcctgcccgccgagaagttcgtgcagaacagcatcagaagagagatccactgccaccccaagtacggcatcgaccccgaggacaccaagaactacagcggcttctggaacgaggtggacaagcaggccatcgacgagagcaccaacggcttcacctacaagccccagggcacccagtggctgtactacagctacggcctgctgcacacctacggcagcggcggctacgccctgtacttcttccccgagcagcagagattcaacagcaccctgagactgaaggagctgcaggagagcaactggctggacgagaagacctgggccgtggtgctggagctgaccaccttcaaccccgacatcaacctgttctgcagcatcagcgtgatcttcgaggtgagccagctgggcgtggtgaacaccagcatcagcctgcacagcttcagcctggccgacttcgacagaaaggccagcgccgagatctacctgtacgtggccatcctgatcttcttcctggcctacgtggtggacgagggctgcatcatcatgcaggagagagccagctacgtgagaagcgtgtacaacctgctgaacttcgccctgaagtgcatcttcaccgtgctgatcgtgctgttcctgagaaagcacttcctggccaccggcatcatcagattctacctgagcaaccccgaggacttcatccccttccacgccgtgagccaggtggaccacatcatgagaatcatcctgggcttcctgctgttcctgaccatcctgaagaccctgagatacagcagattcttctacgacgtgagactggcccagagagccatccaggccgccctgcccggcatctgccacatggccttcgtggtgagcgtgtacttcttcgtgtacatggccttcggctacctggtgttcggccagcacgagtggaactacagcaacctgatccacagcacccagaccgtgttcagctactgcgtgagcgccttccagaacaccgagttcagcaacaacagaatcctgggcgtgctgttcctgagcagcttcatgctggtgatgatctgcgtgctgatcaacctgttccaggccgtgatcctgagcgcctacgaggagatgaagcagcccgtgtacgaggagcccagcgacgaggtggaggccatgacctacctgtgcagaaagctgagaaccatgttcagcttcctgaccagccagagcaaggccaaggacgagcccgagttcttcatcgacatgctgtacggccagcccgagaagaacagccacagatacctgggcctgaagaccagaaacatcaacggcaagaagatggtgtacctggtggtgtag

SEQ ID NO: 93795 - DNA, 12912 bp, synthetic construct
  misc_feature 1..12912: note = Description of Artificial Sequence: Synthetic coding sequence
  source 1..12912: mol_type = other DNA
atgccccccgccgcccccgccagactggccctggccctgggcctgggcctgtggctgggcgccctggccggcggccccggcagaggctgcggcccctgcgagcccccctgcctgtgcggccccgcccccggcgccgcctgcagagtgaactgcagcggcagaggcctgagaaccctgggccccgccctgagaatccccgccgacgccaccgccctggacgtgagccacaacctgctgagagccctggacgtgggcctgctggccaacctgagcgccctggccgagctggacatcagcaacaacaagatcagcaccctggaggagggcatcttcgccaacctgttcaacctgagcgagatcaacctgagcggcaaccccttcgagtgcgactgcggcctggcctggctgcccagatgggccgaggagcagcaggtgagagtggtgcagcccgaggccgccacctgcgccggccccggcagcctggccggccagcccctgctgggcatccccctgctggacagcggctgcggcgaggagtacgtggcctgcctgcccgacaacagcagcggcaccgtggccgccgtgagcttcagcgccgcccacgagggcctgctgcagcccgaggcctgcagcgccttctgcttcagcaccggccagggcctggccgccctgagcgagcagggctggtgcctgtgcggcgccgcccagcccagcagcgccagcttcgcctgcctgagcctgtgcagcggccccccccccccccccgcccccacctgcagaggccccaccctgctgcagcacgtgttccccgccagccccggcgccaccctggtgggcccccacggccccctggccagcggccagctggccgccttccacatcgccgcccccctgcccgtgaccgccaccagatgggacttcggcgacggcagcgccgaggtggacgccgccggccccgccgccagccacagatacgtgctgcccggcagataccacgtgaccgccgtgctggccctgggcgccggcagcgccctgctgggcaccgacgtgcaggtggaggccgcccccgccgccctggagctggtgtgccccagcagcgtgcagagcgacgagagcctggacctgagcatccagaacagaggcggcagcggcctggaggccgcctacagcatcgtggccctgggcgaggagcccgccagagccgtgcaccccctgtgccccagcgacaccgagatcttccccggcaacggccactgctacagactggtggtggagaaggccgcctggctgcaggcccaggagcagtgccaggcctgggccggcgccgccctggccatggtggacagccccgccgtgcagagattcctggtgagcagagtgaccagaagcctggacgtgtggatcggcttcagcaccgtgcagggcgtggaggtgggccccgccccccagggcgaggccttcagcctggagagctgccagaactggctgcccggcgagccccaccccgccaccgccgagcactgcgtgagactgggccccaccggctggtgcaacaccgacctgtgcagcgccccccacagctacgtgtgcgagctgcagcccggcggccccgtgcaggacgccgagaacctgctggtgggcgcccccagcggcgacctgcagggccccctgacccccctggcccagcaggacggcctgagcgccccccacgagcccgtggaggtgatggtgttccccggcctgagactgagcagagaggccttcctgaccaccgccgagttcggcacccaggagctgagaagacccgcccagctgagactgcaggtgtacagactgctgagcaccgccggcacccccgagaacggcagcgagcccgagagcagaagccccgacaacagaacccagctggcccccgcctgcatgcccggcggcagatggtgccccggcgccaacatctgcctgcccctggacgccagctgccacccccaggcctgcgccaacggctgcaccagcggccccggcctgcccggcgccccctacgccctgtggagagagttcctgttcagcgtgcccgccggcccccccgcccagtacagcgtgaccctgcacggccaggacgtgctgatgctgcccggcgacctggtgggcctgcagcacgacgccggccccggcgccctgctgcactgcagccccgcccccggccaccccggccccagagccccctacctgagcgccaacgccagcagctggctgccccacctgcccgcccagctggagggcacctgggcctgccccgcctgcgccctgagactgctggccgccaccgagcagctgaccgtgctgctgggcctgagacccaaccccggcctgagactgcccggcagatacgaggtgagagccgaggtgggcaacggcgtgagcagacacaacctgagctgcagcttcgacgtggtgagccccgtggccggcctgagagtgatctaccccgcccccagagacggcagactgtacgtgcccaccaacggcagcgccctggtgctgcaggtggacagcggcgccaacgccaccgccaccgccagatggcccggcggcagcgtgagcgccagattcgagaacgtgtgccccgccctggtggccaccttcgtgcccggctgcccctgggagaccaacgacaccctgttcagcgtggtggccctgccctggctgagcgagggcgagcacgtggtggacgtggtggtggagaacagcgccagcagagccaacctgagcctgagagtgaccgccgaggagcccatctgcggcctgagagccacccccagccccgaggccagagtgctgcagggcgtgctggtgagatacagccccgtggtggaggccggcagcgacatggtgttcagatggaccatcaacgacaagcagagcctgaccttccagaacgtggtgttcaacgtgatctaccagagcgccgccgtgttcaagctgagcctgaccgccagcaaccacgtgagcaacgtgaccgtgaactacaacgtgaccgtggagagaatgaacagaatgcagggcctgcaggtgagcaccgtgcccgccgtgctgagccccaacgccaccctggccctgaccgccggcgtgctggtggacagcgccgtggaggtggccttcctgtggaccttcggcgacggcgagcaggccctgcaccagttccagcccccctacaacgagagcttccccgtgcccgaccccagcgtggcccaggtgctggtggagcacaacgtgatgcacacctacgccgcccccggcgagtacctgctgaccgtgctggccagcaacgccttcgagaacctgacccagcaggtgcccgtgagcgtgagagccagcctgcccagcgtggccgtgggcgtgagcgacggcgtgctggtggccggcagacccgtgaccttctacccccaccccctgcccagccccggcggcgtgctgtacacctgggacttcggcgacggcagccccgtgctgacccagagccagcccgccgccaaccacacctacgccagcagaggcacctaccacgtgagactggaggtgaacaacaccgtgagcggcgccgccgcccaggccgacgtgagagtgttcgaggagctgagaggcctgagcgtggacatgagcctggccgtggagcagggcgcccccgtggtggtgagcgccgccgtgcagaccggcgacaacatcacctggaccttcgacatgggcgacggcaccgtgctgagcggccccgaggccaccgtggagcacgtgtacctgagagcccagaactgcaccgtgaccgtgggcgccgccagccccgccggccacctggccagaagcctgcacgtgctggtgttcgtgctggaggtgctgagagtggagcccgccgcctgcatccccacccagcccgacgccagactgaccgcctacgtgaccggcaaccccgcccactacctgttcgactggaccttcggcgacggcagcagcaacaccaccgtgagaggctgccccaccgtgacccacaacttcaccagaagcggcaccttccccctggccctggtgctgagcagcagagtgaacagagcccactacttcaccagcatctgcgtggagcccgaggtgggcaacgtgaccctgcagcccgagagacagttcgtgcagctgggcgacgaggcctggctggtggcctgcgcctggccccccttcccctacagatacacctgggacttcggcaccgaggaggccgcccccaccagagccagaggccccgaggtgaccttcatctacagagaccccggcagctacctggtgaccgtgaccgccagcaacaacatcagcgccgccaacgacagcgccctggtggaggtgcaggagcccgtgctggtgaccagcatcaaggtgaacggcagcctgggcctggagctgcagcagccctacctgttcagcgccgtgggcagaggcagacccgccagctacctgtgggacctgggcgacggcggctggctggagggccccgaggtgacccacgcctacaacagcaccggcgacttcaccgtgagagtggccggctggaacgaggtgagcagaagcgaggcctggctgaacgtgaccgtgaagagaagagtgagaggcctggtggtgaacgccagcagaaccgtggtgcccctgaacggcagcgtgagcttcagcaccagcctggaggccggcagcgacgtgagatacagctgggtgctgtgcgacagatgcacccccatccccggcggccccaccatcagctacaccttcagaagcgtgggcaccttcaacatcatcgtgaccgccgagaacgaggtgggcagcgcccaggacagcatcttcgtgtacgtgctgcagctgatcgagggcctgcaggtggtgggcggcggcagatacttccccaccaaccacaccgtgcagctgcaggccgtggtgagagacggcaccaacgtgagctacagctggaccgcctggagagacagaggccccgccctggccggcagcggcaagggcttcagcctgaccgtgctggaggccggcacctaccacgtgcagctgagagccaccaacatgctgggcagcgcctgggccgactgcaccatggacttcgtggagcccgtgggctggctgatggtggccgccagccccaaccccgccgccgtgaacaccagcgtgaccctgagcgccgagctggccggcggcagcggcgtggtgtacacctggagcctggaggagggcctgagctgggagaccagcgagcccttcaccacccacagcttccccacccccggcctgcacctggtgaccatgaccgccggcaaccccctgggcagcgccaacgccaccgtggaggtggacgtgcaggtgcccgtgagcggcctgagcatcagagccagcgagcccggcggcagcttcgtggccgccggcagcagcgtgcccttctggggccagctggccaccggcaccaacgtgagctggtgctgggccgtgcccggcggcagcagcaagagaggcccccacgtgaccatggtgttccccgacgccggcaccttcagcatcagactgaacgccagcaacgccgtgagctgggtgagcgccacctacaacctgaccgccgaggagcccatcgtgggcctggtgctgtgggccagcagcaaggtggtggcccccggccagctggtgcacttccagatcctgctggccgccggcagcgccgtgaccttcagactgcaggtgggcggcgccaaccccgaggtgctgcccggccccagattcagccacagcttccccagagtgggcgaccacgtggtgagcgtgagaggcaagaaccacgtgagctgggcccaggcccaggtgagaatcgtggtgctggaggccgtgagcggcctgcaggtgcccaactgctgcgagcccggcatcgccaccggcaccgagagaaacttcaccgccagagtgcagagaggcagcagagtggcctacgcctggtacttcagcctgcagaaggtgcagggcgacagcctggtgatcctgagcggcagagacgtgacctacacccccgtggccgccggcctgctggagatccaggtgagagccttcaacgccctgggcagcgagaacagaaccctggtgctggaggtgcaggacgccgtgcagtacgtggccctgcagagcggcccctgcttcaccaacagaagcgcccagttcgaggccgccaccagccccagccccagaagagtggcctaccactgggacttcggcgacggcagccccggccaggacaccgacgagcccagagccgagcacagctacctgagacccggcgactacagagtgcaggtgaacgccagcaacctggtgagcttcttcgtggcccaggccaccgtgaccgtgcaggtgctggcctgcagagagcccgaggtggacgtggtgctgcccctgcaggtgctgatgagaagaagccagagaaactacctggaggcccacgtggacctgagagactgcgtgacctaccagaccgagtacagatgggaggtgtacagaaccgccagctgccagagacccggcagacccgccagagtggccctgcccggcgtggacgtgagcagacccagactggtgctgcccagactggccctgcccgtgggccactactgcttcgtgttcgtggtgagcttcggcgacacccccctgacccagagcatccaggccaacgtgaccgtggcccccgagagactggtgcccatcatcgagggcggcagctacagagtgtggagcgacaccagagacctggtgctggacggcagcgagagctacgaccccaacctggaggacggcgaccagacccccctgagcttccactgggcctgcgtggccagcacccagagagaggccggcggctgcgccctgaacttcggccccagaggcagcagcaccgtgaccatccccagagagagactggccgccggcgtggagtacaccttcagcctgaccgtgtggaaggccggcagaaaggaggaggccaccaaccagaccgtgctgatcagaagcggcagagtgcccatcgtgagcctggagtgcgtgagctgcaaggcccaggccgtgtacgaggtgagcagaagcagctacgtgtacctggagggcagatgcctgaactgcagcagcggcagcaagagaggcagatgggccgccagaaccttcagcaacaagaccctggtgctggacgagaccaccaccagcaccggcagcgccggcatgagactggtgctgagaagaggcgtgctgagagacggcgagggctacaccttcaccctgaccgtgctgggcagaagcggcgaggaggagggctgcgccagcatcagactgagccccaacagaccccccctgggcggcagctgcagactgttccccctgggcgccgtgcacgccctgaccaccaaggtgcacttcgagtgcaccggctggcacgacgccgaggacgccggcgcccccctggtgtacgccctgctgctgagaagatgcagacagggccactgcgaggagttctgcgtgtacaagggcagcctgagcagctacggcgccgtgctgccccccggcttcagaccccacttcgaggtgggcctggccgtggtggtgcaggaccagctgggcgccgccgtggtggccctgaacagaagcctggccatcaccctgcccgagcccaacggcagcgccaccggcctgaccgtgtggctgcacggcctgaccgccagcgtgctgcccggcctgctgagacaggccgacccccagcacgtgatcgagtacagcctggccctggtgaccgtgctgaacgagtacgagagagccctggacgtggccgccgagcccaagcacgagagacagcacagagcccagatcagaaagaacatcaccgagaccctggtgagcctgagagtgcacaccgtggacgacatccagcagatcgccgccgccctggcccagtgcatgggccccagcagagagctggtgtgcagaagctgcctgaagcagaccctgcacaagctggaggccatgatgctgatcctgcaggccgagaccaccgccggcaccgtgacccccaccgccatcggcgacagcatcctgaacatcaccggcgacctgatccacctggccagcagcgacgtgagagccccccagcccagcgagctgggcgccgagagccccagcagaatggtggccagccaggcctacaacctgaccagcgccctgatgagaatcctgatgagaagcagagtgctgaacgaggagcccctgaccctggccggcgaggagatcgtggcccagggcaagagaagcgaccccagaagcctgctgtgctacggcggcgcccccggccccggctgccacttcagcatccccgaggccttcagcggcgccctggccaacctgagcgacgtggtgcagctgatcttcctggtggacagcaaccccttccccttcggctacatcagcaactacaccgtgagcaccaaggtggccagcatggccttccagacccaggccggcgcccagatccccatcgagagactggccagcgagagagccatcaccgtgaaggtgcccaacaacagcgactgggccgccagaggccacagaagcagcgccaacagcgccaacagcgtggtggtgcagccccaggccagcgtgggcgccgtggtgaccctggacagcagcaaccccgccgccggcctgcacctgcagctgaactacaccctgctggacggccactacctgagcgaggagcccgagccctacctggccgtgtacctgcacagcgagcccagacccaacgagcacaactgcagcgccagcagaagaatcagacccgagagcctgcagggcgccgaccacagaccctacaccttcttcatcagccccggcagcagagaccccgccggcagctaccacctgaacctgagcagccacttcagatggagcgccctgcaggtgagcgtgggcctgtacaccagcctgtgccagtacttcagcgaggaggacatggtgtggagaaccgagggcctgctgcccctggaggagaccagccccagacaggccgtgtgcctgaccagacacctgaccgccttcggcgccagcctgttcgtgccccccagccacgtgagattcgtgttccccgagcccaccgccgacgtgaactacatcgtgatgctgacctgcgccgtgtgcctggtgacctacatggtgatggccgccatcctgcacaagctggaccagctggacgccagcagaggcagagccatccccttctgcggccagagaggcagattcaagtacgagatcctggtgaagaccggctggggcagaggcagcggcaccaccgcccacgtgggcatcatgctgtacggcgtggacagcagaagcggccacagacacctggacggcgacagagccttccacagaaacagcctggacatcttcagaatcgccaccccccacagcctgggcagcgtgtggaagatcagagtgtggcacgacaacaagggcctgagccccgcctggttcctgcagcacgtgatcgtgagagacctgcagaccgccagaagcgccttcttcctggtgaacgactggctgagcgtggagaccgaggccaacggcggcctggtggagaaggaggtgctggccgccagcgacgccgccctgctgagattcagaagactgctggtggccgagctgcagagaggcttcttcgacaagcacatctggctgagcatctgggacagaccccccagaagcagattcaccagaatccagagagccacctgctgcgtgctgctgatctgcctgttcctgggcgccaacgccgtgtggtacggcgccgtgggcgacagcgcctacagcaccggccacgtgagcagactgagccccctgagcgtggacaccgtggccgtgggcctggtgagcagcgtggtggtgtaccccgtgtacctggccatcctgttcctgttcagaatgagcagaagcaaggtggccggcagccccagccccacccccgccggccagcaggtgctggacatcgacagctgcctggacagcagcgtgctggacagcagcttcctgaccttcagcggcctgcacgccgagcaggccttcgtgggccagatgaagagcgacctgttcctggacgacagcaagagcctggtgtgctggcccagcggcgagggcaccctgagctggcccgacctgctgagcgaccccagcatcgtgggcagcaacctgagacagctggccagaggccaggccggccacggcctgggccccgaggaggacggcttcagcctggccagcccctacagccccgccaagagcttcagcgccagcgacgaggacctgatccagcaggtgctggccgagggcgtgagcagccccgcccccacccaggacacccacatggagaccgacctgctgagcagcctgagcagcacccccggcgagaagaccgagaccctggccctgcagagactgggcgagctgggcccccccagccccggcctgaactgggagcagccccaggccgccagactgagcagaaccggcctggtggagggcctgagaaagagactgctgcccgcctggtgcgccagcctggcccacggcctgagcctgctgctggtggccgtggccgtggccgtgagcggctgggtgggcgccagcttcccccccggcgtgagcgtggcctggctgctgagcagcagcgccagcttcctggccagcttcctgggctgggagcccctgaaggtgctgctggaggccctgtacttcagcctggtggccaagagactgcaccccgacgaggacgacaccctggtggagagccccgccgtgacccccgtgagcgccagagtgcccagagtgagacccccccacggcttcgccctgttcctggccaaggaggaggccagaaaggtgaagagactgcacggcatgctgagaagcctgctggtgtacatgctgttcctgctggtgaccctgctggccagctacggcgacgccagctgccacggccacgcctacagactgcagagcgccatcaagcaggagctgcacagcagagccttcctggccatcaccagaagcgaggagctgtggccctggatggcccacgtgctgctgccctacgtgcacggcaaccagagcagccccgagctgggcccccccagactgagacaggtgagactgcaggaggccctgtaccccgacccccccggccccagagtgcacacctgcagcgccgccggcggcttcagcaccagcgactacgacgtgggctgggagagcccccacaacggcagcggcacctgggcctacagcgcccccgacctgctgggcgcctggagctggggcagctgcgccgtgtacgacagcggcggctacgtgcaggagctgggcctgagcctggaggagagcagagacagactgagattcctgcagctgcacaactggctggacaacagaagcagagccgtgttcctggagctgaccagatacagccccgccgtgggcctgcacgccgccgtgaccctgagactggagttccccgccgccggcagagccctggccgccctgagcgtgagacccttcgccctgagaagactgagcgccggcctgagcctgcccctgctgaccagcgtgtgcctgctgctgttcgccgtgcacttcgccgtggccgaggccagaacctggcacagagagggcagatggagagtgctgagactgggcgcctgggccagatggctgctggtggccctgaccgccgccaccgccctggtgagactggcccagctgggcgccgccgacagacagtggaccagattcgtgagaggcagacccagaagattcaccagcttcgaccaggtggcccagctgagcagcgccgccagaggcctggccgccagcctgctgttcctgctgctggtgaaggccgcccagcagctgagattcgtgagacagtggagcgtgttcggcaagaccctgtgcagagccctgcccgagctgctgggcgtgaccctgggcctggtggtgctgggcgtggcctacgcccagctggccatcctgctggtgagcagctgcgtggacagcctgtggagcgtggcccaggccctgctggtgctgtgccccggcaccggcctgagcaccctgtgccccgccgagagctggcacctgagccccctgctgtgcgtgggcctgtgggccctgagactgtggggcgccctgagactgggcgccgtgatcctgagatggagataccacgccctgagaggcgagctgtacagacccgcctgggagccccaggactacgagatggtggagctgttcctgagaagactgagactgtggatgggcctgagcaaggtgaaggagttcagacacaaggtgagattcgagggcatggagcccctgcccagcagaagcagcagaggcagcaaggtgagccccgacgtgcccccccccagcgccggcagcgacgccagccaccccagcaccagcagcagccagctggacggcctgagcgtgagcctgggcagactgggcaccagatgcgagcccgagcccagcagactgcaggccgtgttcgaggccctgctgacccagttcgacagactgaaccaggccaccgaggacgtgtaccagctggagcagcagctgcacagcctgcagggcagaagaagcagcagagcccccgccggcagcagcagaggccccagccccggcctgagacccgccctgcccagcagactggccagagccagcagaggcgtggacctggccaccggccccagcagaacccccctgagagccaagaacaaggtgcaccccagcagcacctag

SEQ ID NO: 93796 - DNA, 10914 bp, synthetic construct
  misc_feature 1..10914: note = Description of Artificial Sequence: Synthetic coding sequence
  source 1..10914: mol_type = other DNA
atgccccccgccgcccccgccagactggccctggccctgggcctgggcctgtggctgggcgccctggccggcggccccggcagaggctgcggcccctgcgagcccccctgcctgtgcggccccgcccccggcgccgcctgcagagtgaactgcagcggcagaggcctgagaaccctgggccccgccctgagaatccccgccgacgccaccgccctgaccgccatggccaaggccgacggcgacgtgaagaagtacggcagcaagagaggcgccctggccctgacccacggccacagcctgctgagagacgtgagccacaacctgctgagagccctggacgtgggcctgctggccaacctgagcgccctggccgagctggacatcagcaacaacaagatcagcaccctggaggagggcatcttcgccaacctgttcaacctgagcgagatcaacctgagcggcaaccccttcgagtgcgactgcggcctggcctggctgcccagatgggccgaggagcagcaggtgagagtggtgcagcccgaggccgccacctgcgccggccccggcagcctggccggccagcccctgctgggcatccccctgctggacagcggctgcggcgccaccctggtgggcccccacggccccctggccagcggccagctggccgccttccacatcgccgcccccctgcccgtgaccgccaccagatgggacttcggcgacggcagcgccgaggtggacgccgccggccccgccgccagccacagatacgtgctgcccggcagataccacgtgaccgccgtgctggccctgggcgccggcagcgccctgctgggcaccgacgtgcaggtggaggccgcccccgccgccctggagctggtgtgccccagcagcgtgcagagcgacgagagcctggacctgagcatccagaacagaggcggcagcggcctggaggccgcctacagcatcgtggccctgggcgaggagcccgccagagccgtgcaccccctgtgccccagcgacaccgagatcttccccggcaacggccactgctacagactggtggtggagaaggccgcctggctgcaggcccaggagcagtgccaggcctgggccggcgccgccctggccatggtggacagccccgccgtgcagagattcctggtgagcagagtgaccagaagcctggacgtgtggatcggcttcagcaccgtgcagggcgtggaggtgggccccgccccccagggcgaggccttcagcctggagagctgccagaactggctgcccggcgagccccaccccgccaccgccgagcactgcgtgagactgggccccaccggctggtgcaacaccgacctgtgcagcgccccccacagctacgtgtgcgagctgcagcccggcggccccgtgcaggacgccgagaacctgctggtgggcgcccccagcggcgacctgcagggccccctgacccccctggcccagcaggacggcctgagcgccccccacgagcccgtggaggccggcatgggcagcgtggagctgagaagaccccccgcccaccaggtgatggtgttccccggcctgagactgagcagagaggccttcctgaccaccgccgagttcggcacccaggagctgagaagacccgcccagctgagactgcaggtgtacagactgctgagcaccgccggcacccccgagaacggcagcgagcccgagagcagaagccccgacaacagaacccagctggcccccgcctgcatgcccggcggcagatggtgccccggcgccaacatctgcctgcccctggacgccagctgccacccccaggcctgcgccaacggctgcaccgagggcgagcacgtggtggacgtggtggtggagaacagcgccagcagagccaacctgagcctgagagtgaccgccgaggagcccatctgcggcctgagagccacccccagccccgaggccagagtgctgcagggcgtgctggtgagatacagccccgtggtggaggccggcagcgacatggtgttcagatggaccatcaacgacaagcagagcctgaccttccagaacgtggtgttcaacgtgatctaccagagcgccgccgtgttcaagctgagcctgaccgccagcaaccacgtgagcaacgtgaccgtgaactacaacgtgaccgtggagagaatgaacagaatgcagggcctgcaggtgagcaccgtgcccgccgtgctgagccccaacgccaccctggccctgaccgccggcgtgctggtggacagcgccgtggaggtggccttcctgtggaccttcggcgacggcgagcaggccctgcaccagttccagcccccctacaacgagagcttccccgtgcccgaccccagcgtggcccaggtgctggtggagcacaacgtgatgcacacctacgccgcccccggcgagtacctgctgaccgtgctggccagcaacgccttcgagaacctgacccagcaggtgcccgtgagcgtgagagccagcctgcccagcgtggccgtgggcgtgagcgacggcgtgctgagccagcccgccgccaaccacacctacgccagcagaggcacctaccacgtgagactggaggtgaacaacaccgtgagcggcgccgccgcccaggccgacgtgagagtgttcgaggagctgagaggcctgagcgtggacatgagcctggccgtggagcagggcgcccccgtggtggtgagcgccgccgtgcagaccggcgacaacatcacctggaccttcgacatgggcgacggcaccgtgctgagcggccccgaggccaccgtggagcacgtgtacctgagagcccagaactgcaccgtgaccgtgggcgccgccagccccgccggccacctggccagaagcctgcacgtgctggtgttcgtgctggaggtgctgagagtggagcccgccgcctgcatccccacccagcccgacgccagactgaccgcctacgtgaccggcaaccccgcccactacctgttcgactggaccttcggcgacggcagcagcaacaccaccgtgagaggctgccccaccgtgacccacaacttcaccagaagcggcaccttccccctggccctggtgctgagcagcagagtgaacagagcccactacttcaccagcatctgcgtggagcccgaggtgggcaacgtgaccctgcagcccgagagacagttcgtgcagctgggcgacgaggcctggctggtggcctgcgcctggccccccttcccctacagatacacctgggacttcggcaccgaggaggccgcccccaccagagccagaggccccgaggtgaccttcatctacagagaccccggcagctacctggtgaccgtgaccgccagcaacaacatcagcgccgccaacgacagcgccctggtggaggtgcaggagcccgtgctggtgaccagcatcaaggtgaacggcagcctgggcctggagctgcagcagccctacctgttcagcgccgtgggcagaggcagacccgccagctacctgtgggacctgggcgacggcggctggctggagggccccgaggtgacccacgcctacaacagcaccggcgacttcaccggccccggccccggcagacagagacagagactgctggcccacagagaggccggcacctaccacgtgcagctgagagccaccaacatgctgggcagcgcctgggccgactgcaccatggacttcgtggagcccgtgggctggctgatggtggccgccagccccaaccccgccgccgtgaacaccagcgtgaccctgagcgccgagctggccggcggcagcggcgtggtgtacacctggagcctggaggagggcctgagctgggagaccagcgagcccttcaccacccacagcttccccacccccggcctgcacctggtgaccatgaccgccggcaaccccctgggcagcgccaacgccaccgtggaggtggacgtgcaggtgcccgtgagcggcctgagcatcagagccagcgagcccggcggcagcttcgtggccgccggcagcagcgtgcccttctggggccagctggccaccggcaccaacgtgagctggtgctgggccgtgcccggcggcagcagcaagagaggcccccacgtgaccatggtgttccccgacgccggcaccttcagcatcagactgaacgccagcaacgccgtgagctgggtgagcgccacctacaacctgaccgccgaggagcccatcgtgggcctggtgctgtgggccagcagcaaggtggtggcccccggccagctggtgcacttccagatcctgctggccgccggcagcgccgtgaccttcagactgcaggacaccgacgagcccagagccgagcacagctacctgagacccggcgactacagagtgcaggtgaacgccagcaacctggtgagcttcttcgtggcccaggccaccgtgaccgtgcaggtgctggcctgcagagagcccgaggtggacgtggtgctgcccctgcaggtgctgatgagaagaagccagagaaactacctggaggcccacgtggacctgagagactgcgtgacctaccagaccgagtacagatgggaggtgtacagaaccgccagctgccagagacccggcagacccgccagagtggccctgcccggcgtggacgtgagcagacccagactggtgctgcccagactggccctgcccgtgggccactactgcttcgtgttcgtggtgagcttcggcgacacccccctgacccagagcatccaggccaacgtgaccgtggcccccgagagactggtgcccatcatcgagggcggcagctacagagtgtggagcgacaccagagacctggtgctggacggcagcgagagctacgaccccaacctggaggacggcgaccagacccccctgagcttccactgggcctgcgtggccagcacccagagagaggccggcggctgcgccctgaacttcggccccagaggcagcagcaccgtgaccatccccagagagagactggccgccggcgtggagtacaccttcagcctgaccgtgtggaaggccggcagaaaggaggaggccaccaaccagaccgtgctgatcagaagcggcagagtgcccatcgtgagcctggagtgcgtgagctgcaaggcccaggccgtgtacgaggtgagcagaagcagctacgtgtacctggagggcagatgcctgaactgcagcagcggcagcaagagaggcagatgggccgccagaaccttcagcaacaagaccctggtgctggacgagaccaccaccagcaccggcagcgccggcatgagactggtgctgagaagaggcgtgctgagagacggcgagggctacaccttcaccctgaccgtgctgggcagaagcggcgaggaggagggctgcgccagcatcagactgagccccaacagaccccccctgggcggcagctgcagactgttccccctgggcgccgtgcacgccctgaccaccaaggtgcacttcgagtgcaccggctggcacgacgccgaggacgccggcgcccccctggtgtacgccctgctgctgagaagatgcagacagggccactgcgaggagttctgcgtgtacaagggcagcctgagcagctacggcgccgtgctgccccccggcttcagaccccacttcgaggtgggcctggccgtggtggtgcaggaccagctgggcgccgccgtggtggccctgaacagaagcctggccatcaccctgcccgagcccaacggcagcgccaccggcctgaccgtgtggctgcacggcctgaccgccagcgtgctgcccggcctgctgagacaggccgacccccagcacgtgatcgagtacagcctggccctggtgaccgtgctgaacgagcacagagcccagatcagaaagaacatcaccgagaccctggtgagcctgagagtgcacaccgtggacgacatccagcagatcgccgccgccctggcccagtgcatgggccccagcagagagctggtgtgcagaagctgcctgaagcagaccctgcacaagctggaggccatgatgctgatcctgcaggccgagaccaccgccggcaccgtgacccccaccgccatcggcgacagcatcctgaacatcaccggcgacctgatccacctggccagcagcgacgtgagagccccccagcccagcgagctgggcgccgagagccccagcagaatggtggccagccaggcctacaacctgaccagcgccctgatgagaatcctgatgagaagcagagtgctgaacgaggagcccctgaccctggccggcgaggagatcgtggcccagggcaagagaagcgaccccagaagcctgctgtgctacggcggcgcccccggccccggctgccacttcagcatccccgaggccttcagcggcgccctggccaacctgagcgacgtggtgcagctgatcttcctggtggacagcaaccccttccccttcggctacatcagcaactacaccgtgagcaccaaggtggccagcatggccttccagacccaggccggcgcccagatccccatcgagagactggccagcgagagagccatcaccgtgaaggtgcccaacaacagcgactgggccgccagaggccacagaagcagcgccaacagcgccaacagcgtggtggtgcagccccaggccagcgtgggcgccgtggtgaccctggacagcagcaaccccgccgccggcctgcacctgcagctgaactacaccctgctggacggccactacctgagcgaggagcccgagccctacctggccgtgtacctgcacagcgagcccagacccaacgagcacaactgcagcgccagcagaagaatcagacccgagagcctgcagggcgccgaccacagaccctacaccttcttcatcagccccggcagcagagaccccgccggcagctaccacctgaacctgagcagccacttcagatggagcgccctgcaggtgagcgtgggcctgtacaccagcctgtgccagtacttcagcgaggaggacatggtgtggagaaccgagggcctgctgcccctggaggagaccagccccagacaggccgtgtgcctgaccagacacctgaccgccttcggcgccagcctgttcgtgccccccagccacgtgagattcgtgttccccgagcccaccgccgacgtgaactacatcgtgatgctgacctgcgccgtgtgcctggtgacctacatggtgatggccgccatcctgcacaagctggaccagctggacgccagcagaggcagagccatccccttctgcggccagagaggcagattcaagtacgagatcctggtgaagaccggctggggcagaggcagcggcaccaccgcccacgtgggcatcatgctgtacggcgtggacagcagaagcggccacagacacctggacggcgacagagccttccacagaaacagcctggacatcttcagaatcgccaccccccacagcctgggcagcgtgtggaagatcagagtgtggcacgacaacaagggcctgagccccgcctggttcctgcagcacgtgatcgtgagagacctgcagaccgccagaagcgccttcttcctggtgaacgactggctgagcgtggagaccgaggccaacggcggcctggtggagaaggaggtgctggccgccagcgacgccgccctgctgagattcagaagactgctggtggccgagctgcagagaggcttcttcgacaagcacatctggctgagcatctgggacagaccccccagaagcagattcaccagaatccagagagccacctgctgcgtgctgctgatctgcctgttcctgggcgccaacgccgtgtggtacggcgccgtgggcgacagcgcctacagcaccggccacgtgagcagactgagccccctgagcgtggacaccgtggccgtgggcctggtgagcagcgtggtggtgtaccccgtgtacctggccatcctgttcctgttcagaatgagcagaagcaaggtggccggcagccccagccccacccccgccggccagcaggtgctggacatcgacagctgcctggacagcagcgtgctggacagcagcttcctgaccttcagcggcctgcacgccgaggccttcgtgggccagatgaagagcgacctgttcctggacgacagcaagagcctggtgtgctggcccagcggcgagggcaccctgagctggcccgacctgctgagcgaccccagcatcgtgggcagcaacctgagacagctggccagaggccaggccggccacggcctgggccccgaggaggacggcttcagcctggccagcccctacagccccgccaagagcttcagcgccagcgacgaggacctgatccagcaggtgctggccgagggcgtgagcagccccgcccccacccaggacacccacatggagaccgacctgctgagcagcctgagcagcacccccggcgagaagaccgagaccctggccctgcagagactgggcgagctgggcccccccagccccggcctgaactgggagcagccccaggccgccagactgagcagaaccggcctggtggagggcctgagaaagagactgctgcccgcctggtgcgccagcctggcccacggcctgagcctgctgctggtggccgtggccgtggccgtgagcggctgggtgggcgccagcttcccccccggcgtgagcgtggcctggctgctgagcagcagcgccagcttcctggccagcttcctgggctgggagcccctgaaggtgctgctggaggccctgtacttcagcctggtggccaagagactgcaccccgacgaggacgacaccctggtggagagccccgccgtgacccccgtgagcgccagagtgcccagagtgagacccccccacggcttcgccctgttcctggccaaggaggaggccagaaaggtgaagagactgcacggcatgctgagaagcctgctggtgtacatgctgttcctgctggtgaccctgctggccagctacggcgacgccagctgccacggccacgcctacagactgcagagcgccatcaagcaggagctgcacagcagagccttcctggccatcaccagaagcgaggagctgtggccctggatggcccacgtgctgctgccctacgtgcacggcaaccagagcagccccgagctgggcccccccagactgagacaggtgagactgcaggaggccctgtaccccgacccccccggccccagagtgcacacctgcagcgccgccggcggcttcagcaccagcgactacgacgtgggctgggagagcccccacaacggcagcggcacctgggcctacagcgcccccgacctgctgggcgcctggagctggggcagctgcgccgtgtacgacagcggcggctacgtgcaggagctgggcctgagcctggaggagagcagagacagactgagattcctgcagctgcacaactggctggacaacagaagcagagccgtgttcctggagctgaccagatacagccccgccgtgggcctgcacgccgccgtgaccctgagactggagttccccgccgccggcagagccctggccgccctgagcgtgagacccttcgccctgagaagactgagcgccggcctgagcctgcccctgctgaccagcgtgtgcctgctgctgttcgccgtgcacttcgccgtggccgaggccagaacctggcacagagagggcagatggagagtgctgagactgggcgcctgggccagatggctgctggtggccctgaccgccgccaccgccctggtgagactggcccagctgggcgccgccgacagacagtggaccagattcgtgagaggcagacccagaagattcaccagcttcgaccaggtggcccagctgagcagcgccgccagaggcctggccgccagcctgctgttcctgctgctggtgaaggccgcccagcagctgagattcgtgagacagtggagcgtgttcggcaagaccctgtgcagagccctgcccgagctgctgggcgtgaccctgggcctggtggtgctgggcgtggcctacgcccagctggccatcctgctggtgagcagctgcgtggacagcctgtggagcgtggcccaggccctgctggtgctgtgccccggcaccggcctgagcaccctgtgccccgccgagagctggcacctgagccccctgctgtgcgtgggcctgtgggccctgagactgtggggcgccctgagactgggcgccgtgatcctgagatggagataccacgccctgagaggcgagctgtacagacccgcctgggagccccaggactacgagatggtggagctgttcctgagaagactgagactgtggatgggcctgagcaaggtgaaggagttcagacacaaggtgagattcgagggcatggagcccctgcccagcagaagcagcagaggcagcaaggtgagccccgacgtgcccccccccagcgccggcagcgacgccagccaccccagcaccagcagcagccagctggacggcctgagcgtgagcctgggcagactgggcaccagatgcgagcccgagcccagcagactgcaggccgtgttcgaggccctgctgacccagttcgacagactgaaccaggccaccgaggacgtgtaccagctggagcagcagctgcacagcctgcagggcagaagaagcagcagagcccccgccggcagcagcagaggccccagccccggcctgagacccgccctgcccagcagactggccagagccagcagaggcgtggacctggccaccggccccagcagaacccccctgagagccaagaacaaggtgcaccccagcagcacctag

SEQ ID NO: 93797 - DNA, 3693 bp, synthetic construct
  misc_feature 1..3693: note = Description of Artificial Sequence: Synthetic coding sequence
  source 1..3693: mol_type = other DNA
atggtggccgccagccccaaccccgccgccgtgaacaccagcgtgaccctgagcgccgagctggccggcggcagcggcgtggtgtacacctggagcctggaggagggcctgagctgggagaccagcgagcccttcaccacccacagcttccccacccccggcctgcacctggtgaccatgaccgccggcaaccccctgggcagcgccaacgccaccgtggaggtggacgtgcaggtgcccgtgagcggcctgagcatcagagccagcgagcccggcggcagcttcgtggccgccggcagcagcgtgcccttctggggccagctggccaccggcaccaacgtgagctggtgctgggccgtgcccggcggcagcagcaagagaggcccccacgtgaccatggtgttccccgacgccggcaccttcagcatcagactgaacgccagcaacgccgtgagctgggtgagcgccacctacaacctgaccgccgaggagcccatcgtgggcctggtgctgtgggccagcagcaaggtggtggcccccggccagctggtgcacttccagatcctgctggccgccggcagcgccgtgaccttcagactgcaggtgggcggcgccaaccccgaggtgctgcccggccccagattcagccacagcttccccagagtgggcgaccacgtggtgagcgtgagaggcaagaaccacgtgagctgggcccaggcccaggtgagaatcgtggtgctggaggccgtgagcggcctgcaggtgcccaactgctgcgagcccggcatcgccaccggcaccgagagaaacttcaccgccagagtgcagagaggcagcagagtggcctacgcctggtacttcagcctgcagaaggtgcagggcgacagcctggtgatcctgagcggcagagacgtgacctacacccccgtggccgccggcctgctggagatccaggtgagagccttcaacgccctgggcagcgagaacagaaccctggtgctggaggtgcaggacgccgtgcagtacgtggccctgcagagcggcccctgcttcaccaacagaagcgcccagttcgaggccgccaccagccccagccccagaagagtggcctaccactgggacttcggcgacggcagccccggccaggacaccgacgagcccagagccgagcacagctacctgagacccggcgactacagagtgcaggtgaacgccagcaacctggtgagcttcttcgtggcccaggccaccgtgaccgtgcaggtgctggcctgcagagagcccgaggtggacgtggtgctgcccctgcaggtgctgatgagaagaagccagagaaactacctggaggcccacgtggacctgagagactgcgtgacctaccagaccgagtacagatgggaggtgtacagaaccgccagctgccagagacccggcagacccgccagagtggccctgcccggcgtggacgtgagcagacccagactggtgctgcccagactggccctgcccgtgggccactactgcttcgtgttcgtggtgagcttcggcgacacccccctgacccagagcatccaggccaacgtgaccgtggcccccgagagactggtgcccatcatcgagggcggcagctacagagtgtggagcgacaccagagacctggtgctggacggcagcgagagctacgaccccaacctggaggacggcgaccagacccccctgagcttccactgggcctgcgtggccagcacccagagagaggccggcggctgcgccctgaacttcggccccagaggcagcagcaccgtgaccatccccagagagagactggccgccggcgtggagtacaccttcagcctgaccgtgtggaaggccggcagaaaggaggaggccaccaaccagaccgtgctgatcagaagcggcagagtgcccatcgtgagcctggagtgcgtgagctgcaaggcccaggccgtgtacgaggtgagcagaagcagctacgtgtacctggagggcagatgcctgaactgcagcagcggcagcaagagaggcagatgggccgccagaaccttcagcaacaagaccctggtgctggacgagaccaccaccagcaccggcagcgccggcatgagactggtgctgagaagaggcgtgctgagagacggcgagggctacaccttcaccctgaccgtgctgggcagaagcggcgaggaggagggctgcgccagcatcagactgagccccaacagaccccccctgggcggcagctgcagactgttccccctgggcgccgtgcacgccctgaccaccaaggtgcacttcgagtgcaccggctggcacgacgccgaggacgccggcgcccccctggtgtacgccctgctgctgagaagatgcagacagggccactgcgaggagttctgcgtgtacaagggcagcctgagcagctacggcgccgtgctgccccccggcttcagaccccacttcgaggtgggcctggccgtggtggtgcaggaccagctgggcgccgccgtggtggccctgaacagaagcctggccatcaccctgcccgagcccaacggcagcgccaccggcctgaccgtgtggctgcacggcctgaccgccagcgtgctgcccggcctgctgagacaggccgacccccagcacgtgatcgagtacagcctggccctggtgaccgtgctgaacgagtacgagagagccctggacgtggccgccgagcccaagcacgagagacagcacagagcccagatcagaaagaacatcaccgagaccctggtgagcctgagagtgcacaccgtggacgacatccagcagatcgccgccgccctggcccagtgcatgggccccagcagagagctggtgtgcagaagctgcctgaagcagaccctgcacaagctggaggccatgatgctgatcctgcaggccgagaccaccgccggcaccgtgacccccaccgccatcggcgacagcatcctgaacatcaccggcgacctgatccacctggccagcagcgacgtgagagccccccagcccagcgagctgggcgccgagagccccagcagaatggtggccagccaggcctacaacctgaccagcgccctgatgagaatcctgatgagaagcagagtgctgaacgaggagcccctgaccctggccggcgaggagatcgtggcccagggcaagagaagcgaccccagaagcctgctgtgctacggcggcgcccccggccccggctgccacttcagcatccccgaggccttcagcggcgccctggccaacctgagcgacgtggtgcagctgatcttcctggtggacagcaaccccttccccttcggctacatcagcaactacaccgtgagcaccaaggccccccccaccccccccacccccctgtggagcagccccagaccccccagcgtgctgtggagcccctggaccgccgccaccctgagacccggctgcatctgcagcagcaccatcagatgctggaccgccaccacctgcctgagaaacctgagccccacctggcagagcacctacaccagaagccccggccccatgagcaccaccgccagactggccggcggcagcgcccagagccacagcagagtgctgaccaccggccccacccccagcagcttccccagaggcgccgagacccagagaggcgtgaccatctag

SEQ ID NO: 93798 - DNA, 12909 bp, synthetic construct
  misc_feature 1..12909: note = Description of Artificial Sequence: Synthetic coding sequence
  source 1..12909: mol_type = other DNA
atgccccccgccgcccccgccagactggccctggccctgggcctgggcctgtggctgggcgccctggccggcggccccggcagaggctgcggcccctgcgagcccccctgcctgtgcggccccgcccccggcgccgcctgcagagtgaactgcagcggcagaggcctgagaaccctgggccccgccctgagaatccccgccgacgccaccgccctggacgtgagccacaacctgctgagagccctggacgtgggcctgctggccaacctgagcgccctggccgagctggacatcagcaacaacaagatcagcaccctggaggagggcatcttcgccaacctgttcaacctgagcgagatcaacctgagcggcaaccccttcgagtgcgactgcggcctggcctggctgcccagatgggccgaggagcagcaggtgagagtggtgcagcccgaggccgccacctgcgccggccccggcagcctggccggccagcccctgctgggcatccccctgctggacagcggctgcggcgaggagtacgtggcctgcctgcccgacaacagcagcggcaccgtggccgccgtgagcttcagcgccgcccacgagggcctgctgcagcccgaggcctgcagcgccttctgcttcagcaccggccagggcctggccgccctgagcgagcagggctggtgcctgtgcggcgccgcccagcccagcagcgccagcttcgcctgcctgagcctgtgcagcggccccccccccccccccgcccccacctgcagaggccccaccctgctgcagcacgtgttccccgccagccccggcgccaccctggtgggcccccacggccccctggccagcggccagctggccgccttccacatcgccgcccccctgcccgtgaccgccaccagatgggacttcggcgacggcagcgccgaggtggacgccgccggccccgccgccagccacagatacgtgctgcccggcagataccacgtgaccgccgtgctggccctgggcgccggcagcgccctgctgggcaccgacgtgcaggtggaggccgcccccgccgccctggagctggtgtgccccagcagcgtgcagagcgacgagagcctggacctgagcatccagaacagaggcggcagcggcctggaggccgcctacagcatcgtggccctgggcgaggagcccgccagagccgtgcaccccctgtgccccagcgacaccgagatcttccccggcaacggccactgctacagactggtggtggagaaggccgcctggctgcaggcccaggagcagtgccaggcctgggccggcgccgccctggccatggtggacagccccgccgtgcagagattcctggtgagcagagtgaccagaagcctggacgtgtggatcggcttcagcaccgtgcagggcgtggaggtgggccccgccccccagggcgaggccttcagcctggagagctgccagaactggctgcccggcgagccccaccccgccaccgccgagcactgcgtgagactgggccccaccggctggtgcaacaccgacctgtgcagcgccccccacagctacgtgtgcgagctgcagcccggcggccccgtgcaggacgccgagaacctgctggtgggcgcccccagcggcgacctgcagggccccctgacccccctggcccagcaggacggcctgagcgccccccacgagcccgtggaggtgatggtgttccccggcctgagactgagcagagaggccttcctgaccaccgccgagttcggcacccaggagctgagaagacccgcccagctgagactgcaggtgtacagactgctgagcaccgccggcacccccgagaacggcagcgagcccgagagcagaagccccgacaacagaacccagctggcccccgcctgcatgcccggcggcagatggtgccccggcgccaacatctgcctgcccctggacgccagctgccacccccaggcctgcgccaacggctgcaccagcggccccggcctgcccggcgccccctacgccctgtggagagagttcctgttcagcgtgcccgccggcccccccgcccagtacagcgtgaccctgcacggccaggacgtgctgatgctgcccggcgacctggtgggcctgcagcacgacgccggccccggcgccctgctgcactgcagccccgcccccggccaccccggccccagagccccctacctgagcgccaacgccagcagctggctgccccacctgcccgcccagctggagggcacctgggcctgccccgcctgcgccctgagactgctggccgccaccgagcagctgaccgtgctgctgggcctgagacccaaccccggcctgagactgcccggcagatacgaggtgagagccgaggtgggcaacggcgtgagcagacacaacctgagctgcagcttcgacgtggtgagccccgtggccggcctgagagtgatctaccccgcccccagagacggcagactgtacgtgcccaccaacggcagcgccctggtgctgcaggtggacagcggcgccaacgccaccgccaccgccagatggcccggcggcagcgtgagcgccagattcgagaacgtgtgccccgccctggtggccaccttcgtgcccggctgcccctgggagaccaacgacaccctgttcagcgtggtggccctgccctggctgagcgagggcgagcacgtggtggacgtggtggtggagaacagcgccagcagagccaacctgagcctgagagtgaccgccgaggagcccatctgcggcctgagagccacccccagccccgaggccagagtgctgcagggcgtgctggtgagatacagccccgtggtggaggccggcagcgacatggtgttcagatggaccatcaacgacaagcagagcctgaccttccagaacgtggtgttcaacgtgatctaccagagcgccgccgtgttcaagctgagcctgaccgccagcaaccacgtgagcaacgtgaccgtgaactacaacgtgaccgtggagagaatgaacagaatgcagggcctgcaggtgagcaccgtgcccgccgtgctgagccccaacgccaccctggccctgaccgccggcgtgctggtggacagcgccgtggaggtggccttcctgtggaccttcggcgacggcgagcaggccctgcaccagttccagcccccctacaacgagagcttccccgtgcccgaccccagcgtggcccaggtgctggtggagcacaacgtgatgcacacctacgccgcccccggcgagtacctgctgaccgtgctggccagcaacgccttcgagaacctgacccagcaggtgcccgtgagcgtgagagccagcctgcccagcgtggccgtgggcgtgagcgacggcgtgctggtggccggcagacccgtgaccttctacccccaccccctgcccagccccggcggcgtgctgtacacctgggacttcggcgacggcagccccgtgctgacccagagccagcccgccgccaaccacacctacgccagcagaggcacctaccacgtgagactggaggtgaacaacaccgtgagcggcgccgccgcccaggccgacgtgagagtgttcgaggagctgagaggcctgagcgtggacatgagcctggccgtggagcagggcgcccccgtggtggtgagcgccgccgtgcagaccggcgacaacatcacctggaccttcgacatgggcgacggcaccgtgctgagcggccccgaggccaccgtggagcacgtgtacctgagagcccagaactgcaccgtgaccgtgggcgccgccagccccgccggccacctggccagaagcctgcacgtgctggtgttcgtgctggaggtgctgagagtggagcccgccgcctgcatccccacccagcccgacgccagactgaccgcctacgtgaccggcaaccccgcccactacctgttcgactggaccttcggcgacggcagcagcaacaccaccgtgagaggctgccccaccgtgacccacaacttcaccagaagcggcaccttccccctggccctggtgctgagcagcagagtgaacagagcccactacttcaccagcatctgcgtggagcccgaggtgggcaacgtgaccctgcagcccgagagacagttcgtgcagctgggcgacgaggcctggctggtggcctgcgcctggccccccttcccctacagatacacctgggacttcggcaccgaggaggccgcccccaccagagccagaggccccgaggtgaccttcatctacagagaccccggcagctacctggtgaccgtgaccgccagcaacaacatcagcgccgccaacgacagcgccctggtggaggtgcaggagcccgtgctggtgaccagcatcaaggtgaacggcagcctgggcctggagctgcagcagccctacctgttcagcgccgtgggcagaggcagacccgccagctacctgtgggacctgggcgacggcggctggctggagggccccgaggtgacccacgcctacaacagcaccggcgacttcaccgtgagagtggccggctggaacgaggtgagcagaagcgaggcctggctgaacgtgaccgtgaagagaagagtgagaggcctggtggtgaacgccagcagaaccgtggtgcccctgaacggcagcgtgagcttcagcaccagcctggaggccggcagcgacgtgagatacagctgggtgctgtgcgacagatgcacccccatccccggcggccccaccatcagctacaccttcagaagcgtgggcaccttcaacatcatcgtgaccgccgagaacgaggtgggcagcgcccaggacagcatcttcgtgtacgtgctgcagctgatcgagggcctgcaggtggtgggcggcggcagatacttccccaccaaccacaccgtgcagctgcaggccgtggtgagagacggcaccaacgtgagctacagctggaccgcctggagagacagaggccccgccctggccggcagcggcaagggcttcagcctgaccgtgctggaggccggcacctaccacgtgcagctgagagccaccaacatgctgggcagcgcctgggccgactgcaccatggacttcgtggagcccgtgggctggctgatggtggccgccagccccaaccccgccgccgtgaacaccagcgtgaccctgagcgccgagctggccggcggcagcggcgtggtgtacacctggagcctggaggagggcctgagctgggagaccagcgagcccttcaccacccacagcttccccacccccggcctgcacctggtgaccatgaccgccggcaaccccctgggcagcgccaacgccaccgtggaggtggacgtgcaggtgcccgtgagcggcctgagcatcagagccagcgagcccggcggcagcttcgtggccgccggcagcagcgtgcccttctggggccagctggccaccggcaccaacgtgagctggtgctgggccgtgcccggcggcagcagcaagagaggcccccacgtgaccatggtgttccccgacgccggcaccttcagcatcagactgaacgccagcaacgccgtgagctgggtgagcgccacctacaacctgaccgccgaggagcccatcgtgggcctggtgctgtgggccagcagcaaggtggtggcccccggccagctggtgcacttccagatcctgctggccgccggcagcgccgtgaccttcagactgcaggtgggcggcgccaaccccgaggtgctgcccggccccagattcagccacagcttccccagagtgggcgaccacgtggtgagcgtgagaggcaagaaccacgtgagctgggcccaggcccaggtgagaatcgtggtgctggaggccgtgagcggcctgcaggtgcccaactgctgcgagcccggcatcgccaccggcaccgagagaaacttcaccgccagagtgcagagaggcagcagagtggcctacgcctggtacttcagcctgcagaaggtgcagggcgacagcctggtgatcctgagcggcagagacgtgacctacacccccgtggccgccggcctgctggagatccaggtgagagccttcaacgccctgggcagcgagaacagaaccctggtgctggaggtgcaggacgccgtgcagtacgtggccctgcagagcggcccctgcttcaccaacagaagcgcccagttcgaggccgccaccagccccagccccagaagagtggcctaccactgggacttcggcgacggcagccccggccaggacaccgacgagcccagagccgagcacagctacctgagacccggcgactacagagtgcaggtgaacgccagcaacctggtgagcttcttcgtggcccaggccaccgtgaccgtgcaggtgctggcctgcagagagcccgaggtggacgtggtgctgcccctgcaggtgctgatgagaagaagccagagaaactacctggaggcccacgtggacctgagagactgcgtgacctaccagaccgagtacagatgggaggtgtacagaaccgccagctgccagagacccggcagacccgccagagtggccctgcccggcgtggacgtgagcagacccagactggtgctgcccagactggccctgcccgtgggccactactgcttcgtgttcgtggtgagcttcggcgacacccccctgacccagagcatccaggccaacgtgaccgtggcccccgagagactggtgcccatcatcgagggcggcagctacagagtgtggagcgacaccagagacctggtgctggacggcagcgagagctacgaccccaacctggaggacggcgaccagacccccctgagcttccactgggcctgcgtggccagcacccagagagaggccggcggctgcgccctgaacttcggccccagaggcagcagcaccgtgaccatccccagagagagactggccgccggcgtggagtacaccttcagcctgaccgtgtggaaggccggcagaaaggaggaggccaccaaccagaccgtgctgatcagaagcggcagagtgcccatcgtgagcctggagtgcgtgagctgcaaggcccaggccgtgtacgaggtgagcagaagcagctacgtgtacctggagggcagatgcctgaactgcagcagcggcagcaagagaggcagatgggccgccagaaccttcagcaacaagaccctggtgctggacgagaccaccaccagcaccggcagcgccggcatgagactggtgctgagaagaggcgtgctgagagacggcgagggctacaccttcaccctgaccgtgctgggcagaagcggcgaggaggagggctgcgccagcatcagactgagccccaacagaccccccctgggcggcagctgcagactgttccccctgggcgccgtgcacgccctgaccaccaaggtgcacttcgagtgcaccggctggcacgacgccgaggacgccggcgcccccctggtgtacgccctgctgctgagaagatgcagacagggccactgcgaggagttctgcgtgtacaagggcagcctgagcagctacggcgccgtgctgccccccggcttcagaccccacttcgaggtgggcctggccgtggtggtgcaggaccagctgggcgccgccgtggtggccctgaacagaagcctggccatcaccctgcccgagcccaacggcagcgccaccggcctgaccgtgtggctgcacggcctgaccgccagcgtgctgcccggcctgctgagacaggccgacccccagcacgtgatcgagtacagcctggccctggtgaccgtgctgaacgagtacgagagagccctggacgtggccgccgagcccaagcacgagagacagcacagagcccagatcagaaagaacatcaccgagaccctggtgagcctgagagtgcacaccgtggacgacatccagcagatcgccgccgccctggcccagtgcatgggccccagcagagagctggtgtgcagaagctgcctgaagcagaccctgcacaagctggaggccatgatgctgatcctgcaggccgagaccaccgccggcaccgtgacccccaccgccatcggcgacagcatcctgaacatcaccggcgacctgatccacctggccagcagcgacgtgagagccccccagcccagcgagctgggcgccgagagccccagcagaatggtggccagccaggcctacaacctgaccagcgccctgatgagaatcctgatgagaagcagagtgctgaacgaggagcccctgaccctggccggcgaggagatcgtggcccagggcaagagaagcgaccccagaagcctgctgtgctacggcggcgcccccggccccggctgccacttcagcatccccgaggccttcagcggcgccctggccaacctgagcgacgtggtgcagctgatcttcctggtggacagcaaccccttccccttcggctacatcagcaactacaccgtgagcaccaaggtggccagcatggccttccagacccaggccggcgcccagatccccatcgagagactggccagcgagagagccatcaccgtgaaggtgcccaacaacagcgactgggccgccagaggccacagaagcagcgccaacagcgccaacagcgtggtggtgcagccccaggccagcgtgggcgccgtggtgaccctggacagcagcaaccccgccgccggcctgcacctgcagctgaactacaccctgctggacggccactacctgagcgaggagcccgagccctacctggccgtgtacctgcacagcgagcccagacccaacgagcacaactgcagcgccagcagaagaatcagacccgagagcctgcagggcgccgaccacagaccctacaccttcttcatcagccccggcagcagagaccccgccggcagctaccacctgaacctgagcagccacttcagatggagcgccctgcaggtgagcgtgggcctgtacaccagcctgtgccagtacttcagcgaggaggacatggtgtggagaaccgagggcctgctgcccctggaggagaccagccccagacaggccgtgtgcctgaccagacacctgaccgccttcggcgccagcctgttcgtgccccccagccacgtgagattcgtgttccccgagcccaccgccgacgtgaactacatcgtgatgctgacctgcgccgtgtgcctggtgacctacatggtgatggccgccatcctgcacaagctggaccagctggacgccagcagaggcagagccatccccttctgcggccagagaggcagattcaagtacgagatcctggtgaagaccggctggggcagaggcagcggcaccaccgcccacgtgggcatcatgctgtacggcgtggacagcagaagcggccacagacacctggacggcgacagagccttccacagaaacagcctggacatcttcagaatcgccaccccccacagcctgggcagcgtgtggaagatcagagtgtggcacgacaacaagggcctgagccccgcctggttcctgcagcacgtgatcgtgagagacctgcagaccgccagaagcgccttcttcctggtgaacgactggctgagcgtggagaccgaggccaacggcggcctggtggagaaggaggtgctggccgccagcgacgccgccctgctgagattcagaagactgctggtggccgagctgcagagaggcttcttcgacaagcacatctggctgagcatctgggacagaccccccagaagcagattcaccagaatccagagagccacctgctgcgtgctgctgatctgcctgttcctgggcgccaacgccgtgtggtacggcgccgtgggcgacagcgcctacagcaccggccacgtgagcagactgagccccctgagcgtggacaccgtggccgtgggcctggtgagcagcgtggtggtgtaccccgtgtacctggccatcctgttcctgttcagaatgagcagaagcaaggtggccggcagccccagccccacccccgccggccagcaggtgctggacatcgacagctgcctggacagcagcgtgctggacagcagcttcctgaccttcagcggcctgcacgccgaggccttcgtgggccagatgaagagcgacctgttcctggacgacagcaagagcctggtgtgctggcccagcggcgagggcaccctgagctggcccgacctgctgagcgaccccagcatcgtgggcagcaacctgagacagctggccagaggccaggccggccacggcctgggccccgaggaggacggcttcagcctggccagcccctacagccccgccaagagcttcagcgccagcgacgaggacctgatccagcaggtgctggccgagggcgtgagcagccccgcccccacccaggacacccacatggagaccgacctgctgagcagcctgagcagcacccccggcgagaagaccgagaccctggccctgcagagactgggcgagctgggcccccccagccccggcctgaactgggagcagccccaggccgccagactgagcagaaccggcctggtggagggcctgagaaagagactgctgcccgcctggtgcgccagcctggcccacggcctgagcctgctgctggtggccgtggccgtggccgtgagcggctgggtgggcgccagcttcccccccggcgtgagcgtggcctggctgctgagcagcagcgccagcttcctggccagcttcctgggctgggagcccctgaaggtgctgctggaggccctgtacttcagcctggtggccaagagactgcaccccgacgaggacgacaccctggtggagagccccgccgtgacccccgtgagcgccagagtgcccagagtgagacccccccacggcttcgccctgttcctggccaaggaggaggccagaaaggtgaagagactgcacggcatgctgagaagcctgctggtgtacatgctgttcctgctggtgaccctgctggccagctacggcgacgccagctgccacggccacgcctacagactgcagagcgccatcaagcaggagctgcacagcagagccttcctggccatcaccagaagcgaggagctgtggccctggatggcccacgtgctgctgccctacgtgcacggcaaccagagcagccccgagctgggcccccccagactgagacaggtgagactgcaggaggccctgtaccccgacccccccggccccagagtgcacacctgcagcgccgccggcggcttcagcaccagcgactacgacgtgggctgggagagcccccacaacggcagcggcacctgggcctacagcgcccccgacctgctgggcgcctggagctggggcagctgcgccgtgtacgacagcggcggctacgtgcaggagctgggcctgagcctggaggagagcagagacagactgagattcctgcagctgcacaactggctggacaacagaagcagagccgtgttcctggagctgaccagatacagccccgccgtgggcctgcacgccgccgtgaccctgagactggagttccccgccgccggcagagccctggccgccctgagcgtgagacccttcgccctgagaagactgagcgccggcctgagcctgcccctgctgaccagcgtgtgcctgctgctgttcgccgtgcacttcgccgtggccgaggccagaacctggcacagagagggcagatggagagtgctgagactgggcgcctgggccagatggctgctggtggccctgaccgccgccaccgccctggtgagactggcccagctgggcgccgccgacagacagtggaccagattcgtgagaggcagacccagaagattcaccagcttcgaccaggtggcccagctgagcagcgccgccagaggcctggccgccagcctgctgttcctgctgctggtgaaggccgcccagcagctgagattcgtgagacagtggagcgtgttcggcaagaccctgtgcagagccctgcccgagctgctgggcgtgaccctgggcctggtggtgctgggcgtggcctacgcccagctggccatcctgctggtgagcagctgcgtggacagcctgtggagcgtggcccaggccctgctggtgctgtgccccggcaccggcctgagcaccctgtgccccgccgagagctggcacctgagccccctgctgtgcgtgggcctgtgggccctgagactgtggggcgccctgagactgggcgccgtgatcctgagatggagataccacgccctgagaggcgagctgtacagacccgcctgggagccccaggactacgagatggtggagctgttcctgagaagactgagactgtggatgggcctgagcaaggtgaaggagttcagacacaaggtgagattcgagggcatggagcccctgcccagcagaagcagcagaggcagcaaggtgagccccgacgtgcccccccccagcgccggcagcgacgccagccaccccagcaccagcagcagccagctggacggcctgagcgtgagcctgggcagactgggcaccagatgcgagcccgagcccagcagactgcaggccgtgttcgaggccctgctgacccagttcgacagactgaaccaggccaccgaggacgtgtaccagctggagcagcagctgcacagcctgcagggcagaagaagcagcagagcccccgccggcagcagcagaggccccagccccggcctgagacccgccctgcccagcagactggccagagccagcagaggcgtggacctggccaccggccccagcagaacccccctgagagccaagaacaaggtgcaccccagcagcacctag

SEQ ID NO: 93799 - DNA, 8550 bp, synthetic construct
  misc_feature 1..8550: note = Description of Artificial Sequence: Synthetic coding sequence
  source 1..8550: mol_type = other DNA
atggccgaggaggccgcccagaacatcagcgacgaccaggagagatgcctgcaggccgcctgctgcctgagcttcggcggcgagctgagcgtgagcaccgacaagagctggggcctgcacctgtgcagctgcagcccccccggcggcggcctgtgggtggaggtgtacgccaaccacgtgctgctgatgagcgacggcaagtgcggctgcccctggtgcgccctgaacggcaaggccgaggacagagagagccagagccccagcagcagcgccagcagacagaagaacatctggaagaccaccagcgaggccgccctgagcgtggtgaacgagaagacccaggccgtggtgaacgagaagacccaggcccccctggactgcgacaacagcgccgacagaatcccccacaagcccttcatcatcatcgccagagcctggagcagcggcggccccagattccaccacagaagactgtgcgccaccggcaccgccgacagcaccttcagcgccctgctgcagctgcagggcaccaccagcgccgccgccccctgcagcctgaagatggaggccagctgctgcgtgctgagactgctgtgctgcgccgaggacgtggccaccggcctgctgcccggcaccgtgaccatggagacccccaccaaggtggccagacccacccagaccagcagccagagagtgcccctgtggcccatcagccacttccccaccagccccagaagcagccacggcctgccccccggcatccccagaacccccagcttcaccgccagccagagcggcagcgagatcctgtacccccccacccagcacccccccgtggccatcctggccagaaacagcgacaacttcatgaaccccgtgctgaactgcagcctggaggtggaggccagagccccccccaacctgggcttcagagtgcacatggccagcggcgaggccctgtgcctgatgatggacttcggcgacagcagcggcgtggagatgagactgcacaacatgagcgaggccatggccgtgaccgcctaccaccagtacagcaagggcatcttcttccacctgctgcacttccagctggacatgagcacctacaaggaggccgagacccagaacaccaccctgaacgtgtacctgtgccagagcgagaacagctgcctggaggacagcgaccccagcaacctgggctacgagctgatcagcgccttcgtgaccaagggcgtgtacatgctgaaggccgtgatctacaacgagttccacggcaccgaggtggagctgggcccctactacgtggagatcggccacgaggccgtgagcgccttcatgaacagcagcagcgtgcacgaggacgaggtgctggtgttcgccgacagccaggtgaaccagaagagcaccgtggtgatccaccacttccccagcatccccagctacaacgtgagcttcatcagccagacccaggtgggcgacagccaggcctggcacagcatgaccgtgtggtacaagatgcagagcgtgagcgtgtacaccaacggcaccgtgttcgccaccgacaccgacatcaccttcaccgccgtgaccaaggagaccatccccctggagttcgagtggtacttcggcgaggacccccccgtgagaaccaccagcagaagcatcaagaagagactgagcatcccccagtggtacagagtgatggtgaaggccagcaacagaatgagcagcgtggtgagcgagccccacgtgatcagagtgcagaagaagatcgtggccaacagactgaccagccccagcagcgccctggtgaacgccagcgtggccttcgagtgctggatcaacttcggcaccgacgtggcctacctgtgggacttcggcgacggcaccgtgagcctgggcagcagcagcagcagccacgtgtacagcagagagggcgagttcaccgtggaggtgctggccttcaacaacgtgagcgccagcaccctgagacagcagctgttcatcgtgtgcgagccctgccagccccccctggtgaagaacatgggccccggcaaggtgcagatctggagaagccagcccgtgagactgggcgtgaccttcgaggccgccgtgttctgcgacatcagccagggcctgagctacacctggaacctgatggacagcgagggcctgcccgtgagcctgcccgccgccgtggacacccacagacagaccctgatcctgcccagccacaccctggagtacggcaactacaccgccctggccaaggtgcagatcgagggcagcgtggtgtacagcaactactgcgtgggcctggaggtgagagcccaggcccccgtgagcgtgatcagcgagggcacccacctgttcttcagcagaaccaccagcagccccatcgtgctgagaggcacccagagcttcgaccccgacgaccccggcgccaccctgagataccactgggagtgcgccaccgccggcagccccgcccacccctgcttcgacagcagcaccgcccaccagctggacgccgccgcccccaccgtgagcttcgaggcccagtggctgagcgacagctacgaccagttcctggtgatgctgagagtgagcagcggcggcagaaacagcagcgagaccagagtgttcctgagcccctaccccgacagcgccttcagattcgtgcacatcagctgggtgagcttcaaggacaccttcgtgaactggaacgacgagctgagcctgcaggccatgtgcgaggactgcagcgagatccccaacctgagctacagctgggacctgttcctggtgaacgccaccgagaagaacagaatcgaggtgcccttctgcagagtggtgggcctgctgggcagcctgggcctgggcgccatcagcgagagcagccagctgaacctgctgcccaccgagcccggcaccgccgaccccgacgccaccaccacccccttcagcagagagcccagccccgtgaccctgggccagcccgccaccagcgcccccagaggcacccccaccgagcccatgaccggcgtgtactggatcccccccgccggcgacagcgccgtgctgggcgaggcccccgaggagggcagcctggacctggagcccggcccccagagcaagggcagcctgatgaccggcagaagcgagagaagccagcccacccacagccccgacccccacctgagcgacttcgaggcctactacagcgacatccaggaggccatccccagcggcggcagacagcccgccaaggacaccagcttccccggcagcggccccagcctgagcgccgaggagagccccggcgacggcgacaacctggtggaccccagcctgagcgccggcagagccgagcccgtgctgatgatcgactggcccaaggccctgctgggcagagccgtgttccagggctacagcagcagcggcatcaccgagcagaccgtgaccatcaagccctacagcctgagcagcggcgagacctacgtgctgcaggtgagcgtggccagcaagcacggcctgctgggcaaggcccagctgtacctgaccgtgaaccccgcccccagagacatggcctgccaggtgcagccccaccacggcctggaggcccacaccgtgttcagcgtgttctgcatgagcggcaagcccgacttccactacgagttcagctaccagatcggcaacaccagcaagcacaccctgtaccacggcagagacacccagtactacttcgtgctgcccgccggcgagcacctggacaactacaaggtgatggtgagcaccgagatcaccgacggcaagggcagcaaggtgcagccctgcaccgtggtggtgaccgtgctgcccagataccacggcaacgactgcctgggcgaggacctgtacaacagcagcctgaagaacctgagcaccctgcagctgatgggcagctacaccgagatcagaaactacatcaccgtgatcaccagaatcctgagcagactgagcaaggaggacaagaccgccagctgcaaccagtggagcagaatccaggacgccctgatcagcagcgtgtgcagactggccttcgtggaccaggaggagatgatcggcagcgtgctgatgctgagagacctggtgagcttcagcaacaagctgggcttcatgagcgccgtgctgatcctgaagtacaccagagccctgctggcccagggccagttcagcggccccttcgtgatcgacaagggcgtgagactggagctgatcggcctgatcagcagagtgtgggaggtgagcgagcaggagaacagcaaggaggaggtgtacagacacgaggagggcatcaccgtgatcagcgacctgctgctgggctgcctgagcctgaaccacgtgagcaccggccagatggagttcagaaccctgctgcactacaacctgcagagcagcgtgcagagcctgggcagcgtgcaggtgcacctgcccggcgacctggccggccacagccccgccggcgccgagacccagagcccctgctacatcagccagctgatcctgttcaagaagaacccctaccccggcagccaggcccccggccagatcggcggcgtggtgggcctgaacctgtacacctgcagcagcagaagacccatcaacagacagtggctgagaaagcccgtgatggtggagttcggcgaggaggacggcctggacaacagaagaaacaagaccaccttcgtgctgctgagagacaaggtgaacctgcaccagttcaccgagctgagcgagaacccccaggagagcctgcagatcgagatcgagttcagcaagcccgtgaccagagccttccccgtgatgctgctggtgagattcagcgagaagcccacccccagcgacttcctggtgaagcagatctacttctgggacgagagcatcgtgcagatctacatccccgccgccagccagaaggacgccagcgtgggctacctgagcctgctggacgccgactacgacagaaagccccccaacagatacctggccaaggccgtgaactacaccgtgcacttccagtggatcagatgcctgttctgggacaagagagagtggaagagcgagagattcagcccccagcccggcaccagccccgagaaggtgaactgcagctaccacagactggccgccttcgccctgctgagaagaaagctgaaggccagcttcgaggtgagcgacatcagcaagctgcagagccaccccgagaacctgctgcccagcatcttcatcatgggcagcgtgatcctgtacggcttcctggtggccaagagcagacaggtggaccaccacgagaagaagaaggccggctacatcttcctgcaggaggccagcctgcccggccaccagctgtacgccgtggtgatcgacaccggcttcagagcccccgccagactgaccagcaaggtgtacatcgtgctgtgcggcgacaacggcctgagcgagaccaaggagctgagctgccccgagaagcccctgttcgagagaaacagcagacacaccttcatcctgagcgcccccgcccagctgggcctgctgagaaagatcagactgtggcacgacagcagaggccccagccccggctggttcatcagccacgtgatggtgaaggagctgcacaccggccagggctggttcttccccgcccagtgctggctgagcgccggcagacacgacggcagagtggagagagagctgacctgcctgcagggcggcctgggcttcagaaagctgttctactgcaagttcaccgagtacctggaggacttccacgtgtggctgagcgtgtacagcagacccagcagcagcagatacctgcacacccccagactgaccgtgagcttcagcctgctgtgcgtgtacgcctgcctgaccgccctggtggccgccggcggccaggagcagccccacctggacgtgagccccaccctgggcagcttcagagtgggcctgctgtgcaccctgctggccagccccggcgcccagctgctgagcctgctgttcagactgagcaaggaggcccccggcagcgccagagtggagccccacagccccctgagaggcggcgcccagaccgaggccccccacggccccaacagctggggcagaatccccgacgcccaggagcccagaaagcagcccgccagcgccatcctgagcggcagcggcagagcccagagaaaggccgccagcgacaacggcaccgcctgccccgcccccaagctgcaggtgcacggcgccgaccacagcagaaccagcctgatgggcaagagccactgctgccccccccacacccaggcccccagcagcggcctggagggcctgatgccccagtggagcagagccctgcagccctggtggagcagcgccgtgtgggccatctgcggcaccgccagcctggcctgcagcctgggcaccggcttcctggcctacagattcggccaggagcagtgcgtgcagtggctgcacctgctgagcctgagcgtggtgtgctgcatcttcatcacccagcccctgatggtgtgcctgatggccctgggcttcgcctggaagagaagagccgacaaccacttcttcaccgagagcctgtgcgaggccaccagagacctggacagcgagctggccgagagaagctggaccagactgcccttcagcagcagctgcagcatccccgactgcgccggcgaggtggagaaggtgctggccgccagacagcaggccagacacctgagatgggcccacccccccagcaaggcccagctgagaggcaccagacagagaatgagaagagagagcagaaccagagccgccctgagagacatcagcatggacatcctgatgctgctgctgctgctgtgcgtgatctacggcagattcagccaggacgagtacagcctgaaccaggccatcagaaaggagttcaccagaaacgccagaaactgcctgggcggcctgagaaacatcgccgactggtgggactggagcctgaccaccctgctggacggcctgtaccccggcggcacccccagcgccagagtgcccggcgcccagcccggcgccctgggcggcaagtgctacctgatcggcagcagcgtgatcagacagctgaaggtgttccccagacacctgtgcaagccccccagacccttcagcgccctgatcgaggacagcatccccacctgcagccccgaggtgggcggccccgagaacccctacctgatcgaccccgagaaccagaacgtgaccctgaacggccccggcggctgcggcaccagagaggactgcgtgctgagcctgggcagaaccagaaccgaggcccacaccgccctgagcagactgagagccagcatgtggatcgacagaagcaccagagccgtgagcgtgcacttcaccctgtacaacccccccacccagctgttcaccagcgtgagcctgagagtggagatcctgcccaccggcagcctggtgcccagcagcctggtggagagcttcagcatcttcagaagcgacagcgccctgcagtaccacctgatgctgccccagctggtgttcctggccctgagcctgatccacctgtgcgtgcagctgtacagaatgatggacaagggcgtgctgagctactggagaaagcccagaaactggctggagctgagcgtggtgggcgtgagcctgacctactacgccgtgagcggccacctggtgaccctggccggcgacgtgaccaaccagttccacagaggcctgtgcagagccttcatggacctgaccctgatggccagctggaaccagagagccagatggctgagaggcatcctgctgttcctgttcaccctgaagtgcgtgtacctgcccggcatccagaacaccatggccagctgcagcagcatgatgagacacagcctgcccagcatcttcgtggccggcctggtgggcgccctgatgctggccgccctgagccacctgcacagattcctgctgagcatgtgggtgctgccccccggcaccttcaccgacgccttccccggcctgctgttccacttccccagaagaagccagaaggactgcctgctgggcctgagcaagagcgaccagagagccatggcctgctacttcggcatcctgctgatcgtgagcgccaccctgtgcttcggcatgctgagaggcttcctgatgaccctgccccagaagagaaagagcttccagagcaagagcttcgtgagactgaaggacgtgaccgcctacatgtgggagaaggtgctgaccttcctgagactggagacccccaagctggaggaggccgagatggtggagaaccacaactactacctggacgagttcgccaacctgctggacgagctgctgatgaagatcaacggcctgagcgacagcctgcagctgcccctgctggagaagaccagcaacaacaccggcgaggccagaaccgaggagagccccctggtggacatcagcagctaccaggccgccgagcccgccgacatcaaggacttctag

SEQ ID NO: 93800 - DNA, 495 bp, synthetic construct
  misc_feature 1..495: note = Description of Artificial Sequence: Synthetic coding sequence
  source 1..495: mol_type = other DNA
tgagtgggcggccccgagaacccctacctgatcgaccccgagaaccagaacgtgaccctgaacggccccggcggctgcggcaccagagaggactgcgtgctgagcctgggcagaaccagaaccgaggcccacaccgccctgagcagactgagagccagcatgtggatcgacagaagcaccagagccgtgagcgtgcacttcaccctgtacaacccccccacccagctgttcaccagcgtgagcctgagagtggagatcctgcccaccggcagcctggtgcccagcagcctggtggagagcttcagcatcttcagaagcgacagcgccctgcagtaccacctgatgctgccccagctggtgttcctggccctgagcctgatccacctgtgcgtgcagctgtacagaatgatggacaagggcgtgctgagctactggagaaagcccagaaactggctggaggtggccagcctggtgagcttcagcttcgagaagtag

SEQ ID NO: 93801 - DNA, 2907 bp, synthetic construct
  misc_feature 1..2907: note = Description of Artificial Sequence: Synthetic coding sequence
  source 1..2907: mol_type = other DNA
atggtgaacagcagcagagtgcagccccagcagcccggcgacgccaagagaccccccgcccccagagcccccgaccccggcagactgatggccggctgcgccgccgtgggcgccagcctggccgcccccggcggcctgtgcgagcagagaggcctggagatcgagatgcagagaatcagacaggccgccgccagagacccccccgccggcgccgccgccagccccagcccccccctgagcagctgcagcagacaggcctggagcagagacaaccccggcttcgaggccgaggaggaggaggaggaggtggagggcgaggagggcggcatggtggtggagatggacgtggagtggagacccggcagcagaagaagcgccgccagcagcgccgtgagcagcgtgggcgccagaagcagaggcctgggcggctaccacggcgccggccaccccagcggcagaagaagaagaagagaggaccagggccccccctgccccagccccgtgggcggcggcgaccccctgcacagacacctgcccctggagggccagccccccagagtggcctgggccgagagactggtgagaggcctgagaggcctgtggggcaccagactgatggaggagagcagcaccaacagagagaagtacctgaagagcgtgctgagagagctggtgacctacctgctgttcctgatcgtgctgtgcatcctgacctacggcatgatgagcagcaacgtgtactactacaccagaatgatgagccagctgttcctggacacccccgtgagcaagaccgagaagaccaacttcaagaccctgagcagcatggaggacttctggaagttcaccgagggcagcctgctggacggcctgtactggaagatgcagcccagcaaccagaccgaggccgacaacagaagcttcatcttctacgagaacctgctgctgggcgtgcccagaatcagacagctgagagtgagaaacggcagctgcagcatcccccaggacctgagagacgagatcaaggagtgctacgacgtgtacagcgtgagcagcgaggacagagcccccttcggccccagaaacggcaccgcctggatctacaccagcgagaaggacctgaacggcagcagccactggggcatcatcgccacctacagcggcgccggctactacctggacctgagcagaaccagagaggagaccgccgcccaggtggccagcctgaagaagaacgtgtggctggacagaggcaccagagccaccttcatcgacttcagcgtgtacaacgccaacatcaacctgttctgcgtggtgagactgctggtggagttccccgccaccggcggcgtgatccccagctggcagttccagcccctgaagctgatcagatacgtgaccaccttcgacttcttcctggccgcctgcgagatcatcttctgcttcttcatcttctactacgtggtggaggagatcctggagatcagaatccacaagctgcactacttcagaagcttctggaactgcctggacgtggtgatcgtggtgctgagcgtggtggccatcggcatcaacatctacagaaccagcaacgtggaggtgctgctgcagttcctggaggaccagaacaccttccccaacttcgagcacctggcctactggcagatccagttcaacaacatcgccgccgtgaccgtgttcttcgtgtggatcaagctgttcaagttcatcaacttcaacagaaccatgagccagctgagcaccaccatgagcagatgcgccaaggacctgttcggcttcgccatcatgttcttcatcatcttcctggcctacgcccagctggcctacctggtgttcggcacccaggtggacgacttcagcaccttccaggagtgcatcttcacccagttcagaatcatcctgggcgacatcaacttcgccgagatcgaggaggccaacagagtgctgggccccatctacttcaccaccttcgtgttcttcatgttcttcatcctgctgaacatgttcctggccatcatcaacgacacctacagcgaggtgaagagcgacctggcccagcagaaggccgagatggagctgagcgacctgatcagaaagggctaccacaaggccctggtgaagctgaagctgaagaagaacaccgtggacgacatcagcgagagcctgagacagggcggcggcaagctgaacttcgacgagctgagacaggacctgaagggcaagggccacaccgacgccgagatcgaggccatcttcaccaagtacgaccaggacggcgaccaggagctgaccgagcacgagcaccagcagatgagagacgacctggagaaggagagagaggacctggacctggaccacagcagcctgcccagacccatgagcagcagaagcttccccagaagcctggacgacagcgaggaggacgacgacgaggacagcggccacagcagcagaagaagaggcagcatcagcagcggcgtgagctacgaggagttccaggtgctggtgagaagagtggacagaatggagcacagcatcggcagcatcgtgagcaagatcgacgccgtgatcgtgaagctggagatcatggagagagccaagctgaagagaagagaggtgctgggcagactgctggacggcgtggccgaggacgagagactgggcagagacagcgagatccacagagagcagatggagagactggtgagagaggagctggagagatgggagagcgacgacgccgccagccagatcagccacggcctgggcacccccgtgggcctgaacggccagcccagacccagaagcagcagacccagcagcagccagagcaccgagggcatggagggcgccggcggcaacggcagcagcaacgtgcacgtgtag

SEQ ID NO: 93802 - DNA, 1161 bp, synthetic construct
  misc_feature 1..1161: note = Description of Artificial Sequence: Synthetic coding sequence
  source 1..1161: mol_type = other DNA
atgagccagctgagcaccaccatgagcagatgcgccaaggacctgttcggcttcgccatcatgttcttcatcatcttcctggcctacgcccagctggcctacctggtgttcggcacccaggtggacgacttcagcaccttccaggagtgcatcttcacccagttcagaatcatcctgggcgacatcaacttcgccgagatcgaggaggccaacagagtgctgggccccatctacttcaccaccttcgtgttcttcatgttcttcatcctgctgaacatgttcctggccatcatcaacgacacctacagcgaggtgaagagcgacctggcccagcagaaggccgagatggagctgagcgacctgatcagaaagggctaccacaaggccctggtgaagctgaagctgaagaagaacaccgtggacgacatcagcgagagcctgagacagggcggcggcaagctgaacttcgacgagctgagacaggacctgaagggcaagggccacaccgacgccgagatcgaggccatcttcaccaagtacgaccaggacggcgaccaggagctgaccgagcacgagcaccagcagatgagagacgacctggagaaggagagagaggacctggacctggaccacagcagcctgcccagacccatgagcagcagaagcttccccagaagcctggacgacagcgaggaggacgacgacgaggacagcggccacagcagcagaagaagaggcagcatcagcagcggcgtgagctacgaggagttccaggtgctggtgagaagagtggacagaatggagcacagcatcggcagcatcgtgagcaagatcgacgccgtgatcgtgaagctggagatcatggagagagccaagctgaagagaagagaggtgctgggcagactgctggacggcgtggccgaggacgagagactgggcagagacagcgagatccacagagagcagatggagagactggtgagagaggagctggagagatgggagagcgacgacgccgccagccagatcagccacggcctgggcacccccgtgggcctgaacggccagcccagacccagaagcagcagacccagcagcagccagagcaccgagggcatggagggcgccggcggcaacggcagcagcaacgtgcacgtgtag

SEQ ID NO: 93803 - DNA, 1161 bp, synthetic construct; identical to SEQ ID NO: 93802
  misc_feature 1..1161: note = Description of Artificial Sequence: Synthetic coding sequence
  source 1..1161: mol_type = other DNA

SEQ ID NO: 93804 - DNA, 2418 bp, synthetic construct
  misc_feature 1..2418: note = Description of Artificial Sequence: Synthetic coding sequence
  source 1..2418: mol_type = other DNA
atgaacgccgtgggcagccccgagggccaggagctgcagaagctgggcagcggcgcctgggacaaccccgcctacagcggcccccccagcccccacggcaccctgagagtgtgcaccatcagcagcaccggccccctgcagccccagcccaagaagcccgaggacgagccccaggagaccgcctacagaacccaggtgagcagctgctgcctgcacatctgccagggcatcagaggcctgtggggcaccaccctgaccgagaacaccgccgagaacagagagctgtacatcaagaccaccctgagagagctgctggtgtacatcgtgttcctggtggacatctgcctgctgacctacggcatgaccagcagcagcgcctactactacaccaaggtgatgagcgagctgttcctgcacacccccagcgacaccggcgtgagcttccaggccatcagcagcatggccgacttctgggacttcgcccagggccccctgctggacagcctgtactggaccaagtggtacaacaaccagagcctgggccacggcagccacagcttcatctactacgagaacatgctgctgggcgtgcccagactgagacagctgaaggtgagaaacgacagctgcgtggtgcacgaggacttcagagaggacatcctgagctgctacgacgtgtacagccccgacaaggaggagcagctgcccttcggccccttcaacggcaccgcctggacctaccacagccaggacgagctgggcggcttcagccactggggcagactgaccagctacagcggcggcggctactacctggacctgcccggcagcagacagggcagcgccgaggccctgagagccctgcaggagggcctgtggctggacagaggcaccagagtggtgttcatcgacttcagcgtgtacaacgccaacatcaacctgttctgcgtgctgagactggtggtggagttccccgccaccggcggcgccatccccagctggcagatcagaaccgtgaagctgatcagatacgtgagcaactgggacttcttcatcgtgggctgcgaggtgatcttctgcgtgttcatcttctactacgtggtggaggagatcctggagctgcacatccacagactgagatacctgagcagcatctggaacatcctggacctggtggtgatcctgctgagcatcgtggccgtgggcttccacatcttcagaaccctggaggtgaacagactgatgggcaagctgctgcagcagcccaacacctacgccgacttcgagttcctggccttctggcagacccagtacaacaacatgaacgccgtgaacctgttcttcgcctggatcaagatcttcaagtacatcagcttcaacaagaccatgacccagctgagcagcaccctggccagatgcgccaaggacatcctgggcttcgccgtgatgttcttcatcgtgttcttcgcctacgcccagctgggctacctgctgttcggcacccaggtggagaacttcagcaccttcatcaagtgcatcttcacccagttcagaatcatcctgggcgacttcgactacaacgccatcgacaacgccaacagaatcctgggccccgcctacttcgtgacctacgtgttcttcgtgttcttcgtgctgctgaacatgttcctggccatcatcaacgacacctacagcgaggtgaaggaggagctggccggccagaaggacgagctgcagctgagcgacctgctgaagcagggctacaacaagaccctgctgagactgagactgagaaaggagagagtgagcgacgtgcagaaggtgctgcagggcggcgagcaggagatccagttcgaggacttcaccaacaccctgagagagctgggccacgccgagcacgagatcaccgagctgaccgccaccttcaccaagttcgacagagacggcaacagaatcctggacgagaaggagcaggagaagatgagacaggacctggaggaggagagagtggccctgaacaccgagatcgagaagctgggcagaagcatcgtgagcagcccccagggcaagagcggccccgaggccgccagagccggcggctgggtgagcggcgaggagttctacatgctgaccagaagagtgctgcagctggagaccgtgctggagggcgtggtgagccagatcgacgccgtgggcagcaagctgaagatgctggagagaaagggctggctggcccccagccccggcgtgaaggagcaggccatctggaagcacccccagcccgcccccgccgtgacccccgacccctggggcgtgcagggcggccaggagagcgaggtgccctacaagagagaggaggaggccctggaggagagaagactgagcagaggcgagatccccaccctgcagagaagctag

SEQ ID NO: 93805 - DNA, 2193 bp, synthetic construct
  misc_feature 1..2193: note = Description of Artificial Sequence: Synthetic coding sequence
  source 1..2193: mol_type = other DNA
atgaacgccgtgggcagccccgagggccaggagctgcagaagctgggcagcggcgcctgggacaaccccgcctacagcggcccccccagcccccacggcaccctgagagtgtgcaccatcagcagcaccggccccctgcagccccagcccaagaagcccgaggacgagccccaggagaccgcctacagaacccaggtgagcagctgctgcctgcacatctgccagggcatcagaggcctgtggggcaccaccctgaccgagaacaccgccgagaacagagagctgtacatcaagaccaccctgagagagctgctggtgtacatcgtgttcctggtggacatctgcctgctgacctacggcatgaccagcagcagcgcctactactacaccaaggtgatgagcgagctgttcctgcacacccccagcgacaccggcgtgagcttccaggccatcagcagcatggccgacttctgggacttcgcccagggccccctgctggacagcctgtactggaccaagtggtacaacaaccagagcctgggccacggcagccacagcttcatctactacgagaacatgctgctgggcgtgcccagactgagacagctgaaggtgagaaacgacagctgcgtggtgcacgaggacttcagagaggacatcctgagctgctacgacgtgtacagccccgacaaggaggagcagctgcccttcggccccttcaacggcaccgccctggtggtggagttccccgccaccggcggcgccatccccagctggcagatcagaaccgtgaagctgatcagatacgtgagcaactgggacttcttcatcgtgggctgcgaggtgatcttctgcgtgttcatcttctactacgtggtggaggagatcctggagctgcacatccacagactgagatacctgagcagcatctggaacatcctggacctggtggtgatcctgctgagcatcgtggccgtgggcttccacatcttcagaaccctggaggtgaacagactgatgggcaagctgctgcagcagcccaacacctacgccgacttcgagttcctggccttctggcagacccagtacaacaacatgaacgccgtgaacctgttcttcgcctggatcaagatcttcaagtacatcagcttcaacaagaccatgacccagctgagcagcaccctggccagatgcgccaaggacatcctgggcttcgccgtgatgttcttcatcgtgttcttcgcctacgcccagctgggctacctgctgttcggcacccaggtggagaacttcagcaccttcatcaagtgcatcttcacccagttcagaatcatcctgggcgacttcgactacaacgccatcgacaacgccaacagaatcctgggccccgcctacttcgtgacctacgtgttcttcgtgttcttcgtgctgctgaacatgttcctggccatcatcaacgacacctacagcgaggtgaaggaggagctggccggccagaaggacgagctgcagctgagcgacctgctgaagcagggctacaacaagaccctgctgagactgagactgagaaaggagagagtgagcgacgtgcagaaggtgctgcagggcggcgagcaggagatccagttcgaggacttcaccaacaccctgagagagctgggccacgccgagcacgagatcaccgagctgaccgccaccttcaccaagttcgacagagacggcaacagaatcctggacgagaaggagcaggagaagatgagacaggacctggaggaggagagagtggccctgaacaccgagatcgagaagctgggcagaagcatcgtgagcagcccccagggcaagagcggccccgaggccgccagagccggcggctgggtgagcggcgaggagttctacatgctgaccagaagagtgctgcagctggagaccgtgctggagggcgtggtgagccagatcgacgccgtgggcagcaagctgaagatgctggagagaaagggctggctggcccccagccccggcgtgaaggagcaggccatctggaagcacccccagcccgcccccgccgtgacccccgacccctggggcgtgcagggcggccaggagagcgaggtgccctacaagagagaggaggaggccctggaggagagaagactgagcagaggcgagatccccaccctgcagagaagctag

SEQ ID NO: 93806 - DNA, 2328 bp, synthetic construct
  misc_feature 1..2328: note = Description of Artificial Sequence: Synthetic coding sequence
  source 1..2328: mol_type = other DNA
atgaacgccgtgggcagccccgagggccaggagctgcagaagctgggcagcggcgcctgggacaaccccgcctacagcggcccccccagcccccacggcaccctgagagtgtgcaccatcagcagcaccggccccctgcagccccagcccaagaagcccgaggacgagccccaggagaccgcctacagaacccaggtgagcagctgctgcctgcacatctgccagggcatcagaggcctgtggggcaccaccctgaccgagaacaccgccgagaacagagagctgtacatcaagaccaccctgagagagctgctggtgtacatcgtgttcctggtggacatctgcctgctgacctacggcatgaccagcagcagcgcctactactacaccaaggtgatgagcgagctgttcctgcacacccccagcgacaccggcgtgagcttccaggccatcagcagcatggccgacttctgggacttcgcccagggccccctgctggacagcctgtactggaccaagtggtacaacaaccagagcctgggccacggcagccacagcttcatctactacgagaacatgctgctgggcgtgcccagactgagacagctgaaggtgagaaacgacagctgcgtggtgcacgaggacttcagagaggacatcctgagctgctacgacgtgtacagccccgacaaggaggagcagctgcccttcggccccttcaacggcaccgcctggacctaccacagccaggacgagctgggcggcttcagccactggggcagactgaccagctacagcggcggcggctactacctggacctgcccggcagcagacagggcagcgccgaggccctgagagccctgcaggagggcctgtggctggacagaggcaccagagtggtgttcatcgacttcagcgtgtacaacgccaacatcaacctgttctgcgtgctgagactggtggtggagttccccgccagaagatgccaccccatcctggccaacccccacagccaggccgaccccctgtgccagcagctgttcttcatcgtgggctgcgaggtgatcttctgcgtgttcatcttctactacgtggtggaggagatcctggagctgcacatccacagactgagatacctgagcagcatctggaacatcctggacctggtggtgatcctgctgagcatcgtggccgtgggcttccacatcttcagaaccctggaggtgaacagactgatgggcaagctgctgcagcagcccaacacctacgccgacttcgagttcctggccttctggcagacccagtacaacaacatgaacgccgtgaacctgttcttcgcctggatcaagatcttcaagtacatcagcttcaacaagaccatgacccagctgagcagcaccctggccagatgcgccaaggacatcctgggcttcgccgtgatgttcttcatcgtgttcttcgcctacgcccagctgggctacctgctgttcggcacccaggtggagaacttcagcaccttcatcaagtgcatcttcacccagttcagaatcatcctgggcgacttcgactacaacgccatcgacaacgccaacagaatcctgggccccgcctacttcgtgacctacgtgttcttcgtgttcttcgtgctgctgaacatgttcctggccatcatcaacgacacctacagcgaggtgaaggaggagctggccggccagaaggacgagctgcagctgagcgacctgctgaagcagggctacaacaagaccctgctgagactgagactgagaaaggagagagtgagcgacgtgcagaaggtgctgcagggcggcgagcaggagatccagttcgaggacttcaccaacaccctgagagagctgggccacgccgagcacgagatcaccgagctgaccgccaccttcaccaagttcgacagagacggcaacagaatcctggacgagaaggagcaggagaagatgagacaggacctggaggaggagagagtggccctgaacaccgagatcgagaagctgggcagaagcatcgtgagcagcccccagggcaagagcggccccgaggccgccagagccggcggctgggtgagcggcgaggagttctacatgctgaccagaagagtgctgcagctggagaccgtgctggagggcgtggtgagccagatcgacgccgtgggcagcaagctgaagatgctggagagaaagggctggctggcccccagccccggcgtgaaggagcaggccatctggaagcacccccagcccgcccccgccgtgacccccgacccctggggccccggctgggccggcgagtag

SEQ ID NO: 93807 - DNA, 2283 bp, synthetic construct
  misc_feature 1..2283: note = Description of Artificial Sequence: Synthetic coding sequence
  source 1..2283: mol_type = other DNA
atgaacgccgtgggcagccccgagggccaggagctgcagaagctgggcagcggcgcctgggacaaccccgcctacagcggcccccccagcccccacggcaccctgagagtgtgcaccatcagcagcaccggccccctgcagccccagcccaagaagcccgaggacgagccccaggagaccgcctacagaacccaggtgagcagctgctgcctgcacatctgccagggcatcagaggcctgtggggcaccaccctgaccgagaacaccgccgagaacagagagctgtacatcaagaccaccctgagagagctgctggtgtacatcgtgttcctggtggacatctgcctgctgacctacggcatgaccagcagcagcgcctactactacaccaaggtgatgagcgagctgttcctgcacacccccagcgacaccggcgtgagcttccaggccatcagcagcatggccgacttctgggacttcgcccagggccccctgctggacagcctgtactggaccaagtggtacaacaaccagagcctgggccacggcagccacagcttcatctactacgagaacatgctgctgggcgtgcccagactgagacagctgaaggtgagaaacgacagctgcgtggtgcacgaggacttcagagaggacatcctgagctgctacgacgtgtacagccccgacaaggaggagcagctgcccttcggccccttcaacggcaccgcctggacctaccacagccaggacgagctgggcggcttcagccactggggcagactgaccagctacagcggcggcggctactacctggacctgcccggcagcagacagggcagcgccgaggccctgagagccctgcaggagggcctgtggctggacagaggcaccagagtggtgttcatcgacttcagcgtgtacaacgccaacatcaacctgttctgcgtgctgagactggtggtggagttccccgccaccggcggcgccatccccagctggcagatcagaaccgtgaagctgatcagatacgtgagcaactgggacttcttcatcgtgggctgcgaggtgatcttctgcgtgttcatcttctactacgtggtggaggagatcctggagctgcacatccacagactgagatacctgagcagcatctggaacatcctggacctggtggtgatcctgctgagcatcgtggccgtgggcttccacatcttcagaaccctggaggtgaacagactgatgggcaagctgctgcagcagcccaacacctacgccgacttcgagttcctggccttctggcagacccagtacaacaacatgaacgccgtgaacctgttcttcgcctggatcaagatcttcaagtacatcagcttcaacaagaccatgacccagctgagcagcaccctggccagatgcgccaaggacatcctgggcttcgccgtgatgttcttcatcgtgttcttcgcctacgcccagctgggctacctgctgttcggcacccaggtggagaacttcagcaccttcatcaagtgcatcttcacccagttcagaatcatcctgggcgacttcgactacaacgccatcgacaacgccaacagaatcctgggccccgcctacttcgtgacctacgtgttcttcgtgttcttcgtgctgctgaacatgttcctggccatcatcaacgacacctacagcgaggtgaaggaggagctggccggccagaaggacgagctgcagctgagcgacctgctgaagcagggctacaacaagaccctgctgagactgagactgagaaaggagagagtgagcgacgtgcagaaggtgctgcagggcggcgagcaggagatccagttcgaggacttcaccaacaccctgagagagctgggccacgccgagcacgagatcaccgagctgaccgccaccttcaccaagttcgacagagacggcaacagaatcctggacgagaaggagcaggagaagatgagacaggacctggaggaggagagagtggccctgaacaccgagatcgagaagctgggcagaagcatcgtgagcagcccccagggcaagagcggccccgaggccgccagagccggcggctgggtgagcggcgaggagttctacatgctgaccagaagagtgctgcagctggagaccgtgctggagggcgtggtgagccagatcgacgccgtgggcagcaagctgaagatgctggagagaaagggctggctggcccccagccccggcgtgagattccccatcaaggagaagagaaagccctag

SEQ ID NO: 93808 - DNA, 1842 bp, synthetic construct
  misc_feature 1..1842: note = Description of Artificial Sequence: Synthetic coding sequence
  source 1..1842: mol_type = other DNA
atggccgaggccagcagatggcacagaggcggcgccagcaagcacaagctgcactacagaaaggaggtggagatcaccaccaccctgcaggagctgctgctgtacttcatcttcctgatcaacctgtgcatcctgaccttcggcatggtgaacccccacatgtactacctgaacaaggtgatgagcagcctgttcctggacaccagcgtgcccggcgaggagagaaccaacttcaagagcatcagaagcatcaccgacttctggaagttcatggagggccccctgctggagggcctgtactgggacagctggtacaacaaccagcagctgtacaacctgaagaacagcagcagaatctactacgagaacatcctgctgggcgtgcccagagtgagacagctgaaggtgagaaacaacacctgcaaggtgtacagcagcttccagagcctgatgagcgagtgctacggcaagtacaccagcgccaacgaggacctgagcaacttcggcctgcagatcaacaccgagtggagatacagcaccagcaacaccaacagcccctggcactggggcttcctgggcgtgtacagaaacggcggctacatcttcaccctgagcaagagcaagagcgagaccaagaacaagttcatcgacctgagactgaacagctggatcaccagaggcaccagagtgatcttcatcgacttcagcctgtacaacgccaacgtgaacctgttctgcatcatcagactggtggccgagttccccgccaccggcggcatcctgaccagctggcagttctacagcgtgaagctgctgagatacgtgagctactacgactacttcatcgccagctgcgagatcaccttctgcatcttcctgttcgtgttcaccacccaggaggtgaagaagatcaaggagttcaagagcgcctacttcaagagcatctggaactggctggagctgctgctgctgctgctgtgcttcgtggccgtgagcttcaacacctactacaacgtgcagatcttcctgctgctgggccagctgctgaagagcaccgagaagtacagcgacttctacttcctggcctgctggcacatctactacaacaacatcatcgccatcaccatcttcttcgcctggatcaagatcttcaagttcatcagcttcaacaagaccatgagccagctgagcagcaccctgagcagatgcgtgaaggacatcgtgggcttcgccatcatgttcttcatcatcttcttcgcctacgcccagctgggcttcctggtgttcggcagccaggtggacgacttcagcaccttccagaacagcatcttcgcccagttcagaatcgtgctgggcgacttcaacttcgccggcatccagcaggccaaccccatcctgggccccatctacttcatcaccttcatcttcttcgtgttcttcgtgctgctgaacatgttcctggccatcatcaacgacacctacagcgaggtgaaggccgactacagcatcggcagaagactggacttcgagctgggcaagatgatcaagcagagctacaagaacgtgctggagaagttcagactgaagaaggcccagaaggacgaggacaagaagaccaagggcagcggcgacctggccgagcaggccagaagagagggcttcgacgagaacgagatccagaacgccgagcagatgaagaagtggaaggagagactggagaagaagtactacagcatggagatccaggacgactaccagcccgtgacccaggaggagttcagagacggcaccaccaccaagtacaagatgagattcagcgagtgcctgaccaagagaatctag

SEQ ID NO: 93809 - DNA, 1773 bp, synthetic construct
  misc_feature 1..1773: note = Description of Artificial Sequence: Synthetic coding sequence
  source 1..1773: mol_type = other DNA
atggccgaggccagcagatggcacagaggcgtgaccttcggcatggtgaacccccacatgtactacctgaacaaggtgatgagcagcctgttcctggacaccagcgtgcccggcgaggagagaaccaacttcaagagcatcagaagcatcaccgacttctggaagttcatggagggccccctgctggagggcctgtactgggacagctggtacaacaaccagcagctgtacaacctgaagaacagcagcagaatctactacgagaacatcctgctgggcgtgcccagagtgagacagctgaaggtgagaaacaacacctgcaaggtgtacagcagcttccagagcctgatgagcgagtgctacggcaagtacaccagcgccaacgaggacctgagcaacttcggcctgcagatcaacaccgagtggagatacagcaccagcaacaccaacagcccctggcactggggcttcctgggcgtgtacagaaacggcggctacatcttcaccctgagcaagagcaagagcgagaccaagaacaagttcatcgacctgagactgaacagctggatcaccagaggcaccagagtgatcttcatcgacttcagcctgtacaacgccaacgtgaacctgttctgcatcatcagactggtggccgagttccccgccaccggcggcatcctgaccagctggcagttctacagcgtgaagctgctgagatacgtgagctactacgactacttcatcgccagctgcgagatcaccttctgcatcttcctgttcgtgttcaccacccaggaggtgaagaagatcaaggagttcaagagcgcctacttcaagagcatctggaactggctggagctgctgctgctgctgctgtgcttcgtggccgtgagcttcaacacctactacaacgtgcagatcttcctgctgctgggccagctgctgaagagcaccgagaagtacagcgacttctacttcctggcctgctggcacatctactacaacaacatcatcgccatcaccatcttcttcgcctggatcaagatcttcaagttcatcagcttcaacaagaccatgagccagctgagcagcaccctgagcagatgcgtgaaggacatcgtgggcttcgccatcatgttcttcatcatcttcttcgcctacgcccagctgggcttcctggtgttcggcagccaggtggacgacttcagcaccttccagaacagcatcttcgcccagttcagaatcgtgctgggcgacttcaacttcgccggcatccagcaggccaaccccatcctgggccccatctacttcatcaccttcatcttcttcgtgttcttcgtgctgctgaacatgttcctggccatcatcaacgacacctacagcgaggtgaaggccgactacagcatcggcagaagactggacttcgagctgggcaagatgatcaagcagagctacaagaacgtgctggagaagttcagactgaagaaggcccagaaggacgaggacaagaagaccaagggcagcggcgacctggccgagcaggccagaagagagggcttcgacgagaacgagatccagaacgccgagcagatgaagaagtggaaggagagactggagaagaagtactacagcatggagatccaggacgactaccagcccgtgacccaggaggagttcagagagctgttcctgtacgccgtggagctggagaaggagctgcactacatcaacctgaagctgaaccaggtggtgagaaaggtgagcgccctgtag

SEQ ID NO: 93810 - DNA, 1875 bp, synthetic construct
  misc_feature 1..1875: note = Description of Artificial Sequence: Synthetic coding sequence
  source 1..1875: mol_type = other DNA
atggccgaggccagcagatggcacagaggcggcgccagcaagcacaagctgcactacagaaaggaggtggagatcaccaccaccctgcaggagctgctgctgtacttcatcttcctgatcaacctgtgcatcctgaccttcggcatggtgaacccccacatgtactacctgaacaaggtgatgagcagcctgttcctggacaccagcgtgcccggcgaggagagaaccaacttcaagagcatcagaagcatcaccgacttctggaagttcatggagggccccctgctggagggcctgtactgggacagctggtacaacaaccagcagctgtacaacctgaagaacagcagcagaatctactacgagaacatcctgctgggcgtgcccagagtgagacagctgaaggtgagaaacaacacctgcaaggtgtacagcagcttccagagcctgatgagcgagtgctacggcaagtacaccagcgccaacgaggacctgagcaacttcggcctgcagatcaacaccgagtggagatacagcaccagcaacaccaacagcccctggcactggggcttcctgggcgtgtacagaaacggcggctacatcttcaccctgagcaagagcaagagcgagaccaagaacaagttcatcgacctgagactgaacagctggatcaccagaggcaccagagtgatcttcatcgacttcagcctgtacaacgccaacgtgaacctgttctgcatcatcagactggtggccgagttccccgccaccggcggcatcctgaccagctggcagttctacagcgtgaagctgctgagatacgtgagctactacgactacttcatcgccagctgcgagatcaccttctgcatcttcctgttcgtgttcaccacccaggaggtgaagaagatcaaggagttcaagagcgcctacttcaagagcatctggaactggctggagctgctgctgctgctgctgtgcttcgtggccgtgagcttcaacacctactacaacgtgcagatcttcctgctgctgggccagctgctgaagagcaccgagaagtacagcgacttctacttcctggcctgctggcacatctactacaacaacatcatcgccatcaccatcttcttcgcctggatcaagatcttcaagttcatcagcttcaacaagaccatgagccagctgagcagcaccctgagcagatgcgtgaaggacatcgtgggcttcgccatcatgttcttcatcatcttcttcgcctacgcccagctgggcttcctggtgttcggcagccaggtggacgacttcagcaccttccagaacagcatcttcgcccagttcagaatcgtgctgggcgacttcaacttcgccggcatccagcaggccaaccccatcctgggccccatctacttcatcaccttcatcttcttcgtgttcttcgtgctgctgaacatgttcctggccatcatcaacgacacctacagcgaggtgaaggccgactacagcatcggcagaagactggacttcgagctgggcaagatgatcaagcagagctacaagaacgtgctggagaagttcagactgaagaaggcccagaaggacgaggacaagaagaccaagggcagcggcgacctggccgagcaggccagaagagagggcttcgacgagaacgagatccagaacgccgagcagatgaagaagtggaaggagagactggagaagaagtactacagcatggagatccaggacgactaccagcccgtgacccaggaggagttcagagagctgttcctgtacgccgtggagctggagaaggagctgcactacatcaacctgaagctgaaccaggtggtgagaaaggtgagcgccctgtag

SEQ ID NO: 93811 - DNA, 1809 bp, synthetic construct
  misc_feature 1..1809: note = Description of Artificial Sequence: Synthetic coding sequence
  source 1..1809: mol_type = other DNA
atggccgaggccagcagatggcacagaggcggcgccagcaagcacaagctgcactacagaaaggaggtggagatcaccaccaccctgcaggagctgctgctgtacttcatcttcctgatcaacctgtgcatcctgaccttcggcatggtgaacccccacatgtactacctgaacaaggtgatgagcagcctgttcctggacaccagcgtgcccggcgaggagagaaccaacttcaagagcatcagaagcatcaccgacttctggaagttcatggagggccccctgctggagggcctgtactgggacagctggtacaacaaccagcagctgtacaacctgaagaacagcagcagaatctactacgagaacatcctgctgggcgtgcccagagtgagacagctgaaggtgagaaacaacacctgcaaggtgtacagcagcttccagagcctgatgagcgagtgctacggcaagtacaccagcgccaacgaggacctgagcaacttcggcctgcagatcaacaccgagtggagatacagcaccagcaacaccaacagcccctggcactggggcttcctgggcgtgtacagaaacggcggctacatcttcaccctgagcaagagcaagagcgagaccaagaacaagttcatcgacctgagactgaacagctggatcaccagaggcaccagagtgatcttcatcgacttcagcctgtacaacgccaacgtgaacctgttctgcatcatcagactggtggccgagttccccgccaccggcggcatcctgaccagctggcagttctacagcgtgaagctgctgagatacgtgagctactacgactacttcatcgccagctgcgagatcaccttctgcatcttcctgttcgtgttcaccacccaggaggtgaagaagatcaaggagttcaagagcgcctacttcaagagcatctggaactggctggagctgctgctgctgctgctgctgaagagcaccgagaagtacagcgacttctacttcctggcctgctggcacatctactacaacaacatcatcgccatcaccatcttcttcgcctggatcaagatcttcaagttcatcagcttcaacaagaccatgagccagctgagcagcaccctgagcagatgcgtgaaggacatcgtgggcttcgccatcatgttcttcatcatcttcttcgcctacgcccagctgggcttcctggtgttcggcagccaggtggacgacttcagcaccttccagaacagcatcttcgcccagttcagaatcgtgctgggcgacttcaacttcgccggcatccagcaggccaaccccatcctgggccccatctacttcatcaccttcatcttcttcgtgttcttcgtgctgctgaacatgttcctggccatcatcaacgacacctacagcgaggtgaaggccgactacagcatcggcagaagactggacttcgagctgggcaagatgatcaagcagagctacaagaacgtgctggagaagttcagactgaagaaggcccagaaggacgaggacaagaagaccaagggcagcggcgacctggccgagcaggccagaagagagggcttcgacgagaacgagatccagaacgccgagcagatgaagaagtggaaggagagactggagaagaagtactacagcatggagatccaggacgactaccagcccgtgacccaggaggagttcagagagctgttcctgtacgccgtggagctggagaaggagctgcactacatcaacctgaagctgaaccaggtggtgagaaaggtgagcgccctgtag

SEQ ID NO: 93812 - DNA, 1572 bp, synthetic construct
  misc_feature 1..1572: note = Description of Artificial Sequence: Synthetic coding sequence
  source 1..1572: mol_type = other DNA
atggccgaggccagcagatggcacagaggcggcgccagcaagcacaagctgcactacagaaaggaggtggagatcaccaccaccctgcaggagctgctgctgtacttcatcttcctgatcaacctgtgcatcctgaccttcggcatggtgaacccccacatgtactacctgaacaaggtgatgagcagcctgttcctggacaccagcgtgcccggcgaggagagaaccaacttcaagagcatcagaagcatcaccgacttctggaagttcatggagggccccctgctggagggcctgtactgggacagctggtacaacaaccagcagctgtacaacctgaagaacagcagcagaatctactacgagaacatcctgctgggcgtgcccagagtgagacagctgaaggtgagaaacaacacctgcaaggtgtacagcagcttccagagcctgatgagcgagtgctacggcaagtacaccagcgccaacgaggacctgagcaacttcggcctgcagatcaacaccgagtggagatacagcaccagcaacaccaacagcccctggcactggggcttcctgggcgtgtacagaaacggcggctacatcttcaccctgagcaagagcaagagcgagaccaagaacaagttcatcgacctgagactgaacagctggatcaccagaggcaccagagtgatcttcatcgacttcagcctgtacaacgccaacgtgaacctgttctgcatcatcagactggtggccgagttccccgccaccggcggcatcctgaccagctggcagttctacagcgtgaagctgctgagatacgtgagctactacgactacttcatcgccagctgcgagatcaccttctgcatcttcctgttcgtgttcaccacccaggaggtgaagaagatcaaggagttcaagagcgcctacttcaagagcatctggaactggctggagctgctgctgctgctgctgtgcttcgtggccgtgagcttcaacacctactacaacgtgcagatcttcctgctgctgggccagctgctgaagagcaccgagaagtacagcgacttctacttcctggcctgctggcacatctactacaacaacatcatcgccatcaccatcttcttcgcctggatcaagaacatgttcctggccatcatcaacgacacctacagcgaggtgaaggccgactacagcatcggcagaagactggacttcgagctgggcaagatgatcaagcagagctacaagaacgtgctggagaagttcagactgaagaaggcccagaaggacgaggacaagaagaccaagggcagcggcgacctggccgagcaggccagaagagagggcttcgacgagaacgagatccagaacgccgagcagatgaagaagtggaaggagagactggagaagaagtactacagcatggagatccaggacgactaccagcccgtgacccaggaggagttcagagagctgttcctgtacgccgtggagctggagaaggagctgcactacatcaacctgaagctgaaccaggtggtgagaaaggtgagcgccctgtag

SEQ ID NO: 93813 - DNA, 1836 bp, synthetic construct
  misc_feature 1..1836: note = Description of Artificial Sequence: Synthetic coding sequence
  source 1..1836: mol_type = other DNA
atggaggagctggtggtggaggtgagaggcagcaacggcgccttctacaaggccttcgtgaaggacgtgcacgaggacagcatcaccgtggccttcgagaacaactggcagcccgacagacagatccccttccacgacgtgagattccccccccccgtgggctacaacaaggacatcaacgagagcgacgaggtggaggtgtacagcagagccaacgagaaggagccctgctgctggtggctggccaaggtgagaatgatcaagggcgagttctacgtgatcgagtacgccgcctgcgacgccacctacaacgagatcgtgaccatcgagagactgagaagcgtgaaccccaacaagcccgccaccaaggacaccttccacaagatcaagctggacgtgcccgaggacctgagacagatgtgcgccaaggaggccgcccacaaggacttcaagaaggccgtgggcgccttcagcgtgacctacgaccccgagaactaccagctggtgatcctgagcatcaacgaggtgaccagcaagagagcccacatgctgatcgacatgcacttcagaagcctgagaaccaagctgagcctgatcatgagaaacgaggaggccagcaagcagctggagagcagcagacagctggccagcagattccacgagcagttcatcgtgagagaggacctgatgggcctggccatcggcacccacggcgccaacatccagcaggccagaaaggtgcccggcgtgaccgccatcgacctggacgaggacacctgcaccttccacatctacggcgaggaccaggacgccgtgaagaaggccagaagcttcctggagttcgccgaggacgtgatccaggtgcccagaaacctggtgggcaaggtgatcggcaagaacggcaagctgatccaggagatcgtggacaagagcggcgtggtgagagtgagaatcgaggccgagaacgagaagaacgtgccccaggaggaggagatcatgccccccaacagcctgcccagcaacaacagcagagtgggccccaacgcccccgaggagaagaagcacctggacatcaaggagaacagcacccacttcagccagcccaacagcaccaaggtgcagagaggcatggtgcccttcgtgttcgtgggcaccaaggacagcatcgccaacgccaccgtgctgctggactaccacctgaactacctgaaggaggtggaccagctgagactggagagactgcagatcgacgagcagctgagacagatcggcgccagcagcagacccccccccaacagaaccgacaaggagaagagctacgtgaccgacgacggccagggcatgggcagaggcagcagaccctacagaaacagaggccacggcagaagaggccccggctacaccagcggcaccaacagcgaggccagcaacgccagcgagaccgagagcgaccacagagacgagctgagcgactggagcctggcccccaccgaggaggagagagagagcttcctgagaagaggcgacggcagaagaagaggcggcggcggcagaggccagggcggcagaggcagaggcggcggcttcaagggcaacgacgaccacagcagaaccgacaacagacccagaaaccccagagaggccaagggcagaaccaccgacggcagcctgcagatcagagtggactgcaacaacgagagaagcgtgcacaccaagaccctgcagaacaccagcagcgagggcagcagactgagaaccggcaaggacagaaaccagaagaaggagaagcccgacagcgtggacggccagcagcccctggtgaacggcgtgccctag

SEQ ID NO: 93814 - DNA, 513 bp, synthetic construct
  misc_feature 1..513: note = Description of Artificial Sequence: Synthetic coding sequence
  source 1..513: mol_type = other DNA
atgcccctgcccgtggccctgcagaccagactggccaagagaggcatcctgaagcacctggagcccgagcccgaggaggagatcatcgccgaggactacgacgacgaccccgtggactacgaggccaccagactggagggcctgccccccagctggtacaaggtgttcgaccccagctgcggcctgccctactactggaacgccgacaccgacctggtgagctggctgagcccccacgaccccaacagcgtggtgaccaagagcgccaagaagctgagaagcagcaacgccgccgtgagcagaaaggacgaggagctggaccccatggaccccagcagctacagcgacgcccccagaggcacctggagcaccggcctgcccaagagaaacgaggccaagaccggcgccgacaccaccgccgccggccccctgttccagcagagaccctaccccagccccggcgccgtgctgagagccaacgccgaggccagcagaaccaagcagcaggactag

SEQ ID NO: 93815 - DNA, 204 bp, synthetic construct
  misc_feature 1..204: note = Description of Artificial Sequence: Synthetic coding sequence
  source 1..204: mol_type = other DNA
atgcccctgcccgtggccctgcagaccagactggccaagagaggcatcctgaagcacctggagcccgagcccgaggaggagatcatcgccgaggactacgacgacgaccccgtggactacgaggccaccagactggagggcctgccccccagctggtacaaggtgttcgaccccagctgccccggctggagcgccatggtgtag

SEQ ID NO: 93816 - DNA, 798 bp, synthetic construct
  misc_feature 1..798: note = Description of Artificial Sequence: Synthetic coding sequence
  source 1..798: mol_type = other DNA
atgcccctgcccgtggccctgcagaccagactggccaagagaggcatcctgaagcacctggagcccgagcccgaggaggagatcatcgccgaggactacgacgacgaccccgtggactacgaggccaccagactggagggcctgccccccagctggtacaaggtgttcgaccccagctgcggcctgccctactactggaacgccgacaccgacctggtgagctggctgagcccccacgaccccaacagcgtggtgaccaagagcgccaagaagctgagaagcagcaacgccgacgccgaggagaagctggacagaagccacgacaagagcgacagaggccacgacaagagcgacagaagccacgagaagctggacagaggccacgacaagagcgacagaggccacgacaagagcgacagagacagagagagaggctacgacaaggtggacagagagagagagagagacagagagagagacagagacagaggctacgacaaggccgacagagaggagggcaaggagagaagacaccacagaagagaggagctggccccctaccccaagagcaagaaggccgtgagcagaaaggacgaggagctggaccccatggaccccagcagctacagcgacgcccccagaggcacctggagcaccggcctgcccaagagaaacgaggccaagaccggcgccgacaccaccgccgccggccccctgttccagcagagaccctaccccagccccggcgccgtgctgagagccaacgccgaggccagcagaaccaagcagcaggactag

SEQ ID NO: 93817 - DNA, 513 bp, synthetic construct; identical to SEQ ID NO: 93814
  misc_feature 1..513: note = Description of Artificial Sequence: Synthetic coding sequence
  source 1..513: mol_type = other DNA

SEQ ID NO: 93818 - DNA, 798 bp, synthetic construct; identical to SEQ ID NO: 93816
  misc_feature 1..798: note = Description of Artificial Sequence: Synthetic coding sequence
  source 1..798: mol_type = other DNA

SEQ ID NO: 93819 - DNA, 642 bp, synthetic construct
  misc_feature 1..642: note = Description of Artificial Sequence: Synthetic coding sequence
  source 1..642: mol_type = other DNA
atgcccctgcccgtggccctgcagaccagactggccaagagaggcatcctgaagcacctggagcccgagcccgaggaggagatcatcgccgaggactacgacgacgaccccgtggactacgaggccaccagactggagggcctgccccccagctggtacaaggtgttcgaccccagctgcggcctgccctactactggaacgccgacaccgacctggtgagctggctgagcccccacgaccccaacagcgtggtgaccaagagcgccaagaagctgagaagcagcaacgccgacgccgaggagaagctggacagaagccacgacaagagcgacagaggccacgacaagagcgacagaagccacgagaagctggacagaggccacgacaagagcgacagaggccacgacaagagcgacagagacagagagagaggctacgacaaggtggacagagagagagagagagacagagagagagacagagacagaggctacgacaaggccgacagagaggagggcaaggagagaagacaccacagaagagaggagctggccccctaccccaagagcaagaaggccgtgagcagaaaggacgaggagctggaccccatggaccccagcagctacagcgacgccccctag

SEQ ID NO: 93820 - DNA, 798 bp, synthetic construct; identical to SEQ ID NO: 93816
  misc_feature 1..798: note = Description of Artificial Sequence: Synthetic coding sequence
  source 1..798: mol_type = other DNA

SEQ ID NO: 93821 - DNA, 453 bp, synthetic construct
  misc_feature 1..453: note = Description of Artificial Sequence: Synthetic coding sequence
  source 1..453: mol_type = other DNA
tgaatcgccacctacctgctgcacctgctggtgcagcccgaggaggagatcatcgccgaggactacgacgacgaccccgtggactacgaggccaccagactggagggcctgccccccagctggtacaaggtgttcgaccccagctgcggcctgccctactactggaacgccgacaccgacctggtgagctggctgagcccccacgaccccaacagcgtggtgaccaagagcgccaagaagctgagaagcagcaacgccgccgtgagcagaaaggacgaggagctggaccccatggaccccagcagctacagcgacgcccccagaggcacctggagcaccggcctgcccaagagaaacgaggccaagaccggcgccgacaccaccgccgccggccccctgttccagcagagaccctaccccagccccggcgccgtgctgagagccaacgcctag

SEQ ID NO: 93822 - DNA, 699 bp, synthetic construct
  misc_feature 1..699: note = Description of Artificial Sequence: Synthetic coding sequence
  source 1..699: mol_type = other DNA
atgggcagcgtgctgagcaccgacagcggcaagagcgcccccgccagcgccaccgccagagccctggagagaagaagagaccccgagctgcccgtgaccagcttcgactgcgccgtgtgcctggaggtgctgcaccagcccgtgagaaccagatgcggccacgtgttctgcagaagctgcatcgccaccagcctgaagaacaacaagtggacctgcccctactgcagagcctacctgcccagcgagggcgtgcccgccaccgacgtggccaagagaatgaagagcgagtacaagaactgcgccgagtgcgacaccctggtgtgcctgagcgagatgagagcccacatcagaacctgccagaagtacatcgacaagtacggccccctgcaggagctggaggagaccgccgccagatgcgtgtgccccttctgccagagagagctgtacgaggacagcctgctggaccactgcatcacccaccacagaagcgagagaagacccgtgttctgccccctgtgcagactgatccccgacgagaaccccagcagcttcagcggcagcctgatcagacacctgcaggtgagccacaccctgttctacgacgacttcatcgacttcaacatcatcgaggaggccctgatcagaagagtgctggacagaagcctgctggagtacgtgaaccacagcaacaccacctag

SEQ ID NO: 93823 - DNA, 1986 bp, synthetic construct
  misc_feature 1..1986: note = Description of Artificial Sequence: Synthetic coding sequence
  source 1..1986: mol_type = other DNA
atggagaagctgggcgtggagcccgaggaggagggcggcggcgacgacgacgaggaggacgccgaggcctgggccatggagctggccgacgtgggcgccgccgccagcagccagggcgtgcacgaccaggtgctgcccacccccaacgccagcagcagagtgatcgtgcacgtggacctggactgcttctacgcccaggtggagatgatcagcaaccccgagctgaaggacaagcccctgggcgtgcagcagaagtacctggtggtgacctgcaactacgaggccagaaagctgggcgtgaagaagctgatgaacgtgagagacgccaaggagaagtgcccccagctggtgctggtgaacggcgaggacctgaccagatacagagagatgagctacaaggtgaccgagctgctggaggagttcagccccgtggtggagagactgggcttcgacgagaacttcgtggacctgaccgagatggtggagaagagactgcagcagctgcagagcgacgagctgagcgccgtgaccgtgagcggccacgtgtacaacaaccagtgcatcggctacaagaccgccaagtgcctggaggccctgggcatcaacagcgtgagagacctgcagaccttcagccccaagatcctggagaaggagctgggcatcagcgtggcccagagaatccagaagctgagcttcggcgaggacaacagccccgtgatcctgagcggccccccccagagcttcagcgaggaggacagcttcaagaagtgcagcagcgaggtggaggccaagaacaagatcgaggagctgctggccagcctgctgaacagagtgtgccaggacggcagaaagccccacaccgtgagactgatcatcagaagatacagcagcgagaagcactacggcagagagagcagacagtgccccatccccagccacgtgatccagaagctgggcaccggcaactacgacgtgatgacccccatggtggacatcctgatgaagctgttcagaaacatggtgaacgtgaagatgcccttccacctgaccctgctgagcgtgtgcttctgcaacctgaaggccctgaacaccgccaagaagggcctgatcgactactacctgatgcccagcctgagcaccaccagcagaagcggcaagcacagcttcaagatgaaggacacccacatggaggacttccccaaggacaaggagaccaacagagacttcctgcccagcggcagaatcgagagcaccagaaccagagagagccccctggacaccaccaacttcagcaaggagaaggacatcaacgagttccccctgtgcagcctgcccgagggcgtggaccaggaggtgttcaagcagctgcccgtggacatccaggaggagatcctgagcggcaagagcagagagaagttccagggcaagggcagcgtgagctgccccctgcacgccagcagaggcgtgctgagcttcttcagcaagaagcagatgcaggacatccccatcaaccccagagaccacctgagcagcagcaagcaggtgagcagcgtgagcccctgcgagcccggcaccagcggcttcaacagcagcagcagcagctacatgagcagccagaaggactacagctactacctggacaacagactgaaggacgagagaatcagccagggccccaaggagccccagggcttccacttcaccaacagcaaccccgccgtgagcgccttccacagcttccccaacctgcagagcgagcagctgttcagcagaaaccacaccaccgacagccacaagcagaccgtggccaccgacagccacgagggcctgaccgagaacagagagcccgacagcgtggacgagaagatcaccttccccagcgacatcgacccccaggtgttctacgagctgcccgaggccgtgcagaaggagctgctggccgagtggaagagagccggcagcgacttccacatcggccacaagtag

SEQ ID NO: 93824 - DNA, 2223 bp, synthetic construct; identical to SEQ ID NO: 90398
  misc_feature 1..2223: note = Description of Artificial Sequence: Synthetic coding sequence
  source 1..2223: mol_type = other DNA

SEQ ID NO: 93825 - DNA, 2613 bp, synthetic construct
  misc_feature 1..2613: note = Description of Artificial Sequence: Synthetic coding sequence
  source 1..2613: mol_type = other DNA
atggacagcaccaaggagaagtgcgacagctacaaggacgacctgctgctgagaatgggcctgaacgacaacaaggccggcatggagggcctggacaaggagaagatcaacaagatcatcatggaggccaccaagggcagcagattctacggcaacgagctgaagaaggagaagcaggtgaaccagagaatcgagaacatgatgcagcagaaggcccagatcaccagccagcagctgagaaaggcccagctgcaggtggacagattcgccatggagctggagcagagcagaaacctgagcaacaccatcgtgcacatcgacatggacgccttctacgccgccgtggagatgagagacaaccccgagctgaaggacaagcccatcgccgtgggcagcatgagcatgctgagcaccagcaactaccacgccagaagattcggcgtgagagccgccatgcccggcttcatcgccaagagactgtgcccccagctgatcatcgtgccccccaacttcgacaagtacagagccgtgagcaaggaggtgaaggagatcctggccgactacgaccccaacttcatggccatgagcctggacgaggcctacctgaacatcaccaagcacctggaggagagacagaactggcccgaggacaagagaagatacttcatcaagatgggcagcagcgtggagaacgacaaccccggcaaggaggtgaacaagctgagcgagcacgagagaagcatcagccccctgctgttcgaggagagccccagcgacgtgcagccccccggcgaccccttccaggtgaacttcgaggagcagaacaacccccagatcctgcagaacagcgtggtgttcggcaccagcgcccaggaggtggtgaaggagatcagattcagaatcgagcagaagaccaccctgaccgccagcgccggcatcgcccccaacaccatgctggccaaggtgtgcagcgacaagaacaagcccaacggccagtaccagatcctgcccaacagacaggccgtgatggacttcatcaaggacctgcccatcagaaaggtgagcggcatcggcaaggtgaccgagaagatgctgaaggccctgggcatcatcacctgcaccgagctgtaccagcagagagccctgctgagcctgctgttcagcgagaccagctggcactacttcctgcacatcagcctgggcctgggcagcacccacctgaccagagacggcgagagaaagagcatgagcgtggagagaaccttcagcgagatcaacaaggccgaggagcagtacagcctgtgccaggagctgtgcagcgagctggcccaggacctgcagaaggagagactgaagggcagaaccgtgaccatcaagctgaagaacgtgaacttcgaggtgaagaccagagccagcaccgtgagcagcgtggtgagcaccgccgaggagatcttcgccatcgccaaggagctgctgaagaccgagatcgacgccgacttcccccaccccctgagactgagactgatgggcgtgagaatcagcagcttccccaacgaggaggacagaaagcaccagcagagaagcatcatcggcttcctgcaggccggcaaccaggccctgagcgccaccgagtgcaccctggagaagaccgacaaggacaagttcgtgaagcccctggagatgagccacaagaagagcttcttcgacaagaagagaagcgagagaaagtggagccaccaggacaccttcaagtgcgaggccgtgaacaagcagagcttccagaccagccagcccttccaggtgctgaagaagaagatgaacgagaacctggagatcagcgagaacagcgacgactgccagatcctgacctgccccgtgtgcttcagagcccagggctgcatcagcctggaggccctgaacaagcacgtggacgagtgcctggacggccccagcatcagcgagaacttcaagatgttcagctgcagccacgtgagcgccaccaaggtgaacaagaaggagaacgtgcccgccagcagcctgtgcgagaagcaggactacgaggcccaccccaagatcaaggagatcagcagcgtggactgcatcgccctggtggacaccatcgacaacagcagcaaggccgagagcatcgacgccctgagcaacaagcacagcaaggaggagtgcagcagcctgcccagcaagagcttcaacatcgagcactgccaccagaacagcagcagcaccgtgagcctggagaacgaggacgtgggcagcttcagacaggagtacagacagccctacctgtgcgaggtgaagaccggccaggccctggtgtgccccgtgtgcaacgtggagcagaagaccagcgacctgaccctgttcaacgtgcacgtggacgtgtgcctgaacaagagcttcatccaggagctgagaaaggacaagttcaaccccgtgaaccagcccaaggagagcagcagaagcaccggcagcagcagcggcgtgcagaaggccgtgaccagaaccaagagacccggcctgatgaccaagtacagcaccagcaagaagatcaagcccaacaaccccaagcacaccctggacatcttcttcaagtag

SEQ ID NO: 93826 - DNA, 2019 bp, synthetic construct
  misc_feature 1..2019: note = Description of Artificial Sequence: Synthetic coding sequence
  source 1..2019: mol_type = other DNA
atggacagcaccaaggagaagtgcgacagctacaaggacgacctgctgctgagaatgggcctgaacgacaacaaggccggcatggagggcctggacaaggagaagatcaacaagatcatcatggaggccaccaagggcagcagattctacggcaacgagctgaagaaggagaagcaggtgaaccagagaatcgagaacatgatgcagcagaaggcccagatcaccagccagcagctgagaaaggcccagctgcaggtggacagattcgccatggagctggagcagagcagaaacctgagcaacaccatcgtgcacatcgacatggacgccttctacgccgccgtggagatgagagacaaccccgagctgaaggacaagcccatcgccgtgggcagcatgagcatgctgagcaccagcaactaccacgccagaagattcggcgtgagagccgccatgcccggcttcatcgccaagagactgtgcccccagctgatcatcgtgccccccaacttcgacaagtacagagccgtgagcaaggaggtgaaggagatcctggccgactacgaccccaacttcatggccatgagcctggacgaggcctacctgaacatcaccaagcacctggaggagagacagaactggcccgaggacaagagaagatacttcatcaagatgggcagcagcgtggagaacgacaaccccggcaaggaggtgaacaagctgagcgagcacgagagaagcatcagccccctgctgttcgaggagagccccagcgacgtgcagccccccggcgaccccttccaggtgaacttcgaggagcagaacaacccccagatcctgcagaacagcgtggtgttcggcaccagcgcccaggaggtggtgaaggagatcagattcagaatcgagcagaagaccaccctgaccgccagcgccggcgtgagaatcagcagcttccccaacgaggaggacagaaagcaccagcagagaagcatcatcggcttcctgcaggccggcaaccaggccctgagcgccaccgagtgcaccctggagaagaccgacaaggacaagttcgtgaagcccctggagatgagccacaagaagagcttcttcgacaagaagagaagcgagagaaagtggagccaccaggacaccttcaagtgcgaggccgtgaacaagcagagcttccagaccagccagcccttccaggtgctgaagaagaagatgaacgagaacctggagatcagcgagaacagcgacgactgccagatcctgacctgccccgtgtgcttcagagcccagggctgcatcagcctggaggccctgaacaagcacgtggacgagtgcctggacggccccagcatcagcgagaacttcaagatgttcagctgcagccacgtgagcgccaccaaggtgaacaagaaggagaacgtgcccgccagcagcctgtgcgagaagcaggactacgaggcccaccccaagatcaaggagatcagcagcgtggactgcatcgccctggtggacaccatcgacaacagcagcaaggccgagagcatcgacgccctgagcaacaagcacagcaaggaggagtgcagcagcctgcccagcaagagcttcaacatcgagcactgccaccagaacagcagcagcaccgtgagcctggagaacgaggacgtgggcagcttcagacaggagtacagacagccctacctgtgcgaggtgaagaccggccaggccctggtgtgccccgtgtgcaacgtggagcagaagaccagcgacctgaccctgttcaacgtgcacgtggacgtgtgcctgaacaagagcttcatccaggagctgagaaaggacaagttcaaccccgtgaaccagcccaaggagagcagcagaagcaccggcagcagcagcggcgtgcagaaggccgtgaccagaaccaagagacccggcctgatgaccaagtacagcaccagcaagaagatcaagcccaacaaccccaagcacaccctggacatcttcttcaagtag

SEQ ID NO: 93827 - DNA, 2343 bp, synthetic construct
  misc_feature 1..2343: note = Description of Artificial Sequence: Synthetic coding sequence
  source 1..2343: mol_type = other DNA
atggagctggagcagagcagaaacctgagcaacaccatcgtgcacatcgacatggacgccttctacgccgccgtggagatgagagacaaccccgagctgaaggacaagcccatcgccgtgggcagcatgagcatgctgagcaccagcaactaccacgccagaagattcggcgtgagagccgccatgcccggcttcatcgccaagagactgtgcccccagctgatcatcgtgccccccaacttcgacaagtacagagccgtgagcaaggaggtgaaggagatcctggccgactacgaccccaacttcatggccatgagcctggacgaggcctacctgaacatcaccaagcacctggaggagagacagaactggcccgaggacaagagaagatacttcatcaagatgggcagcagcgtggagaacgacaaccccggcaaggaggtgaacaagctgagcgagcacgagagaagcatcagccccctgctgttcgaggagagccccagcgacgtgcagccccccggcgaccccttccaggtgaacttcgaggagcagaacaacccccagatcctgcagaacagcgtggtgttcggcaccagcgcccaggaggtggtgaaggagatcagattcagaatcgagcagaagaccaccctgaccgccagcgccggcatcgcccccaacaccatgctggccaaggtgtgcagcgacaagaacaagcccaacggccagtaccagatcctgcccaacagacaggccgtgatggacttcatcaaggacctgcccatcagaaaggtgagcggcatcggcaaggtgaccgagaagatgctgaaggccctgggcatcatcacctgcaccgagctgtaccagcagagagccctgctgagcctgctgttcagcgagaccagctggcactacttcctgcacatcagcctgggcctgggcagcacccacctgaccagagacggcgagagaaagagcatgagcgtggagagaaccttcagcgagatcaacaaggccgaggagcagtacagcctgtgccaggagctgtgcagcgagctggcccaggacctgcagaaggagagactgaagggcagaaccgtgaccatcaagctgaagaacgtgaacttcgaggtgaagaccagagccagcaccgtgagcagcgtggtgagcaccgccgaggagatcttcgccatcgccaaggagctgctgaagaccgagatcgacgccgacttcccccaccccctgagactgagactgatgggcgtgagaatcagcagcttccccaacgaggaggacagaaagcaccagcagagaagcatcatcggcttcctgcaggccggcaaccaggccctgagcgccaccgagtgcaccctggagaagaccgacaaggacaagttcgtgaagcccctggagatgagccacaagaagagcttcttcgacaagaagagaagcgagagaaagtggagccaccaggacaccttcaagtgcgaggccgtgaacaagcagagcttccagaccagccagcccttccaggtgctgaagaagaagatgaacgagaacctggagatcagcgagaacagcgacgactgccagatcctgacctgccccgtgtgcttcagagcccagggctgcatcagcctggaggccctgaacaagcacgtggacgagtgcctggacggccccagcatcagcgagaacttcaagatgttcagctgcagccacgtgagcgccaccaaggtgaacaagaaggagaacgtgcccgccagcagcctgtgcgagaagcaggactacgaggcccaccccaagatcaaggagatcagcagcgtggactgcatcgccctggtggacaccatcgacaacagcagcaaggccgagagcatcgacgccctgagcaacaagcacagcaaggaggagtgcagcagcctgcccagcaagagcttcaacatcgagcactgccaccagaacagcagcagcaccgtgagcctggagaacgaggacgtgggcagcttcagacaggagtacagacagccctacctgtgcgaggtgaagaccggccaggccctggtgtgccccgtgtgcaacgtggagcagaagaccagcgacctgaccctgttcaacgtgcacgtggacgtgtgcctgaacaagagcttcatccaggagctgagaaaggacaagttcaaccccgtgaaccagcccaaggagagcagcagaagcaccggcagcagcagcggcgtgcagaaggccgtgaccagaaccaagagacccggcctgatgaccaagtacagcaccagcaagaagatcaagcccaacaaccccaagcacaccctggacatcttcttcaagtag

SEQ ID NO: 93828 - DNA, 1386 bp, synthetic construct
  misc_feature 1..1386: note = Description of Artificial Sequence: Synthetic coding sequence
  source 1..1386: mol_type = other DNA
atggacagcaccaaggagaagtgcgacagctacaaggacgacctgctgctgagaatgggcctgaacgacaacaaggccggcatggagggcctggacaaggagaagatcaacaagatcatcatggaggccaccaagggcagcagattctacggcaacgagctgaagaaggagaagcaggtgaaccagagaatcgagaacatgatgcagcagaaggcccagatcaccagccagcagctgagaaaggcccagctgcaggtggacagattcgccatggagctggagcagagcagaaacctgagcaacaccatcgtgcacatcgacatggacgccttctacgccgccgtggagatgagagacaaccccgagctgaaggacaagcccatcgccgtgggcagcatgagcatgctgagcaccagcaactaccacgccagaagattcggcgtgagagccgccatgcccggcttcatcgccaagagactgtgcccccagctgatcatcgtgccccccaacttcgacaagtacagagccgtgagcaaggaggtgaaggagatcctggccgactacgaccccaacttcatggccatgagcctggacgaggcctacctgaacatcaccaagcacctggaggagagacagaactggcccgaggacaagagaagatacttcatcaagatgggcagcagcgtggagaacgacaaccccggcaaggaggtgaacaagctgagcgagcacgagagaagcatcagccccctgctgttcgaggagagccccagcgacgtgcagccccccggcgaccccttccaggtgaacttcgaggagcagaacaacccccagatcctgcagaacagcgtggtgttcggcaccagcgcccaggaggtggtgaaggagatcagattcagaatcgagcagaagaccaccctgaccgccagcgccggcatcgcccccaacaccatgctggccaaggtgtgcagcgacaagaacaagcccaacggccagtaccagatcctgcccaacagacaggccgtgatggacttcatcaaggacctgcccatcagaaaggtgagcggcatcggcaaggtgaccgagaagatgctgaaggccctgggcatcatcacctgcaccgagctgtaccagcagagagccctgctgagcctgctgttcagcgagaccagctggcactacttcctgcacatcagcctgggcctgggcagcacccacctgaccagagacggcgagagaaagagcatgagcgtggagagaaccttcagcgagatcaacaaggccgaggagcagtacagcctgtgccaggagctgtgcagcgagctggcccaggacctgcagaaggagagactgaaggtggcccaggtggagtacagaagactgtag

SEQ ID NO: 93829 - DNA, 2019 bp, synthetic construct; identical to SEQ ID NO: 93826
  misc_feature 1..2019: note = Description of Artificial Sequence: Synthetic coding sequence
  source 1..2019: mol_type = other DNA

SEQ ID NO: 93830 - DNA, 1470 bp, synthetic construct
  misc_feature 1..1470: note = Description of Artificial Sequence: Synthetic coding sequence
  source 1..1470: mol_type = other DNA
atggacagcaccaaggagaagtgcgacagctacaaggacgacctgctgctgagaatgggcctgaacgacaacaaggccggcatggagggcctggacaaggagaagatcaacaagatcatcatggaggccaccaagggcagcagattctacggcaacgagctgaagaaggagaagcaggtgaaccagagaatcgagaacatgatgcagcagaaggcccagatcaccagccagcagctgagaaaggcccagctgcaggtggacagattcgccatggagctggagcagagcagaaacctgagcaacaccatcgtgcacatcgacatggacgccttctacgccgccgtggagatgagagacaaccccgagctgaaggacaagcccatcgccgtgggcagcatgagcatgctgagcaccagcaactaccacgccagaagattcggcgtgagagccgccatgcccggcttcatcgccaagagactgtgcccccagctgatcatcgtgccccccaacttcgacaagtacagagccgtgagcaaggaggtgaaggagatcctggccgactacgaccccaacttcatggccatgagcctggacgaggcctacctgaacatcaccaagcacctggaggagagacagaactggcccgaggacaagagaagatacttcatcaagatgggcagcagcgtggagaacgacaaccccggcaaggaggtgaacaagctgagcgagcacgagagaagcatcagccccctgctgttcgaggagagccccagcgacgtgcagccccccggcgaccccttccaggtgaacttcgaggagcagaacaacccccagatcctgcagaacagcgtggtgttcggcaccagcgcccaggaggtggtgaaggagatcagattcagaatcgagcagaagaccaccctgaccgccagcgccggcatcgcccccaacaccatgctggccaaggtgtgcagcgacaagaacaagcccaacggccagtaccagatcctgcccaacagacaggccgtgatggacttcatcaaggacctgcccatcagaaaggtgagcggcatcggcaaggtgaccgagaagatgctgaaggccctgggcatcatcacctgcaccgagctgtaccagcagagagccctgctgagcctgctgttcagcgagaccagctggcactacttcctgcacatcagcctgggcctgggcagcacccacctgaccagagacggcgagagaaagagcatgagcgtggagagaaccttcagcgagatcaacaaggccgaggagcagtacagcctgtgccaggagctgtgcagcgagctggcccaggacctgcagaaggagagactgaaggtgttcggctacctggtgttccccatgaagagaaccggcaacaccaacaagggcgccctgctggccttctacagactggagaccaagccctgccagcccctgagcgtgcactag

SEQ ID NO: 93831 - DNA, 426 bp, synthetic construct
  misc_feature 1..426: note = Description of Artificial Sequence: Synthetic coding sequence
  source 1..426: mol_type = other DNA
atggacagcaccaaggagaagtgcgacagctacaaggacgacctgctgctgagaatgggcctgaacgacaacaaggccggcatggagggcctggacaaggagaagatcaacaagatcatcatggaggccaccaagggcagcagattctacggcaacgagctgaagaaggagaagcaggtgaaccagagaatcgagaacatgatgcagcagaaggcccagatcaccagccagcagctgagaaaggcccagctgcaggtggacagattcgccatggagctggagcagagcagaaacctgagcaacaccatcgtgcacatcgacatggacgccttctacgccgccgtggagatgagagacaaccccgagctgaaggacaagcccatcgccgtgggcagcatgagcatgctgagcaccagcaactactag

SEQ ID NO: 93832 - DNA, 1419 bp, synthetic construct
  misc_feature 1..1419: note = Description of Artificial Sequence: Synthetic coding sequence
  source 1..1419: mol_type = other DNA
atggacagcaccaaggagaagtgcgacagctacaaggacgacctgctgctgagaatgggcctgaacgacaacaaggccggcatggagggcctggacaaggagaagatcaacaagatcatcatggaggccaccaagggcagcagattctacggcaacgagctgaagaaggagaagcaggtgaaccagagaatcgagaacatgatgcagcagaaggcccagatcaccagccagcagctgagaaaggcccagctgcaggtggacagattcgccatggagctggagcagagcagaaacctgagcaacaccatcgtgcacatcgacatggacgccttctacgccgccgtggagatgagagacaaccccgagctgaaggacaagcccatcgccgtgggcagcatgagcatgctgagcaccagcaactaccacgccagaagattcggcgtgagagccgccatgcccggcttcatcgccaagagactgtgcccccagctgatcatcgtgccccccaacttcgacaagtacagagccgtgagcaaggaggtgaaggagatcctggccgactacgaccccaacttcatggccatgagcctggacgaggcctacctgaacatcaccaagcacctggaggagagacagaactggcccgaggacaagagaagatacttcatcaagatgggcagcagcgtggagaacgacaaccccggcaaggaggtgaacaagctgagcgagcacgagagaagcatcagccccctgctgttcgaggagagccccagcgacgtgcagccccccggcgaccccttccaggtgaacttcgaggagcagaacaacccccagatcctgcagaacagcgtggtgttcggcaccagcgcccaggaggtggtgaaggagatcagattcagaatcgagcagaagaccaccctgaccgccagcgccggcatcgcccccaacaccatgctggccaaggtgtgcagcgacaagaacaagcccaacggccagtaccagatcctgcccaacagacaggccgtgatggacttcatcaaggacctgcccatcagaaaggtgagcggcatcggcaaggtgaccgagaagatgctgaaggccctgggcatcatcacctgcaccgagctgtaccagcagagagccctgctgagcctgctgttcagcgagaccagctggcactacttcctgcacatcagcctgggcctgggcagcacccacctgaccagagacggcgagagaaagagcatgagcgtggagagaaccttcagcgagatcaacaaggccgaggagcagtacagcctgtgccaggagctgtgcagcgagctggcccaggacctgcagaaggagagactgaaggtgctgtacttcgacatggtgagcctggtgttcaagttcttcaacagcaagatgctgccctag

SEQ ID NO: 93833 - DNA, 1911 bp, synthetic construct
  misc_feature 1..1911: note = Description of Artificial Sequence: Synthetic coding sequence
  source 1..1911: mol_type = other DNA
atgaagtgcaagtgccccgtgatctgcttcaacgccaaggacttcgtgagaatcgtgctgcagttcttcggcaacgacggcagctggaagcacgtggccgacttcatcggcctggaccccagaatcgccgcctggctgatcgaccccagcgacgccacccccagcttcgaggacctggtggagaagtactgcgagaagagcatcaccgtgaaggtgaacagcacctacggcaacagcagcagaaacatcgtgaaccagaacgtgagagagaacctgaagaccctgtacagactgaccatggacctgtgcagcaagctgaaggactacggcctgtggcagctgttcagaaccctggagctgcccctgatccccatcctggccgtgatggagagccacgccatccaggtgaacaaggaggagatggagaagaccagcgccctgctgggcgccagactgaaggagctggagcaggaggcccacttcgtggccggcgagagattcctgatcaccagcaacaaccagctgagagagatcctgttcggcaagctgaagctgcacctgctgagccagagaaacagcctgcccagaaccggcctgcagaagtaccccagcaccagcgaggccgtgctgaacgccctgagagacctgcaccccctgcccaagatcatcctggagtacagacaggtgcacaagatcaagagcaccttcgtggacggcctgctggcctgcatgaagaagggcagcatcagcagcacctggaaccagaccggcaccgtgaccggcagactgagcgccaagcaccccaacatccagggcatcagcaagcaccccatccagatcaccacccccaagaacttcaagggcaaggaggacaagatcctgaccatcagccccagagccatgttcgtgagcagcaagggccacaccttcctggccgccgacttcagccagatcgagctgagaatcctgacccacctgagcggcgaccccgagctgctgaagctgttccaggagagcgagagagacgacgtgttcagcaccctgaccagccagtggaaggacgtgcccgtggagcaggtgacccacgccgacagagagcagaccaagaaggtggtgtacgccgtggtgtacggcgccggcaaggagagactggccgcctgcctgggcgtgcccatccaggaggccgcccagttcctggagagcttcctgcagaagtacaagaagatcaaggacttcgccagagccgccatcgcccagtgccaccagaccggctgcgtggtgagcatcatgggcagaagaagacccctgcccagaatccacgcccacgaccagcagctgagagcccaggccgagagacaggccgtgaacttcgtggtgcagggcagcgccgccgacctgtgcaagctggccatgatccacgtgttcaccgccgtggccgccagccacaccctgaccgccagactggtggcccagatccacgacgagctgctgttcgaggtggaggacccccagatccccgagtgcgccgccctggtgagaagaaccatggagagcctggagcaggtgcccctgaaggtgagcctgagcgccggcagaagctggggccacctggtgcccctgcaggaggcctggctgagacaggcccacgtggccctgagcctgcccgccaccgcctggctgcccctgggccccctgcccgcccccagcccccacccctgcatcttcagactgcacttcgtgtgcagccccagacagcagtgggaggagagaaccggcttccagcagagcatcgtgtggcccagccccagaagccccgccctgtacgcccccggcagaatcaaccccctgggcctgggctggcccgccatcccctggagcaagtgcctgtgcaaggccctgctgatcctgtag

SEQ ID NO: 93834 - DNA, 936 bp, synthetic construct
  misc_feature 1..936: note = Description of Artificial Sequence: Synthetic coding sequence
  source 1..936: mol_type = other DNA
atggccgtgggcagccaggactacggcctgtggcagctgttcagaaccctggagctgcccctgatccccatcctggccgtgatggagagccacgccatccaggtgaacaaggaggagatggagaagaccagcgccctgctgggcgccagactgaaggagctggagcaggaggcccacttcgtggccggcgagagattcctgatcaccagcaacaaccagctgagagagatcctgttcggcaagctgaagctgcacctgctgagccagagaaacagcctgcccagaaccggcctgcagaagtaccccagcaccagcgaggccgtgaacatccagggcatcagcaagcaccccatccagatcaccacccccaagaacttcaagggcaaggaggacaagatcctgaccatcagccccagagccatgttcgtgagcagcaagggccacaccttcctggccgccgacttcagccagatcgagctgagaatcctgacccacctgagcggcgaccccgagctgctgaagctgttccaggagagcgagagagacgacgtgttcagcaccctgaccagccagtggaaggacgtgcccgtggagcaggtgacccacgccgacagagagcagaccaagaaggtggtgtacgccgtggtgtacggcgccggcaaggagagactggccgcctgcctgggcgtgcccatccaggaggccgcccagttcctggagagcttcctgcagaagtacaagaagatcaaggacttcgccagagccgccatcgcccagtgccaccagaccggctgcgtggtgagcatcatgggcagaagaagacccctgcccagaatccacgcccacgaccagcagctgagagcccaggccgagagacaggccgtgaacttcgtggtgcaggcccagagccagcacctgtgcgtggaggtgccctag

SEQ ID NO: 93835 - DNA, 2703 bp, synthetic construct
  misc_feature 1..2703: note = Description of Artificial Sequence: Synthetic coding sequence
  source 1..2703: mol_type = other DNA
atggagaactacgaggccctggtgggcttcgacctgtgcaacacccccctgagcagcgtggcccagaagatcatgagcgccatgcacagcggcgacctggtggacagcaagacctggggcaagagcaccgagaccatggaggtgatcaacaagagcagcgtgaagtacagcgtgcagctggaggacagaaagacccagagccccgagaagaaggacctgaagagcctgagaagccagaccagcagaggcagcgccaagctgagcccccagagcttcagcgtgagactgaccgaccagctgagcgccgaccagaagcagaagagcatcagcagcctgaccctgagcagctgcctgatcccccagtacaaccaggaggccagcgtgctgcagaagaagggccacaagagaaagcacttcctgatggagaacatcaacaacgagaacaagggcagcatcaacctgaagagaaagcacatcacctacaacaacctgagcgagaagaccagcaagcagatggccctggaggaggacaccgacgacgccgagggctacctgaacagcggcaacagcggcgccctgaagaagcacttctgcgacatcagacacctggacgactgggccaagagccagctgatcgagatgctgaagcaggccgccgccctggtgatcaccgtgatgtacaccgacggcagcacccagctgggcgccgaccagacccccgtgagcagcgtgagaggcatcgtggtgctggtgaagagacaggccgagggcggccacggctgccccgacgcccccgcctgcggccccgtgctggagggcttcgtgagcgacgacccctgcatctacatccagatcgagcacagcgccatctgggaccaggagcaggaggcccaccagcagttcgccagaaacgtgctgttccagaccatgaagtgcaagtgccccgtgatctgcttcaacgccaaggacttcgtgagaatcgtgctgcagttcttcggcaacgacggcagctggaagcacgtggccgacttcatcggcctggaccccagaatcgccgcctggctgatcgaccccagcgacgccacccccagcttcgaggacctggtggagaagtactgcgagaagagcatcaccgtgaaggtgaacagcacctacggcaacagcagcagaaacatcgtgaaccagaacgtgagagagaacctgaagaccctgtacagactgaccatggacctgtgcagcaagctgaaggactacggcctgtggcagctgttcagaaccctggagctgcccctgatccccatcctggccgtgatggagagccacgccatccaggtgaacaaggaggagatggagaagaccagcgccctgctgggcgccagactgaaggagctggagcaggaggcccacttcgtggccggcgagagattcctgatcaccagcaacaaccagctgagagagatcctgttcggcaagctgaagctgcacctgctgagccagagaaacagcctgcccagaaccggcctgcagaagtaccccagcaccagcgaggccgtgctgaacgccctgagagacctgcaccccctgcccaagatcatcctggagtacagacaggtgcacaagatcaagagcaccttcgtggacggcctgctggcctgcatgaagaagggcagcatcagcagcacctggaaccagaccggcaccgtgaccggcagactgagcgccaagcaccccaacatccagggcatcagcaagcaccccatccagatcaccacccccaagaacttcaagggcaaggaggacaagatcctgaccatcagccccagagccatgttcgtgagcagcaagggccacaccttcctggccgccgacttcagccagatcgagctgagaatcctgacccacctgagcggcgaccccgagctgctgaagctgttccaggagagcgagagagacgacgtgttcagcaccctgaccagccagtggaaggacgtgcccgtggagcaggtgacccacgccgacagagagcagaccaagaaggtggtgtacgccgtggtgtacggcgccggcaaggagagactggccgcctgcctgggcgtgcccatccaggaggccgcccagttcctggagagcttcctgcagaagtacaagaagatcaaggacttcgccagagccgccatcgcccagtgccaccagaccggctgcgtggtgagcatcatgggcagaagaagacccctgcccagaatccacgcccacgaccagcagctgagagcccaggccgagagacaggccgtgaacttcgtggtgcagggcagcgccgccgacctgtgcaagctggccatgatccacgtgttcaccgccgtggccgccagccacaccctgaccgccagactggtggcccagatccacgacgagctgctgttcgaggtggaggacccccagatccccgagtgcgccgccctggtgagaagaaccatggagagcctggagcaggtgcaggccctggagctgcagctgcaggtgcccctgaaggtgagcctgagcgccggcagaagctggggccacctggtgcccctgcaggaggcctggggccccccccccggcccctgcagaaccgagagccccagcaacagcctggccgcccccggcagccccgccagcacccagcccccccccctgcacttcagccccagcttctgcctgtag

SEQ ID NO: 93836 - DNA, 2703 bp, synthetic construct; identical to SEQ ID NO: 93835
  misc_feature 1..2703: note = Description of Artificial Sequence: Synthetic coding sequence
  source 1..2703: mol_type = other DNA

SEQ ID NO: 93837 - DNA, 3033 bp, synthetic construct
  misc_feature 1..3033: note = Description of Artificial Sequence: Synthetic coding sequence
  source 1..3033: mol_type = other DNA
agaatggacggcaagagaagacccggccccggccccggcgtgccccccaagagagccagaggcggcctgtgggacgacgacgacgcccccagacccagccagttcgaggaggacctggccctgatggaggagatggaggccgagcacagactgcaggagcaggaggaggaggagctgcagagcgtgctggagggcgtggccgacggccaggtgccccccagcgccatcgaccccagatggctgagacccaccccccccgccctggacccccagaccgagcccctgatcttccagcagctggagatcgaccactacgtgggccccgcccagcccgtgcccggcggccccccccccagcagaggcagcgtgcccgtgctgagagccttcggcgtgaccgacgagggcttcagcgtgtgctgccacatccacggcttcgccccctacttctacacccccgccccccccggcttcggccccgagcacatgggcgacctgcagagagagctgaacctggccatcagcagagacagcagaggcggcagagagctgaccggccccgccgtgctggccgtggagctgtgcagcagagagagcatgttcggctaccacggccacggccccagccccttcctgagaatcaccgtggccctgcccagactggtggcccccgccagaagactgctggagcagggcatcagagtggccggcctgggcacccccagcttcgccccctacgaggccaacgtggacttcgagatcagattcatggtggacaccgacatcgtgggctgcaactggctggagctgcccgccggcaagtacgccctgagactgaaggagaaggccacccagtgccagctggaggccgacgtgctgtggagcgacgtggtgagccacccccccgagggcccctggcagagaatcgcccccctgagagtgctgagcttcgacatcgagtgcgccggcagaaagggcatcttccccgagcccgagagagaccccgtgatccagatctgcagcctgggcctgagatggggcgagcccgagcccttcctgagactggccctgaccctgagaccctgcgcccccatcctgggcgccaaggtgcagagctacgagaaggaggaggacctgctgcaggcctggagcaccttcatcagaatcatggaccccgacgtgatcaccggctacaacatccagaacttcgacctgccctacctgatcagcagagcccagaccctgaaggtgcagaccttccccttcctgggcagagtggccggcctgtgcagcaacatcagagacagcagcttccagagcaagcagaccggcagaagagacaccaaggtggtgagcatggtgggcagagtgcagatggacatgctgcaggtgctgctgagagagtacaagctgagaagctacaccctgaacgccgtgagcttccacttcctgggcgagcagaaggaggacgtgcagcacagcatcatcaccgacctgcagaacggcaacgaccagaccagaagaagactggccgtgtactgcctgaaggacgcctacctgcccctgagactgctggagagactgatggtgctggtgaacgccgtggagatggccagagtgaccggcgtgcccctgagctacctgctgagcagaggccagcaggtgaaggtggtgagccagctgctgagacaggccatgcacgagggcctgctgatgcccgtggtgaagagcgagggcggcgaggactacaccggcgccaccgtgatcgagcccctgaagggctactacgacgtgcccatcgccaccctggacttcagcagcctgtaccccagcatcatgatggcccacaacctgtgctacaccaccctgctgagacccggcaccgcccagaagctgggcctgaccgaggaccagttcatcagaacccccaccggcgacgagttcgtgaagaccagcgtgagaaagggcctgctgccccagatcctggagaacctgctgagcgccagaaagagagccaaggccgagctggccaaggagaccgaccccctgagaagacaggtgctggacggcagacagctggccctgaaggtgagcgccaacagcgtgtacggcttcaccggcgcccaggtgggcaagctgccctgcctggagatcagccagagcgtgaccggcttcggcagacagatgatcgagaagaccaagcagctggtggagagcaagtacaccgtggagaacggctacagcaccagcgccaaggtggtgtacggcgacaccgacagcgtgatgtgcagattcggcgtgagcagcgtggccgaggccatggccctgggcagagaggccgccgactgggtgagcggccacttccccagccccatcagactggagttcgagaaggtgtacttcccctacctgctgatcagcaagaagagatacgccggcctgctgttcagcagcagacccgacgcccacgacagaatggactgcaagggcctggaggccgtgagaagagacaactgccccctggtggccaacctggtgaccgccagcctgagaagactgctgatcgacagagaccccgagggcgccgtggcccacgcccaggacgtgatcagcgacctgctgtgcaacagaatcgacatcagccagctggtgatcaccaaggagctgaccagagccgccagcgactacgccggcaagcaggcccacgtggagctggccgagagaaccagatgcagctgctggagcaccgcctgccccctgaccagaagcaccacctggagcagcagctggcccagccccagctgcgccagcagcagccccagctgggccagagccgtgcccagactgtgctactgcggcggcaccaccagagccgccagaagatgcagcagagccagatgggccgccagctggcccagccccaacgccgccaccgccgccctggccgccgcccagtgcagcgccaccagagagccctgcgtgagcagcgccagccccggcagcctgagctgcatcagaagaagataccccatctag

SEQ ID NO: 93838 - DNA, 3324 bp, synthetic construct
  misc_feature 1..3324: note = Description of Artificial Sequence: Synthetic coding sequence
  source 1..3324: mol_type = other DNA
atggacggcaagagaagacccggccccggccccggcgtgccccccaagagagccagaggcggcctgtgggacgacgacgacgcccccagacccagccagttcgaggaggacctggccctgatggaggagatggaggccgagcacagactgcaggagcaggaggaggaggagctgcagagcgtgctggagggcgtggccgacggccaggtgccccccagcgccatcgaccccagatggctgagacccaccccccccgccctggacccccagaccgagcccctgatcttccagcagctggagatcgaccactacgtgggccccgcccagcccgtgcccggcggccccccccccagcagaggcagcgtgcccgtgctgagagccttcggcgtgaccgacgagggcttcagcgtgtgctgccacatccacggcttcgccccctacttctacacccccgccccccccggcttcggccccgagcacatgggcgacctgcagagagagctgaacctggccatcagcagagacagcagaggcggcagagagctgaccggccccgccgtgctggccgtggagctgtgcagcagagagagcatgttcggctaccacggccacggccccagccccttcctgagaatcaccgtggccctgcccagactggtggcccccgccagaagactgctggagcagggcatcagagtggccggcctgggcacccccagcttcgccccctacgaggccaacgtggacttcgagatcagattcatggtggacaccgacatcgtgggctgcaactggctggagctgcccgccggcaagtacgccctgagactgaaggagaaggccacccagtgccagctggaggccgacgtgctgtggagcgacgtggtgagccacccccccgagggcccctggcagagaatcgcccccctgagagtgctgagcttcgacatcgagtgcgccggcagaaagggcatcttccccgagcccgagagagaccccgtgatccagatctgcagcctgggcctgagatggggcgagcccgagcccttcctgagactggccctgaccctgagaccctgcgcccccatcctgggcgccaaggtgcagagctacgagaaggaggaggacctgctgcaggcctggagcaccttcatcagaatcatggaccccgacgtgatcaccggctacaacatccagaacttcgacctgccctacctgatcagcagagcccagaccctgaaggtgcagaccttccccttcctgggcagagtggccggcctgtgcagcaacatcagagacagcagcttccagagcaagcagaccggcagaagagacaccaaggtggtgagcatggtgggcagagtgcagatggacatgctgcaggtgctgctgagagagtacaagctgagaagctacaccctgaacgccgtgagcttccacttcctgggcgagcagaaggaggacgtgcagcacagcatcatcaccgacctgcagaacggcaacgaccagaccagaagaagactggccgtgtactgcctgaaggacgcctacctgcccctgagactgctggagagactgatggtgctggtgaacgccgtggagatggccagagtgaccggcgtgcccctgagctacctgctgagcagaggccagcaggtgaaggtggtgagccagctgctgagacaggccatgcacgagggcctgctgatgcccgtggtgaagagcgagggcggcgaggactacaccggcgccaccgtgatcgagcccctgaagggctactacgacgtgcccatcgccaccctggacttcagcagcctgtaccccagcatcatgatggcccacaacctgtgctacaccaccctgctgagacccggcaccgcccagaagctgggcctgaccgaggaccagttcatcagaacccccaccggcgacgagttcgtgaagaccagcgtgagaaagggcctgctgccccagatcctggagaacctgctgagcgccagaaagagagccaaggccgagctggccaaggagaccgaccccctgagaagacaggtgctggacggcagacagctggccctgaaggtgagcgccaacagcgtgtacggcttcaccggcgcccaggtgggcaagctgccctgcctggagatcagccagagcgtgaccggcttcggcagacagatgatcgagaagaccaagcagctggtggagagcaagtacaccgtggagaacggctacagcaccagcgccaaggtggtgtacggcgacaccgacagcgtgatgtgcagattcggcgtgagcagcgtggccgaggccatggccctgggcagagaggccgccgactgggtgagcggccacttccccagccccatcagactggagttcgagaaggtgtacttcccctacctgctgatcagcaagaagagatacgccggcctgctgttcagcagcagacccgacgcccacgacagaatggactgcaagggcctggaggccgtgagaagagacaactgccccctggtggccaacctggtgaccgccagcctgagaagactgctgatcgacagagaccccgagggcgccgtggcccacgcccaggacgtgatcagcgacctgctgtgcaacagaatcgacatcagccagctggtgatcaccaaggagctgaccagagccgccagcgactacgccggcaagcaggcccacgtggagctggccgagagaatgagaaagagagaccccggcagcgcccccagcctgggcgacagagtgccctacgtgatcatcagcgccgccaagggcgtggccgcctacatgaagagcgaggaccccctgttcgtgctggagcacagcctgcccatcgacacccagtactacctggagcagcagctggccaagcccctgctgagaatcttcgagcccatcctgggcgagggcagagccgaggccgtgctgctgagaggcgaccacaccagatgcaagaccgtgctgaccggcaaggtgggcggcctgctggccttcgccaagagaagaaactgctgcatcggctgcagaaccgtgctgagccaccagggcgccgtgtgcgagttctgccagcccagagagagcgagctgtaccagaaggaggtgagccacctgaacgccctggaggagagattcagcagactgtggacccagtgccagagatgccagggcagcctgcacgaggacgtgatctgcaccagcagagactgccccatcttctacatgagaaagaaggtgagaaaggacctggaggaccaggagcagctgctgagaagattcggcccccccggccccgaggcctggtag

SEQ ID NO: 93839 - DNA, 1410 bp, synthetic construct
  misc_feature 1..1410: note = Description of Artificial Sequence: Synthetic coding sequence
  source 1..1410: mol_type = other DNA
atgttcagcgagcaggccgcccagagagcccacaccctgctgagcccccccagcgccaacaacgccaccttcgccagagtgcccgtggccacctacaccaacagcagccagcccttcagactgggcgagagaagcttcagcagacagtacgcccacatctacgccaccagactgatccagatgagacccttcctggagaacagagcccagcagcactggggcagcggcgtgggcgtgaagaagctgtgcgagctgcagcccgaggagaagtgctgcgtggtgggcaccctgttcaaggccatgcccctgcagcccagcatcctgagagaggtgagcgaggagcacaacctgctgccccagccccccagaagcaagtacatccaccccgacgacgagctggtgctggaggacgagctgcagagaatcaagctgaagggcaccatcgacgtgagcaagctggtgaccggcaccgtgctggccgtgttcggcagcgtgagagacgacggcaagttcctggtggaggactactgcttcgccgacctggccccccagaagcccgccccccccctggacaccgacagattcgtgctgctggtgagcggcctgggcctgggcggcggcggcggcgagagcctgctgggcacccagctgctggtggacgtggtgaccggccagctgggcgacgagggcgagcagtgcagcgccgcccacgtgagcagagtgatcctggccggcaacctgctgagccacagcacccagagcagagacagcatcaacaaggccaagtacctgaccaagaagacccaggccgccagcgtggaggccgtgaagatgctggacgagatcctgctgcagctgagcgccagcgtgcccgtggacgtgatgcccggcgagttcgaccccaccaactacaccctgccccagcagcccctgcacccctgcatgttccccctggccaccgcctacagcaccctgcagctggtgaccaacccctaccaggccaccatcgacggcgtgagattcctgggcaccagcggccagaacgtgagcgacatcttcagatacagcagcatggaggaccacctggagatcctggagtggaccctgagagtgagacacatcagccccaccgcccccgacaccctgggctgctaccccttctacaagaccgaccccttcatcttccccgagtgcccccacgtgtacttctgcggcaacacccccagcttcggcagcaagatcatcagaggccccgaggaccagaccgtgctgctggtgaccgtgcccgacttcagcgccacccagaccgcctgcctggtgaacctgagaagcctggcctgccagcccatcagcttcagcggcttcggcgccgaggacgacgacctgggcggcctgggcctgggcccctag

SEQ ID NO: 93840 - DNA, 447 bp, synthetic construct
  misc_feature 1..447: note = Description of Artificial Sequence: Synthetic coding sequence
  source 1..447: mol_type = other DNA
atgttcagcgagcaggccgcccagagagcccacaccctgctgagcccccccagcgccaacaacgccaccttcgccagagtgcccgtggccacctacaccaacagcagccagcccttcagactgggcgagagaagcttcagcagacagtacgcccacatctacgccaccagactgatccagatgagacccttcctggagaacagagcccagcagcactggggcagcggcgtgggcgtgaagaagctgtgcgagctgcagcccgaggagaagtgctgcgtggtgggcaccctgttcaaggccatgcccctgcagcccagcatcctgagagaggtgagcgaggagcacaacctgctgccccagccccccagaagcaagtacatccaccccgacgacgagctggtgctggaggacgagctgcagagaatcaagctgaagggcaccatctag

SEQ ID NO: 93841 - DNA, 663 bp, synthetic construct
  misc_feature 1..663: note = Description of Artificial Sequence: Synthetic coding sequence
  source 1..663: mol_type = other DNA
atgttcagcgagcaggccgcccagagagcccacaccctgctgagcccccccagcgccaacaacgccaccttcgccagagtgcccgtggccacctacaccaacagcagccagcccttcagactgggcgagagaagcttcagcagacagtacgcccacatctacgccaccagactgatccagatgagacccttcctggagaacagagcccagcagcactggggcagcggcgtgggcgtgaagaagctgtgcgagctgcagcccgaggagaagtgctgcgtggtgggcaccctgttcaaggccatgcccctgcagcccagcatcctgagagaggtgagcgaggagcacaacctgctgccccagccccccagaagcaagtacatccaccccgacgacgagctggtgctggaggacgagctgcagagaatcaagctgaagggcaccatcgacgtgagcaagctggtgaccggcaccgtgctggccgtgttcggcagcgtgagagacgacggcaagttcctggtggaggactactgcttcgccgacctggccccccagaagcccgccccccccctggacaccgacagattcgtgctgctggtgagcggcctgggcctgggcggcggcggcggcgagagcctgctgggcacccagctgctggtggactag

SEQ ID NO: 93842 - DNA, 1410 bp, synthetic construct; identical to SEQ ID NO: 93839
  misc_feature 1..1410: note = Description of Artificial Sequence: Synthetic coding sequence
  source 1..1410: mol_type = other DNA

SEQ ID NO: 93843 - DNA, 468 bp, synthetic construct
  misc_feature 1..468: note = Description of Artificial Sequence: Synthetic coding sequence
  source 1..468: mol_type = other DNA
atgttcagcgagcaggccgcccagagagcccacaccctgctgagcccccccagcgccaacaacgccaccttcgccagagtgcccgtggccacctacaccaacagcagccagcccttcagactgggcgagagaagcttcagcagacagtacgcccacatctacgccaccagactgatccagatgagacccttcctggagaacagagcccagcagcactggggcagcggcgtgggcgtgaagaagctgtgcgagctgcagcccgaggagaagtgctgcgtggtgggcaccctgttcaaggccatgcccctgcagcccagcatcctgagagaggtgagcgaggagcacaacctgctgccccagccccccagaagcaagtacatccaccccgacgacgagctggtgctggaggacgagctgcagagaatcaagctgaagggcaccatcgacgtgagcaagctggtgacctag

SEQ ID NO: 93844 - DNA, 771 bp, synthetic construct
  misc_feature 1..771: note = Description of Artificial Sequence: Synthetic coding sequence
  source 1..771: mol_type = other DNA
atgttccccgtgctgcccggcagccacctgctgctgaacaaccccgccctggagttcatcaagtacgtgtgcaaggtgctgagcctggacaccaacatcaccaaccaggtgaacaagctgaacagagacctgctgagactggtggacgtgggcgagttcagcgaggaggcccagttcagagacccctgcagaagctacgtgctgcccgaggtgatctgcagaagctgcaacttctgcagagacctggacctgtgcaaggacagcagcttcagcgaggacggcgccgtgctgccccagtggctgtgcagcaactgccaggccccctacgacagcagcgccatcgagatgaccctggtggaggtgctgcagaagaagctgatggccttcaccctgcaggacctgaaggaggccgacacccccaagtgcgaggagaaggagagaagaaagagagagctgcacagcagcgccaccggcagaagctgcagaggcgccagcgagcagagactgggcgacgcccccagctgcagagtggtggtgcacggcgtgcaggcctgcagaatggagggcgtgtgcctgaagtgcagaggcgtgaaggagaccagcatgcccgtgtactgcagctgcgccggcgacttcgccctgaccatccacacccaggtgttcatggagcagatcggcatcttcagaaacatcgcccagcactacggcatgagctacctgctggagaccctggagtggctgctgcagaagaacccccagctgggccactag

SEQ ID NO: 93845 - DNA, 6861 bp, synthetic construct
  misc_feature 1..6861: note = Description of Artificial Sequence: Synthetic coding sequence
  source 1..6861: mol_type = other DNA
atgagcctgagaagcggcggcagaagaagagccgaccccggcgccgacggcgaggccagcagagacgacggcgccaccagcagcgtgagcgccctgaagagactggagagaagccagtggaccgacaagatggacctgagattcggcttcgagagactgaaggagcccggcgagaagaccggctggctgatcaacatgcaccccaccgagatcctggacgaggacaagagactgggcagcgccgtggactactacttcatccaggacgacggcagcagattcaaggtggccctgccctacaagccctacttctacatcgccaccagaaagggctgcgagagagaggtgagcagcttcctgagcaagaagttccagggcaagatcgccaaggtggagaccgtgcccaaggaggacctggacctgcccaaccacctggtgggcctgaagagaaactacatcagactgagcttccacaccgtggaggacctggtgaaggtgagaaaggagatcagccccgccgtgaagaagaacagagagcaggaccacgccagcgacgcctacaccgccctgctgagcagcgtgctgcagagaggcggcgtgatcaccgacgaggaggagaccagcaagaagatcgccgaccagctggacaacatcgtggacatgagagagtacgacgtgccctaccacatcagactgagcatcgacctgaagatccacgtggcccactggtacaacgtgagatacagaggcaacgccttccccgtggagatcaccagaagagacgacctggtggagagacccgaccccgtggtgctggccttcgacatcgagaccaccaagctgcccctgaagttccccgacgccgagaccgaccagatcatgatgatcagctacatgatcgacggccagggctacctgatcaccaacagagagatcgtgagcgaggacatcgaggacttcgagttcacccccaagcccgagtacgagggccccttctgcgtgttcaacgagcccgacgaggcccacctgatccagagatggttcgagcacgtgcaggagaccaagcccaccatcatggtgacctacaacggcgacttcttcgactggcccttcgtggaggccagagccgccgtgcacggcctgagcatgcagcaggagatcggcttccagaaggacagccagggcgagtacaaggccccccagtgcatccacatggactgcctgagatgggtgaagagagacagctacctgcccgtgggcagccacaacctgaaggccgccgccaaggccaagctgggctacgaccccgtggagctggaccccgaggacatgtgcagaatggccaccgagcagccccagaccctggccacctacagcgtgagcgacgccgtggccacctactacctgtacatgaagtacgtgcaccccttcatcttcgccctgtgcaccatcatccccatggagcccgacgaggtgctgagaaagggcagcggcaccctgtgcgaggccctgctgatggtgcaggccttccacgccaacatcatcttccccaacaagcaggagcaggagttcaacaagctgaccgacgacggccacgtgctggacagcgagacctacgtgggcggccacgtggaggccctggagagcggcgtgttcagaagcgacatcccctgcagattcagaatgaaccccgccgccttcgacttcctgctgcagagagtggagaagaccctgagacacgccctggaggaggaggagaaggtgcccgtggagcaggtgaccaacttcgaggaggtgtgcgacgagatcaagagcaagctggccagcctgaaggacgtgcccagcagaatcgagtgccccctgatctaccacctggacgtgggcgccatgtaccccaacatcatcctgaccaacagactgcagcccagcgccatggtggacgaggccacctgcgccgcctgcgacttcaacaagcccggcgccaactgccagagaaagatggcctggcagtggagaggcgagttcatgcccgccagcagaagcgagtaccacagaatccagcaccagctggagagcgagaagttcccccccctgttccccgagggccccgccagagccttccacgagctgagcagagaggagcaggccaagtacgagaagagaagactggccgactactgcagaaaggcctacaagaagatccacatcaccaaggtggaggagagactgaccaccatctgccagagagagaacagcttctacgtggacaccgtgagagccttcagagacagaagatacgagttcaagggcctgcacaaggtgtggaagaagaagctgagcgccgccgtggaggtgggcgacgccgccgaggtgaagagatgcaagaacatggaggtgctgtacgacagcctgcagctggcccacaagtgcatcctgaacagcttctacggctacgtgatgagaaagggcgccagatggtacagcatggagatggccggcatcgtgtgcttcaccggcgccaacatcatcacccaggccagagagctgatcgagcagatcggcagacccctggagctggacaccgacggcatctggtgcgtgctgcccaacagcttccccgagaacttcgtgttcaagaccaccaacgtgaagaagcccaaggtgaccatcagctaccccggcgccatgctgaacatcatggtgaaggagggcttcaccaacgaccagtaccaggagctggccgagcccagcagcctgacctacgtgaccagaagcgagaacagcatcttcttcgaggtggacggcccctacctggccatgatcctgcccgccagcaaggaggagggcaagaagctgaagaagagatacgccgtgttcaacgaggacggcagcctggccgagctgaagggcttcgaggtgaagagaagaggcgagctgcagctgatcaagatcttccagagcagcgtgttcgaggccttcctgaagggcagcaccctggaggaggtgtacggcagcgtggccaaggtggccgactactggctggacgtgctgtacagcaaggccgccaacatgcccgacagcgagctgttcgagctgatcagcgagaacagaagcatgagcagaaagctggaggactacggcgagcagaagagcaccagcatcagcaccgccaagagactggccgagttcctgggcgaccagatggtgaaggacgccggcctgagctgcagatacatcatcagcagaaagcccgagggcagccccgtgaccgagagagccatccccctggccatcttccaggccgagcccaccgtgagaaagcacttcctgagaaagtggctgaagagcagcagcctgcaggacttcgacatcagagccatcctggactgggactactacatcgagagactgggcagcgccatccagaagatcatcaccatccccgccgccctgcagcaggtgaagaaccccgtgcccagagtgaagcaccccgactggctgcacaagaagctgctggagaagaacgacgtgtacaagcagaagaagatcagcgagctgttcaccctggagggcagaagacaggtgaccatggccgaggccagcgaggacagccccagacccagcgcccccgacatggaggacttcggcctggtgaagctgccccaccccgccgcccccgtgaccgtgaagagaaagagagtgctgtgggagagccaggaggagagccaggacctgacccccaccgtgccctggcaggagatcctgggccagccccccgccctgggcaccagccaggaggagtggctggtgtggctgagattccacaagaagaagtggcagctgcaggccagacagagactggccagaagaaagagacagagactggagagcgccgagggcgtgctgagacccggcgccatcagagacggccccgccaccggcctgggcagcttcctgagaagaaccgccagaagcatcctggacctgccctggcagatcgtgcagatcagcgagaccagccaggccggcctgttcagactgtgggccctggtgggcagcgacctgcactgcatcagactgagcatccccagagtgttctacgtgaaccagagagtggccaaggccgaggagggcgccagctacagaaaggtgaacagagtgctgcccagaagcaacatggtgtacaacctgtacgagtacagcgtgcccgaggacatgtaccaggagcacatcaacgagatcaacgccgagctgagcgcccccgacatcgagggcgtgtacgagacccaggtgcccctgctgttcagagccctggtgcacctgggctgcgtgtgcgtggtgaacaagcagctggtgagacacctgagcggctgggaggccgagaccttcgccctggagcacctggagatgagaagcctggcccagttcagctacctggagcccggcagcatcagacacatctacctgtaccaccacgcccaggcccacaaggccctgttcggcatcttcatccccagccagagaagagccagcgtgttcgtgctggacaccgtgagaagcaaccagatgcccagcctgggcgccctgtacagcgccgagcacggcctgctgctggagaaggtgggccccgagctgctgcccccccccaagcacaccttcgaggtgagagccgagaccgacctgaagaccatctgcagagccatccagagattcctgctggcctacaaggaggagagaagaggccccaccctgatcgccgtgcagagcagctgggagctgaagagactggccagcgagatccccgtgctggaggagttccccctggtgcccatctgcgtggccgacaagatcaactacggcgtgctggactggcagagacacggcgccagaagaatgatcagacactacctgaacctggacacctgcctgagccaggccttcgagatgagcagatacttccacatccccatcggcaacctgcccgaggacatcagcaccttcggcagcgacctgttcttcgccagacacctgcagagacacaaccacctgctgtggctgagccccaccgccagacccgacctgggcggcaaggaggccgacgacaactgcctggtgatggagttcgacgaccaggccaccgtggagatcaacagcagcggctgctacagcaccgtgtgcgtggagctggacctgcagaacctggccgtgaacaccatcctgcagagccaccacgtgaacgacatggagggcgccgacagcatgggcatcagcttcgacgtgatccagcaggccagcctggaggacatgatcaccggcggccaggccgccagcgcccccgccagctacgacgagaccgccctgtgcagcaacaccttcagaatcctgaagagcatggtggtgggctgggtgaaggagatcacccagtaccacaacatctacgccgacaaccaggtgatgcacttctacagatggctgagaagccccagcagcctgctgcacgaccccgccctgcacagaaccctgcacaacatgatgaagaagctgttcctgcagctgatcgccgagttcaagagactgggcagcagcgtgatctacgccaacttcaacagaatcatcctgtgcaccaagaagagaagagtggaggacgccatcgcctacgtggagtacatcaccagcagcatccacagcaaggagaccttccacagcctgaccatcagcttcagcagatgctgggagttcctgctgtggatggaccccagcaactacggcggcatcaagggcaaggtgagcagcagaatccactgcggcctgcaggacagccagaaggccggcggcgccgaggacgagcaggagaacgaggacgacgaggaggagagagacggcgaggaggaggaggaggccgaggagagcaacgtggaggacctgctggagaacaactggaacatcctgcagttcctgccccaggccgccagctgccagaactacttcctgatgatcgtgagcgcctacatcgtggccgtgtaccactgcatgaaggacggcctgagaagaagcgcccccggcagcacccccgtgagaagaagaggcgccagccagctgagccaggaggccgagggcgccgtgggcgccctgcccggcatgatcaccttcagccaggactacgtggccaacgagctgacccagagcttcttcaccatcacccagaagatccagaagaaggtgaccggcagcagaaacagcaccgagctgagcgagatgttccccgtgctgcccggcagccacctgctgctgaacaaccccgccctggagttcatcaagtacgtgtgcaaggtgctgagcctggacaccaacatcaccaaccaggtgaacaagctgaacagagacctgctgagactggtggacgtgggcgagttcagcgaggaggcccagttcagagacccctgcagaagctacgtgctgcccgaggtgatctgcagaagctgcaacttctgcagagacctggacctgtgcaaggacagcagcttcagcgaggacggcgccgtgctgccccagtggctgtgcagcaactgccaggccccctacgacagcagcgccatcgagatgaccctggtggaggtgctgcagaagaagctgatggccttcaccctgcaggacctggtgtgcctgaagtgcagaggcgtgaaggagaccagcatgcccgtgtactgcagctgcgccggcgacttcgccctgaccatccacacccaggtgttcatggagcagatcggcatcttcagaaacatcgcccagcactacggcatgagctacctgctggagaccctggagtggctgctgcagaagaacccccagctgggccactag

SEQ ID NO: 93846 - DNA, 3330 bp, synthetic construct
  misc_feature 1..3330: note = Description of Artificial Sequence: Synthetic coding sequence
  source 1..3330: mol_type = other DNA
atgcaccccaccgagatcctggacgaggacaagagactgggcagcgccgtggactactacttcatccaggacgacggcagcagattcaaggtggccctgccctacaagccctacttctacatcgccaccagaaagggctgcgagagagaggtgagcagcttcctgagcaagaagttccagggcaagatcgccaaggtggagaccgtgcccaaggaggacctggacctgcccaaccacctggtgggcctgaagagaaactacatcagactgagcttccacaccgtggaggacctggtgaaggtgagaaaggagatcagccccgccgtgaagaagaacagagagcaggaccacgccagcgacgcctacaccgccctgctgagcagcgtgctgcagagaggcggcgtgatcaccgacgaggaggagaccagcaagaagatcgccgaccagctggacaacatcgtggacatgagagagtacgacgtgccctaccacatcagactgagcatcgacctgaagatccacgtggcccactggtacaacgtgagatacagaggcaacgccttccccgtggagatcaccagaagagacgacctggtggagagacccgaccccgtggtgctggccttcgacatcgagaccaccaagctgcccctgaagttccccgacgccgagaccgaccagatcatgatgatcagctacatgatcgacggccagggctacctgatcaccaacagagagatcgtgagcgaggacatcgaggacttcgagttcacccccaagcccgagtacgagggccccttctgcgtgttcaacgagcccgacgaggcccacctgatccagagatggttcgagcacgtgcaggagaccaagcccaccatcatggtgacctacaacggcgacttcttcgactggcccttcgtggaggccagagccgccgtgcacggcctgagcatgcagcaggagatcggcttccagaaggacagccagggcgagtacaaggccccccagtgcatccacatggactgcctgagatgggtgaagagagacagctacctgcccgtgggcagccacaacctgaaggccgccgccaaggccaagctgggctacgaccccgtggagctggaccccgaggacatgtgcagaatggccaccgagcagccccagaccctggccacctacagcgtgagcgacgccgtggccacctactacctgtacatgaagtacgtgcaccccttcatcttcgccctgtgcaccatcatccccatggagcccgacgaggtgctgagaaagggcagcggcaccctgtgcgaggccctgctgatggtgcaggccttccacgccaacatcatcttccccaacaagcaggagcaggagttcaacaagctgaccgacgacggccacgtgctggacagcgagacctacgtgggcggccacgtggaggccctggagagcggcgtgttcagaagcgacatcccctgcagattcagaatgaaccccgccgccttcgacttcctgctgcagagagtggagaagaccctgagacacgccctggaggaggaggagaaggtgcccgtggagcaggtgaccaacttcgaggaggtgtgcgacgagatcaagagcaagctggccagcctgaaggacgtgcccagcagaatcgagtgccccctgatctaccacctggacgtgggcgccatgtaccccaacatcatcctgaccaacagactgcagcccagcgccatggtggacgaggccacctgcgccgcctgcgacttcaacaagcccggcgccaactgccagagaaagatggcctggcagtggagaggcgagttcatgcccgccagcagaagcgagtaccacagaatccagcaccagctggagagcgagaagttcccccccctgttccccgagggccccgccagagccttccacgagctgagcagagaggagcaggccaagtacgagaagagaagactggccgactactgcagaaaggcctacaagaagatccacatcaccaaggtggaggagagactgaccaccatctgccagagagagaacagcttctacgtggacaccgtgagagccttcagagacagaagatacgagttcaagggcctgcacaaggtgtggaagaagaagctgagcgccgccgtggaggtgggcgacgccgccgaggtgaagagatgcaagaacatggaggtgctgtacgacagcctgcagctggcccacaagtgcatcctgaacagcttctacggctacgtgatgagaaagggcgccagatggtacagcatggagatggccggcatcgtgtgcttcaccggcgccaacatcatcacccaggccagagagctgatcgagcagatcggcagacccctggagctggacaccgacggcatctggtgcgtgctgcccaacagcttccccgagaacttcgtgttcaagaccaccaacgtgaagaagcccaaggtgaccatcagctaccccggcgccatgctgaacatcatggtgaaggagggcttcaccaacgaccagtaccaggagctggccgagcccagcagcctgacctacgtgaccagaagcgagaacagcatcttcttcgaggtggacggcccctacctggccatgatcctgcccgccagcaaggaggagggcaagaagctgaagaagagatacgccgtgttcaacgaggacggcagcctggccgagctgaagggcttcgaggtgaagagaagaggcgagctgcagctgatcaagatcttccagagcagcgtgttcgaggccttcctgaagggcagcaccctggaggaggtgtacggcagcgtggccaaggtggccgactactggctggacgtgctgtacagcaaggccgccaacatgcccgacagcgagctgttcgagctgatcagcgagaacagaagcatgagcagaaagctggaggactacggcgagcagaagagcaccagcatcagcaccgccaagagactggccgagttcctgggcgaccagatggtgaaggacgccggcctgagctgcagatacatcatcagcagaaagcccgagggcagccccgtgaccgagagagccatccccctggccatcttccaggccgagcccaccgtgagaaagcacttcctgagaaagtggctgaagagcagcagcctgcaggacttcgacatcagagccatcctggactgggactactacatcgagagactgggcagcgccatccagaagatcatcaccatccccgccgccctgcagcaggtgaagaaccccgtgcccagagtgaagcaccccgactggctgcacaagaccgccggcgaggagtag

SEQ ID NO: 93847 - DNA, 1491 bp, synthetic construct
  misc_feature 1..1491: note = Description of Artificial Sequence: Synthetic coding sequence
  source 1..1491: mol_type = other DNA
atggagggcatcctgaagagcatggtggtgggctgggtgaaggagatcacccagtaccacaacatctacgccgacaaccaggtgatgcacttctacagatggctgagaagccccagcagcctgctgcacgaccccgccctgcacagaaccctgcacaacatgatgaagaagctgttcctgcagctgatcgccgagttcaagagactgggcagcagcgtgatctacgccaacttcaacagaatcatcctgtgcaccaagaagagaagagtggaggacgccatcgcctacgtggagtacatcaccagcagcatccacagcaaggagaccttccacagcctgaccatcagcttcagcagatgctgggagttcctgctgtggatggaccccagcaactacggcggcatcaagggcaaggtgagcagcagaatccactgcggcctgcaggacagccagaaggccggcggcgccgaggacgagcaggagaacgaggacgacgaggaggagagagacggcgaggaggaggaggaggccgaggagagcaacgtggaggacctgctggagaacaactggaacatcctgcagttcctgccccaggccgccagctgccagaactacttcctgatgatcgtgagcgcctacatcgtggccgtgtaccactgcatgaaggacggcctgagaagaagcgcccccggcagcacccccgtgagaagaagaggcgccagccagctgagccaggaggccgagggcgccgtgggcgccctgcccggcatgatcaccttcagccaggactacgtggccaacgagctgacccagagcttcttcaccatcacccagaagatccagaagaaggtgaccggcagcagaaacagcaccgagctgagcgagatgttccccgtgctgcccggcagccacctgctgctgaacaaccccgccctggagttcatcaagtacgtgtgcaaggtgctgagcctggacaccaacatcaccaaccaggtgaacaagctgaacagagacctgctgagactggtggacgtgggcgagttcagcgaggaggcccagttcagagacccctgcagaagctacgtgctgcccgaggtgatctgcagaagctgcaacttctgcagagacctggacctgtgcaaggacagcagcttcagcgaggacggcgccgtgctgccccagtggctgtgcagcaactgccaggccccctacgacagcagcgccatcgagatgaccctggtggaggtgctgcagaagaagctgatggccttcaccctgcaggacctggtgtgcctgaagtgcagaggcgtgaaggagaccagcatgcccgtgtactgcagctgcgccggcgacttcgccctgaccatccacacccaggtgttcatggagcagatcggcatcttcagaaacatcgcccagcactacggcatgagctacctgctggagaccctggagtggctgctgcagaagaacccccagctgggccactag

SEQ ID NO: 93848 - DNA, 6894 bp, synthetic construct
  misc_feature 1..6894: note = Description of Artificial Sequence: Synthetic coding sequence
  source 1..6894: mol_type = other DNA
atgagcagacccctgggcctgaagagcttccccagacacaagcaggcccccctgcccctgagcctgaccttccacggctgcctgctgctgagaagagacgacggcgccaccagcagcgtgagcgccctgaagagactggagagaagccagtggaccgacaagatggacctgagattcggcttcgagagactgaaggagcccggcgagaagaccggctggctgatcaacatgcaccccaccgagatcctggacgaggacaagagactgggcagcgccgtggactactacttcatccaggacgacggcagcagattcaaggtggccctgccctacaagccctacttctacatcgccaccagaaagggctgcgagagagaggtgagcagcttcctgagcaagaagttccagggcaagatcgccaaggtggagaccgtgcccaaggaggacctggacctgcccaaccacctggtgggcctgaagagaaactacatcagactgagcttccacaccgtggaggacctggtgaaggtgagaaaggagatcagccccgccgtgaagaagaacagagagcaggaccacgccagcgacgcctacaccgccctgctgagcagcgtgctgcagagaggcggcgtgatcaccgacgaggaggagaccagcaagaagatcgccgaccagctggacaacatcgtggacatgagagagtacgacgtgccctaccacatcagactgagcatcgacctgaagatccacgtggcccactggtacaacgtgagatacagaggcaacgccttccccgtggagatcaccagaagagacgacctggtggagagacccgaccccgtggtgctggccttcgacatcgagaccaccaagctgcccctgaagttccccgacgccgagaccgaccagatcatgatgatcagctacatgatcgacggccagggctacctgatcaccaacagagagatcgtgagcgaggacatcgaggacttcgagttcacccccaagcccgagtacgagggccccttctgcgtgttcaacgagcccgacgaggcccacctgatccagagatggttcgagcacgtgcaggagaccaagcccaccatcatggtgacctacaacggcgacttcttcgactggcccttcgtggaggccagagccgccgtgcacggcctgagcatgcagcaggagatcggcttccagaaggacagccagggcgagtacaaggccccccagtgcatccacatggactgcctgagatgggtgaagagagacagctacctgcccgtgggcagccacaacctgaaggccgccgccaaggccaagctgggctacgaccccgtggagctggaccccgaggacatgtgcagaatggccaccgagcagccccagaccctggccacctacagcgtgagcgacgccgtggccacctactacctgtacatgaagtacgtgcaccccttcatcttcgccctgtgcaccatcatccccatggagcccgacgaggtgctgagaaagggcagcggcaccctgtgcgaggccctgctgatggtgcaggccttccacgccaacatcatcttccccaacaagcaggagcaggagttcaacaagctgaccgacgacggccacgtgctggacagcgagacctacgtgggcggccacgtggaggccctggagagcggcgtgttcagaagcgacatcccctgcagattcagaatgaaccccgccgccttcgacttcctgctgcagagagtggagaagaccctgagacacgccctggaggaggaggagaaggtgcccgtggagcaggtgaccaacttcgaggaggtgtgcgacgagatcaagagcaagctggccagcctgaaggacgtgcccagcagaatcgagtgccccctgatctaccacctggacgtgggcgccatgtaccccaacatcatcctgaccaacagactgcagcccagcgccatggtggacgaggccacctgcgccgcctgcgacttcaacaagcccggcgccaactgccagagaaagatggcctggcagtggagaggcgagttcatgcccgccagcagaagcgagtaccacagaatccagcaccagctggagagcgagaagttcccccccctgttccccgagggccccgccagagccttccacgagctgagcagagaggagcaggccaagtacgagaagagaagactggccgactactgcagaaaggcctacaagaagatccacatcaccaaggtggaggagagactgaccaccatctgccagagagagaacagcttctacgtggacaccgtgagagccttcagagacagaagatacgagttcaagggcctgcacaaggtgtggaagaagaagctgagcgccgccgtggaggtgggcgacgccgccgaggtgaagagatgcaagaacatggaggtgctgtacgacagcctgcagctggcccacaagtgcatcctgaacagcttctacggctacgtgatgagaaagggcgccagatggtacagcatggagatggccggcatcgtgtgcttcaccggcgccaacatcatcacccaggccagagagctgatcgagcagatcggcagacccctggagctggacaccgacggcatctggtgcgtgctgcccaacagcttccccgagaacttcgtgttcaagaccaccaacgtgaagaagcccaaggtgaccatcagctaccccggcgccatgctgaacatcatggtgaaggagggcttcaccaacgaccagtaccaggagctggccgagcccagcagcctgacctacgtgaccagaagcgagaacagcatcttcttcgaggtggacggcccctacctggccatgatcctgcccgccagcaaggaggagggcaagaagctgaagaagagatacgccgtgttcaacgaggacggcagcctggccgagctgaagggcttcgaggtgaagagaagaggcgagctgcagctgatcaagatcttccagagcagcgtgttcgaggccttcctgaagggcagcaccctggaggaggtgtacggcagcgtggccaaggtggccgactactggctggacgtgctgtacagcaaggccgccaacatgcccgacagcgagctgttcgagctgatcagcgagaacagaagcatgagcagaaagctggaggactacggcgagcagaagagcaccagcatcagcaccgccaagagactggccgagttcctgggcgaccagatggtgaaggacgccggcctgagctgcagatacatcatcagcagaaagcccgagggcagccccgtgaccgagagagccatccccctggccatcttccaggccgagcccaccgtgagaaagcacttcctgagaaagtggctgaagagcagcagcctgcaggacttcgacatcagagccatcctggactgggactactacatcgagagactgggcagcgccatccagaagatcatcaccatccccgccgccctgcagcaggtgaagaaccccgtgcccagagtgaagcaccccgactggctgcacaagaagctgctggagaagaacgacgtgtacaagcagaagaagatcagcgagctgttcaccctggagggcagaagacaggtgaccatggccgaggccagcgaggacagccccagacccagcgcccccgacatggaggacttcggcctggtgaagctgccccaccccgccgcccccgtgaccgtgaagagaaagagagtgctgtgggagagccaggaggagagccaggacctgacccccaccgtgccctggcaggagatcctgggccagccccccgccctgggcaccagccaggaggagtggctggtgtggctgagattccacaagaagaagtggcagctgcaggccagacagagactggccagaagaaagagacagagactggagagcgccgagggcgtgctgagacccggcgccatcagagacggccccgccaccggcctgggcagcttcctgagaagaaccgccagaagcatcctggacctgccctggcagatcgtgcagatcagcgagaccagccaggccggcctgttcagactgtgggccctggtgggcagcgacctgcactgcatcagactgagcatccccagagtgttctacgtgaaccagagagtggccaaggccgaggagggcgccagctacagaaaggtgaacagagtgctgcccagaagcaacatggtgtacaacctgtacgagtacagcgtgcccgaggacatgtaccaggagcacatcaacgagatcaacgccgagctgagcgcccccgacatcgagggcgtgtacgagacccaggtgcccctgctgttcagagccctggtgcacctgggctgcgtgtgcgtggtgaacaagcagctggtgagacacctgagcggctgggaggccgagaccttcgccctggagcacctggagatgagaagcctggcccagttcagctacctggagcccggcagcatcagacacatctacctgtaccaccacgcccaggcccacaaggccctgttcggcatcttcatccccagccagagaagagccagcgtgttcgtgctggacaccgtgagaagcaaccagatgcccagcctgggcgccctgtacagcgccgagcacggcctgctgctggagaaggtgggccccgagctgctgcccccccccaagcacaccttcgaggtgagagccgagaccgacctgaagaccatctgcagagccatccagagattcctgctggcctacaaggaggagagaagaggccccaccctgatcgccgtgcagagcagctgggagctgaagagactggccagcgagatccccgtgctggaggagttccccctggtgcccatctgcgtggccgacaagatcaactacggcgtgctggactggcagagacacggcgccagaagaatgatcagacactacctgaacctggacacctgcctgagccaggccttcgagatgagcagatacttccacatccccatcggcaacctgcccgaggacatcagcaccttcggcagcgacctgttcttcgccagacacctgcagagacacaaccacctgctgtggctgagccccaccgccagacccgacctgggcggcaaggaggccgacgacaactgcctggtgatggagttcgacgaccaggccaccgtggagatcaacagcagcggctgctacagcaccgtgtgcgtggagctggacctgcagaacctggccgtgaacaccatcctgcagagccaccacgtgaacgacatggagggcgccgacagcatgggcatcagcttcgacgtgatccagcaggccagcctggaggacatgatcaccggcggccaggccgccagcgcccccgccagctacgacgagaccgccctgtgcagcaacaccttcagaatcctgaagagcatggtggtgggctgggtgaaggagatcacccagtaccacaacatctacgccgacaaccaggtgatgcacttctacagatggctgagaagccccagcagcctgctgcacgaccccgccctgcacagaaccctgcacaacatgatgaagaagctgttcctgcagctgatcgccgagttcaagagactgggcagcagcgtgatctacgccaacttcaacagaatcatcctgtgcaccaagaagagaagagtggaggacgccatcgcctacgtggagtacatcaccagcagcatccacagcaaggagaccttccacagcctgaccatcagcttcagcagatgctgggagttcctgctgtggatggaccccagcaactacggcggcatcaagggcaaggtgagcagcagaatccactgcggcctgcaggacagccagaaggccggcggcgccgaggacgagcaggagaacgaggacgacgaggaggagagagacggcgaggaggaggaggaggccgaggagagcaacgtggaggacctgctggagaacaactggaacatcctgcagttcctgccccaggccgccagctgccagaactacttcctgatgatcgtgagcgcctacatcgtggccgtgtaccactgcatgaaggacggcctgagaagaagcgcccccggcagcacccccgtgagaagaagaggcgccagccagctgagccaggaggccgagggcgccgtgggcgccctgcccggcatgatcaccttcagccaggactacgtggccaacgagctgacccagagcttcttcaccatcacccagaagatccagaagaaggtgaccggcagcagaaacagcaccgagctgagcgagatgttccccgtgctgcccggcagccacctgctgctgaacaaccccgccctggagttcatcaagtacgtgtgcaaggtgctgagcctggacaccaacatcaccaaccaggtgaacaagctgaacagagacctgctgagactggtggacgtgggcgagttcagcgaggaggcccagttcagagacccctgcagaagctacgtgctgcccgaggtgatctgcagaagctgcaacttctgcagagacctggacctgtgcaaggacagcagcttcagcgaggacggcgccgtgctgccccagtggctgtgcagcaactgccaggccccctacgacagcagcgccatcgagatgaccctggtggaggtgctgcagaagaagctgatggccttcaccctgcaggacctggtgtgcctgaagtgcagaggcgtgaaggagaccagcatgcccgtgtactgcagctgcgccggcgacttcgccctgaccatccacacccaggtgttcatggagcagatcggcatcttcagaaacatcgcccagcactacggcatgagctacctgctggagaccctggagtggctgctgcagaagaacccccagctgggccactag

SEQ ID NO: 93849 - DNA, 6780 bp, synthetic construct
  misc_feature 1..6780: note = Description of Artificial Sequence: Synthetic coding sequence
  source 1..6780: mol_type = other DNA
atgagcctgagaagcggcggcagaagaagagccgaccccggcgccgacggcgaggccagcagagacgacggcgccaccagcagcgtgagcgccctgaagagactggagagaagccagtggaccgacaagatggacctgagattcggcttcgagagactgaaggagcccggcgagaagaccggctggctgatcaacatgcaccccgtggccctgccctacaagccctacttctacatcgccaccagaaagggctgcgagagagaggtgagcagcttcctgagcaagaagttccagggcaagatcgccaaggtggagaccgtgcccaaggaggacctggacctgcccaaccacctggtgggcctgaagagaaactacatcagactgagcttccacaccgtggaggacctggtgaaggtgagaaaggagatcagccccgccgtgaagaagaacagagagcaggaccacgccagcgacgcctacaccgccctgctgagcagcgtgctgcagagaggcggcgtgatcaccgacgaggaggagaccagcaagaagatcgccgaccagctggacaacatcgtggacatgagagagtacgacgtgccctaccacatcagactgagcatcgacctgaagatccacgtggcccactggtacaacgtgagatacagaggcaacgccttccccgtggagatcaccagaagagacgacctggtggagagacccgaccccgtggtgctggccttcgacatcgagaccaccaagctgcccctgaagttccccgacgccgagaccgaccagatcatgatgatcagctacatgatcgacggccagggctacctgatcaccaacagagagatcgtgagcgaggacatcgaggacttcgagttcacccccaagcccgagtacgagggccccttctgcgtgttcaacgagcccgacgaggcccacctgatccagagatggttcgagcacgtgcaggagaccaagcccaccatcatggtgacctacaacggcgacttcttcgactggcccttcgtggaggccagagccgccgtgcacggcctgagcatgcagcaggagatcggcttccagaaggacagccagggcgagtacaaggccccccagtgcatccacatggactgcctgagatgggtgaagagagacagctacctgcccgtgggcagccacaacctgaaggccgccgccaaggccaagctgggctacgaccccgtggagctggaccccgaggacatgtgcagaatggccaccgagcagccccagaccctggccacctacagcgtgagcgacgccgtggccacctactacctgtacatgaagtacgtgcaccccttcatcttcgccctgtgcaccatcatccccatggagcccgacgaggtgctgagaaagggcagcggcaccctgtgcgaggccctgctgatggtgcaggccttccacgccaacatcatcttccccaacaagcaggagcaggagttcaacaagctgaccgacgacggccacgtgctggacagcgagacctacgtgggcggccacgtggaggccctggagagcggcgtgttcagaagcgacatcccctgcagattcagaatgaaccccgccgccttcgacttcctgctgcagagagtggagaagaccctgagacacgccctggaggaggaggagaaggtgcccgtggagcaggtgaccaacttcgaggaggtgtgcgacgagatcaagagcaagctggccagcctgaaggacgtgcccagcagaatcgagtgccccctgatctaccacctggacgtgggcgccatgtaccccaacatcatcctgaccaacagactgcagcccagcgccatggtggacgaggccacctgcgccgcctgcgacttcaacaagcccggcgccaactgccagagaaagatggcctggcagtggagaggcgagttcatgcccgccagcagaagcgagtaccacagaatccagcaccagctggagagcgagaagttcccccccctgttccccgagggccccgccagagccttccacgagctgagcagagaggagcaggccaagtacgagaagagaagactggccgactactgcagaaaggcctacaagaagatccacatcaccaaggtggaggagagactgaccaccatctgccagagagagaacagcttctacgtggacaccgtgagagccttcagagacagaagatacgagttcaagggcctgcacaaggtgtggaagaagaagctgagcgccgccgtggaggtgggcgacgccgccgaggtgaagagatgcaagaacatggaggtgctgtacgacagcctgcagctggcccacaagtgcatcctgaacagcttctacggctacgtgatgagaaagggcgccagatggtacagcatggagatggccggcatcgtgtgcttcaccggcgccaacatcatcacccaggccagagagctgatcgagcagatcggcagacccctggagctggacaccgacggcatctggtgcgtgctgcccaacagcttccccgagaacttcgtgttcaagaccaccaacgtgaagaagcccaaggtgaccatcagctaccccggcgccatgctgaacatcatggtgaaggagggcttcaccaacgaccagtaccaggagctggccgagcccagcagcctgacctacgtgaccagaagcgagaacagcatcttcttcgaggtggacggcccctacctggccatgatcctgcccgccagcaaggaggagggcaagaagctgaagaagagatacgccgtgttcaacgaggacggcagcctggccgagctgaagggcttcgaggtgaagagaagaggcgagctgcagctgatcaagatcttccagagcagcgtgttcgaggccttcctgaagggcagcaccctggaggaggtgtacggcagcgtggccaaggtggccgactactggctggacgtgctgtacagcaaggccgccaacatgcccgacagcgagctgttcgagctgatcagcgagaacagaagcatgagcagaaagctggaggactacggcgagcagaagagcaccagcatcagcaccgccaagagactggccgagttcctgggcgaccagatggtgaaggacgccggcctgagctgcagatacatcatcagcagaaagcccgagggcagccccgtgaccgagagagccatccccctggccatcttccaggccgagcccaccgtgagaaagcacttcctgagaaagtggctgaagagcagcagcctgcaggacttcgacatcagagccatcctggactgggactactacatcgagagactgggcagcgccatccagaagatcatcaccatccccgccgccctgcagcaggtgaagaaccccgtgcccagagtgaagcaccccgactggctgcacaagaagctgctggagaagaacgacgtgtacaagcagaagaagatcagcgagctgttcaccctggagggcagaagacaggtgaccatggccgaggccagcgaggacagccccagacccagcgcccccgacatggaggacttcggcctggtgaagctgccccaccccgccgcccccgtgaccgtgaagagaaagagagtgctgtgggagagccaggaggagagccaggacctgacccccaccgtgccctggcaggagatcctgggccagccccccgccctgggcaccagccaggaggagtggctggtgtggctgagattccacaagaagaagtggcagctgcaggccagacagagactggccagaagaaagagacagagactggagagcgccgagggcgtgctgagacccggcgccatcagagacggccccgccaccggcctgggcagcttcctgagaagaaccgccagaagcatcctggacctgccctggcagatcgtgcagatcagcgagaccagccaggccggcctgttcagactgtgggccctggtgggcagcgacctgcactgcatcagactgagcatccccagagtgttctacgtgaaccagagagtggccaaggccgaggagggcgccagctacagaaaggtgaacagagtgctgcccagaagcaacatggtgtacaacctgtacgagtacagcgtgcccgaggacatgtaccaggagcacatcaacgagatcaacgccgagctgagcgcccccgacatcgagggcgtgtacgagacccaggtgcccctgctgttcagagccctggtgcacctgggctgcgtgtgcgtggtgaacaagcagctggtgagacacctgagcggctgggaggccgagaccttcgccctggagcacctggagatgagaagcctggcccagttcagctacctggagcccggcagcatcagacacatctacctgtaccaccacgcccaggcccacaaggccctgttcggcatcttcatccccagccagagaagagccagcgtgttcgtgctggacaccgtgagaagcaaccagatgcccagcctgggcgccctgtacagcgccgagcacggcctgctgctggagaaggtgggccccgagctgctgcccccccccaagcacaccttcgaggtgagagccgagaccgacctgaagaccatctgcagagccatccagagattcctgctggcctacaaggaggagagaagaggccccaccctgatcgccgtgcagagcagctgggagctgaagagactggccagcgagatccccgtgctggaggagttccccctggtgcccatctgcgtggccgacaagatcaactacggcgtgctggactggcagagacacggcgccagaagaatgatcagacactacctgaacctggacacctgcctgagccaggccttcgagatgagcagatacttccacatccccatcggcaacctgcccgaggacatcagcaccttcggcagcgacctgttcttcgccagacacctgcagagacacaaccacctgctgtggctgagccccaccgccagacccgacctgggcggcaaggaggccgacgacaactgcctggtgatggagttcgacgaccaggccaccgtggagatcaacagcagcggctgctacagcaccgtgtgcgtggagctggacctgcagaacctggccgtgaacaccatcctgcagagccaccacgtgaacgacatggagggcgccgacagcatgggcatcagcttcgacgtgatccagcaggccagcctggaggacatgatcaccggcggccaggccgccagcgcccccgccagctacgacgagaccgccctgtgcagcaacaccttcagaatcctgaagagcatggtggtgggctgggtgaaggagatcacccagtaccacaacatctacgccgacaaccaggtgatgcacttctacagatggctgagaagccccagcagcctgctgcacgaccccgccctgcacagaaccctgcacaacatgatgaagaagctgttcctgcagctgatcgccgagttcaagagactgggcagcagcgtgatctacgccaacttcaacagaatcatcctgtgcaccaagaagagaagagtggaggacgccatcgcctacgtggagtacatcaccagcagcatccacagcaaggagaccttccacagcctgaccatcagcttcagcagatgctgggagttcctgctgtggatggaccccagcaactacggcggcatcaagggcaaggtgagcagcagaatccactgcggcctgcaggacagccagaaggccggcggcgccgaggacgagcaggagaacgaggacgacgaggaggagagagacggcgaggaggaggaggaggccgaggagagcaacgtggaggacctgctggagaacaactggaacatcctgcagttcctgccccaggccgccagctgccagaactacttcctgatgatcgtgagcgcctacatcgtggccgtgtaccactgcatgaaggacggcctgagaagaagcgcccccggcagcacccccgtgagaagaagaggcgccagccagctgagccaggaggccgagggcgccgtgggcgccctgcccggcatgatcaccttcagccaggactacgtggccaacgagctgacccagagcttcttcaccatcacccagaagatccagaagaaggtgaccggcagcagaaacagcaccgagctgagcgagatgttccccgtgctgcccggcagccacctgctgctgaacaaccccgccctggagttcatcaagtacgtgtgcaaggtgctgagcctggacaccaacatcaccaaccaggtgaacaagctgaacagagacctgctgagactggtggacgtgggcgagttcagcgaggaggcccagttcagagacccctgcagaagctacgtgctgcccgaggtgatctgcagaagctgcaacttctgcagagacctggacctgtgcaaggacagcagcttcagcgaggacggcgccgtgctgccccagtggctgtgcagcaactgccaggccccctacgacagcagcgccatcgagatgaccctggtggaggtgctgcagaagaagctgatggccttcaccctgcaggacctggtgtgcctgaagtgcagaggcgtgaaggagaccagcatgcccgtgtactgcagctgcgccggcgacttcgccctgaccatccacacccaggtgttcatggagcagatcggcatcttcagaaacatcgcccagcactacggcatgagctacctgctggagaccctggagtggctgctgcagaagaacccccagctgggccactag

SEQ ID NO: 93850 - DNA, 480 bp, synthetic construct
  misc_feature 1..480: note = Description of Artificial Sequence: Synthetic coding sequence
  source 1..480: mol_type = other DNA
atgatcaagttcttcctgatggtgaacaagcagggccagaccagactgagcaagtactacgagcacgtggacatcaacaagagaaccctgctggagaccgaggtgatcaagagctgcctgagcagaagcaacgagcagtgcagcttcatcgagtacaaggacttcaagctgatctacagacagtacgccgccctgttcatcgtggtgggcgtgaacgacaccgagaacgagatggccatctacgagttcatccacaacttcgtggaggtgctggacgagtacttcagcagagtgagcgagctggacgtgagcttcttcaacaccgtgttccacagcacctggcagatgcacagcggcccctaccaggagcccatcgacgagctgcccaagatctgcagcgccctggagccccagcagacctgcttcagccccgacagcagcagcttcaagggcgccgccagcaccacccccatctactag

SEQ ID NO: 93851 - DNA, 1506 bp, synthetic construct
  misc_feature 1..1506: note = Description of Artificial Sequence: Synthetic coding sequence
  source 1..1506: mol_type = other DNA
atggcccccgagagactgagaagcagagccctgagcgccttcaagctgagaggcctgctgctgagaggcgaggccatcaagtacctgaccgaggccctgcagagcatcagcgagctggagctggaggacaagctggagaagatcatcaacgccgtggagaagcagcccctgagcagcaacatgatcgagagaagcgtggtggaggccgccgtgcaggagtgcagccagagcgtggacgagaccatcctgctgatgaccaaccaccccgcccccaacctgttcggcacccccagagacaaggccgagatgttcagagagagatacaccatcctgcaccagagaacccacagacacgagctgttcaccccccccgtgatcggcagccaccccgacgagagcggcagcaagttccagctgaagaccatcgagaccctgctgggcagcaccaccaagatcggcgacgccatcgtgctgggcatgatcacccagctgaaggagggcaagttcttcctggaggaccccaccggcaccgtgcagctggacctgagcaaggcccagttccacagcggcctgtacaccgaggcctgcttcgtgctggccgagggctggttcgaggaccaggtgttccacgtgaacgccttcggcttcccccccaccgagcccagcagcaccaccagagcctactacggcaacatcaacttcttcggcggccccagcaacaccagcgtgaagaccagcgccaagctgaagcagctggaggaggagaacaaggacgccatgttcgtgttcctgagcgacgtgtggctggaccaggtggaggtgctggagaagctgagaatcatgttcgccggctacagccccgccccccccacctgcttcatcctgtgcggcaacttcagcagcgccccctacggcaagaaccaggtgcaggccctgaaggacagcctgaagaccctggccgacatcatctgcgagtaccccgacatccaccagagcagcagattcgtgttcgtgcccggccccgaggaccccggcttcggcagcatcctgcccagaccccccctggccgagagcatcaccaacgagttcagacagagagtgcccttcagcgtgttcaccaccaacccctgcagaatccagtactgcacccaggagatcaccgtgttcagagaggacctggtgaacaagatgtgcagaaactgcgtgagattccccagcagcaacctggccatccccaaccacttcgtgaagaccatcctgagccagggccacctgacccccctgcccctgtacgtgtgccccgtgtactgggcctacgactacgccctgagagtgtaccccgtgcccgacctgctggtgatcgccgacaagtacgaccccttcaccaccaccaacaccgagtgcctgtgcatcaaccccggcagcttccccagaagcggcttcagcttcaaggtgttctaccccagcaacaagaccgtggaggacagcaagctgcagggcttctag

SEQ ID NO: 93852 - DNA, 1509 bp, synthetic construct
  misc_feature 1..1509: note = Description of Artificial Sequence: Synthetic coding sequence
  source 1..1509: mol_type = other DNA
atggcccccgagagactgagaagcagagccctgagcgccttcaagctgagaggcctgctgctgagaggcgaggccatcaagtacctgaccgaggccctgcagagcatcagcgagctggagctggaggacaagctggagaagatcatcaacgccgtggagaagcagcccctgagcagcaacatgatcgagagaagcgtggtggaggccgccgtgcaggagtgcagccagagcgtggacgagaccatcgagcacgtgttcaacatcatcggcgccttcgacatccccagattcgtgtacaacagcgagagaaagaagttcctgcccctgctgatgaccaaccaccccgcccccaacctgttcggcacccccagagacaaggccgagatgttcagagagagatacaccatcctgcaccagagaacccacagacacgagctgttcaccccccccgtgatcggcagccaccccgacgagagcggcagcaagttccagctgaagaccatcgagaccctgctgggcagcaccaccaagatcggcgacgccatcgtgctgggcatgatcacccagctgaaggagggcaagttcttcctggaggaccccaccggcaccgtgcagctggacctgagcaaggcccagttccacagcggcctgtacaccgaggcctgcttcgtgctggccgagggctggttcgaggaccaggtgttccacgtgaacgccttcggcttcccccccaccgagcccagcagcaccaccagagcctactacggcaacatcaacttcttcggcggccccagcaacaccagcgtgaagaccagcgccaagctgaagcagctggaggaggagaacaaggacgccatgttcgtgttcctgagcgacgtgtggctggaccaggtggaggtgctggagaagctgagaatcatgttcgccggctacagccccgccccccccacctgcttcatcctgtgcggcaacttcagcagcgccccctacggcaagaaccaggtgcaggccctgaaggacagcctgaagaccctggccgacatcatctgcgagtaccccgacatccaccagagcagcagattcgtgttcgtgcccggccccgaggaccccggcttcggcagcatcctgcccagaccccccctggccgagagcatcaccaacgagttcagacagagagtgcccttcagcgtgttcaccaccaacccctgcagaatccagtactgcacccaggagatcaccgtgttcagagaggacctggtgaacaagatgtgcagaaactgcgtgagattccccagcagcaacctggccatccccaaccacttcgtgaagaccatcctgagccagggccacctgacccccctgcccctgtacgtgtgccccgtgtactgggcctacgactacgccctgagagtgtaccccgtgcccgacctgctggtgatcgccgacaagtacgaccccttcaccaccaccaacaccgagtgcctgtgcatcaaccccgtgagaatgtag

SEQ ID NO: 93853 - DNA, 444 bp, synthetic construct
  misc_feature 1..444: note = Description of Artificial Sequence: Synthetic coding sequence
  source 1..444: mol_type = other DNA
atggccgagagacccgaggacctgaacctgcccaacgccgtgatcaccagaatcatcaaggaggccctgcccgacggcgtgaacatcagcaaggaggccagaagcgccatcagcagagccgccagcgtgttcgtgctgtacgccaccagctgcgccaacaacttcgccatgaagggcaagagaaagaccctgaacgccagcgacgtgctgagcgccatggaggagatggagttccagagattcgtgacccccctgaaggaggccctggaggcctacagaagagagcagaagggcaagaaggaggccagcgagcagaagaagaaggacaaggacaagaagaccgacagcgaggagcaggacaagagcagagacgaggacaacgacgaggacgaggagagactggaggaggaggagcagaacgaggaggaggaggtggacaactag

SEQ ID NO: 93854 - DNA, 444 bp, synthetic construct; identical to SEQ ID NO: 93853
  misc_feature 1..444: note = Description of Artificial Sequence: Synthetic coding sequence
  source 1..444: mol_type = other DNA

SEQ ID NO: 93855 - DNA, 1245 bp, synthetic construct
  misc_feature 1..1245: note = Description of Artificial Sequence: Synthetic coding sequence
  source 1..1245: mol_type = other DNA
atggccaccggccaggacagagtggtggccctggtggacatggactgcttcttcgtgcaggtggagcagagacagaacccccacctgagaaacaagccctgcgccgtggtgcagtacaagagctggaagggcggcggcatcatcgccgtgagctacgaggccagagccttcggcgtgaccagaagcatgtgggccgacgacgccaagaagctgtgccccgacctgctgctggcccaggtgagagagagcagaggcaaggccaacctgaccaagtacagagaggccagcgtggaggtgatggagatcatgagcagattcgccgtgatcgagagagccagcatcgacgaggcctacgtggacctgaccagcgccgtgcaggagagactgcagaagctgcagggccagcccatcagcgccgacctgctgcccagcacctacatcgagggcctgccccagggccccaccaccgccgaggagaccgtgcagaaggagggcatgagaaagcagggcctgttccagtggctggacagcctgcagatcgacaacctgaccagccccgacctgcagctgaccgtgggcgccgtgatcgtggaggagatgagagccgccatcgagagagagaccggcttccagtgcagcgccggcatcagccacaacaaggtgctggccaagctggcctgcggcctgaacaagcccaacagacagaccctggtgagccacggcagcgtgccccagctgttcagccagatgcccatcagaaagatcagaagcctgggcggcaagctgggcgccagcgtgatcgagatcctgggcatcgagtacatgggcgagctgacccagttcaccgagagccagctgcagagccacttcggcgagaagaacggcagctggctgtacgccatgtgcagaggcatcgagcacgaccccgtgaagcccagacagctgcccaagaccatcggctgcagcaagaacttccccggcaagaccgccctggccaccagagagcaggtgcagtggtggctgctgcagctggcccaggagctggaggagagactgaccaaggacagaaacgacaacgacagagtggccacccagctggtggtgagcatcagagtgcagggcgacaagagactgagcagcctgagaagatgctgcgccctgaccagatacgacgcccacaagatgagccacgacgccttcaccgtgatcaagaactgcaacaccagcggcatccagaccgagtag

SEQ ID NO: 93856 - DNA, 2142 bp, synthetic construct
  misc_feature 1..2142: note = Description of Artificial Sequence: Synthetic coding sequence
  source 1..2142: mol_type = other DNA
atggccaccggccaggacagagtggtggccctggtggacatggactgcttcttcgtgcaggtggagcagagacagaacccccacctgagaaacaagccctgcgccgtggtgcagtacaagagctggaagggcggcggcatcatcgccgtgagctacgaggccagagccttcggcgtgaccagaagcatgtgggccgacgacgccaagaagctgtgccccgacctgctgctggcccaggtgagagagagcagaggcaaggccaacctgaccaagtacagagaggccagcgtggaggtgatggagatcatgagcagattcgccgtgatcgagagagccagcatcgacgaggcctacgtggacctgaccagcgccgtgcaggagagactgcagaagctgcagggccagcccatcagcgccgacctgctgcccagcacctacatcgagggcctgccccagggccccaccaccgccgaggagaccgtgcagaaggagggcatgagaaagcagggcctgttccagtggctggacagcctgcagatcgacaacctgaccagccccgacctgcagctgaccgtgggcgccgtgatcgtggaggagatgagagccgccatcgagagagagaccggcttccagtgcagcgccggcatcagccacaacaaggtgctggccaagctggcctgcggcctgaacaagcccaacagacagaccctggtgagccacggcagcgtgccccagctgttcagccagatgcccatcagaaagatcagaagcctgggcggcaagctgggcgccagcgtgatcgagatcctgggcatcgagtacatgggcgagctgacccagttcaccgagagccagctgcagagccacttcggcgagaagaacggcagctggctgtacgccatgtgcagaggcatcgagcacgaccccgtgaagcccagacagctgcccaagaccatcggctgcagcaagaacttccccggcaagaccgccctggccaccagagagcaggtgcagtggtggctgctgcagctggcccaggagctggaggagagactgaccaaggacagaaacgacaacgacagagtggccacccagctggtggtgagcatcagagtgcagggcgacaagagactgagcagcctgagaagatgctgcgccctgaccagatacgacgcccacaagatgagccacgacgccttcaccgtgatcaagaactgcaacaccagcggcatccagaccgagtggagcccccccctgaccatgctgttcctgtgcgccaccaagttcagcgccagcgcccccagcagcagcaccgacatcaccagcttcctgagcagcgaccccagcagcctgcccaaggtgcccgtgaccagcagcgaggccaagacccagggcagcggccccgccgtgaccgccaccaagaaggccaccaccagcctggagagcttcttccagaaggccgccgagagacagaaggtgaaggaggccagcctgagcagcctgaccgcccccacccaggcccccatgagcaacagccccagcaagcccagcctgcccttccagaccagccagagcaccggcaccgagcccttcttcaagcagaagagcctgctgctgaagcagaagcagctgaacaacagcagcgtgagcagcccccagcagaacccctggagcaactgcaaggccctgcccaacagcctgcccaccgagtaccccggctgcgtgcccgtgtgcgagggcgtgagcaagctggaggagagcagcaaggccacccccgccgagatggacctggcccacaacagccagagcatgcacgccagcagcgccagcaagagcgtgctggaggtgacccagaaggccacccccaaccccagcctgctggccgccgaggaccaggtgccctgcgagaagtgcggcagcctggtgcccgtgtgggacatgcccgagcacatggactaccacttcgccctggagctgcagaagagcttcctgcagccccacagcagcaacccccaggtggtgagcgccgtgagccaccagggcaagagaaaccccaagagccccctggcctgcaccaacaagagacccagacccgagggcatgcagaccctggagagcttcttcaagcccctgacccactag

SEQ ID NO: 93857 - DNA, 219 bp, synthetic construct
  misc_feature 1..219: note = Description of Artificial Sequence: Synthetic coding sequence
  source 1..219: mol_type = other DNA
atgtgggccgacgacgccaagaagctgtgccccgacctgctgctggcccaggtgagagagagcagaggcaaggccaacctgaccaagtacagagaggccagcgtggaggtgatggagatcatgagcagattcgccgtgatcgagagagccagcatcgacgaggcctacgtggacctgaccagcgccgtgcaggagagactgcagaagctgcagggctag

SEQ ID NO: 93858 - DNA, 1956 bp, synthetic construct
  misc_feature 1..1956: note = Description of Artificial Sequence: Synthetic coding sequence
  source 1..1956: mol_type = other DNA
atgtgggccgacgacgccaagaagctgtgccccgacctgctgctggcccaggtgagagagagcagaggcaaggccaacctgaccaagtacagagaggccagcgtggaggtgatggagatcatgagcagattcgccgtgatcgagagagccagcatcgacgaggcctacgtggacctgaccagcgccgtgcaggagagactgcagaagctgcagggccagcccatcagcgccgacctgctgcccagcacctacatcgagggcctgccccagggccccaccaccgccgaggagaccgtgcagaaggagggcatgagaaagcagggcctgttccagtggctggacagcctgcagatcgacaacctgaccagccccgacctgcagctgaccgtgggcgccgtgatcgtggaggagatgagagccgccatcgagagagagaccggcttccagtgcagcgccggcatcagccacaacaaggtgctggccaagctggcctgcggcctgaacaagcccaacagacagaccctggtgagccacggcagcgtgccccagctgttcagccagatgcccatcagaaagatcagaagcctgggcggcaagctgggcgccagcgtgatcgagatcctgggcatcgagtacatgggcgagctgacccagttcaccgagagccagctgcagagccacttcggcgagaagaacggcagctggctgtacgccatgtgcagaggcatcgagcacgaccccgtgaagcccagacagctgcccaagaccatcggctgcagcaagaacttccccggcaagaccgccctggccaccagagagcaggtgcagtggtggctgctgcagctggcccaggagctggaggagagactgaccaaggacagaaacgacaacgacagagtggccacccagctggtggtgagcatcagagtgcagggcgacaagagactgagcagcctgagaagatgctgcgccctgaccagatacgacgcccacaagatgagccacgacgccttcaccgtgatcaagaactgcaacaccagcggcatccagaccgagtggagcccccccctgaccatgctgttcctgtgcgccaccaagttcagcgccagcgcccccagcagcagcaccgacatcaccagcttcctgagcagcgaccccagcagcctgcccaaggtgcccgtgaccagcagcgaggccaagacccagggcagcggccccgccgtgaccgccaccaagaaggccaccaccagcctggagagcttcttccagaaggccgccgagagacagaaggtgaaggaggccagcctgagcagcctgaccgcccccacccaggcccccatgagcaacagccccagcaagcccagcctgcccttccagaccagccagagcaccggcaccgagcccttcttcaagcagaagagcctgctgctgaagcagaagcagctgaacaacagcagcgtgagcagcccccagcagaacccctggagcaactgcaaggccctgcccaacagcctgcccaccgagtaccccggctgcgtgcccgtgtgcgagggcgtgagcaagctggaggagagcagcaaggccacccccgccgagatggacctggcccacaacagccagagcatgcacgccagcagcgccagcaagagcgtgctggaggtgacccagaaggccacccccaaccccagcctgctggccgccgaggaccaggtgccctgcgagaagtgcggcagcctggtgcccgtgtgggacatgcccgagcacatggactaccacttcgccctggagctgcagaagagcttcctgcagccccacagcagcaacccccaggtggtgagcgccgtgagccaccagggcaagagaaaccccaagagccccctggcctgcaccaacaagagacccagacccgagggcatgcagaccctggagagcttcttcaagcccctgacccactag

SEQ ID NO: 93859 - DNA, 3720 bp, synthetic construct
  misc_feature 1..3720: note = Description of Artificial Sequence: Synthetic coding sequence
  source 1..3720: mol_type = other DNA
atgagcagactgctgtggagaaaggtggccggcgccaccgtgggccccggccccgtgcccgcccccggcagatgggtgagcagcagcgtgcccgccagcgaccccagcgacggccagagaagaagacagcagcagcagcagcagcagcagcagcagcagcagcagccccagcagccccaggtgctgagcagcgagggcggccagctgagacacaaccccctggacatccagatgctgagcagaggcctgcacgagcagatcttcggccagggcggcgagatgcccggcgaggccgccgtgagaagaagcgtggagcacctgcagaagcacggcctgtggggccagcccgccgtgcccctgcccgacgtggagctgagactgccccccctgtacggcgacaacctggaccagcacttcagactgctggcccagaagcagagcctgccctacctggaggccgccaacctgctgctgcaggcccagctgccccccaagccccccgcctgggcctgggccgagggctggaccagatacggccccgagggcgaggccgtgcccgtggccatccccgaggagagagccctggtgttcgacgtggaggtgtgcctggccgagggcacctgccccaccctggccgtggccatcagccccagcgcctggtacagctggtgcagccagagactggtggaggagagatacagctggaccagccagctgagccccgccgacctgatccccctggaggtgcccaccggcgccagcagccccacccagagagactggcaggagcagctggtggtgggccacaacgtgagcttcgacagagcccacatcagagagcagtacctgatccagggcagcagaatgagattcctggacaccatgagcatgcacatggccatcagcggcctgagcagcttccagagaagcctgtggatcgccgccaagcagggcaagcacaaggtgcagccccccaccaagcagggccagaagagccagagaaaggccagaagaggccccgccatcagcagctgggactggctggacatcagcagcgtgaacagcctggccgaggtgcacagactgtacgtgggcggcccccccctggagaaggagcccagagagctgttcgtgaagggcaccatgaaggacatcagagagaacttccaggacctgatgcagtactgcgcccaggacgtgtgggccacccacgaggtgttccagcagcagctgcccctgttcctggagagatgcccccaccccgtgaccctggccggcatgctggagatgggcgtgagctacctgcccgtgaaccagaactgggagagatacctggccgaggcccagggcacctacgaggagctgcagagagagatgaagaagagcctgatggacctggccaacgacgcctgccagctgctgagcggcgagagatacaaggaggacccctggctgtgggacctggagtgggacctgcaggagttcaagcagaagaaggccaagaaggtgaagaaggagcccgccaccgccagcaagctgcccatcgagggcgccggcgcccccggcgaccccatggaccaggaggacctgggcccctgcagcgaggaggaggagttccagcaggacgtgatggccagagcctgcctgcagaagctgaagggcaccaccgagctgctgcccaagagaccccagcacctgcccggccaccccggctggtacagaaagctgtgccccagactggacgaccccgcctggacccccggccccagcctgctgagcctgcagatgagagtgacccccaagctgatggccctgacctgggacggcttccccctgcactacagcgagagacacggctggggctacctggtgcccggcagaagagacaacctggccaagctgcccaccggcaccaccctggagagcgccggcgtggtgtgcccctacagagccatcgagagcctgtacagaaagcactgcctggagcagggcaagcagcagctgatgccccaggaggccggcctggccgaggagttcctgctgaccgacaacagcgccatctggcagaccgtggaggagctggactacctggaggtggaggccgaggccaagatggagaacctgagagccgccgtgcccggccagcccctggccctgaccgccagaggcggccccaaggacacccagcccagctaccaccacggcaacggcccctacaacgacgtggacatccccggctgctggttcttcaagctgccccacaaggacggcaacagctgcaacgtgggcagccccttcgccaaggacttcctgcccaagatggaggacggcaccctgcaggccggccccggcggcgccagcggccccagagccctggagatcaacaagatgatcagcttctggagaaacgcccacaagagaatcagcagccagatggtggtgtggctgcccagaagcgccctgcccagagccgtgatcagacaccccgactacgacgaggagggcctgtacggcgccatcctgccccaggtggtgaccgccggcaccatcaccagaagagccgtggagcccacctggctgaccgccagcaacgccagacccgacagagtgggcagcgagctgaaggccatggtgcaggccccccccggctacaccctggtgggcgccgacgtggacagccaggagctgtggatcgccgccgtgctgggcgacgcccacttcgccggcatgcacggctgcaccgccttcggctggatgaccctgcagggcagaaagagcagaggcaccgacctgcacagcaagaccgccaccaccgtgggcatcagcagagagcacgccaagatcttcaactacggcagaatctacggcgccggccagcccttcgccgagagactgctgatgcagttcaaccacagactgacccagcaggaggccgccgagaaggcccagcagatgtacgccgccaccaagggcctgagatggtacagactgagcgacgagggcgagtggctggtgagagagctgaacctgcccgtggacagaaccgagggcggctggatcagcctgcaggacctgagaaaggtgcagagagagaccgccagaaagagccagtggaagaagtgggaggtggtggccgagagagcctggaagggcggcaccgagagcgagatgttcaacaagctggagagcatcgccaccagcgacatccccagaacccccgtgctgggctgctgcatcagcagagccctggagcccagcgccgtgcaggaggagttcatgaccagcagagtgaactgggtggtgcagagcagcgccgtggactacctgcacctgatgctggtggccatgaagtggctgttcgaggagttcgccatcgacggcagattctgcatcagcatccacgacgaggtgagatacctggtgagagaggaggacagatacagagccgccctggccctgcagatcaccaacctgctgaccagatgcatgttcgcctacaagctgggcctgaacgacctgccccagagcgtggccttcttcagcgccgtggacatcgacagatgcctgagaaaggaggtgaccatggactgcaagacccccagcaaccccaccggcatggagagaagatacggcatcccccagggcgaggccctggacatctaccagatcatcgagctgaccaagggcagcctggagaagagaagccagcccggcccctag

SEQ ID NO: 93860 - DNA, 3720 bp, synthetic construct; identical to SEQ ID NO: 93859
  misc_feature 1..3720: note = Description of Artificial Sequence: Synthetic coding sequence
  source 1..3720: mol_type = other DNA

SEQ ID NO: 93861 - DNA, 1458 bp, synthetic construct
  misc_feature 1..1458: note = Description of Artificial Sequence: Synthetic coding sequence
  source 1..1458: mol_type = other DNA
atgagaagcagagtggccgtgagagcctgccacaaggtgtgcagatgcctgctgagcggcttcggcggcagagtggacgccggccagcccgagctgctgaccgagagaagcagccccaagggcggccacgtgaagagccacgccgagctggagggcaacggcgagcaccccgaggcccccggcagcggcgagggcagcgaggccctgctggagatctgccagagaagacacttcctgagcggcagcaagcagcagctgagcagagacagcctgctgagcggctgccaccccggcttcggccccctgggcgtggagctgagaaagaacctggccgccgagtggtggaccagcgtggtggtgttcagagagcaggtgttccccgtggacgccctgcaccacaagcccggccccctgctgcccggcgacagcgccttcagactggtgagcgccgagaccctgagagagatcctgcaggacaaggagctgagcaaggagcagctggtggccttcctggagaacgtgctgaagaccagcggcaagctgagagagaacctgctgcacggcgccctggagcactacgtgaactgcctggacctggtgaacaagagactgccctacggcctggcccagatcggcgtgtgcttccaccccgtgttcgacaccaagcagatcagaaacggcgtgaagagcatcggcgagaagaccgaggccagcctggtgtggttcaccccccccagaaccagcaaccagtggctggacttctggctgagacacagactgcagtggtggagaaagttcgccatgagccccagcaacttcagcagcagcgactgccaggacgaggagggcagaaagggcaacaagctgtactacaacttcccctggggcaaggagctgatcgagaccctgtggaacctgggcgaccacgagctgctgcacatgtaccccggcaacgtgagcaagctgcacggcagagacggcagaaagaacgtggtgccctgcgtgctgagcgtgaacggcgacctggacagaggcatgctggcctacctgtacgacagcttccagctgaccgagaacagcttcaccagaaagaagaacctgcacagaaaggtgctgaagctgcacccctgcctggcccccatcaaggtggccctggacgtgggcagaggccccaccctggagctgagacaggtgtgccagggcctgttcaacgagctgctggagaacggcatcagcgtgtggcccggctacctggagaccatgcagagcagcctggagcagctgtacagcaagtacgacgagatgagcatcctgttcaccgtgctggtgaccgagaccaccctggagaacggcctgatccacctgagaagcagagacaccaccatgaaggagatgatgcacatcagcaagctgaaggacttcctgatcaagtacatcagcagcgccaagaacgtgtag

SEQ ID NO: 93862 - DNA, 7773 bp, synthetic construct
  misc_feature 1..7773: note = Description of Artificial Sequence: Synthetic coding sequence
  source 1..7773: mol_type = other DNA
atgaacctgctgagaagaagcggcaagagaagaagaagcgagagcggcagcgacagcttcagcggcagcggcggcgacagcagcgccagcccccagttcctgagcggcagcgtgctgagccccccccccggcctgggcagatgcctgaaggccgccgccgccggcgagtgcaagcccaccgtgcccgactacgagagagacaagctgctgctggccaactggggcctgcccaaggccgtgctggagaagtaccacagcttcggcgtgaagaagatgttcgagtggcaggccgagtgcctgctgctgggccaggtgctggagggcaagaacctggtgtacagcgcccccaccagcgccggcaagaccctggtggccgagctgctgatcctgaagagagtgctggagatgagaaagaaggccctgttcatcctgcccttcgtgagcgtggccaaggagaagaagtactacctgcagagcctgttccaggaggtgggcatcaaggtggacggctacatgggcagcaccagccccagcagacacttcagcagcctggacatcgccgtgtgcaccatcgagagagccaacggcctgatcaacagactgatcgaggagaacaagatggacctgctgggcatggtggtggtggacgagctgcacatgctgggcgacagccacagaggctacctgctggagctgctgctgaccaagatctgctacatcaccagaaagagcgccagctgccaggccgacctggccagcagcctgagcaacgccgtgcagatcgtgggcatgagcgccaccctgcccaacctggagctggtggccagctggctgaacgccgagctgtaccacaccgacttcagacccgtgcccctgctggagagcgtgaaggtgggcaacagcatctacgacagcagcatgaagctggtgagagagttcgagcccatgctgcaggtgaagggcgacgaggaccacgtggtgagcctgtgctacgagaccatctgcgacaaccacagcgtgctgctgttctgccccagcaagaagtggtgcgagaagctggccgacatcatcgccagagagttctacaacctgcaccaccaggccgagggcctggtgaagcccagcgagtgcccccccgtgatcctggagcagaaggagctgctggaggtgatggaccagctgagaagactgcccagcggcctggacagcgtgctgcagaagaccgtgccctggggcgtggccttccaccacgccggcctgaccttcgaggagagagacatcatcgagggcgccttcagacagggcctgatcagagtgctggccgccaccagcaccctgagcagcggcgtgaacctgcccgccagaagagtgatcatcagaacccccatcttcggcggcagacccctggacatcctgacctacaagcagatggtgggcagagccggcagaaagggcgtggacaccgtgggcgagagcatcctgatctgcaagaacagcgagaagagcaagggcatcgccctgctgcagggcagcctgaagcccgtgagaagctgcctgcagagaagagagggcgaggaggtgaccggcagcatgatcagagccatcctggagatcatcgtgggcggcgtggccagcaccagccaggacatgcacacctacgccgcctgcaccttcctggccgccagcatgaaggagggcaagcagggcatccagagaaaccaggagagcgtgcagctgggcgccatcgaggcctgcgtgatgtggctgctggagaacgagttcatccagagcaccgaggccagcgacggcaccgagggcaaggtgtaccaccccacccacctgggcagcgccaccctgagcagcagcctgagccccgccgacaccctggacatcttcgccgacctgcagagagccatgaagggcttcgtgctggagaacgacctgcacatcctgtacctggtgacccccatgttcgaggactggaccaccatcgactggtacagattcttctgcctgtgggagaagctgcccaccagcatgaagagagtggccgagctggtgggcgtggaggagggcttcctggccagatgcgtgaagggcaaggtggtggccagaaccgagagacagcacagacagatggccatccacaagagattcttcaccagcctggtgctgctggacctgatcagcgaggtgcccctgagagagatcaaccagaagtacggctgcaacagaggccagatccagagcctgcagcagagcgccgccgtgtacgccggcatgatcaccgtgttcagcaacagactgggctggcacaacatggagctgctgctgagccagttccagaagagactgaccttcggcatccagagagagctgtgcgacctggtgagagtgagcctgctgaacgcccagagagccagagtgctgtacgccagcggcttccacaccgtggccgacctggccagagccaacatcgtggaggtggaggtgatcctgaagaacgccgtgcccttcaagagcgccagaaaggccgtggacgaggaggaggaggccgtggaggagagaagaaacatgagaaccatctgggtgaccggcagaaagggcctgaccgagagagaggccgccgccctgatcgtggaggaggccagaatgatcctgcagcaggacctggtggagatgggcgtgcagtggaacccctgcgccctgctgcacagcagcacctgcagcctgacccacagcgagagcgaggtgaaggagcacaccttcatcagccagaccaagagcagctacaagaagctgaccagcaagaacaagagcaacaccatcttcagcgacagctacatcaagcacagccccaacatcgtgcaggacctgaacaagagcagagagcacaccagcagcttcaactgcaacttccagaacggcaaccaggagcaccagacctgcagcatcttcagagccagaaagagagccagcctggacatcaacaaggagaagcccggcgccagccagaacgagggcaagaccagcgacaagaaggtggtgcagaccttcagccagaagaccaagaaggcccccctgaacttcaacagcgagaagatgagcagaagcttcagaagctggaagagaagaaagcacctgaagagaagcagagacagcagccccctgaaggacagcggcgcctgcagaatccacctgcagggccagaccctgagcaaccccagcctgtgcgaggaccccttcaccctggacgagaagaagaccgagttcagaaacagcggccccttcgccaagaacgtgagcctgagcggcaaggagaaggacaacaagaccagcttccccctgcagatcaagcagaactgcagctggaacatcaccctgaccaacgacaacttcgtggagcacatcgtgaccggcagccagagcaagaacgtgacctgccaggccaccagcgtggtgagcgagaagggcagaggcgtggccgtggaggccgagaagatcaacgaggtgctgatccagaacggcagcaagaaccagaacgtgtacatgaagcaccacgacatccaccccatcaaccagtacctgagaaagcagagccacgagcagaccagcaccatcaccaagcagaagaacatcatcgagagacagatgccctgcgaggccgtgagcagctacatcaacagagacagcaacgtgaccatcaactgcgagagaatcaagctgaacaccgaggagaacaagcccagccacttccaggccctgggcgacgacatcagcagaaccgtgatccccagcgaggtgctgcccagcgccggcgccttcagcaagagcgagggccagcacgagaacttcctgaacatcagcagactgcaggagaagaccggcacctacaccaccaacaagaccaagaacaaccacgtgagcgacctgggcctggtgctgtgcgacttcgaggacagcttctacctggacacccagagcgagaagatcatccagcagatggccaccgagaacgccaagctgggcgccaaggacaccaacctggccgccggcatcatgcagaagagcctggtgcagcagaacagcatgaacagcttccagaaggagtgccacatccccttccccgccgagcagcaccccctgggcgccaccaagatcgaccacctggacctgaagaccgtgggcaccatgaagcagagcagcgacagccacggcgtggacatcctgacccccgagagccccatcttccacagccccatcctgctggaggagaacggcctgttcctgaagaagaacgaggtgagcgtgaccgacagccagctgaacagcttcctgcagggctaccagacccaggagaccgtgaagcccgtgatcctgctgatcccccagaagagaacccccaccggcgtggagggcgagtgcctgcccgtgcccgagaccagcctgaacatgagcgacagcctgctgttcgacagcttcagcgacgactacctggtgaaggagcagctgcccgacatgcagatgaaggagcccctgcccagcgaggtgaccagcaaccacttcagcgacagcctgtgcctgcaggaggacctgatcaagaagagcaacgtgaacgagaaccaggacacccaccagcagctgacctgcagcaacgacgagagcatcatcttcagcgagatggacagcgtgcagatggtggaggccctggacaacgtggacatcttccccgtgcaggagaagaaccacaccgtggtgagccccagagccctggagctgagcgaccccgtgctggacgagcaccaccagggcgaccaggacggcggcgaccaggacgagagagccgagaagagcaagctgaccggcaccagacagaaccacagcttcatctggagcggcgccagcttcgacctgagccccggcctgcagagaatcctggacaaggtgagcagccccctggagaacgagaagctgaagagcatgaccatcaacttcagcagcctgaacagaaagaacaccgagctgaacgaggagcaggaggtgatcagcaacctggagaccaagcaggtgcagggcatcagcttcagcagcaacaacgaggtgaagagcaagatcgagatgctggagaacaacgccaaccacgacgagaccagcagcctgctgcccagaaaggagagcaacatcgtggacgacaacggcctgatcccccccacccccatccccaccagcgccagcaagctgaccttccccggcatcctggagacccccgtgaacccctggaagaccaacaacgtgctgcagcccggcgagagctacctgttcggcagccccagcgacatcaagaaccacgacctgagccccggcagcagaaacggcttcaaggacaacagccccatcagcgacaccagcttcagcctgcagctgagccaggacggcctgcagctgacccccgccagcagcagcagcgagagcctgagcatcatcgacgtggccagcgaccagaacctgttccagaccttcatcaaggagtggagatgcaagaagagattcagcatcagcctggcctgcgagaagatcagaagcctgaccagcagcaagaccgccaccatcggcagcagattcaagcaggccagcagcccccaggagatccccatcagagacgacggcttccccatcaagggctgcgacgacaccctggtggtgggcctggccgtgtgctggggcggcagagacgcctactacttcagcctgcagaaggagcagaagcacagcgagatcagcgccagcctggtgccccccagcctggaccccagcctgaccctgaaggacagaatgtggtacctgcagagctgcctgagaaaggagagcgacaaggagtgcagcgtggtgatctacgacttcatccagagctacaagatcctgctgctgagctgcggcatcagcctggagcagagctacgaggaccccaaggtggcctgctggctgctggaccccgacagccaggagcccaccctgcacagcatcgtgaccagcttcctgccccacgagctgcccctgctggagggcatggagaccagccagggcatccagagcctgggcctgaacgccggcagcgagcacagcggcagatacagagccagcgtggagagcatcctgatcttcaacagcatgaaccagctgaacagcctgctgcagaaggagaacctgcaggacgtgttcagaaaggtggagatgcccagccagtactgcctggccctgctggagctgaacggcatcggcttcagcaccgccgagtgcgagagccagaagcacatcatgcaggccaagctggacgccatcgagacccaggcctaccagctggccggccacagcttcagcttcaccagcagcgacgacatcgccgaggtgctgttcctggagctgaagctgccccccaacagagagatgaagaaccagggcagcaagaagaccctgggcagcaccagaagaggcatcgacaacggcagaaagctgagactgggcagacagttcagcaccagcaaggacgtgctgaacaagctgaaggccctgcaccccctgcccggcctgatcctggagtggagaagaatcaccaacgccatcaccaaggtggtgttccccctgcagagagagaagtgcctgaaccccttcctgggcatggagagaatctaccccgtgagccagagccacaccgccaccggcagaatcaccttcaccgagcccaacatccagaacgtgcccagagacttcgagatcaagatgcccaccctggtgggcgagagcccccccagccaggccgtgggcaagggcctgctgcccatgggcagaggcaagtacaagaagggcttcagcgtgaaccccagatgccaggcccagatggaggagagagccgccgacagaggcatgcccttcagcatcagcatgagacacgccttcgtgcccttccccggcggcagcatcctggccgccgactacagccagctggagctgagaatcctggcccacctgagccacgacagaagactgatccaggtgctgaacaccggcgccgacgtgttcagaagcatcgccgccgagtggaagatgatcgagcccgagagcgtgggcgacgacctgagacagcaggccaagcagatctgctacggcatcatctacggcatgggcgccaagagcctgggcgagcagatgggcatcaaggagaacgacgccgcctgctacatcgacagcttcaagagcagatacaccggcatcaaccagttcatgaccgagaccgtgaagaactgcaagagagacggcttcgtgcagaccatcctgggcagaagaagatacctgcccggcatcaaggacaacaacccctacagaaaggcccacgccgagagacaggccatcaacaccatcgtgcagggcagcgccgccgacatcgtgaagatcgccaccgtgaacatccagaagcagctggagaccttccacagcaccttcaagagccacggccacagagagggcatgctgcagagcgaccagaccggcctgagcagaaagagaaagctgcagggcatgttctgccccatcagaggcggcttcttcatcctgcagctgcacgacgagctgctgtacgaggtggccgaggaggacgtggtgcaggtggcccagatcgtgaagaacgagatggagagcgccgtgaagctgagcgtgaagctgaaggtgaaggtgaagatcggcgccagctggggcgagctgaaggacttcgacgtgtag

SEQ ID NO: 93863 - DNA, 8181 bp, synthetic construct
  misc_feature 1..8181: note = Description of Artificial Sequence: Synthetic coding sequence
  source 1..8181: mol_type = other DNA
atgaacggccacagattcaccttcagaaccagaagcctgctgcccctgcagaagggccagcacagatgcatcaccaagctgctggcccacaacgacccctggggcatcttcagagcccccagcagcagaagaagctacagcgtgagcggcgtgtgccagcccgccatccccaacagcagcctgcacatcccccacaacgcctgctggctgaagtggaagctgtgcagcgagatcgccctgccctaccaccacatcctgggcgagagaagaaagctgtgcagcatcagaagattcgagttcgaggactggagagaggacgtgagaagctgctgccaggccagagtgctgcccagaggcagaaccctgggcctgtggctggccctgatcggcagagaggagttcgccatgaacctgctgagaagaagcggcaagagaagaagaagcgagagcggcagcgacagcttcagcggcagcggcggcgacagcagcgccagcccccagttcctgagcggcagcgtgctgagccccccccccggcctgggcagatgcctgaaggccgccgccgccggcgagtgcaagcccaccgtgcccgactacgagagagacaagctgctgctggccaactggggcctgcccaaggccgtgctggagaagtaccacagcttcggcgtgaagaagatgttcgagtggcaggccgagtgcctgctgctgggccaggtgctggagggcaagaacctggtgtacagcgcccccaccagcgccggcaagaccctggtggccgagctgctgatcctgaagagagtgctggagatgagaaagaaggccctgttcatcctgcccttcgtgagcgtggccaaggagaagaagtactacctgcagagcctgttccaggaggtgggcatcaaggtggacggctacatgggcagcaccagccccagcagacacttcagcagcctggacatcgccgtgtgcaccatcgagagagccaacggcctgatcaacagactgatcgaggagaacaagatggacctgctgggcatggtggtggtggacgagctgcacatgctgggcgacagccacagaggctacctgctggagctgctgctgaccaagatctgctacatcaccagaaagagcgccagctgccaggccgacctggccagcagcctgagcaacgccgtgcagatcgtgggcatgagcgccaccctgcccaacctggagctggtggccagctggctgaacgccgagctgtaccacaccgacttcagacccgtgcccctgctggagagcgtgaaggtgggcaacagcatctacgacagcagcatgaagctggtgagagagttcgagcccatgctgcaggtgaagggcgacgaggaccacgtggtgagcctgtgctacgagaccatctgcgacaaccacagcgtgctgctgttctgccccagcaagaagtggtgcgagaagctggccgacatcatcgccagagagttctacaacctgcaccaccaggccgagggcgagggcctggtgaagcccagcgagtgcccccccgtgatcctggagcagaaggagctgctggaggtgatggaccagctgagaagactgcccagcggcctggacagcgtgctgcagaagaccgtgccctggggcgtggccttccaccacgccggcctgaccttcgaggagagagacatcatcgagggcgccttcagacagggcctgatcagagtgctggccgccaccagcaccctgagcagcggcgtgaacctgcccgccagaagagtgatcatcagaacccccatcttcggcggcagacccctggacatcctgacctacaagcagatggtgggcagagccggcagaaagggcgtggacaccgtggagagcatcctgatctgcaagaacagcgagaagagcaagggcatcgccctgctgcagggcagcctgaagcccgtgagaagctgcctgcagagaagagagggcgaggaggtgaccggcagcatgatcagagccatcctggagatcatcgtgggcggcgtggccagcaccagccaggacatgcacacctacgccgcctgcaccttcctggccgccagcatgaaggagggcaagcagggcatccagagaaaccaggagagcgtgcagctgggcgccatcgaggcctgcgtgatgtggctgctggagaacgagttcatccagagcaccgaggccagcgacggcaccgagggcaaggtgtaccaccccacccacctgggcagcgccaccctgagcagcagcctgagccccgccgacaccctggacatcttcgccgacctgcagagagccatgaagggcttcgtgctggagaacgacctgcacatcctgtacctggtgacccccatgttcgaggactggaccaccatcgactggtacagattcttctgcctgtgggagaagctgcccaccagcatgaagagagtggccgagctggtgggcgtggaggagggcttcctggccagatgcgtgaagggcaaggtggtggccagaaccgagagacagcacagacagatggccatccacaagagattcttcaccagcctggtgctgctggacctgatcagcgaggtgcccctgagagagatcaaccagaagtacggctgcaacagaggccagatccagagcctgcagcagagcgccgccgtgtacgccggcatgatcaccgtgttcagcaacagactgggctggcacaacatggagctgctgctgagccagttccagaagagactgaccttcggcatccagagagagctgtgcgacctggtgagagtgagcctgctgaacgcccagagagccagagtgctgtacgccagcggcttccacaccgtggccgacctggccagagccaacatcgtggaggtggaggtgatcctgaagaacgccgtgcccttcaagagcgccagaaaggccgtggacgaggaggaggaggccgtggaggagagaagaaacatgagaaccatctgggtgaccggcagaaagggcctgaccgagagagaggccgccgccctgatcgtggaggaggccagaatgatcctgcagcaggacctggtggagatgggcgtgcagtggaacccctgcgccctgctgcacagcagcacctgcagcctgacccacagcgagagcgaggtgaaggagcacaccttcatcagccagaccaagagcagctacaagaagctgaccagcaagaacaagagcaacaccatcttcagcgacagctacatcaagcacagccccaacatcgtgcaggacctgaacaagagcagagagcacaccagcagcttcaactgcaacttccagaacggcaaccaggagcaccagacctgcagcatcttcagagccagaaagagagccagcctggacatcaacaaggagaagcccggcgccagccagaacgagggcaagaccagcgacaagaaggtggtgcagaccttcagccagaagaccaagaaggcccccctgaacttcaacagcgagaagatgagcagaagcttcagaagctggaagagaagaaagcacctgaagagaagcagagacagcagccccctgaaggacagcggcgcctgcagaatccacctgcagggccagaccctgagcaaccccagcctgtgcgaggaccccttcaccctggacgagaagaagaccgagttcagaaacagcggccccttcgccaagaacgtgagcctgagcggcaaggagaaggacaacaagaccagcttccccctgcagatcaagcagaactgcagctggaacatcaccctgaccaacgacaacttcgtggagcacatcgtgaccggcagccagagcaagaacgtgacctgccaggccaccagcgtggtgagcgagaagggcagaggcgtggccgtggaggccgagaagatcaacgaggtgctgatccagaacggcagcaagaaccagaacgtgtacatgaagcaccacgacatccaccccatcaaccagtacctgagaaagcagagccacgagcagaccagcaccatcaccaagcagaagaacatcatcgagagacagatgccctgcgaggccgtgagcagctacatcaacagagacagcaacgtgaccatcaactgcgagagaatcaagctgaacaccgaggagaacaagcccagccacttccaggccctgggcgacgacatcagcagaaccgtgatccccagcgaggtgctgcccagcgccggcgccttcagcaagagcgagggccagcacgagaacttcctgaacatcagcagactgcaggagaagaccggcacctacaccaccaacaagaccaagaacaaccacgtgagcgacctgggcctggtgctgtgcgacttcgaggacagcttctacctggacacccagagcgagaagatcatccagcagatggccaccgagaacgccaagctgggcgccaaggacaccaacctggccgccggcatcatgcagaagagcctggtgcagcagaacagcatgaacagcttccagaaggagtgccacatccccttccccgccgagcagcaccccctgggcgccaccaagatcgaccacctggacctgaagaccgtgggcaccatgaagcagagcagcgacagccacggcgtggacatcctgacccccgagagccccatcttccacagccccatcctgctggaggagaacggcctgttcctgaagaagaacgaggtgagcgtgaccgacagccagctgaacagcttcctgcagggctaccagacccaggagaccgtgaagcccgtgatcctgctgatcccccagaagagaacccccaccggcgtggagggcgagtgcctgcccgtgcccgagaccagcctgaacatgagcgacagcctgctgttcgacagcttcagcgacgactacctggtgaaggagcagctgcccgacatgcagatgaaggagcccctgcccagcgaggtgaccagcaaccacttcagcgacagcctgtgcctgcaggaggacctgatcaagaagagcaacgtgaacgagaaccaggacacccaccagcagctgacctgcagcaacgacgagagcatcatcttcagcgagatggacagcgtgcagatggtggaggccctggacaacgtggacatcttccccgtgcaggagaagaaccacaccgtggtgagccccagagccctggagctgagcgaccccgtgctggacgagcaccaccagggcgaccaggacggcggcgaccaggacgagagagccgagaagagcaagctgaccggcaccagacagaaccacagcttcatctggagcggcgccagcttcgacctgagccccggcctgcagagaatcctggacaaggtgagcagccccctggagaacgagaagctgaagagcatgaccatcaacttcagcagcctgaacagaaagaacaccgagctgaacgaggagcaggaggtgatcagcaacctggagaccaagcaggtgcagggcatcagcttcagcagcaacaacgaggtgaagagcaagatcgagatgctggagaacaacgccaaccacgacgagaccagcagcctgctgcccagaaaggagagcaacatcgtggacgacaacggcctgatcccccccacccccatccccaccagcgccagcaagctgaccttccccggcatcctggagacccccgtgaacccctggaagaccaacaacgtgctgcagcccggcgagagctacctgttcggcagccccagcgacatcaagaaccacgacctgagccccggcagcagaaacggcttcaaggacaacagccccatcagcgacaccagcttcagcctgcagctgagccaggacggcctgcagctgacccccgccagcagcagcagcgagagcctgagcatcatcgacgtggccagcgaccagaacctgttccagaccttcatcaaggagtggagatgcaagaagagattcagcatcagcctggcctgcgagaagatcagaagcctgaccagcagcaagaccgccaccatcggcagcagattcaagcaggccagcagcccccaggagatccccatcagagacgacggcttccccatcaagggctgcgacgacaccctggtggtgggcctggccgtgtgctggggcggcagagacgcctactacttcagcctgcagaaggagcagaagcacagcgagatcagcgccagcctggtgccccccagcctggaccccagcctgaccctgaaggacagaatgtggtacctgcagagctgcctgagaaaggagagcgacaaggagtgcagcgtggtgatctacgacttcatccagagctacaagatcctgctgctgagctgcggcatcagcctggagcagagctacgaggaccccaaggtggcctgctggctgctggaccccgacagccaggagcccaccctgcacagcatcgtgaccagcttcctgccccacgagctgcccctgctggagggcatggagaccagccagggcatccagagcctgggcctgaacgccggcagcgagcacagcggcagatacagagccagcgtggagagcatcctgatcttcaacagcatgaaccagctgaacagcctgctgcagaaggagaacctgcaggacgtgttcagaaaggtggagatgcccagccagtactgcctggccctgctggagctgaacggcatcggcttcagcaccgccgagtgcgagagccagaagcacatcatgcaggccaagctggacgccatcgagacccaggcctaccagctggccggccacagcttcagcttcaccagcagcgacgacatcgccgaggtgctgttcctggagctgaagctgccccccaacagagagatgaagaaccagggcagcaagaagaccctgggcagcaccagaagaggcatcgacaacggcagaaagctgagactgggcagacagttcagcaccagcaaggacgtgctgaacaagctgaaggccctgcaccccctgcccggcctgatcctggagtggagaagaatcaccaacgccatcaccaaggtggtgttccccctgcagagagagaagtgcctgaaccccttcctgggcatggagagaatctaccccgtgagccagagccacaccgccaccggcagaatcaccttcaccgagcccaacatccagaacgtgcccagagacttcgagatcaagatgcccaccctggtgggcgagagcccccccagccaggccgtgggcaagggcctgctgcccatgggcagaggcaagtacaagaagggcttcagcgtgaaccccagatgccaggcccagatggaggagagagccgccgacagaggcatgcccttcagcatcagcatgagacacgccttcgtgcccttccccggcggcagcatcctggccgccgactacagccagctggagctgagaatcctggcccacctgagccacgacagaagactgatccaggtgctgaacaccggcgccgacgtgttcagaagcatcgccgccgagtggaagatgatcgagcccgagagcgtgggcgacgacctgagacagcaggccaagcagatctgctacggcatcatctacggcatgggcgccaagagcctgggcgagcagatgggcatcaaggagaacgacgccgcctgctacatcgacagcttcaagagcagatacaccggcatcaaccagttcatgaccgagaccgtgaagaactgcaagagagacggcttcgtgcagaccatcctgggcagaagaagatacctgcccggcatcaaggacaacaacccctacagaaaggcccacgccgagagacaggccatcaacaccatcgtgcagggcagcgccgccgacatcgtgaagatcgccaccgtgaacatccagaagcagctggagaccttccacagcaccttcaagagccacggccacagagagggcatgctgcagagcgaccagaccggcctgagcagaaagagaaagctgcagggcatgttctgccccatcagaggcggcttcttcatcctgcagctgcacgacgagctgctgtacgaggtggccgaggaggacgtggtgcaggtggcccagatcgtgaagaacgagatggagagcgccgtgaagctgagcgtgaagctgaaggtgaaggtgaagatcggcgccagctggggcgagctgaaggacttcgacgtgtag

SEQ ID NO: 93864 - DNA, 6642 bp, synthetic construct
  misc_feature 1..6642: note = Description of Artificial Sequence: Synthetic coding sequence
  source 1..6642: mol_type = other DNA
atgcccaccagcaacagccagaaggagctgctggaggtgatggaccagctgagaagactgcccagcggcctggacagcgtgctgcagaagaccgtgccctggggcgtggccttccaccacgccggcctgaccttcgaggagagagacatcatcgagggcgccttcagacagggcctgatcagagtgctggccgccaccagcaccctgagcagcggcgtgaacctgcccgccagaagagtgatcatcagaacccccatcttcggcggcagacccctggacatcctgacctacaagcagatggtgggcagagccggcagaaagggcgtggacaccgtgggcgagagcatcctgatctgcaagaacagcgagaagagcaagggcatcgccctgctgcagggcagcctgaagcccgtgagaagctgcctgcagagaagagagggcgaggaggtgaccggcagcatgatcagagccatcctggagatcatcgtgggcggcgtggccagcaccagccaggacatgcacacctacgccgcctgcaccttcctggccgccagcatgaaggagggcaagcagggcatccagagaaaccaggagagcgtgcagctgggcgccatcgaggcctgcgtgatgtggctgctggagaacgagttcatccagagcaccgaggccagcgacggcaccgagggcaaggtgtaccaccccacccacctgggcagcgccaccctgagcagcagcctgagccccgccgacaccctggacatcttcgccgacctgcagagagccatgaagggcttcgtgctggagaacgacctgcacatcctgtacctggtgacccccatgttcgaggactggaccaccatcgactggtacagattcttctgcctgtgggagaagctgcccaccagcatgaagagagtggccgagctggtgggcgtggaggagggcttcctggccagatgcgtgaagggcaaggtggtggccagaaccgagagacagcacagacagatggccatccacaagagattcttcaccagcctggtgctgctggacctgatcagcgaggtgcccctgagagagatcaaccagaagtacggctgcaacagaggccagatccagagcctgcagcagagcgccgccgtgtacgccggcatgatcaccgtgttcagcaacagactgggctggcacaacatggagctgctgctgagccagttccagaagagactgaccttcggcatccagagagagctgtgcgacctggtgagagtgagcctgctgaacgcccagagagccagagtgctgtacgccagcggcttccacaccgtggccgacctggccagagccaacatcgtggaggtggaggtgatcctgaagaacgccgtgcccttcaagagcgccagaaaggccgtggacgaggaggaggaggccgtggaggagagaagaaacatgagaaccatctgggtgaccggcagaaagggcctgaccgagagagaggccgccgccctgatcgtggaggaggccagaatgatcctgcagcaggacctggtggagatgggcgtgcagtggaacccctgcgccctgctgcacagcagcacctgcagcctgacccacagcgagagcgaggtgaaggagcacaccttcatcagccagaccaagagcagctacaagaagctgaccagcaagaacaagagcaacaccatcttcagcgacagctacatcaagcacagccccaacatcgtgcaggacctgaacaagagcagagagcacaccagcagcttcaactgcaacttccagaacggcaaccaggagcaccagacctgcagcatcttcagagccagaaagagagccagcctggacatcaacaaggagaagcccggcgccagccagaacgagggcaagaccagcgacaagaaggtggtgcagaccttcagccagaagaccaagaaggcccccctgaacttcaacagcgagaagatgagcagaagcttcagaagctggaagagaagaaagcacctgaagagaagcagagacagcagccccctgaaggacagcggcgcctgcagaatccacctgcagggccagaccctgagcaaccccagcctgtgcgaggaccccttcaccctggacgagaagaagaccgagttcagaaacagcggccccttcgccaagaacgtgagcctgagcggcaaggagaaggacaacaagaccagcttccccctgcagatcaagcagaactgcagctggaacatcaccctgaccaacgacaacttcgtggagcacatcgtgaccggcagccagagcaagaacgtgacctgccaggccaccagcgtggtgagcgagaagggcagaggcgtggccgtggaggccgagaagatcaacgaggtgctgatccagaacggcagcaagaaccagaacgtgtacatgaagcaccacgacatccaccccatcaaccagtacctgagaaagcagagccacgagcagaccagcaccatcaccaagcagaagaacatcatcgagagacagatgccctgcgaggccgtgagcagctacatcaacagagacagcaacgtgaccatcaactgcgagagaatcaagctgaacaccgaggagaacaagcccagccacttccaggccctgggcgacgacatcagcagaaccgtgatccccagcgaggtgctgcccagcgccggcgccttcagcaagagcgagggccagcacgagaacttcctgaacatcagcagactgcaggagaagaccggcacctacaccaccaacaagaccaagaacaaccacgtgagcgacctgggcctggtgctgtgcgacttcgaggacagcttctacctggacacccagagcgagaagatcatccagcagatggccaccgagaacgccaagctgggcgccaaggacaccaacctggccgccggcatcatgcagaagagcctggtgcagcagaacagcatgaacagcttccagaaggagtgccacatccccttccccgccgagcagcaccccctgggcgccaccaagatcgaccacctggacctgaagaccgtgggcaccatgaagcagagcagcgacagccacggcgtggacatcctgacccccgagagccccatcttccacagccccatcctgctggaggagaacggcctgttcctgaagaagaacgaggtgagcgtgaccgacagccagctgaacagcttcctgcagggctaccagacccaggagaccgtgaagcccgtgatcctgctgatcccccagaagagaacccccaccggcgtggagggcgagtgcctgcccgtgcccgagaccagcctgaacatgagcgacagcctgctgttcgacagcttcagcgacgactacctggtgaaggagcagctgcccgacatgcagatgaaggagcccctgcccagcgaggtgaccagcaaccacttcagcgacagcctgtgcctgcaggaggacctgatcaagaagagcaacgtgaacgagaaccaggacacccaccagcagctgacctgcagcaacgacgagagcatcatcttcagcgagatggacagcgtgcagatggtggaggccctggacaacgtggacatcttccccgtgcaggagaagaaccacaccgtggtgagccccagagccctggagctgagcgaccccgtgctggacgagcaccaccagggcgaccaggacggcggcgaccaggacgagagagccgagaagagcaagctgaccggcaccagacagaaccacagcttcatctggagcggcgccagcttcgacctgagccccggcctgcagagaatcctggacaaggtgagcagccccctggagaacgagaagctgaagagcatgaccatcaacttcagcagcctgaacagaaagaacaccgagctgaacgaggagcaggaggtgatcagcaacctggagaccaagcaggtgcagggcatcagcttcagcagcaacaacgaggtgaagagcaagatcgagatgctggagaacaacgccaaccacgacgagaccagcagcctgctgcccagaaaggagagcaacatcgtggacgacaacggcctgatcccccccacccccatccccaccagcgccagcaagctgaccttccccggcatcctggagacccccgtgaacccctggaagaccaacaacgtgctgcagcccggcgagagctacctgttcggcagccccagcgacatcaagaaccacgacctgagccccggcagcagaaacggcttcaaggacaacagccccatcagcgacaccagcttcagcctgcagctgagccaggacggcctgcagctgacccccgccagcagcagcagcgagagcctgagcatcatcgacgtggccagcgaccagaacctgttccagaccttcatcaaggagtggagatgcaagaagagattcagcatcagcctggcctgcgagaagatcagaagcctgaccagcagcaagaccgccaccatcggcagcagattcaagcaggccagcagcccccaggagatccccatcagagacgacggcttccccatcaagggctgcgacgacaccctggtggtgggcctggccgtgtgctggggcggcagagacgcctactacttcagcctgcagaaggagcagaagcacagcgagatcagcgccagcctggtgccccccagcctggaccccagcctgaccctgaaggacagaatgtggtacctgcagagctgcctgagaaaggagagcgacaaggagtgcagcgtggtgatctacgacttcatccagagctacaagatcctgctgctgagctgcggcatcagcctggagcagagctacgaggaccccaaggtggcctgctggctgctggaccccgacagccaggagcccaccctgcacagcatcgtgaccagcttcctgccccacgagctgcccctgctggagggcatggagaccagccagggcatccagagcctgggcctgaacgccggcagcgagcacagcggcagatacagagccagcgtggagagcatcctgatcttcaacagcatgaaccagctgaacagcctgctgcagaaggagaacctgcaggacgtgttcagaaaggtggagatgcccagccagtactgcctggccctgctggagctgaacggcatcggcttcagcaccgccgagtgcgagagccagaagcacatcatgcaggccaagctggacgccatcgagacccaggcctaccagctggccggccacagcttcagcttcaccagcagcgacgacatcgccgaggtgctgttcctggagctgaagctgccccccaacagagagatgaagaaccagggcagcaagaagaccctgggcagcaccagaagaggcatcgacaacggcagaaagctgagactgggcagacagttcagcaccagcaaggacgtgctgaacaagctgaaggccctgcaccccctgcccggcctgatcctggagtggagaagaatcaccaacgccatcaccaaggtggtgttccccctgcagagagagaagtgcctgaaccccttcctgggcatggagagaatctaccccgtgagccagagccacaccgccaccggcagaatcaccttcaccgagcccaacatccagaacgtgcccagagacttcgagatcaagatgcccaccctggtgggcgagagcccccccagccaggccgtgggcaagggcctgctgcccatgggcagaggcaagtacaagaagggcttcagcgtgaaccccagatgccaggcccagatggaggagagagccgccgacagaggcatgcccttcagcatcagcatgagacacgccttcgtgcccttccccggcggcagcatcctggccgccgactacagccagctggagctgagaatcctggcccacctgagccacgacagaagactgatccaggtgctgaacaccggcgccgacgtgttcagaagcatcgccgccgagtggaagatgatcgagcccgagagcgtgggcgacgacctgagacagcaggccaagcagatctgctacggcatcatctacggcatgggcgccaagagcctgggcgagcagatgggcatcaaggagaacgacgccgcctgctacatcgacagcttcaagagcagatacaccggcatcaaccagttcatgaccgagaccgtgaagaactgcaagagagacggcttcgtgcagaccatcctgggcagaagaagatacctgcccggcatcaaggacaacaacccctacagaaaggcccacgccgagagacaggccatcaacaccatcgtgcagggcagcgccgccgacatcgtgaagatcgccaccgtgaacatccagaagcagctggagaccttccacagcaccttcaagagccacggccacagagagggcatgctgcagagcgaccagaccggcctgagcagaaagagaaagctgcagggcatgttctgccccatcagaggcggcttcttcatcctgcagctgcacgacgagctgctgtacgaggtggccgaggaggacgtggtgcaggtggcccagatcgtgaagaacgagatggagagcgccgtgaagctgagcgtgaagctgaaggtgaaggtgaagatcggcgccagctggggcgagctgaaggacttcgacgtgtag

SEQ ID NO: 93865 - DNA, 240 bp, synthetic construct
  misc_feature 1..240: note = Description of Artificial Sequence: Synthetic coding sequence
  source 1..240: mol_type = other DNA
atgggcagaaagagactgatcaccgacagctaccccgtggtgaagagaagagagggccccgccggccacagcaagggcgagctggcccccgagctgggcgaggagccccagcccagagacgaggaggaggccgagctggagctgctgagacagttcgacctggcctggcagtacggcccctgcaccgtgagcggcatcagcatcccctacgaggcccccagaaagaccagctgcccctag

SEQ ID NO: 93866 - DNA, 324 bp, synthetic construct
  misc_feature 1..324: note = Description of Artificial Sequence: Synthetic coding sequence
  source 1..324: mol_type = other DNA
atgggcagaaagagactgatcaccgacagctaccccgtggtgaagagaagagagggccccgccggccacagcaagggcgagctggcccccgagctgggcgaggagccccagcccagagacgaggaggaggccgagctggagctgctgagacagttcgacctggcctggcagtacggcccctgcaccggcatcaccagactgcagagatggtgcagagccaagcagatgggcctggagcccccccccgaggtgtggcaggtgctgaagacccaccccggcgaccccagattccagtgcagcctgtggcacctgtaccccctgtag

SEQ ID NO: 93867 - DNA, 105 bp, synthetic construct
  misc_feature 1..105: note = Description of Artificial Sequence: Synthetic coding sequence
  source 1..105: mol_type = other DNA
atgggcagaaagagactgatcaccgacagctaccccgtggtgaagagaagagagggccccgccggccacagcaagggcgagctggcccccgagctgggcctgtag

SEQ ID NO: 93868 - DNA, 1266 bp, synthetic construct
  misc_feature 1..1266: note = Description of Artificial Sequence: Synthetic coding sequence
  source 1..1266: mol_type = other DNA
atggccgacatcagcctggacgagctgatcagaaagagaggcgccgccgccaagggcagactgaacgccagacccggcgtgggcggcgtgagaagcagagtgggcatccagcagggcctgctgagccagagcaccagaaccgccaccttccagcagagattcgacgccagacagaagatcggcctgagcgacgccagactgaagctgggcgtgaaggacgccagagagaagctgctgcagaaggacgccagattcagaatcaagggcaaggtgcaggacgccagagagatgctgaacagcagaaagcagcagaccaccgtgccccagaagcccagacaggtggccgacgccagagagaagatcagcctgaagagaagcagccccgccgccttcatcaacccccccatcggcaccgtgacccccgccctgaagctgaccaagaccatccaggtgccccagcagaaggccatggcccccctgcacccccaccccgccggcatgagaatcaacgtggtgaacaaccaccaggccaagcagaacctgtacgacctggacgaggacgacgacggcatcgccagcgtgcccaccaagcagatgaagttcgccgccagcggcggcttcctgcaccacatggccggcctgagcagcagcaagctgagcatgagcaaggccctgcccctgaccaaggtggtgcagaacgacgcctacaccgcccccgccctgcccagcagcatcagaaccaaggccctgaccaacatgagcagaaccctggtgaacaaggaggagccccccaaggagctgcccgccgccgagcccgtgctgagccccctggagggcaccaagatgaccgtgaacaacctgcaccccagagtgaccgaggaggacatcgtggagctgttctgcgtgtgcggcgccctgaagagagccagactggtgcaccccggcgtggccgaggtggtgttcgtgaagaaggacgacgccatcaccgcctacaagaagtacaacaacagatgcctggacggccagcccatgaagtgcaacctgcacatgaacggcaacgtgatcaccagcgaccagcccatcctgctgagactgagcgacagccccagcatgaagaaggagagcgagctgcccagaagagtgaacagcgccagcagcagcaacccccccgccgaggtggaccccgacaccatcctgaaggccctgttcaagagcagcggcgccagcgtgaccacccagcccaccgagttcaagatcaagctgtag

SEQ ID NO: 93869 - DNA, 558 bp, synthetic construct
  misc_feature 1..558: note = Description of Artificial Sequence: Synthetic coding sequence
  source 1..558: mol_type = other DNA
atggccgacatcagcctggacgagctgatcagaaagagaggcgccgccgccaagggcagactgaacgccagacccggcgtgggcggcgtgagaagcagagtgggcatccagcagggcctgctgagccagagcaccagaaccgccaccttccagcagagattcgacgccagacagaagatcggcctgagcgacgccagactgaagctgggcgtgaaggacgccagagagaagctgctgcagaaggacgccagattcagaatcaagggcaaggtgcaggacgccagagagatgctgaacagcagaaagcagcagaccaccgtgccccagaagcccagacaggtggccgacgccagagagaagatcagcctgaagagaagcagccccgccgccttcatcaacccccccatcggcaccgtgacccccgccctgaagctgaccaagaccatccaggtgggcctgagagccgtgcccctgctgtgcctggtgagcggcggcgcctgggtgggcagcagaagccaggccagctgccccctgcccagcggcagcagaccccactag

SEQ ID NO: 93870 - DNA, 1179 bp, synthetic construct
  misc_feature 1..1179: note = Description of Artificial Sequence: Synthetic coding sequence
  source 1..1179: mol_type = other DNA
atggccgacatcagcctggacgagctgatcagaaagagaggcgccgccgccaagggcagactgaacgccagacccggcgtgggcggcgtgagaagcagagtgggcatccagcagggcctgctgagccagagcaccagaaccgccaccttccagcagagattcgacgccagacagaagatcggcctgagcgacgccagactgaagctgggcgtgaaggacgccagagagaagctgctgcagaaggacgccagattcagaatcaagggcaaggtgcaggacgccagagagatgctgaacagcagaaagcagcagaccaccgtgccccagaagcccagacaggtggccgacgccagagagaagatcagcctgaagagaagcagccccgccgccttcatcaacccccccatcggcaccgtgacccccgccctgaagctgaccaagaccatccagaacctgtacgacctggacgaggacgacgacggcatcgccagcgtgcccaccaagcagatgaagttcgccgccagcggcggcttcctgcaccacatggccggcctgagcagcagcaagctgagcatgagcaaggccctgcccctgaccaaggtggtgcagaacgacgcctacaccgcccccgccctgcccagcagcatcagaaccaaggccctgaccaacatgagcagaaccctggtgaacaaggaggagccccccaaggagctgcccgccgccgagcccgtgctgagccccctggagggcaccaagatgaccgtgaacaacctgcaccccagagtgaccgaggaggacatcgtggagctgttctgcgtgtgcggcgccctgaagagagccagactggtgcaccccggcgtggccgaggtggtgttcgtgaagaaggacgacgccatcaccgcctacaagaagtacaacaacagatgcctggacggccagcccatgaagtgcaacctgcacatgaacggcaacgtgatcaccagcgaccagcccatcctgctgagactgagcgacagccccagcatgaagaaggagagcgagctgcccagaagagtgaacagcgccagcagcagcaacccccccgccgaggtggaccccgacaccatcctgaaggccctgttcaagagcagcggcgccagcgtgaccacccagcccaccgagttcaagatcaagctgtag

SEQ ID NO: 93871 - DNA, 690 bp, synthetic construct
  misc_feature 1..690: note = Description of Artificial Sequence: Synthetic coding sequence
  source 1..690: mol_type = other DNA
atggccgacatcagcctggacgagctgatcagaaagagaggcgccgccgccaagggcagactgaacgccagacccggcgtgggcggcgtgagaagcagagtgggcatccagcagggcctgctgagccagagcaccagaaccgccaccttccagcagagattcgacgccagacagaagatcggcctgagcgacgccagactgaagctgggcgtgaaggacgccagagagaagctgctgcagaaggacgccagattcagaatcaagggcaaggtgcaggacgccagagagatgctgaacagcagaaagcagcagaccaccgtgccccagaagcccagacaggtggccgacgccagagagaagatcagcctgaagagaagcagccccgccgccttcatcaacccccccatcggcaccgtgacccccgccctgaagctgaccaagaccatccagaacctgtacgacctggacgaggacgacgacggcatcgccagcgtgcccaccaagcagatgaagttcgccgccagcggcggcttcctgcaccacatggccggcctgagcagcagcaagctgagcatgagcaaggccctgcccctgaccaaggtggtgcagaacgacgcctacaccgcccccgccctgcccagcagcatcagaaccaaggccctgcccgtgctgaccagccccggcacctag

SEQ ID NO: 93872 - DNA, 561 bp, synthetic construct
  misc_feature 1..561: note = Description of Artificial Sequence: Synthetic coding sequence
  source 1..561: mol_type = other DNA
atggcccccctgcacccccaccccgccggcatgagaatcaacgtggtgaacaaccaccaggccaagcagaacctgtacgacctggacgaggacgacgacggcatcgccagcgtgcccaccaagcagatgaagttcgccgccagcggcggcttcctgcaccacatggccggcctgagcagcagcaagctgagcatgagcaaggccctgcccctgaccaaggtggtgcagaacgacgcctacaccgcccccgccctgcccagcagcatcagaaccaaggccctgaccaacatgagcagaaccctggtgaacaaggaggagccccccaaggagctgcccgccgccgagcccgtgctgagccccctggagggcaccaagatgaccgtgaacaacctgcaccccagagtgaccgaggaggacatcgtggagctgttctgcgtgtgcggcgccctgaagagagccagactggtgcaccccggcgtggccgaggtggtgttcgtgaagaaggacgacgccatcaccgcctacaagaagtacaacaacagatgcctggacggcggctag

SEQ ID NO: 93873 - DNA, 555 bp, synthetic construct
  misc_feature 1..555: note = Description of Artificial Sequence: Synthetic coding sequence
  source 1..555: mol_type = other DNA
atggccgacatcagcctggacgagctgatcagaaagagaggcgccgccgccaagggcagactgaacgccagacccggcgtgggcggcgtgagaagcagagtgggcatccagcagggcctgctgagccagagcaccagaaccgccaccttccagcagagattcgacgccagacagaagatcggcctgagcgacgccagactgaagctgggcgtgaaggacgccagagagaagctgctgcagaaggacgccagattcagaatcaagggcaaggtgcaggacgccagagagatgctgaacagcagaaagcagcagaccaccgtgccccagaagcccagacaggtggccgacgccagagagaagatcagcctgaagagaagcagccccgccgccttcatcaacccccccatcggcaccgtgacccccgccctgaagctgaccaagaccatccaggtgcccagcttcccctgccccagacccagcctgagccccaagtggttcagaatgatgcacacccagctgctgctgagcctgcccctgttcgagcagaagccctag

SEQ ID NO: 93874 - DNA, 354 bp, synthetic construct
  misc_feature 1..354: note = Description of Artificial Sequence: Synthetic coding sequence
  source 1..354: mol_type = other DNA
atggccgccgccgccgccgccggcagcggcacccccagagaggaggagggccccgccggcgaggccgccgccagccagccccaggcccccaccagcgtgcccggcgccagactgagcagactgcccctggccagagtgaaggccctggtgaaggccgaccccgacgtgaccctggccggccaggaggccatcttcatcctggccagagccgccgagctgttcgtggagaccatcgccaaggacgcctactgctgcgcccagcagggcaagagaaagaccctgcagagaagagacctggacaacgccatcgaggccgtggacgagttcgccttcctggagggcaccctggactag

SEQ ID NO: 93875 - DNA, 1029 bp, synthetic construct
  misc_feature 1..1029: note = Description of Artificial Sequence: Synthetic coding sequence
  source 1..1029: mol_type = other DNA
atggccgccagccaggccgtggaggagatgagaagcagagtggtgctgggcgagttcggcgtgagaaacgtgcacaccaccgacttccccggcaactacagcggctacgacgacgcctgggaccaggacagattcgagaagaacttcagagtggacgtggtgcacatggacgagaacagcctggagttcgacatggtgggcatcgacgccgccatcgccaacgccttcagaagaatcctgctggccgaggtgcccaccatggccgtggagaaggtgctggtgtacaacaacaccagcatcgtgcaggacgagatcctggcccacagactgggcctgatccccatccacgccgaccccagactgttcgagtacagaaaccagggcgacgaggagggcaccgagatcgacaccctgcagttcagactgcaggtgagatgcaccagaaacccccacgccgccaaggacagcagcgaccccaacgagctgtacgtgaaccacaaggtgtacaccagacacatgacctggatccccctgggcaaccaggccgacctgttccccgagggcaccatcagacccgtgcacgacgacatcctgatcgcccagctgagacccggccaggagatcgacctgctgatgcactgcgtgaagggcatcggcaaggaccacgccaagttcagccccgtggccaccgccagctacagactgctgcccgacatcaccctgctggagcccgtggagggcgaggccgccgaggagctgagcagatgcttcagccccggcgtgatcgaggtgcaggaggtgcagggcaagaaggtggccagagtggccaaccccagactggacaccttcagcagagagatcttcagaaacgagaagctgaagaaggtggtgagactggccagagtgagagaccactacatctgcaagaaggacctgctggccgccgtggcccacacctgcaaccccagcaccctgggcggccagggcgagtggatcaccggcagcagagagagagaccaccccggctag

SEQ ID NO: 93876 - DNA, 633 bp, synthetic construct
  misc_feature 1..633: note = Description of Artificial Sequence: Synthetic coding sequence
  source 1..633: mol_type = other DNA
atggccgtggagaaggtgctggtgtacaacaacaccagcatcgtgcaggacgagatcctggcccacagactgggcctgatccccatccacgccgaccccagactgttcgagtacagaaaccagggcgacgaggagggcaccgagatcgacaccctgcagttcagactgcaggtgagatgcaccagaaacccccacgccgccaaggacagcagcgaccccaacgagctgtacgtgaaccacaaggtgtacaccagacacatgacctggatccccctgggcaaccaggccgacctgttccccgagggcaccatcagacccgtgcacgacgacatcctgatcgcccagctgagacccggccaggagatcgacctgctgatgcactgcgtgaagggcatcggcaagaaggtggccagagtggccaaccccagactggacaccttcagcagagagatcttcagaaacgagaagctgaagaaggtggtgagactggccagagtgagagaccactacatcttcagcgtggagagcaccggcgtgctgccccccgacgtgctggtgagcgaggccatcaaggtgctgatgggcaagtgcagaagattcctggacgagctggacgccgtgcagatggactag

SEQ ID NO: 93877 - DNA, 1041 bp, synthetic construct
  misc_feature 1..1041: note = Description of Artificial Sequence: Synthetic coding sequence
  source 1..1041: mol_type = other DNA
atggccgccagccaggccgtggaggagatgagaagcagagtggtgctgggcgagttcggcgtgagaaacgtgcacaccaccgacttccccggcaactacagcggctacgacgacgcctgggaccaggacagattcgagaagaacttcagagtggacgtggtgcacatggacgagaacagcctggagttcgacatggtgggcatcgacgccgccatcgccaacgccttcagaagaatcctgctggccgaggtgcccaccatggccgtggagaaggtgctggtgtacaacaacaccagcatcgtgcaggacgagatcctggcccacagactgggcctgatccccatccacgccgaccccagactgttcgagtacagaaaccagggcgacgaggagggcaccgagatcgacaccctgcagttcagactgcaggtgagatgcaccagaaacccccacgccgccaaggacagcagcgaccccaacgagctgtacgtgaaccacaaggtgtacaccagacacatgacctggatccccctgggcaaccaggccgacctgttccccgagggcaccatcagacccgtgcacgacgacatcctgatcgcccagctgagacccggccaggagatcgacctgctgatgcactgcgtgaagggcatcggcaaggaccacgccaagttcagccccgtggccaccgccagctacagactgctgcccgacatcaccctgctggagcccgtggagggcgaggccgccgaggagctgagcagatgcttcagccccggcgtgatcgaggtgcaggaggtgcagggcaagaaggtggccagagtggccaaccccagactggacaccttcagcagagagatcttcagaaacgagaagctgaagaaggtggtgagactggccagagtgagagaccactacatcttcagcgtggagagcaccggcgtgctgccccccgacgtgctggtgagcgaggccatcaaggtgctgatgggcaagtgcagaagattcctggacgagctggacgccgtgcagatggactag

SEQ ID NO: 93878 - DNA, 369 bp, synthetic construct
  misc_feature 1..369: note = Description of Artificial Sequence: Synthetic coding sequence
  source 1..369: mol_type = other DNA
atggaggaggaccaggagctggagagaaaggccatcgaggagctgctgaaggaggccaagagaggcaagaccagagccgagaccatgggccccatgggctggatgaagtgccccctggccagcaccaacaagagattcctgatcaacaccatcaagaacaccctgcccagccacaaggagcaggaccacgagcagaaggagggcgacaaggagcccgccaagagccaggcccagaaggaggagaaccccaagaagcacagaagccacccctacaagcacagcttcagagccagaggcagcgccagctacagcccccccagaaagagaagcagccaggacaagtacgagaagagaagcaacagaagatag

SEQ ID NO: 93879 - DNA, 402 bp, synthetic construct
  misc_feature 1..402: note = Description of Artificial Sequence: Synthetic coding sequence
  source 1..402: mol_type = other DNA
atggaggaggaccaggagctggagagaaagatcagcggcctgaagaccagcatggccgagggcgagagaaagaccgccctggagatggtgcaggccgccggcaccgacagacactgcgtgaccttcgtgctgcacgaggaggaccacaccctgggcaacagcctgagatacatgatcatgaagaaccccgaggtggagttctgcggctacaccaccacccaccccagcgagagcaagatcaacctgagaatccagaccagaggcaccctgcccgccgtggagcccttccagagaggcctgaacgagctgatgaacgtgtgccagcacgtgctggacaagttcgaggccagcatcaaggactacaaggaccagaaggccagcagaaacgagagcaccttctag

SEQ ID NO: 93880 - DNA, 402 bp, synthetic construct; identical to SEQ ID NO: 93879
  misc_feature 1..402: note = Description of Artificial Sequence: Synthetic coding sequence
  source 1..402: mol_type = other DNA

SEQ ID NO: 93881 - DNA, 5913 bp, synthetic construct
  misc_feature 1..5913: note = Description of Artificial Sequence: Synthetic coding sequence
  source 1..5913: mol_type = other DNA
atgcacggcggcggcccccccagcggcgacagcgcctgccccctgagaaccatcaagagagtgcagttcggcgtgctgagccccgacgagctgaagagaatgagcgtgaccgagggcggcatcaagtaccccgagaccaccgagggcggcagacccaagctgggcggcctgatggaccccagacagggcgtgatcgagagaaccggcagatgccagacctgcgccggcaacatgaccgagtgccccggccacttcggccacatcgagctggccaagcccgtgttccacgtgggcttcctggtgaagaccatgaaggtgctgagatgcgtgtgcttcttctgcagcaagctgctggtggacagcaacaaccccaagatcaaggacatcctggccaagagcaagggccagcccaagaagagactgacccacgtgtacgacctgtgcaagggcaagaacatctgcgagggcggcgaggagatggacaacaagttcggcgtggagcagcccgagggcgacgaggacctgaccaaggagaagggccacggcggctgcggcagataccagcccagaatcagaagaagcggcctggagctgtacgccgagtggaagcacgtgaacgaggacagccaggagaagaagatcctgctgagccccgagagagtgcacgagatcttcaagagaatcagcgacgaggagtgcttcgtgctgggcatggagcccagatacgccagacccgagtggatgatcgtgaccgtgctgcccgtgccccccctgagcgtgagacccgccgtggtgatgcagggcagcgccagaaaccaggacgacctgacccacaagctggccgacatcgtgaagatcaacaaccagctgagaagaaacgagcagaacggcgccgccgcccacgtgatcgccgaggacgtgaagctgctgcagttccacgtggccaccatggtggacaacgagctgcccggcctgcccagagccatgcagaagagcggcagacccctgaagagcctgaagcagagactgaagggcaaggagggcagagtgagaggcaacctgatgggcaagagagtggacttcagcgccagaaccgtgatcacccccgaccccaacctgagcatcgaccaggtgggcgtgcccagaagcatcgccgccaacatgaccttcgccgagatcgtgacccccttcaacatcgacagactgcaggagctggtgagaagaggcaacagccagtaccccggcgccaagtacatcatcagagacaacggcgacagaatcgacctgagattccaccccaagcccagcgacctgcacctgcagaccggctacaaggtggagagacacatgtgcgacggcgacatcgtgatcttcaacagacagcccaccctgcacaagatgagcatgatgggccacagagtgagaatcctgccctggagcaccttcagactgaacctgagcgtgaccaccccctacaacgccgacttcgacggcgacgagatgaacctgcacctgccccagagcctggagaccagagccgagatccaggagctggccatggtgcccagaatgatcgtgaccccccagagcaacagacccgtgatgggcatcgtgcaggacaccctgaccgccgtgagaaagttcaccaagagagacgtgttcctggagagaggcgaggtgatgaacctgctgatgttcctgagcacctgggacggcaaggtgccccagcccgccatcctgaagcccagacccctgtggaccggcaagcagatcttcagcctgatcatccccggccacatcaactgcatcagaacccacagcacccaccccgacgacgaggacagcggcccctacaagcacatcagccccggcgacaccaaggtggtggtggagaacggcgagctgatcatgggcatcctgtgcaagaagagcctgggcaccagcgccggcagcctggtgcacatcagctacctggagatgggccacgacatcaccagactgttctacagcaacatccagaccgtgatcaacaactggctgctgatcgagggccacaccatcggcatcggcgacagcatcgccgacagcaagacctaccaggacatccagaacaccatcaagaaggccaagcaggacgtgatcgaggtgatcgagaaggcccacaacaacgagctggagcccacccccggcaacaccctgagacagaccttcgagaaccaggtgaacagaatcctgaacgacgccagagacaagaccggcagcagcgcccagaagagcctgagcgagtacaacaacttcaagagcatggtggtgagcggcgccaagggcagcaagatcaacatcagccaggtgatcgccgtggtgggccagcagaacgtggagggcaagagaatccccttcggcttcaagcacagaaccctgccccacttcatcaaggacgactacggccccgagagcagaggcttcgtggagaacagctacctggccggcctgacccccaccgagttcttcttccacgccatgggcggcagagagggcctgatcgacaccgccgtgaagaccgccgagaccggctacatccagagaagactgatcaagagcatggagagcgtgatggtgaagtacgacgccaccgtgagaaacagcatcaaccaggtggtgcagctgagatacggcgaggacggcctggccggcgagagcgtggagttccagaacctggccaccctgaagcccagcaacaaggccttcgagaagaagttcagattcgactacaccaacgagagagccctgagaagaaccctgcaggaggacctggtgaaggacgtgctgagcaacgcccacatccagaacgagctggagagagagttcgagagaatgagagaggacagagaggtgctgagagtgatcttccccaccggcgacagcaaggtggtgctgccctgcaacctgctgagaatgatctggaacgcccagaagatcttccacatcaaccccagactgcccagcgacctgcaccccatcaaggtggtggagggcgtgaaggagctgagcaagaagctggtgatcgtgaacggcgacgaccccctgagcagacaggcccaggagaacgccaccctgctgttcaacatccacctgagaagcaccctgtgcagcagaagaatggccgaggagttcagactgagcggcgaggccttcgactggctgctgggcgagatcgagagcaagttcaaccaggccatcgcccaccccggcgagatggtgggcgccctggccgcccagagcctgggcgagcccgccacccagatgaccctgaacaccttccactacgccggcgtgagcgccaagaacgtgaccctgggcgtgcccagactgaaggagctgatcaacatcagcaagaagcccaagacccccagcctgaccgtgttcctgctgggccagagcgccagagacgccgagagagccaaggacatcctgtgcagactggagcacaccaccctgagaaaggtgaccgccaacaccgccatctactacgaccccaacccccagagcaccgtggtggccgaggaccaggagtgggtgaacgtgtactacgagatgcccgacttcgacgtggccagaatcagcccctggctgctgagagtggagctggacagaaagcacatgaccgacagaaagctgaccatggagcagatcgccgagaagatcaacgccggcttcggcgacgacctgaactgcatcttcaacgacgacaacgccgagaagctggtgctgagaatcagaatcatgaacagcgacgagaacaagatgcaggaggaggaggaggtggtggacaagatggacgacgacgtgttcctgagatgcatcgagagcaacatgctgaccgacatgaccctgcagggcatcgagcagatcagcaaggtgtacatgcacctgccccagaccgacaacaagaagaagatcatcatcaccgaggacggcgagttcaaggccctgcaggagtggatcctggagaccgacggcgtgagcctgatgagagtgctgagcgagaaggacgtggaccccgtgagaaccaccagcaacgacatcgtggagatcttcaccgtgctgggcatcgaggccgtgagaaaggccctggagagagagctgtaccacgtgatcagcttcgacggcagctacgtgaactacagacacctggccctgctgtgcgacaccatgacctgcagaggccacctgatggccatcaccagacacggcgtgaacagacaggacaccggccccctgatgaagtgcagcttcgaggagaccgtggacgtgctgatggaggccgccgcccacggcgagagcgaccccatgaagggcgtgagcgagaacatcatgctgggccagctggcccccgccggcaccggctgcttcgacctgctgctggacgccgagaagtgcaagtacggcatggagatccccaccaacatccccggcctgggcgccgccggccccaccggcatgttcttcggcagcgcccccagccccatgggcggcatcagccccgccatgaccccctggaaccagggcgccacccccgcctacggcgcctggagccccagcgtgggcagcggcatgacccccggcgccgccggcttcagccccagcgccgccagcgacgccagcggcttcagccccggctacagccccgcctggagccccacccccggcagccccggcagccccggccccagcagcccctacatccccagccccggcggcgccatgagccccagctacagccccaccagccccgcctacgagcccagaagccccggcggctacaccccccagagccccagctacagccccaccagccccagctacagccccaccagccccagctacagccccaccagccccaactacagccccaccagccccagctacagccccaccagccccagctacagccccaccagccccagctacagccccaccagccccagctacagccccaccagccccagctacagccccaccagccccagctacagccccaccagccccagctacagccccaccagccccagctacagccccaccagccccagctacagccccaccagccccagctacagccccaccagccccagctacagccccaccagccccagctacagccccaccagccccagctacagccccaccagccccagctacagccccaccagccccagctacagccccaccagccccaactacagccccaccagccccaactacacccccaccagccccagctacagccccaccagccccagctacagccccaccagccccaactacacccccaccagccccaactacagccccaccagccccagctacagccccaccagccccagctacagccccaccagccccagctacagccccagcagccccagatacaccccccagagccccacctacacccccagcagccccagctacagccccagcagccccagctacagccccgccagccccaagtacacccccaccagccccagctacagccccagcagccccgagtacacccccaccagccccaagtacagccccaccagccccaagtacagccccaccagccccaagtacagccccaccagccccacctacagccccaccacccccaagtacagccccaccagccccacctacagccccaccagccccgtgtacacccccaccagccccaagtacagccccaccagccccacctacagccccaccagccccaagtacagccccaccagccccacctacagccccaccagccccaagggcagcacctacagccccaccagccccggctacagccccaccagccccacctacagcctgaccagccccgccatcagccccgacgacagcgacgaggagaactag

SEQ ID NO: 93882 - DNA, 1626 bp, synthetic construct
  misc_feature 1..1626: note = Description of Artificial Sequence: Synthetic coding sequence
  source 1..1626: mol_type = other DNA
atgcccggcagatgccagagcgacgccgccatgagagtgaacggccccgccagcagagcccccgccggctggaccagcggcagcctgcacaccggccccagagccggcagacccagagcccaggccagaggcgtgagaggcagaggcctgctgctgagacccagacccgccaaggagctgcccctgcccagaaagggcggcgcctgggcccccgccggcaaccccggccccctgcaccccctgggcgtggccgtgggcatggccggcagcggcagactggtgctgagaccctggatcagagagctgatcctgggcagcgagacccccagcagccccagagccggccagctgctggaggacgccgaggccgccgtggccggccccagccacgcccccgacaccagcgacgtgggcgccaccctgctggtgagcgacggcacccacagcgtgagatgcctggtgaccagagaggccctggacaccagcgactgggaggagaaggagttcggcttcagaggcaccgagggcagactgctgctgctgcaggactgcggcgtgcacgtgcaggtggccgagggcggcgcccccgccgagttctacctgcaggtggacagattcagcctgctgcccaccgagcagcccagactgagagtgcccggctgcaaccaggacctggacgtgcagaagaagctgtacgactgcctggaggagcacctgagcgagagcaccagcagcaacgccggcctgagcctgagccagctgctggacgagatgagagaggaccaggagcaccagggcgccctggtgtgcctggccgagagctgcctgaccctggagggcccctgcaccgccccccccgtgacccactgggccgccagcagatgcaaggccaccggcgaggccgtgtacaccgtgcccagcagcatgctgtgcatcagcgagaacgaccagctgatcctgagcagcctgggcccctgccagagaacccagggccccgagctgcccccccccgaccccgccctgcaggacctgagcctgaccctgatcgccagcccccccagcagccccagcagcagcggcacccccgccctgcccggccacatgagcagcgaggagagcggcaccagcatcagcctgctgcccgccctgagcctggccgcccccgaccccggccagagaagcagcagccagcccagccccgccatctgcagcgcccccgccaccctgacccccagaagcccccacgccagcagaacccccagcagccccctgcagagctgcacccccagcctgagccccagaagccacgtgcccagcccccaccaggccctggtgaccagaccccagaagcccagcctggagttcaaggagttcgtgggcctgccctgcaagaacagaccccccttccccagaaccggcgccaccagaggcgcccaggagccctgcagcgtgtgggagccccccaagagacacagagacggcagcgccttccagtacgagtacgagcccccctgcaccagcctgtgcgccagagtgcaggccgtgagactgcccccccagctgatggcctgggccctgcacttcctgatggacgcccagcccggcagcgagcccacccccatgtag

SEQ ID NO: 93883 - DNA, 2040 bp, synthetic construct
  misc_feature 1..2040: note = Description of Artificial Sequence: Synthetic coding sequence
  source 1..2040: mol_type = other DNA
atggacagagtgaccagataccccatcctgggcatcccccaggcccacagaggcaccggcctggtgctggacggcgacaccagctacacctaccacctggtgtgcatgggccccgaggccagcggctggggccaggacgagccccagacctggcccaccgaccacagagcccagcagggcgtgcagagacagggcgtgagctacagcgtgcacgcctacaccggccagcccagccccagaggcctgcacagcgagaacagagaggacgagggctggcaggtgtacagactgggcgccagagacgcccaccagggcagacccacctgggccctgagacccgaggacggcgaggacaaggagatgaagacctacagactggacgccggcgacgccgaccccagaagactgtgcgacctggagagagagagatgggccgtgatccagggccaggccgtgagaaagagcagcaccgtggccaccctgcagggcacccccgaccacggcgaccccagaacccccggcccccccagaagcacccccctggaggagaacgtggtggacagagagcagatcgacttcctggccgccagacagcagttcctgagcctggagcaggccaacaagggcgccccccacagcagccccgccagaggcacccccgccggcaccacccccggcgccagccaggcccccaaggccttcaacaagccccacctggccaacggccacgtggtgcccatcaagccccaggtgaagggcgtggtgagagaggagaacaaggtgagagccgtgcccacctgggccagcgtgcaggtggtggacgaccccggcagcctggccagcgtggagagccccggcacccccaaggagacccccatcgagagagagatcagactggcccaggagagagaggccgacctgagagagcagagaggcctgagacaggccaccgaccaccaggagctggtggagatccccaccagacccctgctgaccaagctgagcctgatcaccgcccccagaagagagagaggcagacccagcctgtacgtgcagagagacatcgtgcaggagacccagagagaggaggaccacagaagagagggcctgcacgtgggcagagccagcacccccgactgggtgagcgagggcccccagcccggcctgagaagagccctgagcagcgacagcatcctgagccccgcccccgacgccagagccgccgaccccgcccccgaggtgagaaaggtgaacagaatcccccccgacgcctaccagccctacctgagccccggcaccccccagctggagttcagcgccttcggcgccttcggcaagcccagcagcctgagcaccgccgaggccaaggccgccaccagccccaaggccaccatgagccccagacacctgagcgagagcagcggcaagcccctgagcaccaagcaggaggccagcaagccccccagaggctgcccccaggccaacagaggcgtggtgagatgggagtacttcagactgagacccctgagattcagagcccccgacgagccccagcaggcccaggtgccccacgtgtggggctgggaggtggccggcgcccccgccctgagactgcagaagagccagagcagcgacctgctggagagagagagagagagcgtgctgagaagagagcaggaggtggccgaggagagaagaaacgccctgttccccgaggtgttcagccccacccccgacgagaacagcgaccagaacagcagaagcagcagccaggccagcggcatcaccggcagctacagcgtgagcgagagccccttcttcagccccatccacctgcacagcaacgtggcctggaccgtggaggaccccgtggacagcgccccccccggccagagaaagaaggagcagtggtacgccggcatcaaccccagcgacggcatcaacagcgaggtgctggaggccatcagagtgaccagacacaagaacgccatggccgagagatgggagagcagaatctacgccagcgaggaggacgactag

SEQ ID NO: 93884 - DNA, 381 bp, synthetic construct
  misc_feature 1..381: note = Description of Artificial Sequence: Synthetic coding sequence
  source 1..381: mol_type = other DNA
atgagcgacaacgaggacaacttcgacggcgacgacttcgacgacgtggaggaggacgagggcctggacgacctggagaacgccgaggaggagggccaggagaacgtggagatcctgcccagcggcgagagaccccaggccaaccagaagagaatcaccaccccctacatgaccaagtacgagagagccagagtgctgggcaccagagccctgcagatcgccatgtgcgcccccgtgatggtggagctggagggcgagaccgaccccctgctgatcgccatgaaggagctgaagctgctgtggggcctggagtacaccgtgctgagacccagctacgccctggcccacagcctgggcagcttcagcatcagcagcagatag

SEQ ID NO: 93885 - DNA, 477 bp, synthetic construct
  misc_feature 1..477: note = Description of Artificial Sequence: Synthetic coding sequence
  source 1..477: mol_type = other DNA
atgagcgacaacgaggacaacttcgacggcgacgacttcgacgacgtggaggaggacgagggcctggacgacctggagaacgccgaggaggagggccaggagaacgtggagatcctgcccagcggcgagagaccccaggccaaccagaagagaatcaccaccccctacatgaccaagtacgagagagccagagtgctgggcaccagagccctgcagatcgccatgtgcgcccccgtgatggtggagctggagggcgagaccgaccccctgctgatcgccatgaaggagctgaacgccagaagcgccagcgagccccccggcgaggagcccccctggatggacagaggcaccagagacgagcacctgcccagctgccccggctgccccgccgtggccagcaacaccagatgctgcccccccgccgcctgcctgcccggcatcagcctgagcagaagaagaagactgagagaggagtag

SEQ ID NO: 93886 - DNA, 384 bp, synthetic construct
  misc_feature 1..384: note = Description of Artificial Sequence: Synthetic coding sequence
  source 1..384: mol_type = other DNA
atgagcgacaacgaggacaacttcgacggcgacgacttcgacgacgtggaggaggacgagggcctggacgacctggagaacgccgaggaggagggccaggagaacgtggagatcctgcccagcggcgagagaccccaggccaaccagaagagaatcaccaccccctacatgaccaagtacgagagagccagagtgctgggcaccagagccctgcagatcgccatgtgcgcccccgtgatggtggagctggagggcgagaccgaccccctgctgatcgccatgaaggagctgaaggccagaaagatccccatcatcatcagaagatacctgcccgacggcagctacgaggactggggcgtggacgagctgatcatcaccgactag

SEQ ID NO: 93887 - DNA, 519 bp, synthetic construct
  misc_feature 1..519: note = Description of Artificial Sequence: Synthetic coding sequence
  source 1..519: mol_type = other DNA
atgttctaccacatcagcctggagcacgagatcctgctgcaccccagatacttcggccccaacctgctgaacaccgtgaagcagaagctgttcaccgaggtggagggcacctgcaccggcaagtacggcttcgtgatcgccgtgaccaccatcgacaacatcggcgccggcgtgatccagcccggcagaggcttcgtgctgtaccccgtgaagtacaaggccatcgtgttcagacccttcaagggcgaggtggtggacgccgtggtgacccaggtgaacaaggtgggcctgttcaccgagatcggccccatgagctgcttcatcagcagacacagcatccccagcgagatggagttcgaccccaacagcaaccccccctgctacaagaccatggacgaggacatcgtgatccagcaggacgacgagatcagactgaagatcgtgggcaccagagtggacaagaacgacatcttcgccatcggcagcctgatggacgactacctgggcctggtgagctag

SEQ ID NO: 93888 - DNA, 453 bp, synthetic construct
  misc_feature 1..453: note = Description of Artificial Sequence: Synthetic coding sequence
  source 1..453: mol_type = other DNA
atggccggcatcctgttcgaggacatcttcgacgtgaaggacatcgaccccgagggcaagaagttcgacagagtgagcagactgcactgcgagagcgagagcttcaagatggacctgatcctggacgtgaacatccagatctaccccgtggacctgggcgacaagttcagactggtgatcgccagcaccctgtacgaggacggcaccctggacgacggcgagtacaaccccaccgacgacagacccagcagagccgaccagttcgagtacgtgatgtacggcaaggtgtacagaatcgagggcgacgagaccagcaccgaggccgccaccagactgagcgcctacgtgagctacggcggcctgctgatgagactgcagggcgacgccaacaacctgcacggcttcgaggtggacagcagagtgtacctgctgatgaagaagctggccttctag

SEQ ID NO: 93889 - DNA, 39 bp, synthetic construct
  misc_feature 1..39: note = Description of Artificial Sequence: Synthetic coding sequence
  source 1..39: mol_type = other DNA
atggccggcatcctgttcgaggacatcttcgacgtgtag

SEQ ID NO: 93890 - DNA, 450 bp, synthetic construct
  misc_feature 1..450: note = Description of Artificial Sequence: Synthetic coding sequence
  source 1..450: mol_type = other DNA
atggccggcatcctgttcgaggacatcttcgacgtgaaggacatcgaccccgagggcaagaagttcgacagagtgagcagactgcactgcgagagcgagagcttcaagatggacctgatcctggacgtgaacatccagatctaccccgtggacctgggcgacaagttcagactggtgatcgccagcaccctgtacgaggacggcaccctggacgacggcgagtacaaccccaccgacgacagacccagcagagccgaccagttcgagtacgtgatgtacggcaaggtgtacagaatcgagggcgacgagaccagcaccgaggccgccaccagactgagcgcctacgtgagctacggcggcctgctgatgagactgcagggcgacgccaacaacctgcacggcttcgaggtggacagcagagtgtacctgctgatgaagaagctggcctag

SEQ ID NO: 93891 - DNA, 453 bp, synthetic construct; identical to SEQ ID NO: 93888
  misc_feature 1..453: note = Description of Artificial Sequence: Synthetic coding sequence
  source 1..453: mol_type = other DNA

SEQ ID NO: 93892 - DNA, 1491 bp, synthetic construct
  misc_feature 1..1491: note = Description of Artificial Sequence: Synthetic coding sequence
  source 1..1491: mol_type = other DNA
atggaggagcagagagaggccctgagaaagatcatcaagaccctggccgtgaagaacgaggagatccagagcttcatctacagcctgaagcagatgctgctgaacgtggaggccaacagcgccaaggtgcaggaggacctggaggccgagttccagagcctgttcagcctgctggaggagctgaaggagggcatgctgatgaagatcaagcaggacagagccagcagaacctacgagctgcagaaccagctggccgcctgcaccagagccctggagagcagcgaggagctgctggagaccgccaaccagaccctgcaggccatggacagcgaggacttcccccaggccgccaagcagatcaaggacggcgtgaccatggcccccgccttcagactgagcctgaaggccaaggtgagcgacaacatgagccacctgatggtggacttcgcccaggagagacagatgctgcaggccctgaagttcctgcccgtgcccagcgcccccgtgatcgacctggccgagagcctggtggccgacaactgcgtgaccctggtgtggagaatgcccgacgaggacagcaagatcgaccactacgtgctggagtacagaagaaccaacttcgagggcccccccagactgaaggaggaccagccctggatggtgatcgagggcatcagacagaccgagtacaccctgaccggcctgaagttcgacatgaagtacatgaacttcagagtgaaggcctgcaacaaggccgtggccggcgagttcagcgagcccgtgaccctggagacccccgccttcatgttcagactggacgccagcaccagccaccagaacctgagagtggacgacctgagcgtggagtgggacgccatgggcggcaaggtgcaggacatcaaggccagagagaaggacggcaagggcagaaccgccagccccatcaacagccccgccagaggcacccccagccccaagagaatgcccagcggcagaggcggcagagacagattcaccgccgagagctacaccgtgctgggcgacaccctgatcgacggcggcgagcactactgggaggtgagatacgagcccgacagcaaggccttcggcgtgggcgtggcctacagaagcctgggcagattcgagcagctgggcaagaccgccgccagctggtgcctgcacgtgaacaactggctgcaggtgagcttcaccgccaagcacgccaacaaggtgaaggtgctggacgcccccgtgcccgactgcctgggcgtgcactgcgacttccaccagggcctgctgagcttctacaacgccagaaccaagcaggtgctgcacaccttcaagaccagattcacccagcccctgctgcccgccttcaccgtgtggtgcggcagcttccaggtgaccaccggcctgcaggtgcccagcgccgtgagatgcctgcagaagagaggcagcgccaccagcagcagcaacaccagcctgacctag

SEQ ID NO: 93893 - DNA, 354 bp, synthetic construct
  misc_feature 1..354: note = Description of Artificial Sequence: Synthetic coding sequence
  source 1..354: mol_type = other DNA
atgaacgccccccccgccttcgagagcttcctgctgttcgagggcgagaagaagatcaccatcaacaaggacaccaaggtgcccaacgcctgcctgttcaccatcaacaaggaggaccacaccctgggcaacatcatcaagagccagctgctgaaggacccccaggtgctgttcgccggctacaaggtgccccaccccctggagcacaagatcatcatcagagtgcagaccacccccgactacagcccccaggaggccttcaccaacgccatcaccgacctgatcagcgagctgagcctgctggaggagagattcagagtggccatcaaggacaagcaggagggcatcgagtag

SEQ ID NO: 93894 - DNA, 384 bp, synthetic construct
  misc_feature 1..384: note = Description of Artificial Sequence: Synthetic coding sequence
  source 1..384: mol_type = other DNA
atgaacgccccccccgccttcgagagcttcctgctgttcgagggcgagaagaagatcaccatcaacaaggacaccaaggtgcccaacgcctgcctgttcaccatcaacaaggaggaccacaccctgggcaacatcatcaagagccagctgctgaaggacccccaggtgctgttcgccggctacaaggtgccccaccccctggagcacaagatcatcatcagagtgcagaccacccccgactacagcccccaggaggccttcaccaacgccatcaccgacctgatcagcgagctgagcctgctggaggagagattcagagtgagagccggccccggcggcgccgacggcgtggccatcaaggacaagcaggagggcatcgagtag

SEQ ID NO: 93895 - DNA, 351 bp, synthetic construct
  misc_feature 1..351: note = Description of Artificial Sequence: Synthetic coding sequence
  source 1..351: mol_type = other DNA
atgaacgccccccccgccttcgagagcttcctgctgttcgagggcgagaagatcaccatcaacaaggacaccaaggtgcccaaggcctgcctgttcaccatcaacaaggaggaccacaccctgggcaacatcatcaagagcagagcctgcttccccttcgccttctgcagagactgccagttccccgaggccagccccgccaccctgcccgtgcagcccgccgagctgtgccccagagcccaccagctgtgcgcccccgccctgaagagacacctgggcggcgaggcccaccccgtgcacctgcacgccggcgccgccagcagacccgtgcagcagccccagcacctgtag

SEQ ID NO: 93896 - DNA, 348 bp, synthetic construct
  misc_feature 1..348: note = Description of Artificial Sequence: Synthetic coding sequence
  source 1..348: mol_type = other DNA
atgaacgccccccccgccttcgagagcttcctgctgttcgagggcgagaagatcaccatcaacaaggacaccaaggtgcccaaggcctgcctgttcaccatcaacaaggaggaccacaccctgggcaacatcatcaagagccagctgctgaaggacccccaggtgctgttcgccggctacaaggtgccccaccccctggagcacaagatcatcatcagagtgcagaccacccccgactacagcccccaggaggccttcaccaacgccatcaccgacctgatcagcgagctgagcctgctggaggagagattcagaacctgcctgctgcccctgagactgctgccctag

SEQ ID NO: 93897 - DNA, 177 bp, synthetic construct
  misc_feature 1..177: note = Description of Artificial Sequence: Synthetic coding sequence
  source 1..177: mol_type = other DNA
atggacacccagaaggacgtgcagccccccaagcagcagcccatgatctacatctgcggcgagtgccacaccgagaacgagatcaagagcagagaccccatcagatgcagagagtgcggctacagaatcatgtacaagaagagaaccaagagactggtggtgttcgacgccagatag

SEQ ID NO: 93898 - DNA, 204 bp, synthetic construct
  misc_feature 1..204: note = Description of Artificial Sequence: Synthetic coding sequence
  source 1..204: mol_type = other DNA
atgatcatccccgtgagatgcttcacctgcggcaagatcgtgggcaacaagtgggaggcctacctgggcctgctgcaggccgagtacaccgagggcgacgccctggacgccctgggcctgaagagatactgctgcagaagaatgctgctggcccacgtggacctgatcgagaagctgctgaactacgcccccctggagaagtag

SEQ ID NO: 93899 - DNA, 204 bp, synthetic construct; identical to SEQ ID NO: 93898
  misc_feature 1..204: note = Description of Artificial Sequence: Synthetic coding sequence
  source 1..204: mol_type = other DNA

SEQ ID NO: 93900 - DNA, 4173 bp, synthetic construct
  misc_feature 1..4173: note = Description of Artificial Sequence: Synthetic coding sequence
  source 1..4173: mol_type = other DNA
atggtgaaggagcagttcagagagaccgacgtggccaagaagatcagccacatctgcttcggcatgaagagccccgaggagatgagacagcaggcccacatccaggtggtgagcaagaacctgtacagccaggacaaccagcacgcccccctgctgtacggcgtgctggaccacagaatgggcaccagcgagaaggacagaccctgcgagacctgcggcaagaacctggccgactgcctgggccactacggctacatcgacctggagctgccctgcttccacgtgggctacttcagagccgtgatcggcatcctgcagatgatctgcaagacctgctgccacatcatgctgagccaggaggagaagaagcagttcctggactacctgaagagacccggcctgacctacctgcagaagagaggcctgaagaagaagatcagcgacaagtgcagaaagaagaacatctgccaccactgcggcgccttcaacggcaccgtgaagaagtgcggcctgctgaagatcatccacgagaagtacaagaccaacaagaaggtggtggaccccatcgtgagcaacttcctgcagagcttcgagaccgccatcgagcacaacaaggaggtggagcccctgctgggcagagcccaggagaacctgaaccccctggtggtgctgaacctgttcaagagaatccccgccgaggacgtgcccctgctgctgatgaaccccgaggccggcaagcccagcgacctgatcctgaccagactgctggtgccccccctgtgcatcagacccagcgtggtgagcgacctgaagagcggcaccaacgaggacgacctgaccatgaagctgaccgagatcatcttcctgaacgacgtgatcaagaagcacagaatcagcggcgccaagacccagatgatcatggaggactgggacttcctgcagctgcagtgcgccctgtacatcaacagcgagctgagcggcatccccctgaacatggcccccaagaagtggaccagaggcttcgtgcagagactgaagggcaagcagggcagattcagaggcaacctgagcggcaagagagtggacttcagcggcagaaccgtgatcagccccgaccccaacctgagaatcgacgaggtggccgtgcccgtgcacgtggccaagatcctgaccttccccgagaaggtgaacaaggccaacatcaacttcctgagaaagctggtgcagaacggccccgaggtgcaccccggcgccaacttcatccagcagagacacacccagatgaagagattcctgaagtacggcaacagagagaagatggcccaggagctgaagtacggcgacatcgtggagagacacctgatcgacggcgacgtggtgctgttcaacagacagcccagcctgcacaagctgagcatcatggcccacctggccagagtgaagccccacagaaccttcagattcaacgagtgcgtgtgcaccccctacaacgccgacttcgacggcgacgagatgaacctgcacctgccccagaccgaggaggccaaggccgaggccctggtgctgatgggcaccaaggccaacctggtgacccccagaaacggcgagcccctgatcgccgccatccaggacttcctgaccggcgcctacctgctgaccctgaaggacaccttcttcgacagagccaaggcctgccagatcatcgccagcatcctggtgggcaaggacgagaagatcaaggtgagactgcccccccccaccatcctgaagcccgtgaccctgtggaccggcaagcagatcttcagcgtgatcctgagacccagcgacgacaaccccgtgagagccaacctgagaaccaagggcaagcagtactgcggcaagggcgaggacctgtgcgccaacgacagctacgtgaccatccagaacagcgagctgatgagcggcagcatggacaagggcaccctgggcagcggcagcaagaacaacatcttctacatcctgctgagagactggggccagaacgaggccgccgacgccatgagcagactggccagactggcccccgtgtacctgagcaacagaggcttcagcatcggcatcggcgacgtgacccccggccagggcctgctgaaggccaagtacgagctgctgaacgccggctacaagaagtgcgacgagtacatcgaggccctgaacaccggcaagctgcagcagcagcccggctgcaccgccgaggagaccctggaggccctgatcctgaaggagctgagcgtgatcagagaccacgccggcagcgcctgcctgagagagctggacaagagcaacagccccctgaccatggccctgtgcggcagcaagggcagcttcatcaacatcagccagatgatcgcctgcgtgggccagcaggccatcagcggcagcagagtgcccgacggcttcgagaacagaagcctgccccacttcgagaagcacagcaagctgcccgccgccaagggcttcgtggccaacagcttctacagcggcctgacccccaccgagttcttcttccacaccatggccggcagagagggcctggtggacaccgccgtgaagaccgccgagaccggctacatgcagagaagactggtgaagagcctggaggacctgtgcagccagtacgacctgaccgtgagaagcagcaccggcgacatcatccagttcatctacggcggcgacggcctggaccccgccgccatggagggcaaggacgagcccctggagttcaagagagtgctggacaacatcaaggccgtgttcccctgccccagcgagcccgccctgagcaagaacgagctgatcctgaccaccgagagcatcatgaagaagagcgagttcctgtgctgccaggacagcttcctgcaggagatcaagaagttcatcaagggcgtgagcgagaagatcaagaagaccagagacaagtacggcatcaacgacaacggcaccaccgagcccagagtgctgtaccagctggacagaatcacccccacccaggtggagaagttcctggagacctgcagagacaagtacatgagagcccagatggagcccggcagcgccgtgggcgccctgtgcgcccagagcatcggcgagcccggcacccagatgaccctgaagaccttccacttcgccggcgtggccagcatgaacatcaccctgggcgtgcccagaatcaaggagatcatcaacgccagcaaggccatcagcacccccatcatcaccgcccagctggacaaggacgacgacgccgactacgccagactggtgaagggcagaatcgagaagaccctgctgggcgagatcagcgagtacatcgaggaggtgttcctgcccgacgactgcttcatcctggtgaagctgagcctggagagaatcagactgctgagactggaggtgaacgccgagaccgtgagatacagcatctgcaccagcaagctgagagtgaagcccggcgacgtggccgtgcacggcgaggccgtggtgtgcgtgacccccagagagaacagcaagagcagcatgtactacgtgctgcagttcctgaaggaggacctgcccaaggtggtggtgcagggcatccccgaggtgagcagagccgtgatccacatcgacgagcagagcggcaaggagaagtacaagctgctggtggagggcgacaacctgagagccgtgatggccacccacggcgtgaagggcaccagaaccaccagcaacaacacctacgaggtggagaagaccctgggcatcgaggccgccagaaccaccatcatcaacgagatccagtacaccatggtgaaccacggcatgagcatcgacagaagacacgtgatgctgctgagcgacctgatgacctacaagggcgaggtgctgggcatcaccagattcggcctggccaagatgaaggagagcgtgctgatgctggccagcttcgagaagaccgccgaccacctgttcgacgccgcctacttcggccagaaggacagcgtgtgcggcgtgagcgagtgcatcatcatgggcatccccatgaacatcggcaccggcctgttcaagctgctgcacaaggccgacagagaccccaacccccccaagagacccctgatcttcgacaccaacgagttccacatccccctggtgacctag

SEQ ID NO: 93901 - DNA, 489 bp, synthetic construct
  misc_feature 1..489: note = Description of Artificial Sequence: Synthetic coding sequence
  source 1..489: mol_type = other DNA
atgtactacgtgctgcagttcctgaaggaggacctgcccaaggtggtggtgcagggcatccccgaggtgagcagagccgtgatccacatcgacgagcagagcggcaaggagaagtacaagctgctggtggagggcgacaacctgagagccgtgatggccacccacggcgtgaagggcaccagaaccaccagcaacaacacctacgaggtggagaagaccctgggcatcgaggccgccagaaccaccatcatcaacgagatccagtacaccatggtgaaccacggcatgagcatcgacagaagacacgtgatgctgctgagcgacctgatgacctacaagggcgaggtgctgggcatcaccagattcggcctggccaagatgaaggagagcgtgctgatgctggccagcttcgagaagaccgccgaccacctgttcgacgccgcctacttcggccagaaggacagcgtgtgcgcctggccccagccctag

SEQ ID NO: 93902 - DNA, 4110 bp, synthetic construct
  misc_feature 1..4110: note = Description of Artificial Sequence: Synthetic coding sequence
  source 1..4110: mol_type = other DNA
atggtgaaggagcagttcagagagaccgacgtggccaagaagatcagccacatctgcttcggcatgaagagccccgaggagatgagacagcaggcccacatccaggtggtgagcaagaacctgtacagccaggacaaccagcacgcccccctgctgtacggcgtgctggaccacagaatgggcaccagcgagaaggacagaccctgcgagacctgcggcaagaacctggccgactgcctgggccactacggctacatcgacctggagctgccctgcttccacgtgggctacttcagagccgtgatcggcatcctgcagatgatctgcaagacctgctgccacatcatgctgagccaggaggagaagaagcagttcctggactacctgaagagacccggcctgacctacctgcagaagagaggcctgaagaagaagatcagcgacaagtgcagaaagaagaacatctgccaccactgcggcgccttcaacggcaccgtgaagaagtgcggcctgctgaagatcatccacgagaagtacaagaccaacaagaaggtggtggaccccatcgtgagcaacttcctgcagagcttcgagaccgccatcgagcacaacaaggaggtggagcccctgctgggcagagcccaggagaacctgaaccccctggtggtgctgaacctgttcaagagaatccccgccgaggacgtgcccctgctgctgatgaaccccgaggccggcaagcccagcgacctgatcctgaccagactgctggtgccccccctgtgcatcagacccagcgtggtgagcgacctgaagagcggcaccaacgaggacgacctgaccatgaagctgaccgagatcatcttcctgaacgacgtgatcaagaagcacagaatcagcggcgccaagacccagatgatcatggaggactgggacttcctgcagctgcagtgcgccctgtacatcaacagcgagctgagcggcatccccctgaacatggcccccaagaagtggaccagaggcttcgtgcagagactgaagggcaagcagggcagattcagaggcaacctgagcggcaagagagtggacttcagcggcagaaccgtgatcagccccgaccccaacctgagaatcgacgaggtggccgtgcccgtgcacgtggccaagatcctgaccttccccgagaaggtgaacaaggccaacatcaacttcctgagaaagctggtgcagaacggccccgaggtgcaccccggcgccaacttcatccagcagagacacacccagatgaagagattcctgaagtacggcaacagagagaagatggcccaggagctgaagtacggcgacatcgtggagagacacctgatcgacggcgacgtggtgctgttcaacagacagcccagcctgcacaagctgagcatcatggcccacctggccagagtgaagccccacagaaccttcagattcaacgagtgcgtgtgcaccccctacaacgccgacttcgacggcgacgagatgaacctgcacctgccccagaccgaggaggccaaggccgaggccctggtgctgatgggcaccaaggccaacctggtgacccccagaaacggcgagcccctgatcgccgccatccaggacttcctgaccggcgcctacctgctgaccctgaaggacaccttcttcgacagagccaaggcctgccagatcatcgccagcatcctggtgggcaaggacgagaagatcaaggtgagactgcccccccccaccatcctgaagcccgtgaccctgtggaccggcaagcagatcttcagcgtgatcctgagacccagcgacgacaaccccgtgagagccaacctgagaaccaagggcaagcagtactgcggcaagggcgaggacctgtgcgccaacgacagctacgtgaccatccagaacagcgagctgatgagcggcagcatggacaagggcaccctgggcagcggcagcaagaacaacatcttctacatcctgctgagagactggggccagaacgaggccgccgacgccatgagcagactggccagactggcccccgtgtacctgagcaacagaggcttcagcatcggcatcggcgacgtgacccccggccagggcctgctgaaggccaagtacgagctgctgaacgccggctacaagaagtgcgacgagtacatcgaggccctgaacaccggcaagctgcagcagcagcccggctgcaccgccgaggagaccctggaggccctgatcctgaaggagctgagcgtgatcagagaccacgccggcagcgcctgcctgagagagctggacaagagcaacagccccctgaccatggccctgtgcggcagcaagggcagcttcatcaacatcagccagatgatcgcctgcgtgggccagcaggccatcagcggcagcagagtgcccgacggcttcgagaacagaagcctgccccacttcgagaagcacagcaagctgcccgccgccaagggcttcgtggccaacagcttctacagcggcctgacccccaccgagttcttcttccacaccatggccggcagagagggcctggtggacaccgccgtgaagaccgccgagaccggctacatgcagagaagactggtgaagagcctggaggacctgtgcagccagtacgacctgaccgtgagaagcagcaccggcgacatcatccagttcatctacggcggcgacggcctggaccccgccgccatggagggcaaggacgagcccctggagttcaagagagtgctggacaacatcaaggccgtgttcccctgccccagcgagcccgccctgagcaagaacgagctgatcctgaccaccgagagcatcatgaagaagagcgagttcctgtgctgccaggacagcttcctgcaggagatcaagaagttcatcaagggcgtgagcgagaagatcaagaagaccagagacaagtacggcatcaacgacaacggcaccaccgagcccagagtgctgtaccagctggacagaatcacccccacccaggtggagaagttcctggagacctgcagagacaagtacatgagagcccagatggagcccggcagcgccgtgggcgccctgtgcgcccagagaaacatcaccctgggcgtgcccagaatcaaggagatcatcaacgccagcaaggccatcagcacccccatcatcaccgcccagctggacaaggacgacgacgccgactacgccagactggtgaagggcagaatcgagaagaccctgctgggcgagatcagcgagtacatcgaggaggtgttcctgcccgacgactgcttcatcctggtgaagctgagcctggagagaatcagactgctgagactggaggtgaacgccgagaccgtgagatacagcatctgcaccagcaagctgagagtgaagcccggcgacgtggccgtgcacggcgaggccgtggtgtgcgtgacccccagagagaacagcaagagcagcatgtactacgtgctgcagttcctgaaggaggacctgcccaaggtggtggtgcagggcatccccgaggtgagcagagccgtgatccacatcgacgagcagagcggcaaggagaagtacaagctgctggtggagggcgacaacctgagagccgtgatggccacccacggcgtgaagggcaccagaaccaccagcaacaacacctacgaggtggagaagaccctgggcatcgaggccgccagaaccaccatcatcaacgagatccagtacaccatggtgaaccacggcatgagcatcgacagaagacacgtgatgctgctgagcgacctgatgacctacaagggcgaggtgctgggcatcaccagattcggcctggccaagatgaaggagagcgtgctgatgctggccagcttcgagaagaccgccgaccacctgttcgacgccgcctacttcggccagaaggacagcgtgtgcggcgtgagcgagtgcatcatcatgggcatccccatgaacatcggcaccggcctgttcaagctgctgcacaaggccgacagagaccccaacccccccaagagacccctgatcttcgacaccaacgagttccacatccccctggtgacctag

SEQ ID NO: 93903 - DNA, 753 bp, synthetic construct; identical to SEQ ID NO: 78837
  misc_feature 1..753: note = Description of Artificial Sequence: Synthetic coding sequence
  source 1..753: mol_type = other DNA

SEQ ID NO: 93904 - DNA, 3228 bp, synthetic construct
  misc_feature 1..3228: note = Description of Artificial Sequence: Synthetic coding sequence
  source 1..3228: mol_type = other DNA
atgaaggccaacgagaaggtgaccagcgacgccgaccccatgtggtacctgaagtacctgaacatctacgtgggcctgcccgacgtggaggagagcttcaacgtgaccagacccgtgagcccccacgagtgcagactgagagacatgacctacagcgcccccatcaccgtggacatcgagtacaccagaggcagccagagaatcatcagaaacgccctgcccatcggcagaatgcccatcatgctgagaagcagcaactgcgtgctgaccggcaagacccccgccgagttcgccaagctgaacgagtgccccctggaccccggcggctacttcatcgtgaagggcgtggagaaggtgatcctgatccaggagcagctgagcaagaacagaatcatcgtggaggccgacagaaagggcgccgtgggcgccagcgtgaccagcagcacccacgagaagaagagcagaaccaacatggccgtgaagcagggcagattctacctgagacacaacaccctgagcgaggacatccccatcgtgatcatcttcaaggccatgggcgtggagagcgaccaggagatcgtgcagatgatcggcaccgaggagcacgtgatggccgccttcggccccagcctggaggagtgccagaaggcccagatcttcacccagatgcaggccctgaagtacatcggcaacaaggtgagaagacagagaatgtggggcggcggccccaagaagaccaagatcgaggaggccagagagctgctggccagcaccatcctgacccacgtgcccgtgaaggagttcaacttcagagccaagtgcatctacaccgccgtgatggtgagaagagtgatcctggcccagggcgacaacaaggtggacgacagagactactacggcaacaagagactggagctggccggccagctgctgagcctgctgttcgaggacctgttcaagaagttcaacagcgagatgaagaagatcgccgaccaggtgatccccaagcagagagccgcccagttcgacgtggtgaagcacatgagacaggaccagatcaccaacggcatggtgaacgccatcagcaccggcaactggagcctgaagagattcaagatggacagacagggcgtgacccaggtgctgagcagactgagctacatcagcgccctgggcatgatgaccagaatcagcagccagttcgagaagaccagaaaggtgagcggccccagaagcctgcagcccagccagtggggcatgctgtgccccagcgacacccccgagggcgaggcctgcggcctggtgaagaacctggccctgatgacccacatcaccaccgacatggaggacggccccatcgtgaagctggccagcaacctgggcgtggaggacgtgaacctgctgtgcggcgaggagctgagctaccccaacgtgttcctggtgttcctgaacggcaacatcctgggcgtgatcagagaccacaagaagctggtgaacaccttcagactgatgagaagagccggctacatcaacgagttcgtgagcatcagcaccaacctgaccgacagatgcgtgtacatcagcagcgacggcggcagactgtgcagaccctacatcatcgtgaagaagcagaagcccgccgtgaccaacaagcacatggaggagctggcccagggctacagaaacttcgaggacttcctgcacgagagcctggtggagtacctggacgtgaacgaggagaacgactgcaacatcgccctgtacgagcacaccatcaacaaggacaccacccacctggagatcgagcccttcaccctgctgggcgtgtgcgccggcctgatcccctacccccaccacaaccagagccccagaaacacctaccagtgcgccatgggcaagcaggccatgggcaccatcggctacaaccagagaaacagaatcgacaccctgatgtacctgctggcctacccccagaagcccatggtgaagaccaagaccatcgagctgatcgagttcgagaagctgcccgccggccagaacgccaccgtggccgtgatgagctacagcggctacgacatcgaggacgccctggtgctgaacaaggccagcctggacagaggcttcggcagatgcctggtgtacaagaacgccaagtgcaccctgaagagatacaccaaccagaccttcgacaaggtgatgggccccatgctggacgccgccaccagaaagcccatctggagacacgagatcctggacgccgacggcatctgcagccccggcgagaaggtggagaacaagcaggtgctggtgaacaagagcatgcccaccgtgacccagatccccctggagggcagcaacgtgccccagcagccccagtacaaggacgtgcccatcacctacaagggcgccaccgacagctacatcgagaaggtgatgatcagcagcaacgccgaggacgccttcctgatcaagatgctgctgagacagaccagaagacccgagatcggcgacaagttcagcagcagacacggccagaagggcgtgtgcggcctgatcgtgccccaggaggacatgcccttctgcgacagcggcatctgccccgacatcatcatgaacccccacggcttccccagcagaatgaccgtgggcaagctgatcgagctgctggccggcaaggccggcgtgctggacggcagattccactacggcaccgccttcggcggcagcaaggtgaaggacgtgtgcgaggacctggtgagacacggctacaactacctgggcaaggactacgtgaccagcggcatcaccggcgagcccctggaggcctacatctacttcggccccgtgtactaccagaagctgaagcacatggtgctggacaagatgcacgccagagccagaggccccagagccgtgctgaccagacagcccaccgagggcagaagcagagacggcggcctgagactgggcgagatggagagagactgcctgatcggctacggcgccagcatgctgctgctggagagactgatgatcagcagcgacgccttcgaggtggacgtgtgcggccagtgcggcctgctgggctacagcggctggtgccactactgcaagagcagctgccacgtgagcagcctgagaatcccctacgcctgcaagctgctgttccaggagctgcagagcatgaacatcatccccagactgaagctgagcaagtacaacgagtag

SEQ ID NO: 93905 - DNA, 633 bp, synthetic construct
  misc_feature 1..633: note = Description of Artificial Sequence: Synthetic coding sequence
  source 1..633: mol_type = other DNA
atggacgacgaggaggagacctacagactgtggaagatcagaaagaccatcatgcagctgtgccacgacagaggctacctggtgacccaggacgagctggaccagaccctggaggagttcaaggcccagagcggcgacaagcccagcgagggcagacccagaagaaccgacctgaccgtgctggtggcccacaacgacgaccccaccgaccagatgttcgtgttcttccccgaggagcccaaggtgggcatcaagaccatcaaggtgtactgccagagaatgcaggaggagaacatcaccagagccctgatcgtggtgcagcagggcatgacccccagcgccaagcagagcctggtggacatggcccccaagtacatcctggagcagttcctgcagcaggagctgctgatcaacatcaccgagcacgagctggtgcccgagcacgtggtgatgaccaaggaggaggtgaccgagctgctggccagatacaagctgagagagaaccagctgcccagaatccaggccggcgaccccgtggccagatacttcggcatcaagagaggccaggtggtgaagatcatcagacccagcgagaccgccggcagatacatcacctacagactggtgcagtag

SEQ ID NO: 93906 - DNA, 1173 bp, synthetic construct
  misc_feature 1..1173: note = Description of Artificial Sequence: Synthetic coding sequence
  source 1..1173: mol_type = other DNA
atggaggaccccaccctgtacatcgtggagagacccctgcccggctaccccgacgccgaggcccccgagcccagcagcgccggcgcccaggccgccgaggagcccagcggcgccggcagcgaggagctgatcaagagcgaccaggtgaacggcgtgctggtgctgagcctgctggacaagatcatcggcgccgtggaccagatccagctgacccaggcccagctggaggagagacaggccgagatggagggcgccgtgcagagcatccagggcgagctgagcaagctgggcaaggcccacgccaccaccagcaacaccgtgagcaagctgctggagaaggtgagaaaggtgagcgtgaacgtgaagaccgtgagaggcagcctggagagacaggccggccagatcaagaagctggaggtgaacgaggccgagctgctgagaagaagaaacttcaaggtgatgatctaccaggacgaggtgaagctgcccgccaagctgagcatcagcaagagcctgaaggagagcgaggccctgcccgagaaggagggcgaggagctgggcgagggcgagagacccgaggaggacgccgccgccctggagctgagcagcgacgaggccgtggaggtggaggaggtgatcgaggagagcagagccgagagaatcaagagaagcggcctgagaagagtggacgacttcaagaaggccttcagcaaggagaagatggagaagaccaaggtgagaaccagagagaacctggagaagaccagactgaagaccaaggagaacctggagaagaccagacacaccctggagaagagaatgaacaagctgggcaccagactggtgcccgccgagagaagagagaagctgaagaccagcagagacaagctgagaaagagcttcacccccgaccacgtggtgtacgccagaagcaagaccgccgtgtacaaggtgccccccttcaccttccacgtgaagaagatcagagagggccaggtggaggtgctgaaggccaccgagatggtggaggtgggcgccgacgacgacgagggcggcgccgagagaggcgaggccggcgacctgagaagaggcagcagccccgacgtgcacgccctgctggagatcaccgaggagagcgacgccgtgctggtggacaagagcgacagcgactag

SEQ ID NO: 93907 - DNA, 1038 bp, synthetic construct
  misc_feature 1..1038: note = Description of Artificial Sequence: Synthetic coding sequence
  source 1..1038: mol_type = other DNA
atggaggaccccaccctgtacatcgtggagagacccctgcccggctaccccgacgccgtggaccagatccagctgacccaggcccagctggaggagagacaggccgagatggagggcgccgtgcagagcatccagggcgagctgagcaagctgggcaaggcccacgccaccaccagcaacaccgtgagcaagctgctggagaaggtgagaaaggtgagcgtgaacgtgaagaccgtgagaggcagcctggagagacaggccggccagatcaagaagctggaggtgaacgaggccgagctgctgagaagaagaaacttcaaggtgatgatctaccaggacgaggtgaagctgcccgccaagctgagcatcagcaagagcctgaaggagagcgaggccctgcccgagaaggagggcgaggagctgggcgagggcgagagacccgaggaggacgccgccgccctggagctgagcagcgacgaggccgtggaggtggaggaggtgatcgaggagagcagagccgagagaatcaagagaagcggcctgagaagagtggacgacttcaagaaggccttcagcaaggagaagatggagaagaccaaggtgagaaccagagagaacctggagaagaccagactgaagaccaaggagaacctggagaagaccagacacaccctggagaagagaatgaacaagctgggcaccagactggtgcccgccgagagaagagagaagctgaagaccagcagagacaagctgagaaagagcttcacccccgaccacgtggtgtacgccagaagcaagaccgccgtgtacaaggtgccccccttcaccttccacgtgaagaagatcagagagggccaggtggaggtgctgaaggccaccgagatggtggaggtgggcgccgacgacgacgagggcggcgccgagagaggcgaggccggcgacctgagaagaggcagcagccccgacgtgcacgccctgctggagatcaccgaggagagcgacgccgtgctggtggacaagagcgacagcgactag

SEQ ID NO: 93908 - DNA, 2295 bp, synthetic construct
  misc_feature 1..2295: note = Description of Artificial Sequence: Synthetic coding sequence
  source 1..2295: mol_type = other DNA
atgctgctgttcgtgctgacctgcctgctggccgtgttccccgccatcagcaccaagagccccatcttcggccccgaggaggtgaacagcgtggagggcaacagcgtgagcatcacctgctactacccccccaccagcgtgaacagacacaccagaaagtactggtgcagacagggcgccagaggcggctgcatcaccctgatcagcagcgagggctacgtgagcagcaagtacgccggcagagccaacctgaccaacttccccgagaacggcaccttcgtggtgaacatcgcccagctgagccaggacgacagcggcagatacaagtgcggcctgggcatcaacagcagaggcctgagcttcgacgtgagcctggaggtgagccagggccccggcctgctgaacgacaccaaggtgtacaccgtggacctgggcagaaccgtgaccatcaactgccccttcaagaccgagaacgcccagaagagaaagagcctgtacaagcagatcggcctgtaccccgtgctggtgatcgacagcagcggctacgtgaaccccaactacaccggcagaatcagactggacatccagggcaccggccagctgctgttcagcgtggtgatcaaccagctgagactgagcgacgccggccagtacctgtgccaggccggcgacgacagcaacagcaacaagaagaacgccgacctgcaggtgctgaagcccgagcccgagctggtgtacgaggacctgagaggcagcgtgaccttccactgcgccctgggccccgaggtggccaacgtggccaagttcctgtgcagacagagcagcggcgagaactgcgacgtggtggtgaacaccctgggcaagagagcccccgccttcgagggcagaatcctgctgaacccccaggacaaggacggcagcttcagcgtggtgatcaccggcctgagaaaggaggacgccggcagatacctgtgcggcgcccacagcgacggccagctgcaggagggcagccccatccaggcctggcagctgttcgtgaacgaggagagcaccatccccagaagccccaccgtggtgaagggcgtggccggcggcagcgtggccgtgctgtgcccctacaacagaaaggagagcaagagcatcaagtactggtgcctgtgggagggcgcccagaacggcagatgccccctgctggtggacagcgagggctgggtgaaggcccagtacgagggcagactgagcctgctggaggagcccggcaacggcaccttcaccgtgatcctgaaccagctgaccagcagagacgccggcttctactggtgcctgaccaacggcgacaccctgtggagaaccaccgtggagatcaagatcatcgagggcgagcccaacctgaaggtgcccggcaacgtgaccgccgtgctgggcgagaccctgaaggtgccctgccacttcccctgcaagttcagcagctacgagaagtactggtgcaagtggaacaacaccggctgccaggccctgcccagccaggacgagggccccagcaaggccttcgtgaactgcgacgagaacagcagactggtgagcctgaccctgaacctggtgaccagagccgacgagggctggtactggtgcggcgtgaagcagggccacttctacggcgagaccgccgccgtgtacgtggccgtggaggagagaaaggccgccggcagcagagacgtgagcctggccaaggccgacgccgcccccgacgagaaggtgctggacagcggcttcagagagatcgagaacaaggccatccaggaccccagactgttcgccgaggagaaggccgtggccgacaccagagaccaggccgacggcagcagagccagcgtggacagcggcagcagcgaggagcagggcggcagcagcagagccctggtgagcaccctggtgcccctgggcctggtgctggccgtgggcgccgtggccgtgggcgtggccagagccagacacagaaagaacgtggacagagtgagcatcagaagctacagaaccgacatcagcatgagcgacttcgagaacagcagagagttcggcgccaacgacaacatgggcgccagcagcatcacccaggagaccagcctgggcggcaaggaggagttcgtggccaccaccgagagcaccaccgagaccaaggagcccaagaaggccaagagaagcagcaaggaggaggccgagatggcctacaaggacttcctgctgcagagcagcaccgtggccgccgaggcccaggacggcccccaggaggcctag

SEQ ID NO: 93909 - DNA, 1596 bp, synthetic construct
  misc_feature 1..1596: note = Description of Artificial Sequence: Synthetic coding sequence
  source 1..1596: mol_type = other DNA
atggacggcatcgtgcccgacatcgccgtgggcaccaagagaggcagcgacgagctgttcagcacctgcgtgaccaacggccccttcatcatgagcagcaacagcgccagcgccgccaacggcaacgacagcaagaagttcaagggcgacagcagaagcgccggcgtgcccagcagagtgatccacatcagaaagctgcccatcgacgtgaccgagggcgaggtgatcagcctgggcctgcccttcggcaaggtgaccaacctgctgatgctgaagggcaagaaccaggccttcatcgagatgaacaccgaggaggccgccaacaccatggtgaactactacaccagcgtgacccccgtgctgagaggccagcccatctacatccagttcagcaaccacaaggagctgaagaccgacagcagccccaaccaggccagagcccaggccgccctgcaggccgtgaacagcgtgcagagcggcaacctggccctggccgccagcgccgccgccgtggacgccggcatggccatggccggccagagccccgtgctgagaatcatcgtggagaacctgttctaccccgtgaccctggacgtgctgcaccagatcttcagcaagttcggcaccgtgctgaagatcatcaccttcaccaagaacaaccagttccaggccctgctgcagtacgccgaccccgtgagcgcccagcacgccaagctgagcctggacggccagaacatctacaacgcctgctgcaccctgagaatcgacttcagcaagctgaccagcctgaacgtgaagtacaacaacgacaagagcagagactacaccagacccgacctgcccagcggcgacagccagcccagcctggaccagaccatggccgccgccttcggcctgagcgtgcccaacgtgcacggcgccctggcccccctggccatccccagcgccgccgccgccgccgccgccgccggcagaatcgccatccccggcctggccggcgccggcaacagcgtgctgctggtgagcaacctgaaccccgagagagtgaccccccagagcctgttcatcctgttcggcgtgtacggcgacgtgcagagagtgaagatcctgttcaacaagaaggagaacgccctggtgcagatggccgacggcaaccaggcccagctggccatgagccacctgaacggccacaagctgcacggcaagcccatcagaatcaccctgagcaagcaccagaacgtgcagctgcccagagagggccaggaggaccagggcctgaccaaggactacggcaacagccccctgcacagattcaagaagcccggcagcaagaacttccagaacatcttcccccccagcgccaccctgcacctgagcaacatcccccccagcgtgagcgaggaggacctgaaggtgctgttcagcagcaacggcggcgtggtgaagggcttcaagttcttccagaaggacagaaagatggccctgatccagatgggcagcgtggaggaggccgtgcaggccctgatcgacctgcacaaccacgacctgggcgagaaccaccacctgagagtgagcttcagcaagagcaccatctag

SEQ ID NO: 93910 - DNA, 594 bp, synthetic construct
  misc_feature 1..594: note = Description of Artificial Sequence: Synthetic coding sequence
  source 1..594: mol_type = other DNA
atggacggcatcgtgcccgacatcgccgtgggcaccaagagagtgaccccccagagcctgttcatcctgttcggcgtgtacggcgacgtgcagagagtgaagatcctgttcaacaagaaggagaacgccctggtgcagatggccgacggcaaccaggcccagctggccatgagccacctgaacggccacaagctgcacggcaagcccatcagaatcaccctgagcaagcaccagaacgtgcagctgcccagagagggccaggaggaccagggcctgaccaaggactacggcaacagccccctgcacagattcaagaagcccggcagcaagaacttccagaacatcttcccccccagcgccaccctgcacctgagcaacatcccccccagcgtgagcgaggaggacctgaaggtgctgttcagcagcaacggcggcgtggtgaagggcttcaagttcttccagaaggacagaaagatggccctgatccagatgggcagcgtggaggaggccgtgcaggccctgatcgacctgcacaaccacgacctgggcgagaaccaccacctgagagtgagcttcagcaagagcaccatctag

SEQ ID NO: 93911 - DNA, 1674 bp, synthetic construct
  misc_feature 1..1674: note = Description of Artificial Sequence: Synthetic coding sequence
  source 1..1674: mol_type = other DNA
atggacggcatcgtgcccgacatcgccgtgggcaccaagagaggcagcgacgagctgttcagcacctgcgtgaccaacggccccttcatcatgagcagcaacagcgccagcgccgccaacggcaacgacagcaagaagttcaagggcgacagcagaagcgccggcgtgcccagcagagtgatccacatcagaaagctgcccatcgacgtgaccgagggcgaggtgatcagcctgggcctgcccttcggcaaggtgaccaacctgctgatgctgaagggcaagaaccaggccttcatcgagatgaacaccgaggaggccgccaacaccatggtgaactactacaccagcgtgacccccgtgctgagaggccagcccatctacatccagttcagcaaccacaaggagctgaagaccgacagcagccccaaccaggccagagcccaggccgccctgcaggccgtgaacagcgtgcagagcggcaacctggccctggccgccagcgccgccgccgtggacgccggcatggccatggccggccagagccccgtgctgagaatcatcgtggagaacctgttctaccccgtgaccctggacgtgctgcaccagatcttcagcaagttcggcaccgtgctgaagatcatcaccttcaccaagaacaaccagttccaggccctgctgcagtacgccgaccccgtgagcgcccagcacgccaagctgagcctggacggccagaacatctacaacgcctgctgcaccctgagaatcgacttcagcaagctgaccagcctgaacgtgaagtacaacaacgacaagagcagagactacaccagacccgacctgcccagcggcgacagccagcccagcctggaccagaccatggccgccgccttcggcgcccccggcatcatcagcgccagcccctacgccggcgccggcttcccccccaccttcgccatcccccaggccgccggcctgagcgtgcccaacgtgcacggcgccctggcccccctggccatccccagcgccgccgccgccgccgccgccgccggcagaatcgccatccccggcctggccggcgccggcaacagcgtgctgctggtgagcaacctgaaccccgagagagtgaccccccagagcctgttcatcctgttcggcgtgtacggcgacgtgcagagagtgaagatcctgttcaacaagaaggagaacgccctggtgcagatggccgacggcaaccaggcccagctggccatgagccacctgaacggccacaagctgcacggcaagcccatcagaatcaccctgagcaagcaccagaacgtgcagctgcccagagagggccaggaggaccagggcctgaccaaggactacggcaacagccccctgcacagattcaagaagcccggcagcaagaacttccagaacatcttcccccccagcgccaccctgcacctgagcaacatcccccccagcgtgagcgaggaggacctgaaggtgctgttcagcagcaacggcggcgtggtgaagggcttcaagttcttccagaaggacagaaagatggccctgatccagatgggcagcgtggaggaggccgtgcaggccctgatcgacctgcacaaccacgacctgggcgagaaccaccacctgagagtgagcttcagcaagagcaccatctag

SEQ ID NO: 93912 - DNA, 1653 bp, synthetic construct
  misc_feature 1..1653: note = Description of Artificial Sequence: Synthetic coding sequence
  source 1..1653: mol_type = other DNA
atggacggcatcgtgcccgacatcgccgtgggcaccaagagaggcagcgacgagctgttcagcacctgcgtgaccaacggccccttcatcatgagcagcaacagcgccagcgccgccaacggcaacgacagcaagaagttcaagggcgacagcagaagcgccggcgtgcccagcagagtgatccacatcagaaagctgcccatcgacgtgaccgagggcgaggtgatcagcctgggcctgcccttcggcaaggtgaccaacctgctgatgctgaagggcaagaaccaggccttcatcgagatgaacaccgaggaggccgccaacaccatggtgaactactacaccagcgtgacccccgtgctgagaggccagcccatctacatccagttcagcaaccacaaggagctgaagaccgacagcagccccaaccaggccagagcccaggccgccctgcaggccgtgaacagcgtgcagagcggcaacctggccctggccgccagcgccgccgccgtggacgccggcatggccatggccggccagagccccgtgctgagaatcatcgtggagaacctgttctaccccgtgaccctggacgtgctgcaccagatcttcagcaagttcggcaccgtgctgaagatcatcaccttcaccaagaacaaccagttccaggccctgctgcagtacgccgaccccgtgagcgcccagcacgccaagctgagcctggacggccagaacatctacaacgcctgctgcaccctgagaatcgacttcagcaagctgaccagcctgaacgtgaagtacaacaacgacaagagcagagactacaccagacccgacctgcccagcggcgacagccagcccagcctggaccagaccatggccgccgccttcgccagcccctacgccggcgccggcttcccccccaccttcgccatcccccaggccgccggcctgagcgtgcccaacgtgcacggcgccctggcccccctggccatccccagcgccgccgccgccgccgccgccgccggcagaatcgccatccccggcctggccggcgccggcaacagcgtgctgctggtgagcaacctgaaccccgagagagtgaccccccagagcctgttcatcctgttcggcgtgtacggcgacgtgcagagagtgaagatcctgttcaacaagaaggagaacgccctggtgcagatggccgacggcaaccaggcccagctggccatgagccacctgaacggccacaagctgcacggcaagcccatcagaatcaccctgagcaagcaccagaacgtgcagctgcccagagagggccaggaggaccagggcctgaccaaggactacggcaacagccccctgcacagattcaagaagcccggcagcaagaacttccagaacatcttcccccccagcgccaccctgcacctgagcaacatcccccccagcgtgagcgaggaggacctgaaggtgctgttcagcagcaacggcggcgtggtgaagggcttcaagttcttccagaaggacagaaagatggccctgatccagatgggcagcgtggaggaggccgtgcaggccctgatcgacctgcacaaccacgacctgggcgagaaccaccacctgagagtgagcttcagcaagagcaccatctag

SEQ ID NO: 93913 - DNA, 1599 bp, synthetic construct
  misc_feature 1..1599: note = Description of Artificial Sequence: Synthetic coding sequence
  source 1..1599: mol_type = other DNA
atggacggcatcgtgaccgaggtggccgtgggcgtgaagagaggcagcgacgagctgctgagcggcagcgtgctgagcagccccaacagcaacatgagcagcatggtggtgaccgccaacggcaacgacagcaagaagttcaagggcgaggacaagatggacggcgcccccagcagagtgctgcacatcagaaagctgcccggcgaggtgaccgagaccgaggtgatcgccctgggcctgcccttcggcaaggtgaccaacatcctgatgctgaagggcaagaaccaggccttcctggagctggccaccgaggaggccgccatcaccatggtgaactactacagcgccgtgaccccccacctgagaaaccagcccatctacatccagtacagcaaccacaaggagctgaagaccgacaacaccctgaaccagagagcccaggccgtgctgcaggccgtgaccgccgtgcagaccgccaacacccccctgagcggcaccaccgtgagcgagagcgccgtgacccccgcccagagccccgtgctgagaatcatcatcgacaacatgtactaccccgtgaccctggacgtgctgcaccagatcttcagcaagttcggcgccgtgctgaagatcatcaccttcaccaagaacaaccagttccaggccctgctgcagtacggcgaccccgtgaacgcccagcaggccaagctggccctggacggccagaacatctacaacgcctgctgcaccctgagaatcgacttcagcaagctggtgaacctgaacgtgaagtacaacaacgacaagagcagagactacaccagacccgacctgcccagcggcgacggccagcccgccctggaccccgccatcgccgccgccttcgccaaggagaccagcctgctggccgtgcccggcgccctgagccccctggccatccccaacgccgccgccgccgccgccgccgccgccgccggcagagtgggcatgcccggcgtgagcgccggcggcaacaccgtgctgctggtgagcaacctgaacgaggagatggtgaccccccagagcctgttcaccctgttcggcgtgtacggcgacgtgcagagagtgaagatcctgtacaacaagaaggacagcgccctgatccagatggccgacggcaaccagagccagctggccatgaaccacctgaacggccagaagatgtacggcaagatcatcagagtgaccctgagcaagcaccagaccgtgcagctgcccagagagggcctggacgaccagggcctgaccaaggacttcggcaacagccccctgcacagattcaagaagcccggcagcaagaacttccagaacatcttcccccccagcgccaccctgcacctgagcaacatcccccccagcgtggccgaggaggacctgagaaccctgttcgccaacaccggcggcaccgtgaaggccttcaagttcttccagagagaccacaagatggccctgctgcagatggccaccgtggaggaggccatccaggccctgatcgacctgcacaactacaacctgggcgagaaccaccacctgagagtgagcttcagcaagagcaccatctag

SEQ ID NO: 93914 - DNA, 1614 bp, synthetic construct
  misc_feature 1..1614: note = Description of Artificial Sequence: Synthetic coding sequence
  source 1..1614: mol_type = other DNA
atggacggcatcgtgaccgaggtggccgtgggcgtgaagagaggcagcgacgagctgctgagcggcagcgtgctgagcagccccaacagcaacatgagcagcatggtggtgaccgccaacggcaacgacagcaagaagttcaagggcgaggacaagatggacggcgcccccagcagagtgctgcacatcagaaagctgcccggcgaggtgaccgagaccgaggtgatcgccctgggcctgcccttcggcaaggtgaccaacatcctgatgctgaagggcaagaaccaggccttcctggagctggccaccgaggaggccgccatcaccatggtgaactactacagcgccgtgaccccccacctgagaaaccagcccatctacatccagtacagcaaccacaaggagctgaagaccgacaacaccctgaaccagagagcccaggccgtgctgcaggccgtgaccgccgtgcagaccgccaacacccccctgagcggcaccaccgtgagcgagagcgccgtgacccccgcccagagccccgtgctgagaatcatcatcgacaacatgtactaccccgtgaccctggacgtgctgcaccagatcttcagcaagttcggcgccgtgctgaagatcatcaccttcaccaagaacaaccagttccaggccctgctgcagtacggcgaccccgtgaacgcccagcaggccaagctggccctggacggccagaacatctacaacgcctgctgcaccctgagaatcgacttcagcaagctggtgaacctgaacgtgaagtacaacaacgacaagagcagagactacaccagacccgacctgcccagcggcgacggccagcccgccctggaccccgccatcgccgccgccttcgccaaggagaccagcctgctgggcctgcccgtggccgccgtgcccggcgccctgagccccctggccatccccaacgccgccgccgccgccgccgccgccgccgccggcagagtgggcatgcccggcgtgagcgccggcggcaacaccgtgctgctggtgagcaacctgaacgaggagatggtgaccccccagagcctgttcaccctgttcggcgtgtacggcgacgtgcagagagtgaagatcctgtacaacaagaaggacagcgccctgatccagatggccgacggcaaccagagccagctggccatgaaccacctgaacggccagaagatgtacggcaagatcatcagagtgaccctgagcaagcaccagaccgtgcagctgcccagagagggcctggacgaccagggcctgaccaaggacttcggcaacagccccctgcacagattcaagaagcccggcagcaagaacttccagaacatcttcccccccagcgccaccctgcacctgagcaacatcccccccagcgtggccgaggaggacctgagaaccctgttcgccaacaccggcggcaccgtgaaggccttcaagttcttccagagagaccacaagatggccctgctgcagatggccaccgtggaggaggccatccaggccctgatcgacctgcacaactacaacctgggcgagaaccaccacctgagagtgagcttcagcaagagcaccatctag

SEQ ID NO: 93915 - DNA, 1611 bp, synthetic construct
  misc_feature 1..1611: note = Description of Artificial Sequence: Synthetic coding sequence
  source 1..1611: mol_type = other DNA
atggacggcatcgtgaccgaggtggccgtgggcgtgaagagaggcagcgacgagctgctgagcggcagcgtgctgagcagccccaacagcaacatgagcagcatggtggtgaccgccaacggcaacgacagcaagaagttcaagggcgaggacaagatggacggcgcccccagcagagtgctgcacatcagaaagctgcccggcgaggtgaccgagaccgaggtgatcgccctgggcctgcccttcggcaaggtgaccaacatcctgatgctgaagggcaagaaccaggccttcctggagctggccaccgaggaggccgccatcaccatggtgaactactacagcgccgtgaccccccacctgagaaaccagcccatctacatccagtacagcaaccacaaggagctgaagaccgacaacaccctgaaccagagagcccaggccgtgctgcaggccgtgaccgccgtgcagaccgccaacacccccctgagcggcaccaccgtgagcgagagcgccgtgacccccgcccagagccccgtgctgagaatcatcatcgacaacatgtactaccccgtgaccctggacgtgctgcaccagatcttcagcaagttcggcgccgtgctgaagatcatcaccttcaccaagaacaaccagttccaggccctgctgcagtacggcgaccccgtgaacgcccagcaggccaagctggccctggacggccagaacatctacaacgcctgctgcaccctgagaatcgacttcagcaagctggtgaacctgaacgtgaagtacaacaacgacaagagcagagactacaccagacccgacctgcccagcggcgacggccagcccgccctggaccccgccatcgccgccgccttcgccaaggagaccagcctgctgggcctgcccgtggccgccgtgcccggcgccctgagccccctggccatccccaacgccgccgccgccgccgccgccgccgccgccggcagagtgggcatgcccggcgtgagcgccggcggcaacaccgtgctgctggtgagcaacctgaacgaggagatggtgaccccccagagcctgttcaccctgttcggcgtgtacggcgacgtgcagagagtgaagatcctgtacaacaagaaggacagcgccctgatccagatggccgacggcaaccagagccagctggccatgaaccacctgaacggccagaagatgtacggcaagatcatcagagtgaccctgagcaagcaccagaccgtgcagctgcccagagagggcctggacgaccagggcctgaccaaggacttcggcaacagccccctgcacagattcaagaagcccggcagcaagaacttccagaacatcttcccccccagcgccaccctgcacctgagcaacatcccccccagcgtggccgaggaggacctgagaaccctgttcgccaacaccggcggcaccgtgaaggccttcaagttcttccaggaccacaagatggccctgctgcagatggccaccgtggaggaggccatccaggccctgatcgacctgcacaactacaacctgggcgagaaccaccacctgagagtgagcttcagcaagagcaccatctag

SEQ ID NO: 93916 - DNA, 1056 bp, synthetic construct
  misc_feature 1..1056: note = Description of Artificial Sequence: Synthetic coding sequence
  source 1..1056: mol_type = other DNA
ggcatgaagagaggcagcgacgagctgctgagcggcagcgtgctgagcagccccaacagcaacatgagcagcatggtggtgaccgccaacggcaacgacagcaagaagttcaagggcgaggacaagatggacggcgcccccagcagagtgctgcacatcagaaagctgcccggcgaggtgaccgagaccgaggtgatcgccctgggcctgcccttcggcaaggtgaccaacatcctgatgctgaagggcaagaaccaggccttcctggagctggccaccgaggaggccgccatcaccatggtgaactactacagcgccgtgaccccccacctgagaaaccagcccatctacatccagtacagcaaccacaaggagctgaagaccgacaacaccctgaaccagagagcccaggccgtgctgcaggccgtgaccgccgtgcagaccgccaacacccccctgagcggcaccaccgtgagcgagagcgccgtgacccccgcccagagccccgtgctgagaatcatcatcgacaacatgtactaccccgtgaccctggacgtgctgcaccagatcttcagcaagttcggcgccgtgctgaagatcatcaccttcaccaagaacaaccagttccaggccctgctgcagtacggcgaccccgtgaacgcccagcaggccaagctggccctggacggccagaacatctacaacgcctgctgcaccctgagaatcgacttcagcaagctggtgaacctgaacgtgaagtacaacaacgacaagagcagagactacaccagacccgacctgcccagcggcgacggccagcccgccctggaccccgccatcgccgccgccttcgccaaggagaccagcctgctgggcctgcccgtggccgccgtgcccggcgccctgagccccctggccatccccaacgccgccgccgccgccgccgccgccgccgccggcagagtgggcatgcccggcgtgagcgccggcggcaacaccgtgctgctggtgagcaacctgaacgaggaggtgttcatggagatgtgcagcgtgtag

SEQ ID NO: 93917 - DNA, 1647 bp, synthetic construct
  misc_feature 1..1647: note = Description of Artificial Sequence: Synthetic coding sequence
  source 1..1647: mol_type = other DNA
atgtggagcaacctgaccttcagcttcttcggcctgagaaccaaggccaagaagtacgtgaccgtgaacaacagaggcagcgacgagctgctgagcggcagcgtgctgagcagccccaacagcaacatgagcagcatggtggtgaccgccaacggcaacgacagcaagaagttcaagggcgaggacaagatggacggcgcccccagcagagtgctgcacatcagaaagctgcccggcgaggtgaccgagaccgaggtgatcgccctgggcctgcccttcggcaaggtgaccaacatcctgatgctgaagggcaagaaccaggccttcctggagctggccaccgaggaggccgccatcaccatggtgaactactacagcgccgtgaccccccacctgagaaaccagcccatctacatccagtacagcaaccacaaggagctgaagaccgacaacaccctgaaccagagagcccaggccgtgctgcaggccgtgaccgccgtgcagaccgccaacacccccctgagcggcaccaccgtgagcgagagcgccgtgacccccgcccagagccccgtgctgagaatcatcatcgacaacatgtactaccccgtgaccctggacgtgctgcaccagatcttcagcaagttcggcgccgtgctgaagatcatcaccttcaccaagaacaaccagttccaggccctgctgcagtacggcgaccccgtgaacgcccagcaggccaagctggccctggacggccagaacatctacaacgcctgctgcaccctgagaatcgacttcagcaagctggtgaacctgaacgtgaagtacaacaacgacaagagcagagactacaccagacccgacctgcccagcggcgacggccagcccgccctggaccccgccatcgccgccgccttcgccaaggagaccagcctgctgggcctgcccgtggccgccgtgcccggcgccctgagccccctggccatccccaacgccgccgccgccgccgccgccgccgccgccggcagagtgggcatgcccggcgtgagcgccggcggcaacaccgtgctgctggtgagcaacctgaacgaggagatggtgaccccccagagcctgttcaccctgttcggcgtgtacggcgacgtgcagagagtgaagatcctgtacaacaagaaggacagcgccctgatccagatggccgacggcaaccagagccagctggccatgaaccacctgaacggccagaagatgtacggcaagatcatcagagtgaccctgagcaagcaccagaccgtgcagctgcccagagagggcctggacgaccagggcctgaccaaggacttcggcaacagccccctgcacagattcaagaagcccggcagcaagaacttccagaacatcttcccccccagcgccaccctgcacctgagcaacatcccccccagcgtggccgaggaggacctgagaaccctgttcgccaacaccggcggcaccgtgaaggccttcaagttcttccagagagaccacaagatggccctgctgcagatggccaccgtggaggaggccatccaggccctgatcgacctgcacaactacaacctgggcgagaaccaccacctgagagtgagcttcagcaagagcaccatctag

SEQ ID NO: 93918 - DNA, 1596 bp, synthetic construct
  misc_feature 1..1596: note = Description of Artificial Sequence: Synthetic coding sequence
  source 1..1596: mol_type = other DNA
atggacggcatcgtgaccgaggtggccgtgggcgtgaagagaggcagcgacgagctgctgagcggcagcgtgctgagcagccccaacagcaacatgagcagcatggtggtgaccgccaacggcaacgacagcaagaagttcaagggcgaggacaagatggacggcgcccccagcagagtgctgcacatcagaaagctgcccggcgaggtgaccgagaccgaggtgatcgccctgggcctgcccttcggcaaggtgaccaacatcctgatgctgaagggcaagaaccaggccttcctggagctggccaccgaggaggccgccatcaccatggtgaactactacagcgccgtgaccccccacctgagaaaccagcccatctacatccagtacagcaaccacaaggagctgaagaccgacaacaccctgaaccagagagcccaggccgtgctgcaggccgtgaccgccgtgcagaccgccaacacccccctgagcggcaccaccgtgagcgagagcgccgtgacccccgcccagagccccgtgctgagaatcatcatcgacaacatgtactaccccgtgaccctggacgtgctgcaccagatcttcagcaagttcggcgccgtgctgaagatcatcaccttcaccaagaacaaccagttccaggccctgctgcagtacggcgaccccgtgaacgcccagcaggccaagctggccctggacggccagaacatctacaacgcctgctgcaccctgagaatcgacttcagcaagctggtgaacctgaacgtgaagtacaacaacgacaagagcagagactacaccagacccgacctgcccagcggcgacggccagcccgccctggaccccgccatcgccgccgccttcgccaaggagaccagcctgctggccgtgcccggcgccctgagccccctggccatccccaacgccgccgccgccgccgccgccgccgccgccggcagagtgggcatgcccggcgtgagcgccggcggcaacaccgtgctgctggtgagcaacctgaacgaggagatggtgaccccccagagcctgttcaccctgttcggcgtgtacggcgacgtgcagagagtgaagatcctgtacaacaagaaggacagcgccctgatccagatggccgacggcaaccagagccagctggccatgaaccacctgaacggccagaagatgtacggcaagatcatcagagtgaccctgagcaagcaccagaccgtgcagctgcccagagagggcctggacgaccagggcctgaccaaggacttcggcaacagccccctgcacagattcaagaagcccggcagcaagaacttccagaacatcttcccccccagcgccaccctgcacctgagcaacatcccccccagcgtggccgaggaggacctgagaaccctgttcgccaacaccggcggcaccgtgaaggccttcaagttcttccaggaccacaagatggccctgctgcagatggccaccgtggaggaggccatccaggccctgatcgacctgcacaactacaacctgggcgagaaccaccacctgagagtgagcttcagcaagagcaccatctag

SEQ ID NO: 93919 - DNA, 978 bp, synthetic construct
  misc_feature 1..978: note = Description of Artificial Sequence: Synthetic coding sequence
  source 1..978: mol_type = other DNA
atgagcagcatggtggtgaccgccaacggcaacgacagcaagaagttcaagggcgaggacaagatggacggcgcccccagcagagtgctgcacatcagaaagctgcccggcgaggtgaccgagaccgaggtgatcgccctgggcctgcccttcggcaaggtgaccaacatcctgatgctgaagggcaagaaccaggccttcctggagctggccaccgaggaggccgccatcaccatggtgaactactacagcgccgtgaccccccacctgagaaaccagcccatctacatccagtacagcaaccacaaggagctgaagaccgacaacaccctgaaccagagagcccaggccgtgctgcaggccgtgaccgccgtgcagaccgccaacacccccctgagcggcaccaccgtgagcgagagcgccgtgacccccgcccagagccccgtgctgagaatcatcatcgacaacatgtactaccccgtgaccctggacgtgctgcaccagatcttcagcaagttcggcgccgtgctgaagatcatcaccttcaccaagaacaaccagttccaggccctgctgcagtacggcgaccccgtgaacgcccagcaggccaagctggccctggacggccagaacatctacaacgcctgctgcaccctgagaatcgacttcagcaagctggtgaacctgaacgtgaagtacaacaacgacaagagcagagactacaccagacccgacctgcccagcggcgacggccagcccgccctggaccccgccatcgccgccgccttcgccaaggagaccagcctgctggccgtgcccggcgccctgagccccctggccatccccaacgccgccgccgccgccgccgccgccgccgccggcagagtgggcatgcccggcgtgagcgccggcggcaacaccgtgctgctggtgagcaacctgaacgaggaggtgttcatggagatgtgcagcgtgtag

SEQ ID NO: 93920 - DNA, 615 bp, synthetic construct
  misc_feature 1..615: note = Description of Artificial Sequence: Synthetic coding sequence
  source 1..615: mol_type = other DNA
atgcccggcgtgagcgccggcggcaacaccgtgctgctggtgagcaacctgaacgaggagatggtgaccccccagagcctgttcaccctgttcggcgtgtacggcgacgtgcagagagtgaagatcctgtacaacaagaaggacagcgccctgatccagatggccgacggcaaccagagccagctggccatgaaccacctgaacggccagaagatgtacggcaagatcatcagagtgaccctgagcaagcaccagaccgtgcagctgcccagagagggcctggacgaccagggcctgaccaaggacttcggcaacagccccctgcacagattcaagaagcccggcagcaagaacttccagaacatcttcccccccagcgccaccctgcacctgagcaacatcccccccagcgtggccgaggaggacctgagaaccctgttcgccaacaccggcggcaccgtgaaggccttcaagttcttccagagagaccacaagatggccctgctgcagatggccaccgtggaggaggccatccaggccctgatcgacctgcacaactacaacctgggcgagaaccaccacctgagagtgagcttcagcaagagcaccatctag

SEQ ID NO: 93921 - DNA, 348 bp, synthetic construct
  misc_feature 1..348: note = Description of Artificial Sequence: Synthetic coding sequence
  source 1..348: mol_type = other DNA
atggtgtgcagccccgtgaccctgagaatcgccccccccgacagaagattcagcagaagcgccatccccgagcagatcatcagcagcaccctgagcagccccagcagcaacgcccccgacccctgcgccaaggagaccgtgctgagcgccctgaaggagaagaagaagaagagaaccgtggaggaggaggaccagatcttcctggacggccaggagaacaagagaagctgcctggtggacggcctgaccgacgccagcagcgccttcaaggtgcccagacccggccccgacaccctgcagttcaccgtggacgtgttccacttcgccaacgacagcagaaacatgtag

SEQ ID NO: 93922 - DNA, 564 bp, synthetic construct
  misc_feature 1..564: note = Description of Artificial Sequence: Synthetic coding sequence
  source 1..564: mol_type = other DNA
atggtgtgcagccccgtgaccctgagaatcgccccccccgacagaagattcagcagaagcgccatccccgagcagatcatcagcagcaccctgagcagccccagcagcaacgcccccgacccctgcgccaaggagaccgtgctgagcgccctgaaggagaagaagaagaagagaaccgtggaggaggaggaccagatcttcctggacggccaggagaacaagagaagctgcctggtggacggcctgaccgacgccagcagcgccttcaaggtgcccagacccggccccgacaccctgcagttcaccgtggacgtgttccacttcgccaacgacagcagaaacatgatctacatcacctgccacctgaaggtgaccctggccgagcaggaccccgacgagctgaacaaggcctgcagcttcagcaagcccagcaacagctggttccccgtggagggcctggccgacatctgccagtgctgcaacaagggcgactgcggcacccccagccacagcagaagacagcccagagtggtgagccagtggagcaccagcgccagcctgtag

SEQ ID NO: 93923 - DNA, 1095 bp, synthetic construct
  misc_feature 1..1095: note = Description of Artificial Sequence: Synthetic coding sequence
  source 1..1095: mol_type = other DNA
atgagcgccaacagcagcagagtgggccagctgctgctgcagggcagcgcctgcatcagatggaagcaggacgtggagggcgccgtgtaccacctggccaactgcctgctgctgctgggcttcatgggcggcagcggcgtgtacggctgcttctacctgttcggcttcctgagcgccggctacctgtgctgcgtgctgtggggctggttcagcgcctgcggcctggacatcgtgctgtggagcttcctgctggccgtggtgtgcctgctgcagctggcccacctggtgtacagactgagagaggacaccctgcccgaggagttcgacctgctgtacaagaccctgtgcctgcccctgcaggtgcccctgcagacctacaaggagatcgtgcactgctgcgaggagcaggtgctgaccctggccaccgagcagacctacgccgtggagggcgagacccccatcaacagactgagcctgctgctgagcggcagagtgagagtgagccaggacggccagttcctgcactacatcttcccctaccagttcatggacagccccgagtgggagagcctgcagcccagcgaggagggcgtgttccaggtgaccctgaccgccgagaccagctgcagctacatcagctggcccagaaagagcctgcacctgctgctgaccaaggagagatacatcagctgcctgttcagcgccctgctgggctacgacatcagcgagaagctgtacaccctgaacgacaagctgttcgccaagttcggcctgagattcgacatcagactgcccagcctgtaccacgtgctgggccccaccgccgccgacgccggccccgagagcgagaagggcgacgaggaggtgtgcgagcccgccgtgagccccccccaggccacccccaccagcctgcagcagacccccccctgcagcaccccccccgccaccaccaacttccccgccccccccaccagagccagactgagcagacccgacagcggcatcctggccagcagaatccccctgcagagctacagccaggtgatcagcagaggccaggcccccctggcccccacccacacccccgagctgtag

SEQ ID NO: 93924 - DNA, 1083 bp, synthetic construct
  misc_feature 1..1083: note = Description of Artificial Sequence: Synthetic coding sequence
  source 1..1083: mol_type = other DNA
atgagcgccaacagcagcagagtgggccagctgctgctgcagggcagcgcctgcatcagatggaagcaggacgtggagggcgccgtgtaccacctggccaactgcctgctgctgctgggcttcatgggcggcagcggcgtgtacggctgcttctacctgttcggcttcctgagcgccggctacctgtgctgcgtgctgtggggctggttcagcgcctgcggcctggacatcgtgctgtggagcttcctgctggccgtggtgtgcctgctgcagctggcccacctggtgtacagactgagagaggacaccctgcccgaggagttcgacctgctgtacaagaccctgtgcctgcccctgcaggtgcccctgcagacctacaaggagatcgtgcactgctgcgaggagcaggtgctgaccctggccaccgagcagacctacgccgtggagggcgagacccccatcaacagactgagcctgctgctgagcggcagagtgagagtgagccaggacggccagttcctgcactacatcttcccctaccagttcatggacagccccgagtgggagagcctgcagcccagcgaggagggcgtgttccaggtgaccctgaccgccgagaccagctgcagctacatcagctggcccagaaagagcctgcacctgctgctgaccaaggagagatacatcagctgcctgttcagcgccctgctgggctacgacatcagcgagaagctgtacaccctgaacgacaagctgttcgccaagttcggcctgagattcgacatcagactgcccagcctgtaccacgtgctgggccccaccgccgccgacgccggccccgagagcgagaagggcgacgaggaggtgtgcgagcccgccgtgagccccccccaggccacccccaccagcctgcagcagacccccccctgcagcaccccccccgccaccaccaacttccccgccccccccaccagagccagactgagcagacccgacagcggcatcctggagatcgacgacttccccagctacttccaccagttcggcttcagcggcaaggtggccgccggcagaatcccctag

SEQ ID NO: 93925 - DNA, 1083 bp, synthetic construct; identical to SEQ ID NO: 93924
  misc_feature 1..1083: note = Description of Artificial Sequence: Synthetic coding sequence
  source 1..1083: mol_type = other DNA

SEQ ID NO: 93926 - DNA, 876 bp, synthetic construct
  misc_feature 1..876: note = Description of Artificial Sequence: Synthetic coding sequence
  source 1..876: mol_type = other DNA
atggagagaaacagcagcctgtggaagaacctgatcgacgagcaccccgtgtgcaccacctggaagcaggaggccgagggcgccatctaccacctggccagcatcctgttcgtggtgggcttcatgggcggcagcggcttcttcggcctgctgtacgtgttcagcctgctgggcctgggcttcctgtgcagcgccgtgtgggcctgggtggacgtgtgcgccgccgacatcttcagctggaacttcgtgctgttcgtgatctgcttcatgcagttcgtgcacatcgcctaccaggtgagaagcatcaccttcgccagagagttccaggtgctgtacagcagcctgttccagcccctgggcatcagcctgcccgtgttcagaaccatcgccctgagcagcgaggtggtgaccctggagaaggagcactgctacgccatgcagggcaagaccagcatcgacaagctgagcctgctggtgagcggcagaatcagagtgaccgtggacggcgagttcctgcactacatcttccccctgcagttcctggacagccccgagtgggacagcctgagacccaccgaggagggcatcttccaggtgaccctgaccgccgagaccgactgcagatacgtgagctggagaagaaagaagctgtacctgctgttcgcccagcacagatacatcagcagactgttcagcgtgctgatcggcagcgacatcgccgacaagctgtacgccctgaacgacagagtgtacatcggcaagagataccactacgacatcagactgcccaacttctaccagatgagcacccccgagatcagaagaagccccctgacccagcacttccagaacagcagaagatactgcgacaagtag

SEQ ID NO: 93927 - DNA, 306 bp, synthetic construct
  misc_feature 1..306: note = Description of Artificial Sequence: Synthetic coding sequence
  source 1..306: mol_type = other DNA
atgctgttcctgtgcttcgacagaatcagagtgaccgtggacggcgagttcctgcactacatcttccccctgcagttcctggacagccccgagtgggacagcctgagacccaccgaggagggcatcttccaggtgaccctgaccgccgagaccgactgcagatacgtgagctggagaagaaagaagctgtacctgctgttcgcccagcacagatacatcagcagactgttcagcgtgctgatcggcagcgacatcgccgacaagctgtacgccctgaacgacagagtgtacatcggcaagagatag

SEQ ID NO: 93928 - DNA, 1386 bp, synthetic construct
  misc_feature 1..1386: note = Description of Artificial Sequence: Synthetic coding sequence
  source 1..1386: mol_type = other DNA
atggccaccttcagcagacaggagttcttccagcagctgctgcagggctgcctgctgcccaccgcccagcagggcctggaccagatctggctgctgctggccatctgcctggcctgcagactgctgtggagactgggcctgcccagctacctgaagcacgccagcaccgtggccggcggcttcttcagcctgtaccacttcttccagctgcacatggtgtgggtggtgctgctgagcctgctgtgctacctggtgctgttcctgtgcagacacagcagccacagaggcgtgttcctgagcgtgaccatcctgatctacctgctgatgggcgagatgcacatggtggacaccgtgacctggcacaagatgagaggcgcccagatgatcgtggccatgaaggccgtgagcctgggcttcgacctggacagaggcgaggtgggcaccgtgcccagccccgtggagttcatgggctacctgtacttcgtgggcaccatcgtgttcggcccctggatcagcttccacagctacctgcaggccgtgcagggcagacccctgagctgcagatggctgcagaaggtggccagaagcctggccctggccctgctgtgcctggtgctgagcacctgcgtgggcccctacctgttcccctacttcatccccctgaacggcgacagactgctgagaaacaagaagagaaaggccagaggcaccatggtgagatggctgagagcctacgagagcgccgtgagcttccacttcagcaactacttcgtgggcttcctgagcgaggccaccgccaccctggccggcgccggcttcaccgaggagaaggaccacctggagtgggacctgaccgtgagcaagcccctgaacgtggagctgcccagaagcatggtggaggtggtgaccagctggaacctgcccatgagctactggctgaacaactacgtgttcaagaacgccctgagactgggcaccttcagcgccgtgctggtgacctacgccgccagcgccctgctgcacggcttcagcttccacctggccgccgtgctgctgagcctggccttcatcacctacgtggagcacgtgctgagaaagagactggccagaatcctgagcgcctgcgtgctgagcaagagatgcccccccgactgcagccaccagcacagactgggcctgggcgtgagagccctgaacctgctgttcggcgccctggccatcttccacctggcctacctgggcagcctgttcgacgtggacgtggacgacaccaccgaggagcagggctacggcatggcctacaccgtgcacaagtggagcgagctgagctgggccagccactgggtgaccttcggctgctggatcttctacagactgatcggctag

SEQ ID NO: 93929 - DNA, 1368 bp, synthetic construct
  misc_feature 1..1368: note = Description of Artificial Sequence: Synthetic coding sequence
  source 1..1368: mol_type = other DNA
atggccaccttcagcagacaggagttcttccagcagctgctgcagggctgcctgctgcccaccgcccagcagggcctggaccagatctggctgctgctggccatctgcctggcctgcagactgctgtggagactgggcctgcccagctacctgaagcacgccagcaccgtggccggcggcttcttcagcctgtaccacttcttccagctgcacatggtgtgggtggtgctgctgagcctgctgtgctacctggtgctgttcctgtgcagacacagcagccacagaggcgtgttcctgagcgtgaccatcctgatctacctgctgatgggcgagatgcacatggtggacaccgtgacctggcacaagatgagaggcgcccagatgatcgtggccatgaaggccgtgagcctgggcttcgacctggacagaggcgaggtgggcaccgtgcccagccccgtggagttcatgggctacctgtacttcgtgggcaccatcgtgttcggcccctggatcagcttccacagctacctgcaggccgtgcagggcagacccctgagctgcagatggctgcagaaggtggccagaagcctggccctggccctgctgtgcctggtgctgagcacctgcgtgggcccctacctgttcccctacttcatccccctgaacggcgacagactgctgagaaagggcaccatggtgagatggctgagagcctacgagagcgccgtgagcttccacttcagcaactacttcgtgggcttcctgagcgaggccaccgccaccctggccggcgccggcttcaccgaggagaaggaccacctggagtgggacctgaccgtgagcaagcccctgaacgtggagctgcccagaagcatggtggaggtggtgaccagctggaacctgcccatgagctactggctgaacaactacgtgttcaagaacgccctgagactgggcaccttcagcgccgtgctggtgacctacgccgccagcgccctgctgcacggcttcagcttccacctggccgccgtgctgctgagcctggccttcatcacctacgtggagcacgtgctgagaaagagactggccagaatcctgagcgcctgcgtgctgagcaagagatgcccccccgactgcagccaccagcacagactgggcctgggcgtgagagccctgaacctgctgttcggcgccctggccatcttccacctggcctacctgggcagcctgttcgacgtggacgtggacgacaccaccgaggagcagggctacggcatggcctacaccgtgcacaagtggagcgagctgagctgggccagccactgggtgaccttcggctgctggatcttctacagactgatcggctag

SEQ ID NO: 93930 - DNA, 1371 bp, synthetic construct
  misc_feature 1..1371: note = Description of Artificial Sequence: Synthetic coding sequence
  source 1..1371: mol_type = other DNA
atggccaccttcagcagacaggagttcttccagcagctgctgcagggctgcctgctgcccaccgcccagcagggcctggaccagatctggctgctgctggccatctgcctggcctgcagactgctgtggagactgggcctgcccagctacctgaagcacgccagcaccgtggccggcggcttcttcagcctgtaccacttcttccagctgcacatggtgtgggtggtgctgctgagcctgctgtgctacctggtgctgttcctgtgcagacacagcagccacagaggcgtgttcctgagcgtgaccatcctgatctacctgctgatgggcgagatgcacatggtggacaccgtgacctggcacaagatgagaggcgcccagatgatcgtggccatgaaggccgtgagcctgggcttcgacctggacagaggcgaggtgggcaccgtgcccagccccgtggagttcatgggctacctgtacttcgtgggcaccatcgtgttcggcccctggatcagcttccacagctacctgcaggccgtgcagggcagacccctgagctgcagatggctgcagaaggtggccagaagcctggccctggccctgctgtgcctggtgctgagcacctgcgtgggcccctacctgttcccctacttcatccccctgaacggcgacagactgctgagaaacaagaagagaaaggccagatggctgagagcctacgagagcgccgtgagcttccacttcagcaactacttcgtgggcttcctgagcgaggccaccgccaccctggccggcgccggcttcaccgaggagaaggaccacctggagtgggacctgaccgtgagcaagcccctgaacgtggagctgcccagaagcatggtggaggtggtgaccagctggaacctgcccatgagctactggctgaacaactacgtgttcaagaacgccctgagactgggcaccttcagcgccgtgctggtgacctacgccgccagcgccctgctgcacggcttcagcttccacctggccgccgtgctgctgagcctggccttcatcacctacgtggagcacgtgctgagaaagagactggccagaatcctgagcgcctgcgtgctgagcaagagatgcccccccgactgcagccaccagcacagactgggcctgggcgtgagagccctgaacctgctgttcggcgccctggccatcttccacctggcctacctgggcagcctgttcgacgtggacgtggacgacaccaccgaggagcagggctacggcatggcctacaccgtgcacaagtggagcgagctgagctgggccagccactgggtgaccttcggctgctggatcttctacagactgatcggctag

SEQ ID NO: 93931 - DNA, 1368 bp, synthetic construct; identical to SEQ ID NO: 93929
  misc_feature 1..1368: note = Description of Artificial Sequence: Synthetic coding sequence
  source 1..1368: mol_type = other DNA

SEQ ID NO: 93932 - DNA, 1353 bp, synthetic construct
  misc_feature 1..1353: note = Description of Artificial Sequence: Synthetic coding sequence
  source 1..1353: mol_type = other DNA
atggccaccttcagcagacaggagttcttccagcagctgctgcagggctgcctgctgcccaccgcccagcagggcctggaccagatctggctgctgctggccatctgcctggcctgcagactgctgtggagactgggcctgcccagctacctgaagcacgccagcaccgtggccggcggcttcttcagcctgtaccacttcttccagctgcacatggtgtgggtggtgctgctgagcctgctgtgctacctggtgctgttcctgtgcagacacagcagccacagaggcgtgttcctgagcgtgaccatcctgatctacctgctgatgggcgagatgcacatggtggacaccgtgacctggcacaagatgagaggcgcccagatgatcgtggccatgaaggccgtgagcctgggcttcgacctggacagaggcgaggtgggcaccgtgcccagccccgtggagttcatgggctacctgtacttcgtgggcaccatcgtgttcggcccctggatcagcttccacagctacctgcaggccgtgcagggcagacccctgagctgcagatggctgcagaaggtggccagaagcctggccctggccctgctgtgcctggtgctgagcacctgcgtgggcccctacctgttcccctacttcatccccctgaacggcgacagactgctgagaaagtggctgagagcctacgagagcgccgtgagcttccacttcagcaactacttcgtgggcttcctgagcgaggccaccgccaccctggccggcgccggcttcaccgaggagaaggaccacctggagtgggacctgaccgtgagcaagcccctgaacgtggagctgcccagaagcatggtggaggtggtgaccagctggaacctgcccatgagctactggctgaacaactacgtgttcaagaacgccctgagactgggcaccttcagcgccgtgctggtgacctacgccgccagcgccctgctgcacggcttcagcttccacctggccgccgtgctgctgagcctggccttcatcacctacgtggagcacgtgctgagaaagagactggccagaatcctgagcgcctgcgtgctgagcaagagatgcccccccgactgcagccaccagcacagactgggcctgggcgtgagagccctgaacctgctgttcggcgccctggccatcttccacctggcctacctgggcagcctgttcgacgtggacgtggacgacaccaccgaggagcagggctacggcatggcctacaccgtgcacaagtggagcgagctgagctgggccagccactgggtgaccttcggctgctggatcttctacagactgatcggctag

SEQ ID NO: 93933 - DNA, 1140 bp, synthetic construct
  misc_feature 1..1140: note = Description of Artificial Sequence: Synthetic coding sequence
  source 1..1140: mol_type = other DNA
atggtgtgggtggtgctgctgagcctgctgtgctacctggtgctgttcctgtgcagacacagcagccacagaggcgtgttcctgagcgtgaccatcctgatctacctgctgatgggcgagatgcacatggtggacaccgtgacctggcacaagatgagaggcgcccagatgatcgtggccatgaaggccgtgagcctgggcttcgacctggacagaggcgaggtgggcaccgtgcccagccccgtggagttcatgggctacctgtacttcgtgggcaccatcgtgttcggcccctggatcagcttccacagctacctgcaggccgtgcagggcagacccctgagctgcagatggctgcagaaggtggccagaagcctggccctggccctgctgtgcctggtgctgagcacctgcgtgggcccctacctgttcccctacttcatccccctgaacggcgacagactgctgagaaagtggctgagagcctacgagagcgccgtgagcttccacttcagcaactacttcgtgggcttcctgagcgaggccaccgccaccctggccggcgccggcttcaccgaggagaaggaccacctggagtgggacctgaccgtgagcaagcccctgaacgtggagctgcccagaagcatggtggaggtggtgaccagctggaacctgcccatgagctactggctgaacaactacgtgttcaagaacgccctgagactgggcaccttcagcgccgtgctggtgacctacgccgccagcgccctgctgcacggcttcagcttccacctggccgccgtgctgctgagcctggccttcatcacctacgtggagcacgtgctgagaaagagactggccagaatcctgagcgcctgcgtgctgagcaagagatgcccccccgactgcagccaccagcacagactgggcctgggcgtgagagccctgaacctgctgttcggcgccctggccatcttccacctggcctacctgggcagcctgttcgacgtggacgtggacgacaccaccgaggagcagggctacggcatggcctacaccgtgcacaagtggagcgagctgagctgggccagccactgggtgaccttcggctgctggatcttctacagactgatcggctag

SEQ ID NO: 93934 - DNA, 294 bp, synthetic construct
  misc_feature 1..294: note = Description of Artificial Sequence: Synthetic coding sequence
  source 1..294: mol_type = other DNA
atggccaccttcagcagacaggagttcttccagcagctgctgcagggctgcctgctgcccaccgcccagcagggcctggaccagatctggctgctgctggccatctgcctggcctgcagactgctgtggagactgggcctgcccagctacctgaagcacgccagcaccgtggccggcggcttcttcagcctgtaccacttcttccagctgcacatggtgtgggtggtgctgctgagcctgctgtgctacctggtgctgttcctgtgcagacacagcagccacagaggcgtgtag

SEQ ID NO: 93935 - DNA, 1386 bp, synthetic construct; identical to SEQ ID NO: 93928
  misc_feature 1..1386: note = Description of Artificial Sequence: Synthetic coding sequence
  source 1..1386: mol_type = other DNA

SEQ ID NO: 93936 - DNA, 2769 bp, synthetic construct
  misc_feature 1..2769: note = Description of Artificial Sequence: Synthetic coding sequence
  source 1..2769: mol_type = other DNA
atgttcctgcacagcgtgaacctgtggaacctggccttctacgtgttcatggtgttcctggccaccctgggcctgtgggacgtgttcttcggcttcgaggagaacaagtgcagcatgagctacatgttcgagtaccccgagtaccagaagatcgagctgcccaagaagctggccaagagataccccgcctacgagctgtacctgtacggcgagggcagctacgccgaggagcacaagatcctgcccctgaccggcatccccgtgctgttcctgcccggcaacgccggcagctacaagcaggtgagaagcatcggcagcatcgccctgagaaaggccgaggacatcgacttcaagtaccacttcgacttcttcagcgtgaacttcaacgaggagctggtggccctgtacggcggcagcctgcagaagcagaccaagttcgtgcacgagtgcatcaagaccatcctgaagctgtacaagggccaggagttcgcccccaagagcgtggccatcatcggccacagcatgggcggcctggtggccagagccctgctgaccctgaagaacttcaagcacgacctgatcaacctgctgatcacccaggccaccccccacgtggcccccgtgatgcccctggacagattcatcaccgacttctacaccaccgtgaacaactactggatcctgaacgccagacacatcaacctgaccaccctgagcgtggccggcggcttcagagactaccaggtgagaagcggcctgaccttcctgcccaagctgagccaccacaccagcgccctgagcgtggtgagcagcgccgtgcccaagacctgggtgagcaccgaccacctgagcatcgtgtggtgcaagcagctgcagctgaccaccgtgagagccttcttcgacctgatcgacgccgacaccaagcagatcacccagaacagcaagaagaagctgagcgtgctgtaccaccacttcatcagacaccccagcaagcacttcgaggagaaccccgccatcatcagcgacctgaccggcaccagcatgtgggtgctggtgaaggtgagcaagtggacctacgtggcctacaacgagagcgagaagatctacttcaccttccccctggagaaccacagaaagatctacacccacgtgtactgccagagcaccatgctggacaccaacagctggatcttcgcctgcatcaacagcaccagcatgtgcctgcagggcgtggacctgagctggaaggccgagctgctgcccaccatcaagtacctgaccctgagactgcaggactaccccagcctgagccacctggtggtgtacgtgcccagcgtgagaggcagcaagttcgtggtggactgcgagttcttcaagaaggagaagagatacatccagctgcccgtgacccacctgttcagcttcggcctgagcagcagaaaggtggtgctgaacaccaacggcctgtactacaacctggagctgctgaacttcggccagatctaccaggccttcaagatcaacgtggtgagcaagtgcagcgccgtgaaggaggagatcaccagcatctacagactgcacatcccctggagctacgaggacagcctgaccatcgcccaggcccccagcagcaccgagatcagcctgaagctgcacatcgcccagcccgagaacaacacccacgtggccctgttcaagatgtacaccagcagcgactgcagatacgaggtgaccgtgaagaccagcttcagccagatcctgggccaggtggtgagattccacggcggcgccctgcccgcctacgtggtgagcaacatcctgctggcctacagaggccagctgtacagcctgttcagcaccggctgctgcctggagtacgccaccatgctggacaaggaggccaagccctacaaggtggaccccttcgtgatcatcatcaagttcctgctgggctacaagtggttcaaggagctgtgggacgtgctgctgctgcccgagctggacgccgtgatcctgacctgccagagcatgtgcttccccctgatcagcctgatcctgttcctgttcggcacctgcaccgcctactggagcggcctgctgagcagcgccagcgtgagactgctgagcagcctgtggctggccctgaagagacccagcgagctgcccaaggacatcaagatgatcagccccgacctgcccttcctgaccatcgtgctgatcatcgtgagctggaccacctgcggcgccctggccatcctgctgagctacctgtactacgtgttcaaggtggtgcacctgcaggccagcctgaccaccttcaagaacagccagcccgtgaaccccaagcacagcagaagaagcgagaagaagagcaaccaccacaaggacagcagcatccaccacctgagactgagcgccaacgacgccgaggacagcctgagaatgcacagcaccgtgatcaacctgctgacctggatcgtgctgctgagcatgcccagcctgatctactggctgaagaacctgagatactacttcaagctgaaccccgacccctgcaagcccctggccttcatcctgatccccaccatggccatcctgggcaacacctacaccgtgagcatcaagagcagcaagctgctgaagaccaccagccagttccccctgcccctggccgtgggcgtgatcgccttcggcagcgcccacctgtacagactgccctgcttcgtgttcatccccctgctgctgcacgccctgtgcaacttcatgtag

SEQ ID NO: 93937 - DNA, 915 bp, synthetic construct
  misc_feature 1..915: note = Description of Artificial Sequence: Synthetic coding sequence
  source 1..915: mol_type = other DNA
atggaggtgctggagagcaagaagatcgagctgcccaagaagctggccaagagataccccgcctacgagctgtacctgtacggcgagggcagctacgccgaggagcacaagatcctgcccctgaccggcatccccgtgctgttcctgcccggcaacgccggcagctacaagcaggtgagaagcatcggcagcatcgccctgagaaaggccgaggacatcgacttcaagtaccacttcgacttcttcagcgtgaacttcaacgaggagctggtggccctgtacggcggcagcctgcagaagcagaccaagttcgtgcacgagtgcatcaagaccatcctgaagctgtacaagggccaggagttcgcccccaagagcgtggccatcatcggccacagcatgggcggcctggtggccagagccctgctgaccctgaagaacttcaagcacgacctgatcaacctgctgatcacccaggccaccccccacgtggcccccgtgatgcccctggacagattcatcaccgacttctacaccaccgtgaacaactactggatcctgaacgccagacacatcaacctgaccaccctgagcgtggccggcggcttcagagactaccaggtgagaagcggcctgaccttcctgcccaagctgagccaccacaccagcgccctgagcgtggtgagcagcgccgtgcccaagacctgggtgagcaccgaccacctgagcatcgtgtggtgcaagcagctgcagctgaccaccgtgagagccttcttcgacctgatcgacgccgacaccaagcagatcacccagaacagcaagaagaagctgagcgtgctgtaccaccacttcatcagacaccccagcaagcacttcgaggagaaccccgccatcatcagcgacctgaccggcatctag

SEQ ID NO: 93938 - DNA, 1779 bp, synthetic construct
  misc_feature 1..1779: note = Description of Artificial Sequence: Synthetic coding sequence
  source 1..1779: mol_type = other DNA
atgttcctgcacagcgtgaacctgtggaacctggccttctacgtgttcatggtgttcctggccaccctgggcctgtgggacgtgttcttcggcttcgaggagaacaagtgcagcatgagctacatgttcgagtaccccgagtaccagaagatcgagctgcccaagaagctggccaagagataccccgcctacgagctgtacctgtacggcgagggcagctacgccgaggagcacaagatcctgcccctgaccggcatccccgtgctgttcctgcccggcaacgccggcagctacaagcaggtgagaagcatcggcagcatcgccctgagaaaggccgaggacatcgacttcaagtaccacttcgacttcttcagcgtgaacttcaacgaggagctggtggccctgtacggcggcagcctgcagaagcagaccaagttcgtgcacgagtgcatcaagaccatcctgaagctgtacaagggccaggagttcgcccccaagagcgtggccatcatcggccacagcatgggcggcctggtggccagagccctgctgaccctgaagaacttcaagcacgacctgatcaacctgctgatcacccaggccaccccccacgtggcccccgtgatgcccctggacagattcatcaccgacttctacaccaccgtgaacaactactggatcctgaacgccagacacatcaacctgaccaccctgagcgtggccggcggcttcagagactaccaggtgagaagcggcctgaccttcctgcccaagctgagccaccacaccagcgccctgagcgtggtgagcagcgccgtgcccaagacctgggtgagcaccgaccacctgagcatcgtgtggtgcaagcagctgcagctgaccaccgtgagagccttcttcgacctgatcgacgccgacaccaagcagatcacccagaacagcaagaagaagctgagcgtgctgtaccaccacttcatcagacaccccagcaagcacttcgaggagaaccccgccatcatcagcgacctgaccggcaccagcatgtgggtgctggtgaaggtgagcaagtggacctacgtggcctacaacgagagcgagaagatctacttcaccttccccctggagaaccacagaaagatctacacccacgtgtactgccagagcaccatgctggacaccaacagctggatcttcgcctgcatcaacagcaccagcatgtgcctgcagggcgtggacctgagctggaaggccgagctgctgcccaccatcaagtacctgaccctgagactgcaggactaccccagcctgagccacctggtggtgtacgtgcccagcgtgagaggcagcaagttcgtggtggactgcgagttcttcaagaaggagaagagatacatccagctgcccgtgacccacctgttcagcttcggcctgagcagcagaaaggtggtgctgaacaccaacggcctgtactacaacctggagctgctgaacttcggccagatctaccaggccttcaagatcaacgtggtgagcaagtgcagcgccgtgaaggaggagatcaccagcatctacagactgcacatcccctggagctacgaggacagcctgaccatcgcccaggcccccagcagcaccgagatcagcctgaagctgcacatcgcccagcccgagaacaacacccacgtggccctgttcaagatgtacaccagcagcgactgcagatacgaggtgaccgtgaagaccagcttcagccagatcctgggccaggtggtggcctag

SEQ ID NO: 93939 - DNA, 1293 bp, synthetic construct
  misc_feature 1..1293: note = Description of Artificial Sequence: Synthetic coding sequence
  source 1..1293: mol_type = other DNA
atgttcctgcacagcgtgaacctgtggaacctggccttctacgtgttcatggtgttcctggccaccctgggcctgtgggacgtgttcttcggcttcgaggagaacaagtgcagcatgagctacatgttcgagtaccccgagtaccagagcagcgccgtgcccaagacctgggtgagcaccgaccacctgagcatcgtgtggtgcaagcagctgcagctgaccaccgtgagagccttcttcgacctgatcgacgccgacaccaagcagatcacccagaacagcaagaagaagctgagcgtgctgtaccaccacttcatcagacaccccagcaagcacttcgaggagaaccccgccatcatcagcgacctgaccggcaccagcatgtgggtgctggtgaaggtgagcaagtggacctacgtggcctacaacgagagcgagaagatctacttcaccttccccctggagaaccacagaaagatctacacccacgtgtactgccagagcaccatgctggacaccaacagctggatcttcgcctgcatcaacagcaccagcatgtgcctgcagggcgtggacctgagctggaaggccgagctgctgcccaccatcaagtacctgaccctgagactgcaggactaccccagcctgagccacctggtggtgtacgtgcccagcgtgagaggcagcaagttcgtggtggactgcgagttcttcaagaaggagaagagatacatccagctgcccgtgacccacctgttcagcttcggcctgagcagcagaaaggtggtgctgaacaccaacggcctgtactacaacctggagctgctgaacttcggccagatctaccaggccttcaagatcaacgtggtgagcaagtgcagcgccgtgaaggaggagatcaccagcatctacagactgcacatcccctggagctacgaggacagcctgaccatcgcccaggcccccagcagcaccgagatcagcctgaagctgcacatcgcccagcccgagaacaacacccacgtggccctgttcaagatgtacaccagcagcgactgcagatacgaggtgaccgtgaagaccagcttcagccagatcctgggccaggtggtgagattccacggcggcgccctgcccgcctacgtggtgagcaacatcctgctggcctacagaggccagctgtacagcctgttcagcaccggctgctgcctggagtacgccaccatgctggacaaggaggccaagccctacaaggtggaccccttcgtgatcatcatcaagttcctgctgtag

SEQ ID NO: 93940 - DNA, 774 bp, synthetic construct
  misc_feature 1..774: note = Description of Artificial Sequence: Synthetic coding sequence
  source 1..774: mol_type = other DNA
atgagcagacccctgatcaccagaagccccgccagccccctgaacaaccagggcatccccacccccgcccagctgaccaagagcaacgcccccgtgcacatcgacgtgggcggccacatgtacaccagcagcctggccaccctgaccaagtaccccgagagcagaatcggcagactgttcgacggcaccgagcccatcgtgctggacagcctgaagcagcactacttcatcgacagagacggccagatgttcagatacatcctgaacttcctgagaaccagcaagctgctgatccccgacgacttcaaggactacaccctgctgtacgaggaggccaagtacttccagctgcagcccatgctgctggagatggagagatggaagcaggacagagagaccggcagattcagcagaccctgcgagtgcctggtggtgagagtggcccccgacctgggcgagagaatcaccctgagcggcgacaagagcctgatcgaggaggtgttccccgagatcggcgacgtgatgtgcaacagcgtgaacgccggctggaaccacgacagcacccacgtgatcagattccccctgaacggctactgccacctgaacagcgtgcaggtgctggagagactgcagcagagaggcttcgagatcgtgggcagctgcggcggcggcgtggacagcagccagttcagcgagtacgtgctgagaagagagctgagaagaacccccagagtgcccagcgtgatcagaatcaagcaggagcccctggactag

SEQ ID NO: 93941 - DNA, 774 bp, synthetic construct; identical to SEQ ID NO: 93940
  misc_feature 1..774: note = Description of Artificial Sequence: Synthetic coding sequence
  source 1..774: mol_type = other DNA

SEQ ID NO: 93942 - DNA, 2598 bp, synthetic construct
  misc_feature 1..2598: note = Description of Artificial Sequence: Synthetic coding sequence
  source 1..2598: mol_type = other DNA
atggccagaatgcccggcagcggcgactgcaacaccagcgccggcggcagcgccagcgccgccgccgccgccgccgagaacaacggcgagagaggcgagggcgagagaggcgccggcggcagaggcagaagacacagcagaccccactactgcagcgccggcgaggaggaggaggaggaggaggaggaggacgagatccaggaggtgcagatcaccggcgacgaggaggaggaggaggacggcggcggcggcctggaggaggacgaggaggaggaggaggaggaggagatgggcctggactgggacgagcccctggagcccgaggacagcgccggcgaggagctggagcccgagcccgtgcacatgatcaacatggaccagagcgccgccctggagcccgaggccccccccagactgctggcccccagagccagaggcggcccccccggcgacggcagcgagctggaccccgacgtgctgcagagacccgagagagccagactgagcgagaacaccagactggccaccagatacgccgtgagaatcttcagagagtacctgagcgagaaggcccagagccccgacttcgagaccatggacaagggcgccctgtgcagagtgctgagaagcttctacgccgaggccagaagcaagagcggccagctgtacagcaagagcagcctgatcagcatcagaagcagcctgaacagatacctgaacgagcccccctactgcagaaccctggacctgaccaaggaccccgagctgagaagcgccaacctgaccctggccgccgtgatcagaaagctggaggagcagggcgccggccccgtggtgcagaagcaggccatcaccagagccgacctgagaaagctgtacaccagcagcgtgttcagcaccaacacccccttcggcctgctgaacaaggtgtggttcgagacctgcatgtacttctgcaccagaggcagagagaaccagagagagctggaggaggacagcttcggcctggccatggacgaggacggcagaaagttcgtgtacttcaagagcctgggcccctaccacaagagcagaagcagcagctggagcaagaagagagccgagagcagcgacgaggagaacctgcccagaatgtacgagaccggcaccgagttctgcccctacgccagcttcgtgaagtacctgagcaagagaaaccccctgtgcaaggccttcttccagagacccagagaccactgcagcgagggcgacgtgacctggtacgagaacaaggccatcggcaagaacctgctgggcaccagaatgcagatgctgagcaaggccgccaagctgagcaagacctacaccaaccactgcatcggcgccgtgagcatcgccaccctgaacagcatcgccggcatcggcaccaagctgggcagccccgccccccagggctgctacgccgaggccctgaacggcgccgccagacaccacagccaccacccccccacccaccccagccaccaccacagaccccagccccccagcctgggcaacacctacatcctgcccaaggacagccaggtgggccccgacgtgaagagcgaggccgcccccaagagagccctgtacgagagcgtgttcggcagcggcgagatctgcggccccaccagccccaagagactgtgcatcagacccagcgagcccgtggacgccgtggtggtggtgagcgtgaagcacgaccccctgcccctgctgcccgaggccaacggccacagaagcaccaacagccccaccatcgtgagccccgccatcgtgagccccacccaggacagcagacccaacatgagcagacccctgatcaccagaagccccgccagccccctgaacaaccagggcatccccacccccgcccagctgaccaagagcaacgcccccgtgcacatcgacgtgggcggccacatgtacaccagcagcctggccaccctgaccaagtaccccgagagcagaatcggcagactgttcgacggcaccgagcccatcgtgctggacagcctgaagcagcactacttcatcgacagagacggccagatgttcagatacatcctgaacttcctgagaaccagcaagctgctgatccccgacgacttcaaggactacaccctgctgtacgaggaggccaagtacttccagctgcagcccatgctgctggagatggagagatggaagcaggacagagagaccggcagattcagcagaccctgcgagtgcctggtggtgagagtggcccccgacctgggcgagagaatcaccctgagcggcgacaagagcctgatcgaggaggtgttccccgagatcggcgacgtgatgtgcaacagcgtgaacgccggctggaaccacgacagcacccacgtgatcagattccccctgaacggctactgccacctgaacagcgtgcaggtgctggagagactgcagcagagaggcttcgagatcgtgggcagctgcggcggcggcgtggacagcagccagttcagcgagtacgtgctgagaagagagctgagaagaacccccagagtgcccagcgtgatcagaatcaagcaggagcccctggactag

SEQ ID NO: 93943 - DNA, 774 bp, synthetic construct; identical to SEQ ID NO: 93940
  misc_feature 1..774: note = Description of Artificial Sequence: Synthetic coding sequence
  source 1..774: mol_type = other DNA

SEQ ID NO: 93944 - DNA, 1044 bp, synthetic construct
  misc_feature 1..1044: note = Description of Artificial Sequence: Synthetic coding sequence
  source 1..1044: mol_type = other DNA
atgagagtggtggtgatcggcgccggcgtgatcggcctgagcaccgccctgtgcatccacgagagataccacagcgtgctgcagcccctggacatcaaggtgtacgccgacagattcacccccctgaccaccaccgacgtggccgccggcctgtggcagccctacctgagcgaccccaacaacccccaggaggccgactggagccagcagaccttcgactacctgctgagccacgtgcacagccccaacgccgagaacctgggcctgttcctgatcagcggctacaacctgttccacgaggccatccccgaccccagctggaaggacaccgtgctgggcttcagaaagctgacccccagagagctggacatgttccccgactacggctacggctggttccacaccagcctgatcctggagggcaagaactacctgcagtggctgaccgagagactgaccgagagaggcgtgaagttcttccagagaaaggtggagagcttcgaggaggtggccagagagggcgccgacgtgatcgtgaactgcaccggcgtgtgggccggcgccctgcagagagaccccctgctgcagcccggcagaggccagatcatgaaggtggacgccccctggatgaagcacttcatcctgacccacgaccccgagagaggcatctacaacagcccctacatcatccccggcacccagaccgtgaccctgggcggcatcttccagctgggcaactggagcgagctgaacaacatccaggaccacaacaccatctgggagggctgctgcagactggagcccaccctgaagaacgccagaatcatcggcgagagaaccggcttcagacccgtgagaccccagatcagactggagagagagcagctgagaaccggccccagcaacaccgaggtgatccacaactacggccacggcggctacggcctgaccatccactggggctgcgccctggaggccgccaagctgttcggcagaatcctggaggagaagaagctgagcagaatgccccccagccacctgtag

SEQ ID NO: 93945 - DNA, 399 bp, synthetic construct
  misc_feature 1..399: note = Description of Artificial Sequence: Synthetic coding sequence
  source 1..399: mol_type = other DNA
atgctgaagaacatcgagctgttcgacaagctgagcctgagattcaacggcagagtgctgttcatcaaggacgtgatcggcgacgagatctgctgctggagcttctacggccagggcagaaagatcgccgaggtgtgctgcaccagcatcgtgtacgccaccgagaagaagcagaccaaggtggagttccccgaggccagaatctacgaggagaccctgaacatcctgctgtacgaggcccaggacggcagaggccccgacaacgccctgctggaggccaccggcggcgccgccggcagaagccaccacctggacgaggacgaggagagagagagaatcgagagagtgagaagaatccacatcaagagacccgacgacagagcccacctgcaccagtag

SEQ ID NO: 93946 - DNA, 840 bp, synthetic construct
  misc_feature 1..840: note = Description of Artificial Sequence: Synthetic coding sequence
  source 1..840: mol_type = other DNA
tgaagatactgcagaagccccttctggagcggctacggcaacttctacagcctgcagaagagcggcttcctgcccaccctgggcaccgtgcagcccttcaactactgcaagagcggctggatcctgatcgacagatgcggcaagcacttcggcaccatcctgaactacctgagagacggcgccgtgcccctgcccgagagcagaagagagatcgaggagctgctggccgaggccaagtactacctggtgcagggcctggtggaggagtgccaggccgccctgcagaacaaggacacctacgagcccttctgcaaggtgcccgtgatcaccagcagcaaggaggagcagaagctgatcgccaccagcaacaagcccgccgtgaagctgctgtacaacagaagcaacaacaagtacagctacaccagcaacagcgacgacaacatgctgaagaacatcgagctgttcgacaagctgagcctgagattcaacggcagagtgctgttcatcaaggacgtgatcggcgacgagatctgctgctggagcttctacggccagggcagaaagatcgccgaggtgtgctgcaccagcatcgtgtacgccaccgagaagaagcagaccaaggtggagttccccgaggccagaatctacgaggagaccctgaacatcctgctgtacgaggcccaggacggcagaggccccgacaacgccctgctggaggccaccggcggcgccgccggcagaagccaccacctggacgaggacgaggagagagagagaatcgagagagtgagaagaatccacatcaagagacccgacgacagagcccacctgcaccagtag

SEQ ID NO: 93947 - DNA, 864 bp, synthetic construct
  misc_feature 1..864: note = Description of Artificial Sequence: Synthetic coding sequence
  source 1..864: mol_type = other DNA
atgagcggcgagagcgtggtgagcagcgccgtgcccgccgccgccaccagaaccaccagcttcaagggcaccagccccagcagcaagtacgtgaagctgaacgtgggcggcgccctgtactacaccaccatgcagaccctgaccaagcaggacaccatgctgaaggccatgttcagcggcagaatggaggtgctgaccgacagcgagggctggatcctgatcgacagatgcggcaagcacttcggcaccatcctgaactacctgagagacggcgccgtgcccctgcccgagagcagaagagagatcgaggagctgctggccgaggccaagtactacctggtgcagggcctggtggaggagtgccaggccgccctgcagaacaaggacacctacgagcccttctgcaaggtgcccgtgatcaccagcagcaaggaggagcagaagctgatcgccaccagcaacaagcccgccgtgaagctgctgtacaacagaagcaacaacaagtacagctacaccagagtgctgttcatcaaggacgtgatcggcgacgagatctgctgctggagcttctacggccagggcagaaagatcgccgaggtgtgctgcaccagcatcgtgtacgccaccgagaagaagcagaccaaggtggagttccccgaggccagaatctacgaggagaccctgaacatcctgctgtacgaggcccaggacggcagaggccccgacaacgccctgctggaggccaccggcggcgccgccggcagaagccaccacctggacgaggacgaggagagagagagaatcgagagagtgagaagaatccacatcaagagacccgacgacagagcccacctgcaccagtag

SEQ ID NO: 93948 - DNA, 468 bp, synthetic construct
  misc_feature 1..468: note = Description of Artificial Sequence: Synthetic coding sequence
  source 1..468: mol_type = other DNA
atgatggccgtgttcaccagcctgtggagcccctaccagatgctgttctgcagcaacagcgacgacaacatgctgaagaacatcgagctgttcgacaagctgagcctgagattcaacggcagagtgctgttcatcaaggacgtgatcggcgacgagatctgctgctggagcttctacggccagggcagaaagatcgccgaggtgtgctgcaccagcatcgtgtacgccaccgagaagaagcagaccaaggtggagttccccgaggccagaatctacgaggagaccctgaacatcctgctgtacgaggcccaggacggcagaggccccgacaacgccctgctggaggccaccggcggcgccgccggcagaagccaccacctggacgaggacgaggagagagagagaatcgagagagtgagaagaatccacatcaagagacccgacgacagagcccacctgcaccagtag

SEQ ID NO: 93949 - DNA, 990 bp, synthetic construct
  misc_feature 1..990: note = Description of Artificial Sequence: Synthetic coding sequence
  source 1..990: mol_type = other DNA
atgagcgccgaggccagcggccccgccgccgccgccgcccccagcctggaggcccccaagcccagcggcctggagcccggccccgccgcctacggcctgaagcccctgacccccaacagcaagtacgtgaagctgaacgtgggcggcagcctgcactacaccaccctgagaaccctgaccggccaggacaccatgctgaaggccatgttcagcggcagagtggaggtgctgaccgacgccggcggctgggtgctgatcgacagaagcggcagacacttcggcaccatcctgaactacctgagagacggcagcgtgcccctgcccgagagcaccagagagctgggcgagctgctgggcgaggccagatactacctggtgcagggcctgatcgaggactgccagctggccctgcagcagaagagagagaccctgagccccctgtgcctgatccccatggtgaccagccccagagaggagcagcagctgctggccagcaccagcaagcccgtggtgaagctgctgcacaacagaagcaacaacaagtacagctacaccagcaccagcgacgacaacctgctgaagaacatcgagctgttcgacaagctggccctgagattccacggcagactgctgttcctgaaggacgtgctgggcgacgagatctgctgctggagcttctacggccagggcagaaagatcgccgaggtgtgctgcaccagcatcgtgtacgccaccgagaagaagcagaccaaggtggagttccccgaggccagaatcttcgaggagaccctgaacatcctgatctacgagacccccagaggccccgaccccgccctgctggaggccaccggcggcgccgccggcgccggcggcgccggcagaggcgaggacgaggagaacagagagcacagagtgagaagaatccacgtgagaagacacatcacccacgacgagagaccccacggccagcagatcgtgttcaaggactag

SEQ ID NO: 93950 - DNA, 990 bp, synthetic construct; identical to SEQ ID NO: 93949
  misc_feature 1..990: note = Description of Artificial Sequence: Synthetic coding sequence
  source 1..990: mol_type = other DNA

SEQ ID NO: 93951 - DNA, 1287 bp, synthetic construct
  misc_feature 1..1287: note = Description of Artificial Sequence: Synthetic coding sequence
  source 1..1287: mol_type = other DNA
atggccctgagcggcaactgcagcagatactaccccagagagcagggcagcgccgtgcccaacagcttccccgaggtggtggagctgaacgtgggcggccaggtgtacttcaccagacacagcaccctgatcagcatcccccacagcctgctgtggaagatgttcagccccaagagagacaccgccaacgacctggccaaggacagcaagggcagattcttcatcgacagagacggcttcctgttcagatacatcctggactacctgagagacagacaggtggtgctgcccgaccacttccccgagaagggcagactgaagagagaggccgagtacttccagctgcccgacctggtgaagctgctgacccccgacgagatcaagcagagccccgacgagttctgccacagcgacttcgaggacgccagccagggcagcgacaccagaatctgcccccccagcagcctgctgcccgccgacagaaagtggggcttcatcaccgtgggctacagaggcagctgcaccctgggcagagagggccaggccgacgccaagttcagaagagtgcccagaatcctggtgtgcggcagaatcagcctggccaaggaggtgttcggcgagaccctgaacgagagcagagaccccgacagagcccccgagagatacaccagcagattctacctgaagttcaagcacctggagagagccttcgacatgctgagcgagtgcggcttccacatggtggcctgcaacagcagcgtgaccgccagcttcatcaaccagtacaccgacgacaagatctggagcagctacaccgagtacgtgttctacagagagcccagcagatggagccccagccactgcgactgctgctgcaagaacggcaagggcgacaaggagggcgagagcggcaccagctgcaacgacctgagcaccagcagctgcgacagccagagcgaggccagcagcccccaggagaccgtgatctgcggccccgtgaccagacagaccaacatccagaccctggacagacccatcaagaagggccccgtgcagctgatccagcagagcgagatgagaagaaagagcgacctgctgagaaccctgaccagcggcagcagagagagcaacatgagcagcaagaagaaggccgtgaaggagaagctgagcatcgaggaggagctggagaagtgcatccaggacttcctgaagatcaagatccccgacagattccccgagagaaagcacccctggcagagcgagctgctgagaaagtaccacctgtag

SEQ ID NO: 93952 - DNA, 1287 bp, synthetic construct; identical to SEQ ID NO: 93951
  misc_feature 1..1287: note = Description of Artificial Sequence: Synthetic coding sequence
  source 1..1287: mol_type = other DNA

SEQ ID NO: 93953 - DNA, 792 bp, synthetic construct
  misc_feature 1..792: note = Description of Artificial Sequence: Synthetic coding sequence
  source 1..792: mol_type = other DNA
atggccgagctgcagctggaccccgccatggccggcctgggcggcggcggcggcagcggcgtgggcgacggcggcggccccgtgagaggcccccccagccccagacccgccggccccacccccagaggccacggcagacccgccgccgccgtggcccagcccctggagcccggccccggcccccccgagagagccggcggcggcggcgccgccagatgggtgagactgaacgtgggcggcacctacttcgtgaccaccagacagaccctgggcagagagcccaagagcttcctgtgcagactgtgctgccaggaggaccccgagctggacagcgacaaggacgagaccggcgcctacctgatcgacagagaccccacctacttcggccccatcctgaactacctgagacacggcaagctgatcatcaccaaggagctggccgaggagggcgtgctggaggaggccgagttctacaacatcgccagcctggtgagactggtgaaggagagaatcagagacaacgagaacagaaccagccagggccccgtgaagcacgtgtacagagtgctgcagtgccaggaggaggagctgacccagatggtgagcaccatgagcgacggctggaagttcgagcagctgatcagcatcggcagcagctacaactacggcaacgaggaccaggccgagttcctgtgcgtggtgagcagagagctgaacaacagcaccaacggcatcgtgatcgagcccagcgagaaggccaagatcctgcaggagagaggcagcagaatgtag

SEQ ID NO: 93954 - DNA, 738 bp, synthetic construct
  misc_feature 1..738: note = Description of Artificial Sequence: Synthetic coding sequence
  source 1..738: mol_type = other DNA
agcctgcccagaaacggccccgccagactgagagccggcagcagcggcggcggcggcggccccagatggagaaactgcagctggaccagaagatggagaggctgggagggcgcccccggccccggcccccccgagagagccggcggcggcggcgccgccagatgggtgagactgaacgtgggcggcacctacttcgtgaccaccagacagaccctgggcagagagcccaagagcttcctgtgcagactgtgctgccaggaggaccccgagctggacagcgacaaggacgagaccggcgcctacctgatcgacagagaccccacctacttcggccccatcctgaactacctgagacacggcaagctgatcatcaccaaggagctggccgaggagggcgtgctggaggaggccgagttctacaacatcgccagcctggtgagactggtgaaggagagaatcagagacaacgagaacagaaccagccagggccccgtgaagcacgtgtacagagtgctgcagtgccaggaggaggagctgacccagatggtgagcaccatgagcgacggctggaagttcgagcagctgatcagcatcggcagcagctacaactacggcaacgaggaccaggccgagttcctgtgcgtggtgagcagagagctgaacaacagcaccaacggcatcgtgatcgagcccagcgagaaggccaagatcctgcaggagagaggcagcagaatgtag

SEQ ID NO: 93955 - DNA, 2448 bp, synthetic construct
  misc_feature 1..2448: note = Description of Artificial Sequence: Synthetic coding sequence
  source 1..2448: mol_type = other DNA
atggccggcggccactgcggcagcttccccgccgccgccgccggcagcggcgagatcgtgcagctgaacgtgggcggcaccagattcagcaccagcagacagaccctgatgtggatccccgacagcttcttcagcagcctgctgagcggcagaatcagcaccctgagagacgagaccggcgccatcttcatcgacagagaccccgccgccttcgcccccatcctgaacttcctgagaaccaaggagctggacctgagaggcgtgagcatcaacgtgctgagacacgaggccgagttctacggcatcacccccctggtgagaagactgctgctgtgcgaggagctggagagaagcagctgcggcagcgtgctgttccacggctacctgcccccccccggcatccccagcagaaagatcaacaacaccgtgagaagcgccgacagcagaaacggcctgaacagcaccgagggcgaggccagaggcaacggcacccagcccgtgctgagcggcaccggcgaggagaccgtgagactgggcttccccgtggaccccagaaaggtgctgatcgtggccggccaccacaactggatcgtggccgcctacgcccacttcgccgtgtgctacagaatcaaggagagcagcggctggcagcaggtgttcaccagcccctacctggactggaccatcgagagagtggccctgaacgccaaggtggtgggcggcccccacggcgacaaggacaagatggtggccgtggccagcgagagcagcatcatcctgtggagcgtgcaggacggcggcagcggcagcgagatcggcgtgttcagcctgggcgtgcccgtggacgccctgttcttcatcggcaaccagctggtggccaccagccacaccggcaaggtgggcgtgtggaacgccgtgacccagcactggcaggtgcaggacgtggtgcccatcaccagctacgacaccgccggcagcttcctgctgctgggctgcaacaacggcagcatctactacatcgacatgcagaagttccccctgagaatgaaggacaacgacctgctggtgaccgagctgtaccacgaccccagcaacgacgccatcaccgccctgagcgtgtacctgacccccaagaccagcgtgagcggcaactggatcgagatcgcctacggcaccagcagcggcgccgtgagagtgatcgtgcagcaccccgagaccgtgggcagcggcccccagctgttccagaccttcaccgtgcacagaagccccgtgaccaagatcatgctgagcgagaagcacctggtgagcgtgtgcgccgacaacaaccacgtgagaacctggaccgtgaccagattcagaggcatgatcagcacccagcccggcagcacccccctggccagcttcaagatcctgagcctggaggagaccgagagccacggcagctacagcagcggcaacgacatcggccccttcggcgagagagacgaccagcaggtgttcatccagaaggtggtgcccatcaccaacaagctgttcgtgagactgagcagcaccggcaagagaatctgcgagatccaggccgtggactgcaccaccatcagcagcttcaccgtgagagagtgcgagggcagcagcagaatgggcagcagacccagaagatacctgttcaccggccacaccaacggcagcatccagatgtgggacctgaccaccgccatggacatggtgaacaagagcgaggacaaggacgtgggcggccccaccgaggaggagctgctgaagctgctggaccagtgcgacctgagcaccagcagatgcgccacccccaacatcagccccgccaccagcgtggtgcagcacagccacctgagagagagcaacagcagcctgcagctgcagcaccacgacaccacccacgaggccgccacctacggcagcatgagaccctacagagagagccccctgctggccagagccagaagaaccgagagcttccacagctacagagacttccagaccatcaacctgaacagaaacgtggagagagccgtgcccgagaacggcaacctgggccccatccaggccgaggtgaagggcgccaccggcgagtgcaacatcagcgagagaaagagccccggcgtggagatcaagagcctgagagagctggacagcggcctggaggtgcacaagatcgccgagggcttcagcgagagcaagaagagaagcagcgaggacgagaacgagaacaagatcgagttcagaaagaagggcggcttcgagggcggcggcttcctgggcagaaagaaggtgccctacctggccagcagccccagcaccagcgacggcggcaccgacagccccggcaccgccagccccagccccaccaagaccacccccagccccagacacaagaagagcgacagcagcggccaggagtacagcctgtag

SEQ ID NO: 93956 - DNA, 723 bp, synthetic construct
  misc_feature 1..723: note = Description of Artificial Sequence: Synthetic coding sequence
  source 1..723: mol_type = other DNA
atggccggcggccactgcggcagcttccccgccgccgccgccggcagcggcgagatcgtgcagctgaacgtgggcggcaccagattcagcaccagcagacagaccctgatgtggatccccgacagcttcttcagcagcctgctgagcggcagaatcagcaccctgagagacgagaccggcgccatcttcatcgacagagaccccgccgccttcgcccccatcctgaacttcctgagaaccaaggagctggacctgagaggcgtgagcatcaacgtgctgagacacgaggccgagttctacggcatcacccccctggtgagaagactgctgctgtgcgaggagctggagagaagcagctgcggcagcgtgctgttccacggctacctgcccccccccggcatccccagcagaaagatcaacaacaccgtgagaagcgccgacagcagaaacggcctgaacagcaccgagggcgaggccagaggcaacggcacccagcccgtgctgagcggcaccggcgaggagaccgtgagactgggcttccccgtggaccccagaaaggtgctgatcgtggccggccaccacaactggatcgtggccgcctacgcccacttcgccgtgtgctacagagtgttctggctgggcaccgtgggccacgcctgcaaccccagcaccctgggcggcagagacggctggagcagcagaagcgccagacccacctggtag

SEQ ID NO: 93957 - DNA, 567 bp, synthetic construct
  misc_feature 1..567: note = Description of Artificial Sequence: Synthetic coding sequence
  source 1..567: mol_type = other DNA
atgaaggacaacgacctgctggtgaccgagctgtaccacgaccccagcaacgacgccatcaccgccctgagcgtgtacctgacccccaagaccagcgtgagcggcaactggatcgagatcgcctacggcaccagcagcggcgccgtgagagtgatcgtgcagcaccccgagaccgtgggcagcggcccccagctgttccagaccttcaccgtgcacagaagccccgtgaccaagatcatgctgagcgagaagcacctggtgagcgtgtgcgccgacaacaaccacgtgagaacctggaccgtgaccagattcagaggcatgatcagcacccagcccggcagcacccccctggccagcttcaagatcctgagcctggaggagaccgagagccacggcagctacagcagcggcaacgacatcggccccttcggcgagagagacgaccagcaggtgttcatccagaaggtggtgcccatcaccaacaagctgttcgtgagactgagcagcaccggcaagagcctgtgcggcgtgagcctggtgagcagaagcagccaggagcccacctag

SEQ ID NO: 93958 - DNA, 642 bp, synthetic construct
  misc_feature 1..642: note = Description of Artificial Sequence: Synthetic coding sequence
  source 1..642: mol_type = other DNA
tgattcagcaccagcagacagaccctgatgtggatccccgacagcttcttcagcagcctgctgagcggcagaatcagcaccctgagagacgagaccggcgccatcttcatcgacagagaccccgccgccttcgcccccatcctgaacttcctgagaaccaaggagctggacctgagaggcgtgagcatcaacgtgctgagacacgaggccgagttctacggcatcacccccctggtgagaagactgctgctgtgcgaggagctggagagaagcagctgcggcagcgtgctgttccacggctacctgcccccccccggcatccccagcagaaagatcaacaacaccgtgagaagcgccgacagcagaaacggcctgaacagcaccgagggcgaggccagaggcaacggcacccagcccgtgctgagcggcaccggcgaggagaccgtgagactgggcttccccgtggaccccagaaaggtgctgatcgtggccggccaccacaactggatcgtggccgcctacgcccacttcgccgtgtgctacagagtgttctggctgggcaccgtgggccacgcctgcaaccccagcaccctgggcggcagagacggctggagcagcagaagcgccagacccacctggtag

SEQ ID NO: 93959 - DNA, 507 bp, synthetic construct
  misc_feature 1..507: note = Description of Artificial Sequence: Synthetic coding sequence
  source 1..507: mol_type = other DNA
tgagccctgagcgtgtacctgacccccaagaccagcgtgagcggcaactggatcgagatcgcctacggcaccagcagcggcgccgtgagagtgatcgtgcagcaccccgagaccgtgggcagcggcccccagctgttccagaccttcaccgtgcacagaagccccgtgaccaagatcatgctgagcgagaagcacctggtgagcgtgtgcgccgacaacaaccacgtgagaacctggaccgtgaccagattcagaggcatgatcagcacccagcccggcagcacccccctggccagcttcaagatcctgagcctggaggagaccgagagccacggcagctacagcagcggcaacgacatcggccccttcggcgagagagacgaccagcaggtgttcatccagaaggtggtgcccatcaccaacaagctgttcgtgagactgagcagcaccggcaagagcctgtgcggcgtgagcctggtgagcagaagcagccaggagcccacctag

SEQ ID NO: 93960 - DNA, 870 bp, synthetic construct
  misc_feature 1..870: note = Description of Artificial Sequence: Synthetic coding sequence
  source 1..870: mol_type = other DNA
atggtggtggtgaccggcagagagcccgacagcagaagacaggacggcgccatgagcagcagcgacgccgaggacgacttcctggagcccgccacccccaccgccacccaggccggccacgccctgcccctgctgccccaggagttccccgaggtggtgcccctgaacatcggcggcgcccacttcaccaccagactgagcaccctgagatgctacgaggacaccatgctggccgccatgttcagcggcagacactacatccccaccgacagcgagggcagatacttcatcgacagagacggcacccacttcggcgacgtgctgaacttcctgagaagcggcgacctgccccccagagagagagtgagagccgtgtacaaggaggcccagtactacgccatcggccccctgctggagcagctggagaacatgcagcccctgaagggcgagaaggtgagacaggccttcctgggcctgatgccctactacaaggaccacctggagagaatcgtggagatcgccagactgagagccgtgcagagaaaggccagattcgccaagctgaaggtgtgcgtgttcaaggaggagatgcccatcaccccctacgagtgccccctgctgaacagcctgagattcgagagaagcgagagcgacggccagctgttcgagcaccactgcgaggtggacgtgagcttcggcccctgggaggccgtggccgacgtgtacgacctgctgcactgcctggtgaccgacctgagcgcccagggcctgaccgtggaccaccagtgcatcggcgtgtgcgacaagcacctggtgaaccactactactgcaagagacccatctacgagttcaagatcacctggtggtag

SEQ ID NO: 93961 - DNA, 1728 bp, synthetic construct
  misc_feature 1..1728: note = Description of Artificial Sequence: Synthetic coding sequence
  source 1..1728: mol_type = other DNA
gtgagcagaaagaagatgagcctgaagagcgagagaagaggcatccacgtggaccagagcgacctgctgtgcaagaagggctgcggctactacggcaaccccgcctggcagggcttctgcagcaagtgctggagagaggagtaccacaaggccagacagaagcagatccaggaggactgggagctggccgagagagtgctgctgtgctaccccggctggagcgccatggtgcagttccagctgaccgccaccagcgccagctgggcccaggtgatcctgctgctgcagccccccaacgtgctgggcctgcaggccctgcagagagaggaggaggaggccttcgccagcagccagagcagccagggcgcccagagcctgaccttcagcaagttcgaggagaagaagaccaacgagaagaccagaaaggtgaccaccgtgaagaagttcttcagcgccagcagcagagtgggcagcaagaaggagatccaggaggccaaggcccccagccccagcatcaacagacagaccagcatcgagaccgacagagtgagcaaggagttcatcgagttcctgaagaccttccacaagaccggccaggagatctacaagcagaccaagctgttcctggagggcatgcactacaagagagacctgagcatcgaggagcagagcgagtgcgcccaggacttctaccacaacgtggccgagagaatgcagaccagaggcaaggagagaagattccaccacgtgggccaggccggcctggagctgctgaccagcggcgacccccccgccagcgccagccagagcgccggcaacaccggcgtggagcccccccaccccgccgtgccccccgagagagtggagaagatcatggaccagatcgagaagtacatcatgaccagactgtacaagtacgtgttctgccccgagaccaccgacgacgagaagaaggacctggccatccagaagagaatcagagccctgagatgggtgaccccccagatgctgtgcgtgcccgtgaacgaggacatccccgaggtgagcgacatggtggtgaaggccatcaccgacatcatcgagatggacagcaagagagtgcccagagacaagctggcctgcatcaccaagtgcagcaagcacatcttcaacgccatcaagatcaccaagaacgagcccgccagcgccgacgacttcctgcccaccctgatctacatcgtgctgaagggcaacccccccagactgcagagcaacatccagtacatcaccagattctgcaaccccagcagactgatgaccggcgaggacggctactacttcaccaacctgtgctgcgccgtggccttcatcgagaagctggacgcccagagcctgaacctgagccaggaggacttcgacagatacatgagcggccagaccagccccagaaagcaggaggccgagagctggagccccgacgcctgcctgggcgtgaagcagatgtacaagaacctggacctgctgagccagctgaacgagagacaggagagaatcatgaacgaggccaagaagctggagaaggacctgatcgactggaccgacggcatcgccagagaggtgcaggacatcgtggagaagtaccccctggagatcaagccccccaaccagcccctggccgccatcgacagcgagaacgtggagaacgacaagctgcccccccccctgcagccccaggtgtacgccggctag

SEQ ID NO: 93962 - DNA, 1596 bp, synthetic construct
  misc_feature 1..1596: note = Description of Artificial Sequence: Synthetic coding sequence
  source 1..1596: mol_type = other DNA
atgagcctgaagagcgagagaagaggcatccacgtggaccagagcgacctgctgtgcaagaagggctgcggctactacggcaaccccgcctggcagggcttctgcagcaagtgctggagagaggagtaccacaaggccagacagaagcagatccaggaggactgggagctggccgagagagtgctgctgtgctaccccggctggagcgccatggtgcagttccagctgaccgccaccagcgccagctgggcccaggtgatcctgctgctgcagccccccaacgtgctgggcctgcaggccctgcagagagaggaggaggaggccttcgccagcagccagagcagccagggcgcccagagcctgaccttcagcaagttcgaggagaagaagaccaacgagaagaccagaaaggtgaccaccgtgaagaagttcttcagcgccagcagcagagtgggcagcaagaaggagatccaggaggccaaggcccccagccccagcatcaacagacagaccagcatcgagaccgacagagtgagcaaggagttcatcgagttcctgaagaccttccacaagaccggccaggagatctacaagcagaccaagctgttcctggagggcatgcactacaagagagacctgagcatcgaggagcagagcgagtgcgcccaggacttctaccacaacgtggccgagagaatgcagaccagaggcaaggtgccccccgagagagtggagaagatcatggaccagatcgagaagtacatcatgaccagactgtacaagtacgtgttctgccccgagaccaccgacgacgagaagaaggacctggccatccagaagagaatcagagccctgagatgggtgaccccccagatgctgtgcgtgcccgtgaacgaggacatccccgaggtgagcgacatggtggtgaaggccatcaccgacatcatcgagatggacagcaagagagtgcccagagacaagctggcctgcatcaccaagtgcagcaagcacatcttcaacgccatcaagatcaccaagaacgagcccgccagcgccgacgacttcctgcccaccctgatctacatcgtgctgaagggcaacccccccagactgcagagcaacatccagtacatcaccagattctgcaaccccagcagactgatgaccggcgaggacggctactacttcaccaacctgtgctgcgccgtggccttcatcgagaagctggacgcccagagcctgaacctgagccaggaggacttcgacagatacatgagcggccagaccagccccagaaagcaggaggccgagagctggagccccgacgcctgcctgggcgtgaagcagatgtacaagaacctggacctgctgagccagctgaacgagagacaggagagaatcatgaacgaggccaagaagctggagaaggacctgatcgactggaccgacggcatcgccagagaggtgcaggacatcgtggagaagtaccccctggagatcaagccccccaaccagcccctggccgccatcgacagcgagaacgtggagaacgacaagctgcccccccccctgcagccccaggtgtacgccggctag

SEQ ID NO: 93963 - DNA, 1476 bp, synthetic construct
  misc_feature 1..1476: note = Description of Artificial Sequence: Synthetic coding sequence
  source 1..1476: mol_type = other DNA
atgagcctgaagagcgagagaagaggcatccacgtggaccagagcgacctgctgtgcaagaagggctgcggctactacggcaaccccgcctggcagggcttctgcagcaagtgctggagagaggagtaccacaaggccagacagaagcagatccaggaggactgggagctggccgagagactgcagagagaggaggaggaggccttcgccagcagccagagcagccagggcgcccagagcctgaccttcagcaagttcgaggagaagaagaccaacgagaagaccagaaaggtgaccaccgtgaagaagttcttcagcgccagcagcagagtgggcagcaagaaggagatccaggaggccaaggcccccagccccagcatcaacagacagaccagcatcgagaccgacagagtgagcaaggagttcatcgagttcctgaagaccttccacaagaccggccaggagatctacaagcagaccaagctgttcctggagggcatgcactacaagagagacctgagcatcgaggagcagagcgagtgcgcccaggacttctaccacaacgtggccgagagaatgcagaccagaggcaaggtgccccccgagagagtggagaagatcatggaccagatcgagaagtacatcatgaccagactgtacaagtacgtgttctgccccgagaccaccgacgacgagaagaaggacctggccatccagaagagaatcagagccctgagatgggtgaccccccagatgctgtgcgtgcccgtgaacgaggacatccccgaggtgagcgacatggtggtgaaggccatcaccgacatcatcgagatggacagcaagagagtgcccagagacaagctggcctgcatcaccaagtgcagcaagcacatcttcaacgccatcaagatcaccaagaacgagcccgccagcgccgacgacttcctgcccaccctgatctacatcgtgctgaagggcaacccccccagactgcagagcaacatccagtacatcaccagattctgcaaccccagcagactgatgaccggcgaggacggctactacttcaccaacctgtgctgcgccgtggccttcatcgagaagctggacgcccagagcctgaacctgagccaggaggacttcgacagatacatgagcggccagaccagccccagaaagcaggaggccgagagctggagccccgacgcctgcctgggcgtgaagcagatgtacaagaacctggacctgctgagccagctgaacgagagacaggagagaatcatgaacgaggccaagaagctggagaaggacctgatcgactggaccgacggcatcgccagagaggtgcaggacatcgtggagaagtaccccctggagatcaagccccccaaccagcccctggccgccatcgacagcgagaacgtggagaacgacaagctgcccccccccctgcagccccaggtgtacgccggctag

SEQ ID NO: 93964 - DNA, 1476 bp, synthetic construct; identical to SEQ ID NO: 93963
  misc_feature 1..1476: note = Description of Artificial Sequence: Synthetic coding sequence
  source 1..1476: mol_type = other DNA

SEQ ID NO: 93965 - DNA, 1224 bp, synthetic construct
  misc_feature 1..1224: note = Description of Artificial Sequence: Synthetic coding sequence
  source 1..1224: mol_type = other DNA
atgagcctgaagagcgagagaagaggcatccacgtggaccagagcgacctgctgtgcaagaagggctgcggctactacggcaaccccgcctggcagggcttctgcagcaagtgctggagagaggagtaccacaaggccagacagaagcagatccaggaggactgggagctggccgagagactgcagagagaggaggaggaggccttcgccagcagccagagcagccagggcgcccagagcctgaccttcagcaagttcgaggagaagaagaccaacgagaagaccagaaaggtgaccaccgtgaagaagttcttcagcgccagcagcagagtgggcagcaagaagccccccgagagagtggagaagatcatggaccagatcgagaagtacatcatgaccagactgtacaagtacgtgttctgccccgagaccaccgacgacgagaagaaggacctggccatccagaagagaatcagagccctgagatgggtgaccccccagatgctgtgcgtgcccgtgaacgaggacatccccgaggtgagcgacatggtggtgaaggccatcaccgacatcatcgagatggacagcaagagagtgcccagagacaagctggcctgcatcaccaagtgcagcaagcacatcttcaacgccatcaagatcaccaagaacgagcccgccagcgccgacgacttcctgcccaccctgatctacatcgtgctgaagggcaacccccccagactgcagagcaacatccagtacatcaccagattctgcaaccccagcagactgatgaccggcgaggacggctactacttcaccaacctgtgctgcgccgtggccttcatcgagaagctggacgcccagagcctgaacctgagccaggaggacttcgacagatacatgagcggccagaccagccccagaaagcaggaggccgagagctggagccccgacgcctgcctgggcgtgaagcagatgtacaagaacctggacctgctgagccagctgaacgagagacaggagagaatcatgaacgaggccaagaagctggagaaggacctgatcgactggaccgacggcatcgccagagaggtgcaggacatcgtggagaagtaccccctggagatcaagccccccaaccagcccctggccgccatcgacagcgagaacgtggagaacgacaagctgcccccccccctgcagccccaggtgtacgccggctag

SEQ ID NO: 93966 - DNA, 867 bp, synthetic construct
  misc_feature 1..867: note = Description of Artificial Sequence: Synthetic coding sequence
  source 1..867: mol_type = other DNA
atggtggtggtgaccggcagagagcccgacagcagaagacaggacggcgccatgagcagcagcgacgccgaggacgacttcctggagcccgccacccccaccgccacccaggccggccacgccctgcccctgctgccccaggagttccccgaggtggtgcccctgaacatcggcggcgcccacttcaccaccagactgagcaccctgagatgctacgaggacaccatgctggccgccatgttcagcggcagacactacatccccaccgacagcgagggcagatacttcatcgacagagacggcacccacttcggcgacgtgctgaacttcctgagaagcggcgacctgccccccagagagagagtgagagccgtgtacaaggaggcccagtactacgccatcggccccctgctggagcagctggagaacatgcagcccctgaagggcgagaaggtgagacaggccttcctgggcctgatgccctactacaaggaccacctggagagaatcgtggagatcgccagactgagagccgtgcagagaaaggccagattcgccaagctgaaggtgtgcgtgttcaaggaggagatgcccatcaccccctacgagtgccccctgctgaacagcctgagattcgagagaagcgagagcgacggccagctgttcgagcaccactgcgaggtggacgtgagcttcggcccctgggaggccgtggccgacgtgtacgacctgctgcactgcctggtgaccgacctgagcgcccagggcctgaccgtggaccaccagtgcatcggcgtgtgcgacaagcacctggtgaaccactactactgcaagagacccatctacgagttcaagatcacctggtag

SEQ ID NO: 93967 - DNA, 663 bp, synthetic construct
  misc_feature 1..663: note = Description of Artificial Sequence: Synthetic coding sequence
  source 1..663: mol_type = other DNA
atgaagggctacggccacaccgtgcccctgagcgacggcggcaaggccttctgcatcatctacagcgtgatcggcatccccttcaccctgctgttcctgaccgccgtggtgcagagaatcaccgtgcacgtgaccagaagacccgtgctgtacttccacatcagatggggcttcagcaagcaggtggtggccatcgtgcacgccgtgctgctgggcttcgtgaccgtgagctgcttcttcttcatccccgccgccgtgttcagcgtgctggaggacgactggaacttcctggagagcttctacttctgcttcatcagcctgagcaccatcggcctgggcgactacgtgcccggcgagggctacaaccagaagttcagagagctgtacaagatcggcatcacctgctacctgctgctgggcctgatcgccatgctggtggtgctggagaccttctgcgagctgcacgagctgaagaagttcagaaagatgttctacgtgaagaaggacaaggacgaggaccaggtgcacatcatcgagcacgaccagctgagcttcagcagcatcaccgaccaggccgccggcatgaaggaggaccagaagcagaacgagcccttcgtggccacccagagcagcgcctgcgtggacggccccgccaaccactag

SEQ ID NO: 93968 - DNA, 1011 bp, synthetic construct
  misc_feature 1..1011: note = Description of Artificial Sequence: Synthetic coding sequence
  source 1..1011: mol_type = other DNA
atgctgcagagcctggccggcagcagctgcgtgagactggtggagagacacagaagcgcctggtgcttcggcttcctggtgctgggctacctgctgtacctggtgttcggcgccgtggtgttcagcagcgtggagctgccctacgaggacctgctgagacaggagctgagaaagctgaagagaagattcctggaggagcacgagtgcctgagcgagcagcagctggagcagttcctgggcagagtgctggaggccagcaactacggcgtgagcgtgctgagcaacgccagcggcaactggaactgggacttcaccagcgccctgttcttcgccagcaccgtgctgagcaccaccggctacggccacaccgtgcccctgagcgacggcggcaaggccttctgcatcatctacagcgtgatcggcatccccttcaccctgctgttcctgaccgccgtggtgcagagaatcaccgtgcacgtgaccagaagacccgtgctgtacttccacatcagatggggcttcagcaagcaggtggtggccatcgtgcacgccgtgctgctgggcttcgtgaccgtgagctgcttcttcttcatccccgccgccgtgttcagcgtgctggaggacgactggaacttcctggagagcttctacttctgcttcatcagcctgagcaccatcggcctgggcgactacgtgcccggcgagggctacaaccagaagttcagagagctgtacaagatcggcatcacctgctacctgctgctgggcctgatcgccatgctggtggtgctggagaccttctgcgagctgcacgagctgaagaagttcagaaagatgttctacgtgaagaaggacaaggacgaggaccaggtgcacatcatcgagcacgaccagctgagcttcagcagcatcaccgaccaggccgccggcatgaaggaggaccagaagcagaacgagcccttcgtggccacccagagcagcgcctgcgtggacggccccgccaaccactag

SEQ ID NO: 93969 - DNA, 729 bp, synthetic construct
  misc_feature 1..729: note = Description of Artificial Sequence: Synthetic coding sequence
  source 1..729: mol_type = other DNA
gtgctgagagtgctgagccccgacctggtgagaagactgctgaacctggccgtgagagccttccaggtgcccaagggcgagagcctgaacttccccgagagcacccccggctacggccacaccgtgcccctgagcgacggcggcaaggccttctgcatcatctacagcgtgatcggcatccccttcaccctgctgttcctgaccgccgtggtgcagagaatcaccgtgcacgtgaccagaagacccgtgctgtacttccacatcagatggggcttcagcaagcaggtggtggccatcgtgcacgccgtgctgctgggcttcgtgaccgtgagctgcttcttcttcatccccgccgccgtgttcagcgtgctggaggacgactggaacttcctggagagcttctacttctgcttcatcagcctgagcaccatcggcctgggcgactacgtgcccggcgagggctacaaccagaagttcagagagctgtacaagatcggcatcacctgctacctgctgctgggcctgatcgccatgctggtggtgctggagaccttctgcgagctgcacgagctgaagaagttcagaaagatgttctacgtgaagaaggacaaggacgaggaccaggtgcacatcatcgagcacgaccagctgagcttcagcagcatcaccgaccaggccgccggcatgaaggaggaccagaagcagaacgagcccttcgtggccacctag

SEQ ID NO: 93970 - DNA, 1632 bp, synthetic construct
  misc_feature 1..1632: note = Description of Artificial Sequence: Synthetic coding sequence
  source 1..1632: mol_type = other DNA
atggaggacggcttcaagggcgacagaaccgagggctgcagaagcgacagcgtggccgtgcccgccgccgcccccgtgtgccagcccaagagcgccaccaacggccagccccccgcccccgcccccacccccacccccagactgagcatcagcagcagagccaccgtggtggccagaatggagggcaccagccagggcggcctgcagaccgtgatgaagtggaagaccgtggtggccatcttcgtggtggtggtggtgtacctggtgaccggcggcctggtgttcagagccctggagcagcccttcgagagcagccagaagaacaccatcgccctggagaaggccgagttcctgagagaccacgtgtgcgtgagcccccaggagctggagaccctgatccagcacgccctggacgccgacaacgccggcgtgagccccatcggcaacagcagcaacaacagcagccactgggacctgggcagcgccttcttcttcgccggcaccgtgatcaccaccatcggctacggcaacatcgcccccagcaccgagggcggcaagatcttctgcatcctgtacgccatcttcggcatccccctgttcggcttcctgctggccggcatcggcgaccagctgggcaccatcttcggcaagagcatcgccagagtggagaaggtgttcagaaagaagcaggtgagccagaccaagatcagagtgatcagcaccatcctgttcatcctggccggctgcatcgtgttcgtgaccatccccgccgtgatcttcaagtacatcgagggctggaccgccctggagagcatctacttcgtggtggtgaccctgaccaccgtgggcttcggcgacttcgtggccggcggcaacgccggcatcaactacagagagtggtacaagcccctggtgtggttctggatcctggtgggcctggcctacttcgccgccgtgctgagcatgatcggcgactggctgagagtgctgagcaagaagaccaaggaggaggtgggcgagatcaaggcccacgccgccgagtggaaggccaacgtgaccgccgagttcagagagaccagaagaagactgagcgtggagatccacgacaagctgcagagagccgccaccatcagaagcatggagagaagaagactgggcctggaccagagagcccacagcctggacatgctgagccccgagaagagaagcgtgttcgccgccctggacaccggcagattcaaggccagcagccaggagagcatcaacaacagacccaacaacctgagactgaagggccccgagcagctgaacaagcacggccagggcgccagcgaggacaacatcatcaacaagttcggcagcaccagcagactgaccaagagaaagaacaaggacctgaagaagaccctgcccgaggacgtgcagaagatctacaagaccttcagaaactacagcctggacgaggagaagaaggaggaggagaccgagaagatgtgcaacagcgacaacagcagcaccgccatgctgaccgactgcatccagcagcacgccgagctggagaacggcatgatccccaccgacaccaaggacagagagcccgagaacaacagcctgctggaggacagaaactag

SEQ ID NO: 93971 - DNA, 1632 bp, synthetic construct
  misc_feature 1..1632: note = Description of Artificial Sequence: Synthetic coding sequence
  source 1..1632: mol_type = other DNA
atgaagttccccatcgagacccccagaaagcaggtgaactgggaccccaaggtggccgtgcccgccgccgcccccgtgtgccagcccaagagcgccaccaacggccagccccccgcccccgcccccacccccacccccagactgagcatcagcagcagagccaccgtggtggccagaatggagggcaccagccagggcggcctgcagaccgtgatgaagtggaagaccgtggtggccatcttcgtggtggtggtggtgtacctggtgaccggcggcctggtgttcagagccctggagcagcccttcgagagcagccagaagaacaccatcgccctggagaaggccgagttcctgagagaccacgtgtgcgtgagcccccaggagctggagaccctgatccagcacgccctggacgccgacaacgccggcgtgagccccatcggcaacagcagcaacaacagcagccactgggacctgggcagcgccttcttcttcgccggcaccgtgatcaccaccatcggctacggcaacatcgcccccagcaccgagggcggcaagatcttctgcatcctgtacgccatcttcggcatccccctgttcggcttcctgctggccggcatcggcgaccagctgggcaccatcttcggcaagagcatcgccagagtggagaaggtgttcagaaagaagcaggtgagccagaccaagatcagagtgatcagcaccatcctgttcatcctggccggctgcatcgtgttcgtgaccatccccgccgtgatcttcaagtacatcgagggctggaccgccctggagagcatctacttcgtggtggtgaccctgaccaccgtgggcttcggcgacttcgtggccggcggcaacgccggcatcaactacagagagtggtacaagcccctggtgtggttctggatcctggtgggcctggcctacttcgccgccgtgctgagcatgatcggcgactggctgagagtgctgagcaagaagaccaaggaggaggtgggcgagatcaaggcccacgccgccgagtggaaggccaacgtgaccgccgagttcagagagaccagaagaagactgagcgtggagatccacgacaagctgcagagagccgccaccatcagaagcatggagagaagaagactgggcctggaccagagagcccacagcctggacatgctgagccccgagaagagaagcgtgttcgccgccctggacaccggcagattcaaggccagcagccaggagagcatcaacaacagacccaacaacctgagactgaagggccccgagcagctgaacaagcacggccagggcgccagcgaggacaacatcatcaacaagttcggcagcaccagcagactgaccaagagaaagaacaaggacctgaagaagaccctgcccgaggacgtgcagaagatctacaagaccttcagaaactacagcctggacgaggagaagaaggaggaggagaccgagaagatgtgcaacagcgacaacagcagcaccgccatgctgaccgactgcatccagcagcacgccgagctggagaacggcatgatccccaccgacaccaaggacagagagcccgagaacaacagcctgctggaggacagaaactag

SEQ ID NO: 93972 - DNA, 1617 bp, synthetic construct
  misc_feature 1..1617: note = Description of Artificial Sequence: Synthetic coding sequence
  source 1..1617: mol_type = other DNA
atgttcttcctgtacaccgacttcttcctgagcctggtggccgtgcccgccgccgcccccgtgtgccagcccaagagcgccaccaacggccagccccccgcccccgcccccacccccacccccagactgagcatcagcagcagagccaccgtggtggccagaatggagggcaccagccagggcggcctgcagaccgtgatgaagtggaagaccgtggtggccatcttcgtggtggtggtggtgtacctggtgaccggcggcctggtgttcagagccctggagcagcccttcgagagcagccagaagaacaccatcgccctggagaaggccgagttcctgagagaccacgtgtgcgtgagcccccaggagctggagaccctgatccagcacgccctggacgccgacaacgccggcgtgagccccatcggcaacagcagcaacaacagcagccactgggacctgggcagcgccttcttcttcgccggcaccgtgatcaccaccatcggctacggcaacatcgcccccagcaccgagggcggcaagatcttctgcatcctgtacgccatcttcggcatccccctgttcggcttcctgctggccggcatcggcgaccagctgggcaccatcttcggcaagagcatcgccagagtggagaaggtgttcagaaagaagcaggtgagccagaccaagatcagagtgatcagcaccatcctgttcatcctggccggctgcatcgtgttcgtgaccatccccgccgtgatcttcaagtacatcgagggctggaccgccctggagagcatctacttcgtggtggtgaccctgaccaccgtgggcttcggcgacttcgtggccggcggcaacgccggcatcaactacagagagtggtacaagcccctggtgtggttctggatcctggtgggcctggcctacttcgccgccgtgctgagcatgatcggcgactggctgagagtgctgagcaagaagaccaaggaggaggtgggcgagatcaaggcccacgccgccgagtggaaggccaacgtgaccgccgagttcagagagaccagaagaagactgagcgtggagatccacgacaagctgcagagagccgccaccatcagaagcatggagagaagaagactgggcctggaccagagagcccacagcctggacatgctgagccccgagaagagaagcgtgttcgccgccctggacaccggcagattcaaggccagcagccaggagagcatcaacaacagacccaacaacctgagactgaagggccccgagcagctgaacaagcacggccagggcgccagcgaggacaacatcatcaacaagttcggcagcaccagcagactgaccaagagaaagaacaaggacctgaagaagaccctgcccgaggacgtgcagaagatctacaagaccttcagaaactacagcctggacgaggagaagaaggaggaggagaccgagaagatgtgcaacagcgacaacagcagcaccgccatgctgaccgactgcatccagcagcacgccgagctggagaacggcatgatccccaccgacaccaaggacagagagcccgagaacaacagcctgctggaggacagaaactag

SEQ ID NO: 93973 - DNA, 1293 bp, synthetic construct
  misc_feature 1..1293: note = Description of Artificial Sequence: Synthetic coding sequence
  source 1..1293: mol_type = other DNA
atgagcagcagaagccccagacccccccccagaagaagcagaagaagactgcccagacccagctgctgctgctgctgctgcagaagaagccacctgaacgaggacaccggcagattcgtgctgctggccgccctgatcggcctgtacctggtggccggcgccaccgtgttcagcgccctggagagccccggcgaggccgaggccagagccagatggggcgccaccctgagaaacttcagcgccgcccacggcgtggccgagcccgagctgagagccttcctgagacactacgaggccgccctggccgccggcgtgagagccgacgccctgagacccagatgggacttccccggcgccttctacttcgtgggcaccgtggtgagcaccatcggcttcggcatgaccacccccgccaccgtgggcggcaaggccttcctgatcgcctacggcctgttcggctgcgccggcaccatcctgttcttcaacctgttcctggagagaatcatcagcctgctggccttcatcatgagagcctgcagagagagacagctgagaagaagcggcctgctgcccgccaccttcagaagaggcagcgccctgagcgaggccgacagcctggccggctggaagcccagcgtgtaccacgtgctgctgatcctgggcctgttcgccgtgctgctgagctgctgcgccagcgccatgtacaccagcgtggagggctgggactacgtggacagcctgtacttctgcttcgtgaccttcagcaccatcggcttcggcgacctggtgagcagccagcacgccgcctacagaaaccagggcctgtacagactgggcaacttcctgttcatcctgctgggcgtgtgctgcatctacagcctgttcaacgtgatcagcatcctgatcaagcaggtgctgaactggatgctgagaaagctgagctgcagatgctgcgccagatgctgccccgcccccggcgcccccctggccagaagaaacgccatcacccccggcagcagactgagaagaagactggccgccctgggcgccgaccccgccgccagagacagcgacgccgagggcagaagactgagcggcgagctgatcagcatgagagacctgaccgccagcaacaaggtgagcctggccctgctgcagaagcagctgagcgagaccgccaacggctaccccagaagcgtgtgcgtgaacaccagacagaacggcttcagcggcggcgtgggcgccctgggcatcatgaacaacagactggccgagaccagcgccagcagatag

SEQ ID NO: 93974 - DNA, 1227 bp, synthetic construct
  misc_feature 1..1227: note = Description of Artificial Sequence: Synthetic coding sequence
  source 1..1227: mol_type = other DNA
atggccggcagaggcttcagctggggccccggccacctgaacgaggacaacgccagattcctgctgctggccgccctgatcgtgctgtacctgctgggcggcgccgccgtgttcagcgccctggagctggcccacgagagacaggccaagcagagatgggaggagagactggccaacttcagcagaggccacaacctgagcagagacgagctgagaggcttcctgagacactacgaggaggccaccagagccggcatcagagtggacaacgtgagacccagatgggacttcaccggcgccttctacttcgtgggcaccgtggtgagcaccatcggcttcggcatgaccacccccgccaccgtgggcggcaagatcttcctgatcttctacggcctggtgggctgcagcagcaccatcctgttcttcaacctgttcctggagagactgatcaccatcatcgcctacatcatgaagagctgccaccagagacagctgagaagaagaggcgccctgccccaggagagcctgaaggacgccggccagtgcgaggtggacagcctggccggctggaagcccagcgtgtactacgtgatgctgatcctgtgcaccgccagcatcctgatcagctgctgcgccagcgccatgtacacccccatcgagggctggagctacttcgacagcctgtacttctgcttcgtggccttcagcaccatcggcttcggcgacctggtgagcagccagaacgcccactacgagagccagggcctgtacagattcgccaacttcgtgttcatcctgatgggcgtgtgctgcatctacagcctgttcaacgtgatcagcatcctgatcaagcagagcctgaactggatcctgagaaagatggacagcggctgctgcccccagtgccagagaggcctgctgagaagcagaagaaacgtggtgatgcccggcagcgtgagaaacagatgcaacatcagcatcgagaccgacggcgtggccgagagcgacaccgacggcagaagactgagcggcgagatgatcagcatgaaggacctgctggccgccaacaaggccagcctggccatcctgcagaagcagctgagcgagatggccaacggctgcccccaccagaccagcaccctggccagagacaacgagttcagcggcggcgtgggcgccttcgccatcatgaacaacagactggccgagaccagcggcgacagatag

SEQ ID NO: 93975 - DNA, 993 bp, synthetic construct
  misc_feature 1..993: note = Description of Artificial Sequence: Synthetic coding sequence
  source 1..993: mol_type = other DNA
atgagaagacccagcgtgagagccgccggcctggtgctgtgcaccctgtgctacctgctggtgggcgccgccgtgttcgacgccctggagagcgaggccgagagcggcagacagagactgctggtgcagaagagaggcgccctgagaagaaagttcggcttcagcgccgaggactacagagagctggagagactggccctgcaggccgagccccacagagccggcagacagtggaagttccccggcagcttctacttcgccatcaccgtgatcaccaccatcgagtacggccacgccgcccccggcaccgacagcggcaaggtgttctgcatgttctacgccctgctgggcatccccctgaccctggtgaccttccagagcctgggcgagagactgaacgccgtggtgagaagactgctgctggccgccaagtgctgcctgggcctgagatggacctgcgtgagcaccgagaacctggtggtggccggcctgctggcctgcgccgccaccctggccctgggcgccgtggccttcagccacttcgagggctggaccttcttccacgcctactactactgcttcatcaccctgaccaccatcggcttcggcgacttcgtggccctgcagagcggcgaggccctgcagagaaagctgccctacgtggccttcagcttcctgtacatcctgctgggcctgaccgtgatcggcgccttcctgaacctggtggtgctgagattcctggtggccagcgccgactggcccgagagagccgccagaacccccagccccagaccccccggcgcccccgagagcagaggcctgtggctgcccagaagacccgccagaagcgtgggcagcgccagcgtgttctgccacgtgcacaagctggagagatgcgccagagacaacctgggcttcagcccccccagcagccccggcgtggtgagaggcggccaggcccccagactgggcgccagatggaagagcatctag

SEQ ID NO: 93976 - DNA, 789 bp, synthetic construct
  misc_feature 1..789: note = Description of Artificial Sequence: Synthetic coding sequence
  source 1..789: mol_type = other DNA
atgcccagcgccggcctgtgcagctgctggggcggcagagtgctgcccctgctgctggcctacgtgtgctacctgctgctgggcgccaccatcttccagctgctggagagacaggccgaggcccagagcagagaccagttccagctggagaagctgagattcctggagaactacacctgcctggaccagtgggccatggagcagttcgtgcaggtgatcatggaggcctgggtgaagggcgtgaaccccaagggcaacagcaccaaccccagcaactgggacttcggcagcagcttcttcttcgccggcaccgtggtgaccaccatcggctacggcaacctggcccccagcaccgaggccggccaggtgttctgcgtgttctacgccctgctgggcatccccctgaacgtgatcttcctgaaccacctgggcaccggcctgagagcccacctggccgccatcgagagatgggaggacagacccagaagaagccaggtgctgcaggtgctgggcctggccctgttcctgaccctgggcaccctggtgatcctgatcttcccccccatggtgttcagccacgtggagggctggagcttcagcgagggcttctacttcgccttcatcaccctgagcaccatcggcttcggcgactacgtggtgggcctgagacagggctgcggcgccaaggccgcccccggcagaagacccagaagaggcagcaccgccgccagaggcgtgcaggtgaccccccaggacttccccatcagcaagaagggcctgggcagctag

SEQ ID NO: 93977 - DNA, 930 bp, synthetic construct
  misc_feature 1..930: note = Description of Artificial Sequence: Synthetic coding sequence
  source 1..930: mol_type = other DNA
atgcccagcgccggcctgtgcagctgctggggcggcagagtgctgcccctgctgctggcctacgtgtgctacctgctgctgggcgccaccatcttccagctgctggagagacaggccgaggcccagagcagagaccagttccagctggagaagctgagattcctggagaactacacctgcctggaccagtgggccatggagcagttcgtgcaggtgatcatggaggcctgggtgaagggcgtgaaccccaagggcaacagcaccaaccccagcaactgggacttcggcagcagcttcttcttcgccggcaccgtggtgaccaccatcggctacggcaacctggcccccagcaccgaggccggccaggtgttctgcgtgttctacgccctgctgggcatccccctgaacgtgatcttcctgaaccacctgggcaccggcctgagagcccacctggccgccatcgagagatgggaggacagacccagaagaagccaggtgctgcaggtgctgggcctggccctgttcctgaccctgggcaccctggtgatcctgatcttcccccccatggtgttcagccacgtggagggctggagcttcagcgagggcttctacttcgccttcatcaccctgagcaccatcggcttcggcgactacgtggtgggcaccgaccccagcaagcactacatcagcgtgtacagaagcctggccgccatctggatcctgctgggcctggcctggctggccctgatcctgcccctgggccccctgctgctgcacagatgctgccagctgtggctgctgagcctgagacagggctgcggcgccaaggccgcccccggcagaagacccagaagaggcagcaccgccgccagaggcgtgcaggtgaccccccaggacttccccatcagcaagaagggcctgggcagctag

SEQ ID NO: 93978 - DNA, 969 bp, synthetic construct
  misc_feature 1..969: note = Description of Artificial Sequence: Synthetic coding sequence
  source 1..969: mol_type = other DNA
atgcccagcgccggcctgtgcagctgctggggcggcagagtgctgcccctgctgctggcctacgtgtgctacctgctgctgggcgccaccatcttccagctgctggagagacaggccgaggcccagagcagagaccagttccagctggagaagctgagattcctggagaactacacctgcctggaccagtgggccatggagcagttcgtgcaggtgatcatggaggcctgggtgaagggcgtgaaccccaagggcaacagcaccaaccccagcaactgggacttcggcagcagcttcttcttcgccggcaccgtggtgaccaccatcggctacggcaacctggcccccagcaccgaggccggccaggtgttctgcgtgttctacgccctgctgggcatccccctgaacgtgatcttcctgaaccacctgggcaccggcctgagagcccacctggccgccatcgagagatgggaggacagacccagaagaagccaggtgctgcaggtgctgggcctggccctgttcctgaccctgggcaccctggtgatcctgatcttcccccccatggtgttcagccacgtggagggctggagcttcagcgagggcttctacttcgccttcatcaccctgagcaccatcggcttcggcgactacgtggtgggccaccccctgaacttcatcacccccagcggcctgctgcccagccaggagcccttccagaccccccacggcaagcccgagagccagcagatccccggcagcttccagaaggtgagcagcatgaacgtgtggcccctgagcggcatgcacagccccggcctggccttccccctgcccgactgcaacatccccgaccaggagagattcagacccctgcaccccggcgcctggaagttctggcccctgcccctgcccagcagcaacagcaagtgggcccccatgtggctgggcagcagcgcccaggtgtag

SEQ ID NO: 93979 - DNA, 885 bp, synthetic construct
  misc_feature 1..885: note = Description of Artificial Sequence: Synthetic coding sequence
  source 1..885: mol_type = other DNA
atgcccagcgccggcctgtgcagctgctggggcggcagagtgctgcccctgctgctggcctacgtgtgctacctgctgctgggcgccaccatcttccagctgctggagagacaggccgaggcccagagcagagaccagttccagctggagaagctgagattcctggagaactacacctgcctggaccagtgggccatggagcagttcgtgcaggtgatcatggaggcctgggtgaagggcgtgaaccccaagggcaacagcaccaaccccagcaactgggacttcggcagcagcttcttcttcgccggcaccgtggtgaccaccatcggctacggcaacctggcccccagcaccgaggccggccaggtgttctgcgtgttctacgccctgctgggcatccccctgaacgtgatcttcctgaaccacctgggcaccggcctgagagcccacctggccgccatcgagagatgggaggacagacccagaagaagccaggtgctgcaggtgctgggcctggccctgttcctgaccctgggcaccctggtgatcctgatcttcccccccatggtgttcagccacgtggagggctggagcttcagcgagggcttctacttcgccttcatcaccctgagcaccatcggcttcggcgactacgtggtgggcaccgaccccagcaagcactacatcagcgtgtacagaagcctggccgccatctggatcctgctgggcctggcctggctggccctgatcctgcccctgggccccctgctgctgcacagatgctgccagctgtggctgctgagcagaggcctgggcgtgaaggacggcgccgccagcgaccccagcggcctgcccagaccccagaagatccccatcagcgcctag

SEQ ID NO: 93980 - DNA, 594 bp, synthetic construct
  misc_feature 1..594: note = Description of Artificial Sequence: Synthetic coding sequence
  source 1..594: mol_type = other DNA
atggagcagttcgtgcaggtgatcatggaggcctgggtgaagggcgtgaaccccaagggcaacagcaccaaccccagcaactgggacttcggcagcagcttcttcttcgccggcaccgtggtgaccaccatcggctacggcaacctggcccccagcaccgaggccggccaggtgttctgcgtgttctacgccctgctgggcatccccctgaacgtgatcttcctgaaccacctgggcaccggcctgagagcccacctggccgccatcgagagatgggaggacagacccagaagaagccaggtgctgcaggtgctgggcctggccctgttcctgaccctgggcaccctggtgatcctgatcttcccccccatggtgttcagccacgtggagggctggagcttcagcgagggcttctacttcgccttcatcaccctgagcaccatcggcttcggcgactacgtggtgggcctgagacagggctgcggcgccaaggccgcccccggcagaagacccagaagaggcagcaccgccgccagaggcgtgcaggtgaccccccaggacttccccatcagcaagaagggcctgggcagctag

SEQ ID NO: 93981 - DNA, 999 bp, synthetic construct
  misc_feature 1..999: note = Description of Artificial Sequence: Synthetic coding sequence
  source 1..999: mol_type = other DNA
atgtacagacccagagccagagccgcccccgagggcagagtgagaggctgcgccgtgcccagcaccgtgctgctgctgctggcctacctggcctacctggccctgggcaccggcgtgttctggaccctggagggcagagccgcccaggacagcagcagaagcttccagagagacaagtgggagctgctgcagaacttcacctgcctggacagacccgccctggacagcctgatcagagacgtggtgcaggcctacaagaacggcgccagcctgctgagcaacaccaccagcatgggcagatgggagctggtgggcagcttcttcttcagcgtgagcaccatcaccaccatcggctacggcaacctgagccccaacaccatggccgccagactgttctgcatcttcttcgccctggtgggcatccccctgaacctggtggtgctgaacagactgggccacctgatgcagcagggcgtgaaccactgggccagcagactgggcggcacctggcaggaccccgacaaggccagatggctggccggcagcggcgccctgctgagcggcctgctgctgttcctgctgctgccccccctgctgttcagccacatggagggctggagctacaccgagggcttctacttcgccttcatcaccctgagcaccgtgggcttcggcgactacgtgatcggcatgaaccccagccagagataccccctgtggtacaagaacatggtgagcctgtggatcctgttcggcatggcctggctggccctgatcatcaagctgatcctgagccagctggagacccccggcagagtgtgcagctgctgccaccacagcagcaaggaggacttcaagagccagagctggagacagggccccgacagagagcccgagagccacagcccccagcagggctgctaccccgagggccccatgggcatcatccagcacctggagcccagcgcccacgccgccggctgcggcaaggacagctag

SEQ ID NO: 93982 - DNA, 816 bp, synthetic construct
  misc_feature 1..816: note = Description of Artificial Sequence: Synthetic coding sequence
  source 1..816: mol_type = other DNA
atgtacagacccagagccagagccgcccccgagggcagagtgagaggctgcgccgtgcccagcaccgtgctgctgctgctggcctacctggcctacctggccctgggcaccggcgtgttctggaccctggagggcagagccgcccaggacagcagcagaagcttccagagagacaagtgggagctgctgcagaacttcacctgcctggacagacccgccctggacagcctgatcagagacgtggtgcaggcctacaagaacggcgccagcctgctgagcaacaccaccagcatgggcagatgggagctggtgggcagcttcttcttcagcgtgagcaccatcaccaccatcggctacggcaacctgagccccaacaccatggccgccagactgttctgcatcttcttcgccctggtgggcatccccctgaacctggtggtgctgaacagactgggccacctgatgcagcagggcgtgaaccactgggccagcagactgggcggcacctggcaggaccccgacaaggccagatggctggccggcagcggcgccctgctgagcggcctgctgctgttcctgctgctgccccccctgctgttcagccacatggagggctggagctacaccgagggcttctacttcgccttcatcaccctgagcaccgtgggcttcggcgactacgtgatcgccagctgcctgatcagcgacaccagaaagcccaacagagactggcagaccctggagagaaccagcaagagcagcggcggcctgctgaagtacagattcctggccggccacggcggcagccacctgtag

SEQ ID NO: 93983 - DNA, 1155 bp, synthetic construct
  misc_feature 1..1155: note = Description of Artificial Sequence: Synthetic coding sequence
  source 1..1155: mol_type = other DNA
atggaggtgagcggccacccccaggccagaagatgctgccccgaggccctgggcaagctgttccccggcctgtgcttcctgtgcttcctggtgacctacgccctggtgggcgccgtggtgttcagcgccatcgaggacggccaggtgctggtggccgccgacgacggcgagttcgagaagttcctggaggagctgtgcagaatcctgaactgcagcgagaccgtggtggaggacagaaagcaggacctgcagggccacctgcagaaggtgaagccccagtggttcaacagaaccacccactggagcttcctgagcagcctgttcttctgctgcaccgtgttcagcaccgtgggctacggctacatctaccccgtgaccagactgggcaagtacctgtgcatgctgtacgccctgttcggcatccccctgatgttcctggtgctgaccgacaccggcgacatcctggccaccatcctgagcaccagctacaacagattcagaaagttccccttcttcaccagacccctgctgagcaagtggtgccccaagagcctgttcaagaagaagcccgaccccaagcccgccgacgaggccgtgccccagatcatcatcagcgccgaggagctgcccggccccaagctgggcacctgccccagcagacccagctgcagcatggagctgttcgagagaagccacgccctggagaagcagaacaccctgcagctgcccccccaggccatggagagaagcaacagctgccccgagctggtgctgggcagactgagctacagcatcatcagcaacctggacgaggtgggccagcaggtggagagactggacatccccctgcccatcatcgccctgatcgtgttcgcctacatcagctgcgccgccgccatcctgcccttctgggagacccagctggacttcgagaacgccttctacttctgcttcgtgaccctgaccaccatcggcttcggcgacaccgtgctggagcaccccaacttcttcctgttcttcagcatctacatcatcgtgggcatggagatcgtgttcatcgccttcaagctggtgcagaacagactgatcgacatctacaagaacgtgatgctgttcttcgccaagggcaagttctaccacctggtgaagaagtag

SEQ ID NO: 93984 - DNA, 459 bp, synthetic construct
  misc_feature 1..459: note = Description of Artificial Sequence: Synthetic coding sequence
  source 1..459: mol_type = other DNA
atgatgaaccccagagccaagagagacttctacctggccgcccccgacctgctggaccccaagagcgccgcccagaacagcaagcccagactgagcttcagcaccaagcccaccgtgctggccagcagagtggagagcgacaccaccatcaacgtgatgaagtggaagaccgtgagcaccatcttcctggtggtggtgctgtacctgatcatcggcgccaccgtgttcaaggccctggagcagccccacgagatcagccagagaaccaccatcgtgatccagaagcagaccttcatcagccagcacagctgcgtgaacagcaccgagctggacgagctgatccaggacctggagaccagccaccacgcccagaaggccgccaagtacagcgtgagcagcatgccctactgggagttccccagcctggtgttcagctggctggagctggagatcagctag

SEQ ID NO: 93985 - DNA, 1236 bp, synthetic construct
  misc_feature 1..1236: note = Description of Artificial Sequence: Synthetic coding sequence
  source 1..1236: mol_type = other DNA
atggccgcccccgacctgctggaccccaagagcgccgcccagaacagcaagcccagactgagcttcagcaccaagcccaccgtgctggccagcagagtggagagcgacaccaccatcaacgtgatgaagtggaagaccgtgagcaccatcttcctggtggtggtgctgtacctgatcatcggcgccaccgtgttcaaggccctggagcagccccacgagatcagccagagaaccaccatcgtgatccagaagcagaccttcatcagccagcacagctgcgtgaacagcaccgagctggacgagctgatccagcagatcgtggccgccatcaacgccggcatcatccccctgggcaacaccagcaaccagatcagccactgggacctgggcagcagcttcttcttcgccggcaccgtgatcaccaccatcggcttcggcaacatcagccccagaaccgagggcggcaagatcttctgcatcatctacgccctgctgggcatccccctgttcggcttcctgctggccggcgtgggcgaccagctgggcaccatcttcggcaagggcatcgccaaggtggaggacaccttcatcaagtggaacgtgagccagaccaagatcagaatcatcagcaccatcatcttcatcctgttcggctgcgtgctgttcgtggccctgcccgccatcatcttcaagcacatcgagggctggagcgccctggacgccatctacttcgtggtgatcaccctgaccaccatcggcttcggcgactacgtggccggcggcagcgacatcgagtacctggacttctacaagcccgtggtgtggttctggatcctggtgggcctggcctacttcgccgccgtgctgagcatgatcggcgactggctgagagtgatcagcaagaagaccaaggaggaggtgggcgagttcagagcccacgccgccgagtggaccgccaacgtgaccgccgagttcaaggagaccagaagaagactgagcgtggagatctacgacaagttccagagagccaccagcatcaagagaaagctgagcgccgagctggccggcaaccacaaccaggagctgaccccctgcagaagaaccctgagcgtgaaccacctgaccagcgagagagacgtgctgccccccctgctgaagaccgagagcatctacctgaacggcctgaccccccactgcgccggcgaggagatcgccgtgatcgagaacatcaagtag

SEQ ID NO: 93986 - DNA, 1269 bp, synthetic construct
  misc_feature 1..1269: note = Description of Artificial Sequence: Synthetic coding sequence
  source 1..1269: mol_type = other DNA
atgatgaaccccagagccaagagagacttctacctggccgcccccgacctgctggaccccaagagcgccgcccagaacagcaagcccagactgagcttcagcaccaagcccaccgtgctggccagcagagtggagagcgacaccaccatcaacgtgatgaagtggaagaccgtgagcaccatcttcctggtggtggtgctgtacctgatcatcggcgccaccgtgttcaaggccctggagcagccccacgagatcagccagagaaccaccatcgtgatccagaagcagaccttcatcagccagcacagctgcgtgaacagcaccgagctggacgagctgatccagcagatcgtggccgccatcaacgccggcatcatccccctgggcaacaccagcaaccagatcagccactgggacctgggcagcagcttcttcttcgccggcaccgtgatcaccaccatcggcttcggcaacatcagccccagaaccgagggcggcaagatcttctgcatcatctacgccctgctgggcatccccctgttcggcttcctgctggccggcgtgggcgaccagctgggcaccatcttcggcaagggcatcgccaaggtggaggacaccttcatcaagtggaacgtgagccagaccaagatcagaatcatcagcaccatcatcttcatcctgttcggctgcgtgctgttcgtggccctgcccgccatcatcttcaagcacatcgagggctggagcgccctggacgccatctacttcgtggtgatcaccctgaccaccatcggcttcggcgactacgtggccggcggcagcgacatcgagtacctggacttctacaagcccgtggtgtggttctggatcctggtgggcctggcctacttcgccgccgtgctgagcatgatcggcgactggctgagagtgatcagcaagaagaccaaggaggaggtgggcgagttcagagcccacgccgccgagtggaccgccaacgtgaccgccgagttcaaggagaccagaagaagactgagcgtggagatctacgacaagttccagagagccaccagcatcaagagaaagctgagcgccgagctggccggcaaccacaaccaggagctgaccccctgcagaagaaccctgagcgtgaaccacctgaccagcgagagagacgtgctgccccccctgctgaagaccgagagcatctacctgaacggcctgaccccccactgcgccggcgaggagatcgccgtgatcgagaacatcaagtag

SEQ ID NO: 93987 - DNA, 1281 bp, synthetic construct
  misc_feature 1..1281: note = Description of Artificial Sequence: Synthetic coding sequence
  source 1..1281: mol_type = other DNA
atgctgcccagcgccagcagagagagacccggctacagagccggcgtggccgcccccgacctgctggaccccaagagcgccgcccagaacagcaagcccagactgagcttcagcaccaagcccaccgtgctggccagcagagtggagagcgacaccaccatcaacgtgatgaagtggaagaccgtgagcaccatcttcctggtggtggtgctgtacctgatcatcggcgccaccgtgttcaaggccctggagcagccccacgagatcagccagagaaccaccatcgtgatccagaagcagaccttcatcagccagcacagctgcgtgaacagcaccgagctggacgagctgatccagcagatcgtggccgccatcaacgccggcatcatccccctgggcaacaccagcaaccagatcagccactgggacctgggcagcagcttcttcttcgccggcaccgtgatcaccaccatcggcttcggcaacatcagccccagaaccgagggcggcaagatcttctgcatcatctacgccctgctgggcatccccctgttcggcttcctgctggccggcgtgggcgaccagctgggcaccatcttcggcaagggcatcgccaaggtggaggacaccttcatcaagtggaacgtgagccagaccaagatcagaatcatcagcaccatcatcttcatcctgttcggctgcgtgctgttcgtggccctgcccgccatcatcttcaagcacatcgagggctggagcgccctggacgccatctacttcgtggtgatcaccctgaccaccatcggcttcggcgactacgtggccggcggcagcgacatcgagtacctggacttctacaagcccgtggtgtggttctggatcctggtgggcctggcctacttcgccgccgtgctgagcatgatcggcgactggctgagagtgatcagcaagaagaccaaggaggaggtgggcgagttcagagcccacgccgccgagtggaccgccaacgtgaccgccgagttcaaggagaccagaagaagactgagcgtggagatctacgacaagttccagagagccaccagcatcaagagaaagctgagcgccgagctggccggcaaccacaaccaggagctgaccccctgcagaagaaccctgagcgtgaaccacctgaccagcgagagagacgtgctgccccccctgctgaagaccgagagcatctacctgaacggcctgaccccccactgcgccggcgaggagatcgccgtgatcgagaacatcaagtag

SEQ ID NO: 93988 - DNA, 687 bp, synthetic construct
  misc_feature 1..687: note = Description of Artificial Sequence: Synthetic coding sequence
  source 1..687: mol_type = other DNA
atgatgaaccccagagccaagagagacttctacctggccgcccccgacctgctggaccccaagagcgccgcccagaacagcaagcccagactgagcttcagcaccaagcccaccgtgctggccagcagagtggagagcgacaccaccatcaacgtgatgaagtggaagaccgtgagcaccatcttcctggtggtggtgctgtacctgatcatcggcgccaccgtgttcaaggccctggagcagccccacgagatcagccagagaaccaccatcgtgatccagaagcagaccttcatcagccagcacagctgcgtgaacagcaccgagctggacgagctgatccagcagatcgtggccgccatcaacgccggcatcatccccctgggcaacaccagcaaccagatcagccactgggacctgggcagcagcttcttcttcgccggcaccgtgatcaccaccatcggcttcggcaacatcagccccagaaccgagggcggcaagatcttctgcatcatctacgccctgctgggcatccccctgttcggcttcctgctggccggcgtgggcgaccagctgggcaccatcttcggcaagggcatcgccaaggtggaggacaccttcatcgtggaccccatcctgaacatctggaccagcatcagcctgagctgcggcagcggcagcctgtag

SEQ ID NO: 93989 - DNA, 471 bp, synthetic construct
  misc_feature 1..471: note = Description of Artificial Sequence: Synthetic coding sequence
  source 1..471: mol_type = other DNA
atgctgcccagcgccagcagagagagacccggctacagagccggcgtggccgcccccgacctgctggaccccaagagcgccgcccagaacagcaagcccagactgagcttcagcaccaagcccaccgtgctggccagcagagtggagagcgacaccaccatcaacgtgatgaagtggaagaccgtgagcaccatcttcctggtggtggtgctgtacctgatcatcggcgccaccgtgttcaaggccctggagcagccccacgagatcagccagagaaccaccatcgtgatccagaagcagaccttcatcagccagcacagctgcgtgaacagcaccgagctggacgagctgatccaggacctggagaccagccaccacgcccagaaggccgccaagtacagcgtgagcagcatgccctactgggagttccccagcctggtgttcagctggctggagctggagatcagctag

SEQ ID NO: 93990 - DNA, 459 bp, synthetic construct; identical to SEQ ID NO: 93984
  misc_feature 1..459: note = Description of Artificial Sequence: Synthetic coding sequence
  source 1..459: mol_type = other DNA

SEQ ID NO: 93991 - DNA, 1185 bp, synthetic construct
  misc_feature 1..1185: note = Description of Artificial Sequence: Synthetic coding sequence
  source 1..1185: mol_type = other DNA
atgaagagacagaacgtgagaaccctggccctgatcgtgtgcaccttcacctacctgctggtgggcgccgccgtgttcgacgccctggagagcgagcccgagctgatcgagagacagagactggagctgagacagcaggagctgagagccagatacaacctgagccagggcggctacgaggagctggagagagtggtgctgagactgaagccccacaaggccggcgtgcagtggagattcgccggcagcttctacttcgccatcaccgtgatcaccaccatcggctacggccacgccgcccccagcaccgacggcggcaaggtgttctgcatgttctacgccctgctgggcatccccctgaccctggtgatgttccagagcctgggcgagagaatcaacaccctggtgagatacctgctgcacagagccaagaagggcctgggcatgagaagagccgacgtgagcatggccaacatggtgctgatcggcttcttcagctgcatcagcaccctgtgcatcggcgccgccgccttcagccactacgagcactggaccttcttccaggcctactactactgcttcatcaccctgaccaccatcggcttcggcgactacgtggccctgcagaaggaccaggccctgcagacccagccccagtacgtggccttcagcttcgtgtacatcctgaccggcctgaccgtgatcggcgccttcctgaacctggtggtgctgagattcatgaccatgaacgccgaggacgagaagagagacgccgagcacagagccctgctgaccagaaacggccaggccggcggcggcggcggcggcggcagcgcccacaccaccgacaccgccagcagcaccgccgccgccggcggcggcggcttcagaaacgtgtacgccgaggtgctgcacttccagagcatgtgcagctgcctgtggtacaagagcagagagaagctgcagtacagcatccccatgatcatccccagagacctgagcaccagcgacacctgcgtggagcagagccacagcagccccggcggcggcggcagatacagcgacacccccagcagaagatgcctgtgcagcggcgcccccagaagcgccatcagcagcgtgagcaccggcctgcacagcctgagcaccttcagaggcctgatgaagagaagaagcagcgtgtag

SEQ ID NO: 93992 - DNA, 816 bp, synthetic construct
  misc_feature 1..816: note = Description of Artificial Sequence: Synthetic coding sequence
  source 1..816: mol_type = other DNA
atgttccagagcctgggcgagagaatcaacaccctggtgagatacctgctgcacagagccaagaagggcctgggcatgagaagagccgacgtgagcatggccaacatggtgctgatcggcttcttcagctgcatcagcaccctgtgcatcggcgccgccgccttcagccactacgagcactggaccttcttccaggcctactactactgcttcatcaccctgaccaccatcggcttcggcgactacgtggccctgcagaaggaccaggccctgcagacccagccccagtacgtggccttcagcttcgtgtacatcctgaccggcctgaccgtgatcggcgccttcctgaacctggtggtgctgagattcatgaccatgaacgccgaggacgagaagagagacgccgagcacagagccctgctgaccagaaacggccaggccggcggcggcggcggcggcggcagcgcccacaccaccgacaccgccagcagcaccgccgccgccggcggcggcggcttcagaaacgtgtacgccgaggtgctgcacttccagagcatgtgcagctgcctgtggtacaagagcagagagaagctgcagtacagcatccccatgatcatccccagagacctgagcaccagcgacacctgcgtggagcagagccacagcagccccggcggcggcggcagatacagcgacacccccagcagaagatgcctgtgcagcggcgcccccagaagcgccatcagcagcgtgagcaccggcctgcacagcctgagcaccttcagaggcctgatgaagagaagaagcagcgtgtag

SEQ ID NO: 93993 - DNA, 1182 bp, synthetic construct
  misc_feature 1..1182: note = Description of Artificial Sequence: Synthetic coding sequence
  source 1..1182: mol_type = other DNA
atgagaagcaccaccctgctggccctgctggccctggtgctgctgtacctggtgagcggcgccctggtgttcagagccctggagcagccccacgagcagcaggcccagagagagctgggcgaggtgagagagaagttcctgagagcccacccctgcgtgagcgaccaggagctgggcctgctgatcaaggaggtggccgacgccctgggcggcggcgccgaccccgagaccaacagcaccagcaacagcagccacagcgcctgggacctgggcagcgccttcttcttcagcggcaccatcatcaccaccatcggctacggcaacgtggccctgagaaccgacgccggcagactgttctgcatcttctacgccctggtgggcatccccctgttcggcatcctgctggccggcgtgggcgacagactgggcagcagcctgagacacggcatcggccacatcgaggccatcttcctgaagtggcacgtgccccccgagctggtgagagtgctgagcgccatgctgttcctgctgatcggctgcctgctgttcgtgctgacccccaccttcgtgttctgctacatggaggactggagcaagctggaggccatctacttcgtgatcgtgaccctgaccaccgtgggcttcggcgactacgtggccggcgccgaccccagacaggacagccccgcctaccagcccctggtgtggttctggatcctgctgggcctggcctacttcgccagcgtgctgaccaccatcggcaactggctgagagtggtgagcagaagaaccagagccgagatgggcggcctgaccgcccaggccgccagctggaccggcaccgtgaccgccagagtgacccagagagccggccccgccgcccccccccccgagaaggagcagcccctgctgcccccccccccctgccccgcccagcccctgggcagacccagaagccccagcccccccgagaaggcccagccccccagcccccccaccgccagcgccctggactaccccagcgagaacctggccttcatcgacgagagcagcgacacccagagcgagagaggctgccccctgcccagagcccccagaggcagaagaagacccaacccccccagaaagcccgtgagacccagaggccccggcagacccagagacaagggcgtgcccgtgtag

SEQ ID NO: 93994 - DNA, 1182 bp, synthetic construct; identical to SEQ ID NO: 93993
  misc_feature 1..1182: note = Description of Artificial Sequence: Synthetic coding sequence
  source 1..1182: mol_type = other DNA

SEQ ID NO: 93995 - DNA, 1182 bp, synthetic construct; identical to SEQ ID NO: 93993
  misc_feature 1..1182: note = Description of Artificial Sequence: Synthetic coding sequence
  source 1..1182: mol_type = other DNA

SEQ ID NO: 93996 - DNA, 1257 bp, synthetic construct
  misc_feature 1..1257: note = Description of Artificial Sequence: Synthetic coding sequence
  source 1..1257: mol_type = other DNA
accaccgccccccaggagccccccgccagacccctgcaggccggcagcggcgccggccccgcccccggcagagccatgagaagcaccaccctgctggccctgctggccctggtgctgctgtacctggtgagcggcgccctggtgttcagagccctggagcagccccacgagcagcaggcccagagagagctgggcgaggtgagagagaagttcctgagagcccacccctgcgtgagcgaccaggagctgggcctgctgatcaaggaggtggccgacgccctgggcggcggcgccgaccccgagaccaacagcaccagcaacagcagccacagcgcctgggacctgggcagcgccttcttcttcagcggcaccatcatcaccaccatcggctacggcaacgtggccctgagaaccgacgccggcagactgttctgcatcttctacgccctggtgggcatccccctgttcggcatcctgctggccggcgtgggcgacagactgggcagcagcctgagacacggcatcggccacatcgaggccatcttcctgaagtggcacgtgccccccgagctggtgagagtgctgagcgccatgctgttcctgctgatcggctgcctgctgttcgtgctgacccccaccttcgtgttctgctacatggaggactggagcaagctggaggccatctacttcgtgatcgtgaccctgaccaccgtgggcttcggcgactacgtggccggcgccgaccccagacaggacagccccgcctaccagcccctggtgtggttctggatcctgctgggcctggcctacttcgccagcgtgctgaccaccatcggcaactggctgagagtggtgagcagaagaaccagagccgagatgggcggcctgaccgcccaggccgccagctggaccggcaccgtgaccgccagagtgacccagagagccggccccgccgcccccccccccgagaaggagcagcccctgctgcccccccccccctgccccgcccagcccctgggcagacccagaagccccagcccccccgagaaggcccagccccccagcccccccaccgccagcgccctggactaccccagcgagaacctggccttcatcgacgagagcagcgacacccagagcgagagaggctgccccctgcccagagcccccagaggcagaagaagacccaacccccccagaaagcccgtgagacccagaggccccggcagacccagagacaagggcgtgcccgtgtag

SEQ ID NO: 93997 - DNA, 1368 bp, synthetic construct
  misc_feature 1..1368: note = Description of Artificial Sequence: Synthetic coding sequence
  source 1..1368: mol_type = other DNA
gtgcacgccagcgtgcacaccagagtgagaggcctgtgggtgccctggagaggcagacacgcccacggcggcagaggctgcagaggcgtgtgcggcgagtgcagatgggtgaccaccgccccccaggagccccccgccagacccctgcaggccggcagcggcgccggccccgcccccggcagagccatgagaagcaccaccctgctggccctgctggccctggtgctgctgtacctggtgagcggcgccctggtgttcagagccctggagcagccccacgagcagcaggcccagagagagctgggcgaggtgagagagaagttcctgagagcccacccctgcgtgagcgaccaggagctgggcctgctgatcaaggaggtggccgacgccctgggcggcggcgccgaccccgagaccaacagcaccagcaacagcagccacagcgcctgggacctgggcagcgccttcttcttcagcggcaccatcatcaccaccatcggctacggcaacgtggccctgagaaccgacgccggcagactgttctgcatcttctacgccctggtgggcatccccctgttcggcatcctgctggccggcgtgggcgacagactgggcagcagcctgagacacggcatcggccacatcgaggccatcttcctgaagtggcacgtgccccccgagctggtgagagtgctgagcgccatgctgttcctgctgatcggctgcctgctgttcgtgctgacccccaccttcgtgttctgctacatggaggactggagcaagctggaggccatctacttcgtgatcgtgaccctgaccaccgtgggcttcggcgactacgtggccggcgccgaccccagacaggacagccccgcctaccagcccctggtgtggttctggatcctgctgggcctggcctacttcgccagcgtgctgaccaccatcggcaactggctgagagtggtgagcagaagaaccagagccgagatgggcggcctgaccgcccaggccgccagctggaccggcaccgtgaccgccagagtgacccagagagccggccccgccgcccccccccccgagaaggagcagcccctgctgcccccccccccctgccccgcccagcccctgggcagacccagaagccccagcccccccgagaaggcccagccccccagcccccccaccgccagcgccctggactaccccagcgagaacctggccttcatcgacgagagcagcgacacccagagcgagagaggctgccccctgcccagagcccccagaggcagaagaagacccaacccccccagaaagcccgtgagacccagaggccccggcagacccagagacaagggcgtgcccgtgtag

SEQ ID NO: 93998 - DNA, 1500 bp, synthetic construct
  misc_feature 1..1500: note = Description of Artificial Sequence: Synthetic coding sequence
  source 1..1500: mol_type = other DNA
atggtggacagaggccccctgctgaccagcgccatcatcttctacctggccatcggcgccgccatcttcgaggtgctggaggagccccactggaaggaggccaagaagaactactacacccagaagctgcacctgctgaaggagttcccctgcctgggccaggagggcctggacaagatcctggaggtggtgagcgacgccgccggccagggcgtggccatcaccggcaaccagaccttcaacaactggaactggcccaacgccatgatcttcgccgccaccgtgatcaccaccatcggctacggcaacgtggcccccaagacccccgccggcagactgttctgcgtgttctacggcctgttcggcgtgcccctgtgcctgacctggatcagcgccctgggcaagttcttcggcggcagagccaagagactgggccagttcctgaccaagagaggcgtgagcctgagaaaggcccagatcacctgcaccgtgatcttcatcgtgtggggcgtgctggtgcacctggtgatcccccccttcgtgttcatggtgaccgagggctggaactacatcgagggcctgtactacagcttcatcaccatcagcaccatcggcttcggcgacttcgtggccggcgtgaaccccagcgccaactaccacgccctgtacagatacttcgtggagctgtggatctacctgggcctggcctggctgagcctgttcgtgaactggaaggtgagcatgttcgtggaggtgcacaaggccatcaagaagagaagaagaagaagaaaggagagcttcgagagcagcccccacagcagaaaggccctgcaggtgaagggcagcaccgccagcaaggacgtgaacatcttcagcttcctgagcaagaaggaggagacctacaacgacctgatcaagcagatcggcaagaaggccatgaagaccagcggcggcggcgagaccggccccggccccggcctgggcccccagggcggcggcctgcccgccctgccccccagcctggtgcccctggtggtgtacagcaagaacagagtgcccaccctggaggaggtgagccagaccctgagaagcaagggccacgtgagcagaagccccgacgaggaggccgtggccagagcccccgaggacagcagccccgcccccgaggtgttcatgaaccagctggacagaatcagcgaggagtgcgagccctgggacgcccaggactaccaccccctgatcttccaggacgccagcatcaccttcgtgaacaccgaggccggcctgagcgacgaggagaccagcaagagcagcctggaggacaacctggccggcgaggagagcccccagcagggcgccgaggccaaggcccccctgaacatgggcgagttccccagcagcagcgagagcaccttcaccagcaccgagagcgagctgagcgtgccctacgagcagctgatgaacgagtacaacaaggccaacagccccaagggcacctag

SEQ ID NO: 93999 - DNA, 942 bp, synthetic construct
  misc_feature 1..942: note = Description of Artificial Sequence: Synthetic coding sequence
  source 1..942: mol_type = other DNA
atgagaagaggcgccctgctggccggcgccctggccgcctacgccgcctacctggtgctgggcgccctgctggtggccagactggagggcccccacgaggccagactgagagccgagctggagaccctgagagcccagctgctgcagagaagcccctgcgtggccgcccccgccctggacgccttcgtggagagagtgctggccgccggcagactgggcagagtggtgctggccaacgccagcggcagcgccaacgccagcgaccccgcctgggacttcgccagcgccctgttcttcgccagcaccctgatcaccaccgtgggctacggctacaccacccccctgaccgacgccggcaaggccttcagcatcgccttcgccctgctgggcgtgcccaccaccatgctgctgctgaccgccagcgcccagagactgagcctgctgctgacccacgtgcccctgagctggctgagcatgagatggggctgggaccccagaagagccgcctgctggcacctggtggccctgctgggcgtggtggtgaccgtgtgcttcctggtgcccgccgtgatcttcgcccacctggaggaggcctggagcttcctggacgccttctacttctgcttcatcagcctgagcaccatcggcctgggcgactacgtgcccggcgaggcccccggccagccctacagagccctgtacaaggtgctggtgaccgtgtacctgttcctgggcctggtggccatggtgctggtgctgcagaccttcagacacgtgagcgacctgcacggcctgaccgagctgatcctgctgccccccccctgccccgccagcttcaacgccgacgaggacgacagagtggacatcctgggcccccagcccgagagccaccagcagctgagcgccagcagccacaccgactacgccagcatccccagatag

SEQ ID NO: 94000 - DNA, 924 bp, synthetic construct
  misc_feature 1..924: note = Description of Artificial Sequence: Synthetic coding sequence
  source 1..924: mol_type = other DNA
atgggcggcctgagaccctggagcagatacggcctgctggtggtggcccacctgctggccctgggcctgggcgccgtggtgttccaggccctggagggcccccccgcctgcagactgcaggccgagctgagagccgagctggccgccttccaggccgagcacagagcctgcctgccccccggcgccctggaggagctgctgggcaccgccctggccacccaggcccacggcgtgagcaccctgggcaacagcagcgagggcagaacctgggacctgcccagcgccctgctgttcgccgccagcatcctgaccaccaccggctacggccacatggcccccctgagccccggcggcaaggccttctgcatggtgtacgccgccctgggcctgcccgccagcctggccctggtggccaccctgagacactgcctgctgcccgtgctgagcagacccagagcctgggtggccgtgcactggcagctgagccccgccagagccgccctgctgcaggccgtggccctgggcctgctggtggccagcagcttcgtgctgctgcccgccctggtgctgtggggcctgcagggcgactgcagcctgctgggcgccgtgtacttctgcttcagcagcctgagcaccatcggcctggaggacctgctgcccggcagaggcagaagcctgcaccccgtgatctaccacctgggccagctggccctgctgggctacctgctgctgggcctgctggccatgctgctggccgtggagaccttcagcgagctgccccaggtgagagccatgggcaagttcttcagacccagcggccccgtgaccgccgaggaccagggcggcatcctgggccaggacgagctggccctgagcaccctgccccccgccgcccccgccagcggccaggcccccgcctgctag

SEQ ID NO: 94001 - DNA, 759 bp, synthetic construct
  misc_feature 1..759: note = Description of Artificial Sequence: Synthetic coding sequence
  source 1..759: mol_type = other DNA
atgggcggcctgagaccctggagcagatacggcctgctggtggtggcccacctgctggccctgggcctgggcgccgtggtgttccaggccctggagggcccccccgcctgcagactgcaggccgagctgagagccgagctggccgccttccaggccgagcacagagcctgcctgccccccggcgccctggaggagctgctgggcaccgccctggccacccaggcccacggcgtgagcaccctgggcaacagcagcgagggcagaacctgggacctgcccagcgccctgctgttcgccgccagcatcctgaccaccaccggctacggccacatggcccccctgagccccggcggcaaggccttctgcatggtgtacgccgccctgggcctgcccgccagcctggccctggtggccaccctgagacactgcctgctgcccgtgctgagcagacccagagcctgggtggccgtgcactggcagctgagccccgccagagccgccctgctgcaggccgtggccctgggcctgctggtggccagcagcttcgtgctgctgcccgccctggtgctgtggggcctgcagggcgactgcagcctgctgggcgccgtgtacttctgcttcagcagcctgagcaccatcggcctggaggacctgctgcccggcagaggcagaagcctgcaccccgtgatctaccacctgggccagctggccctgctgggcggcggcaccagcctgcagggcaccgcctgggagggctag

SEQ ID NO: 94002 - DNA, 774 bp, synthetic construct
  misc_feature 1..774: note = Description of Artificial Sequence: Synthetic coding sequence
  source 1..774: mol_type = other DNA
atgggcggcctgagaccctggagcagatacggcctgctggtggtggcccacctgctggccctgggcctgggcgccgtggtgttccaggccctggagggcccccccgcctgcagactgcaggccgagctgagagccgagctggccgccttccaggccgagcacagagcctgcctgccccccggcgccctggaggagctgctgggcaccgccctggccacccaggcccacggcgtgagcaccctgggcaacagcagcgagggcagaacctgggacctgcccagcgccctgctgttcgccgccagcatcctgaccaccaccggctacggccacatggcccccctgagccccggcggcaaggccttctgcatggtgtacgccgccctgggcctgcccgccagcctggccctggtggccaccctgagacactgcctgctgcccgtgctgagcagacccagagcctgggtggccgtgcactggcagctgagccccgccagagccgccctgctgcaggccgtggccctgggcctgctggtggccagcagcttcgtgctgctgcccgccctggtgctgtggggcctgcagggcgactgcagcctgctgggcgccgtgtacttctgcttcagcagcctgagcaccatcggcctggaggacctgctgcccggcagaggcagaagcctgcaccccgtgatctaccacctgggccagctggccctgctgggcaagagcagccacctgaccgcctgcggcggcagaggcaagagaagcctggactag

SEQ ID NO: 94003 - DNA, 759 bp, synthetic construct; identical to SEQ ID NO: 94001
  misc_feature 1..759: note = Description of Artificial Sequence: Synthetic coding sequence
  source 1..759: mol_type = other DNA

SEQ ID NO: 94004 - DNA, 87 bp, synthetic construct
  misc_feature 1..87: note = Description of Artificial Sequence: Synthetic coding sequence
  source 1..87: mol_type = other DNA
tgactgcaccccgtgatctaccacctgggccagctggccctgctgggcggcggcaccagcctgcagggcaccgcctgggagggctag

SEQ ID NO: 94005 - DNA, 1125 bp, synthetic construct
  misc_feature 1..1125: note = Description of Artificial Sequence: Synthetic coding sequence
  source 1..1125: mol_type = other DNA
atgaagagacagaacgtgagaaccctgagcctgatcgtgtgcaccttcacctacctgctggtgggcgccgccgtgttcgacgccctggagagcgaccacgagatgagagaggaggagaagctgaaggccgaggagatcagaatcaagggcaagtacaacatcagcagcgaggactacagacagctggagctggtgatcctgcagagcgagccccacagagccggcgtgcagtggaagttcgccggcagcttctacttcgccatcaccgtgatcaccaccatcggctacggccacgccgcccccggcaccgacgccggcaaggccttctgcatgttctacgccgtgctgggcatccccctgaccctggtgatgttccagagcctgggcgagagaatgaacaccttcgtgagatacctgctgaagagaatcaagaagtgctgcggcatgagaaacaccgacgtgagcatggagaacatggtgaccgtgggcttcttcagctgcatgggcaccctgtgcatcggcgccgccgccttcagccagtgcgaggagtggagcttcttccacgcctactactactgcttcatcaccctgaccaccatcggcttcggcgactacgtggccctgcagaccaagggcgccctgcagaagaagcccctgtacgtggccttcagcttcatgtacatcctggtgggcctgaccgtgatcggcgccttcctgaacctggtggtgctgagattcctgaccatgaacagcgaggacgagagaagagacgccgaggagagagccagcctggccggcaacagaaacagcatggtgatccacatccccgaggagcccagacccagcagacccagatacaaggccgacgtgcccgacctgcagagcgtgtgcagctgcacctgctacagaagccaggactacggcggcagaagcgtggccccccagaacagcttcagcgccaagctggccccccactacttccacagcatcagctacaagatcgaggagatcagccccagcaccctgaagaacagcctgttccccagccccatcagcagcatcagccccggcctgcacagcttcaccgaccaccagagactgatgaagagaagaaagagcgtgtag

SEQ ID NO: 94006 - DNA, 1125 bp, synthetic construct; identical to SEQ ID NO: 94005
  misc_feature 1..1125: note = Description of Artificial Sequence: Synthetic coding sequence
  source 1..1125: mol_type = other DNA

SEQ ID NO: 94007 - DNA, 1125 bp, synthetic construct; identical to SEQ ID NO: 94005
  misc_feature 1..1125: note = Description of Artificial Sequence: Synthetic coding sequence
  source 1..1125: mol_type = other DNA

SEQ ID NO: 94008 - DNA, 3693 bp, synthetic construct
  misc_feature 1..3693: note = Description of Artificial Sequence: Synthetic coding sequence
  source 1..3693: mol_type = other DNA
atggccagagccaagctgcccagaagccccagcgagggcaaggccggccccggcggcgcccccgccggcgccgccgcccccgaggagccccacggcctgagccccctgctgcccgccagaggcggcggcagcgtgggcagcgacgtgggccagagactgcccgtggaggacttcagcctggacagcagcctgagccaggtgcaggtggagttctacgtgaacgagaacaccttcaaggagagactgaagctgttcttcatcaagaaccagagaagcagcctgagaatcagactgttcaacttcagcctgaagctgctgacctgcctgctgtacatcgtgagagtgctgctggacgaccccgccctgggcatcggctgctggggctgccccaagcagaactacagcttcaacgacagcagcagcgagatcaactgggcccccatcctgtgggtggagagaaagatgaccctgtgggccatccaggtgatcgtggccatcatcagcttcctggagaccatgctgctgatctacctgagctacaagggcaacatctgggagcagatcttcagagtgagcttcgtgctggagatgatcaacaccctgcccttcatcatcaccatcttctggccccccctgagaaacctgttcatccccgtgttcctgaactgctggctggccaagcacgccctggagaacatgatcaacgacttccacagagccatcctgagaacccagagcgccatgttcaaccaggtgctgatcctgttctgcaccctgctgtgcctggtgttcaccggcacctgcggcatccagcacctggagagagccggcgagaacctgagcctgctgaccagcttctacttctgcatcgtgaccttcagcaccgtgggctacggcgacgtgacccccaagatctggcccagccagctgctggtggtgatcatgatctgcgtggccctggtggtgctgcccctgcagttcgaggagctggtgtacctgtggatggagagacagaagagcggcggcaactacagcagacacagagcccagaccgagaagcacgtggtgctgtgcgtgagcagcctgaagatcgacctgctgatggacttcctgaacgagttctacgcccaccccagactgcaggactactacgtggtgatcctgtgccccaccgagatggacgtgcaggtgagaagagtgctgcagatccccctgtggagccagagagtgatctacctgcagggcagcgccctgaaggaccaggacctgatgagagccaagatggacaacggcgaggcctgcttcatcctgagcagcagaaacgaggtggacagaaccgccgccgaccaccagaccatcctgagagcctgggccgtgaaggacttcgcccccaactgccccctgtacgtgcagatcctgaagcccgagaacaagttccacgtgaagttcgccgaccacgtggtgtgcgaggaggagtgcaagtacgccatgctggccctgaactgcatctgccccgccaccagcaccctgatcaccctgctggtgcacaccagcagaggccaggagggccaggagagccccgagcagtggcagagaatgtacggcagatgcagcggcaacgaggtgtaccacatcagaatgggcgacagcaagttcttcagagagtacgagggcaagagcttcacctacgccgccttccacgcccacaagaagtacggcgtgtgcctgatcggcctgaagagagaggacaacaagagcatcctgctgaaccccggccccagacacatcctggccgccagcgacacctgcttctacatcaacatcaccaaggaggagaacagcgccttcatcttcaagcaggaggagaagagaaagaagagagccttcagcggccagggcctgcacgagggccccgccagactgcccgtgcacagcatcatcgccagcatgggcaccgtggccatggacctgcagggcaccgagcacagacccacccagagcggcggcggcggcggcggcagcaagctggccctgcccaccgagaacggcagcggcagcagaagacccagcatcgcccccgtgctggagctggccgacagcagcgccctgctgccctgcgacctgctgagcgaccagagcgaggacgaggtgacccccagcgacgacgagggcctgagcgtggtggagtacgtgaagggctacccccccaacagcccctacatcggcagcagccccaccctgtgccacctgctgcccgtgaaggcccccttctgctgcctgagactggacaagggctgcaagcacaacagctacgaggacgccaaggcctacggcttcaagaacaagctgatcatcgtgagcgccgagaccgccggcaacggcctgtacaacttcatcgtgcccctgagagcctactacagaagcagaaaggagctgaaccccatcgtgctgctgctggacaacaagcccgaccaccacttcctggaggccatctgctgcttccccatggtgtactacatggagggcagcgtggacaacctggacagcctgctgcagtgcggcatcatctacgccgacaacctggtggtggtggacaaggagagcaccatgagcgccgaggaggactacatggccgacgccaagaccatcgtgaacgtgcagaccatgttcagactgttccccagcctgagcatcaccaccgagctgacccaccccagcaacatgagattcatgcagttcagagccaaggacagctacagcctggccctgagcaagctggagaagagagagagagagaacggcagcaacctggccttcatgttcagactgcccttcgccgccggcagagtgttcagcatcagcatgctggacaccctgctgtaccagagcttcgtgaaggactacatgatcaccatcaccagactgctgctgggcctggacaccacccccggcagcggctacctgtgcgccatgaagatcaccgagggcgacctgtggatcagaacctacggcagactgttccagaagctgtgcagcagcagcgccgagatccccatcggcatctacagaaccgagagccacgtgttcagcaccagcgagagccagatcagcgtgaacgtggaggactgcgaggacaccagagaggtgaagggcccctggggcagcagagccggcaccggcggcagcagccagggcagacacaccggcggcggcgaccccgccgagcaccccctgctgagaagaaagagcctgcagtgggccagaagactgagcagaaaggcccccaagcaggccggcagagccgccgccgccgagtggatcagccagcagagactgagcctgtacagaagaagcgagagacaggagctgagcgagctggtgaagaacagaatgaagcacctgggcctgcccaccaccggctacgaggacgtggccaacctgaccgccagcgacgtgatgaacagagtgaacctgggctacctgcaggacgagatgaacgaccaccagaacaccctgagctacgtgctgatcaaccccccccccgacaccagactggagcccagcgacatcgtgtacctgatcagaagcgaccccctggcccacgtggccagcagcagccagagcagaaagagcagctgcagccacaagctgagcagctgcaaccccgagaccagagacgagacccagctgtag

SEQ ID NO: 94009 - DNA, 3771 bp, synthetic construct
  misc_feature 1..3771: note = Description of Artificial Sequence: Synthetic coding sequence
  source 1..3771: mol_type = other DNA
atgcccctgcccgacggcgccagaacccccggcggcgtgtgcagagaggccagaggcggcggctacaccaacagaaccttcgagttcgacgacggccagtgcgcccccagaagaccctgcgccggcgacggcgccctgctggacaccgccggcttcaagatgagcgacctggacagcgaggtgctgcccctgccccccagatacagattcagagacctgctgctgggcgaccccagcttccagaacgacgacagagtgcaggtggagttctacgtgaacgagaacaccttcaaggagagactgaagctgttcttcatcaagaaccagagaagcagcctgagaatcagactgttcaacttcagcctgaagctgctgacctgcctgctgtacatcgtgagagtgctgctggacgaccccgccctgggcatcggctgctggggctgccccaagcagaactacagcttcaacgacagcagcagcgagatcaactgggcccccatcctgtgggtggagagaaagatgaccctgtgggccatccaggtgatcgtggccatcatcagcttcctggagaccatgctgctgatctacctgagctacaagggcaacatctgggagcagatcttcagagtgagcttcgtgctggagatgatcaacaccctgcccttcatcatcaccatcttctggccccccctgagaaacctgttcatccccgtgttcctgaactgctggctggccaagcacgccctggagaacatgatcaacgacttccacagagccatcctgagaacccagagcgccatgttcaaccaggtgctgatcctgttctgcaccctgctgtgcctggtgttcaccggcacctgcggcatccagcacctggagagagccggcgagaacctgagcctgctgaccagcttctacttctgcatcgtgaccttcagcaccgtgggctacggcgacgtgacccccaagatctggcccagccagctgctggtggtgatcatgatctgcgtggccctggtggtgctgcccctgcagttcgaggagctggtgtacctgtggatggagagacagaagagcggcggcaactacagcagacacagagcccagaccgagaagcacgtggtgctgtgcgtgagcagcctgaagatcgacctgctgatggacttcctgaacgagttctacgcccaccccagactgcaggactactacgtggtgatcctgtgccccaccgagatggacgtgcaggtgagaagagtgctgcagatccccctgtggagccagagagtgatctacctgcagggcagcgccctgaaggaccaggacctgatgagagccaagatggacaacggcgaggcctgcttcatcctgagcagcagaaacgaggtggacagaaccgccgccgaccaccagaccatcctgagagcctgggccgtgaaggacttcgcccccaactgccccctgtacgtgcagatcctgaagcccgagaacaagttccacgtgaagttcgccgaccacgtggtgtgcgaggaggagtgcaagtacgccatgctggccctgaactgcatctgccccgccaccagcaccctgatcaccctgctggtgcacaccagcagaggccaggagggccaggagagccccgagcagtggcagagaatgtacggcagatgcagcggcaacgaggtgtaccacatcagaatgggcgacagcaagttcttcagagagtacgagggcaagagcttcacctacgccgccttccacgcccacaagaagtacggcgtgtgcctgatcggcctgaagagagaggacaacaagagcatcctgctgaaccccggccccagacacatcctggccgccagcgacacctgcttctacatcaacatcaccaaggaggagaacagcgccttcatcttcaagcaggaggagaagagaaagaagagagccttcagcggccagggcctgcacgagggccccgccagactgcccgtgcacagcatcatcgccagcatgggcaccgtggccatggacctgcagggcaccgagcacagacccacccagagcggcggcggcggcggcggcagcaagctggccctgcccaccgagaacggcagcggcagcagaagacccagcatcgcccccgtgctggagctggccgacagcagcgccctgctgccctgcgacctgctgagcgaccagagcgaggacgaggtgacccccagcgacgacgagggcctgagcgtggtggagtacgtgaagggctacccccccaacagcccctacatcggcagcagccccaccctgtgccacctgctgcccgtgaaggcccccttctgctgcctgagactggacaagggctgcaagcacaacagctacgaggacgccaaggcctacggcttcaagaacaagctgatcatcgtgagcgccgagaccgccggcaacggcctgtacaacttcatcgtgcccctgagagcctactacagaagcagaaaggagctgaaccccatcgtgctgctgctggacaacaagcccgaccaccacttcctggaggccatctgctgcttccccatggtgtactacatggagggcagcgtggacaacctggacagcctgctgcagtgcggcatcatctacgccgacaacctggtggtggtggacaaggagagcaccatgagcgccgaggaggactacatggccgacgccaagaccatcgtgaacgtgcagaccatgttcagactgttccccagcctgagcatcaccaccgagctgacccaccccagcaacatgagattcatgcagttcagagccaaggacagctacagcctggccctgagcaagctggagaagagagagagagagaacggcagcaacctggccttcatgttcagactgcccttcgccgccggcagagtgttcagcatcagcatgctggacaccctgctgtaccagagcttcgtgaaggactacatgatcaccatcaccagactgctgctgggcctggacaccacccccggcagcggctacctgtgcgccatgaagatcaccgagggcgacctgtggatcagaacctacggcagactgttccagaagctgtgcagcagcagcgccgagatccccatcggcatctacagaaccgagagccacgtgttcagcaccagcgagccccacgacctgagagcccagagccagatcagcgtgaacgtggaggactgcgaggacaccagagaggtgaagggcccctggggcagcagagccggcaccggcggcagcagccagggcagacacaccggcggcggcgaccccgccgagcaccccctgctgagaagaaagagcctgcagtgggccagaagactgagcagaaaggcccccaagcaggccggcagagccgccgccgccgagtggatcagccagcagagactgagcctgtacagaagaagcgagagacaggagctgagcgagctggtgaagaacagaatgaagcacctgggcctgcccaccaccggctacgaggacgtggccaacctgaccgccagcgacgtgatgaacagagtgaacctgggctacctgcaggacgagatgaacgaccaccagaacaccctgagctacgtgctgatcaaccccccccccgacaccagactggagcccagcgacatcgtgtacctgatcagaagcgaccccctggcccacgtggccagcagcagccagagcagaaagagcagctgcagccacaagctgagcagctgcaaccccgagaccagagacgagacccagctgtag

SEQ ID NO: 94010 - DNA, 3708 bp, synthetic construct
  misc_feature 1..3708: note = Description of Artificial Sequence: Synthetic coding sequence
  source 1..3708: mol_type = other DNA
atgcccctgcccgacggcgccagaacccccggcggcgtgtgcagagaggccagaggcggcggctacaccaacagaaccttcgagttcgacgacggccagtgcgcccccagaagaccctgcgccggcgacggcgccctgctggacaccgccggcttcaagatgagcgacctggacagcgaggtgctgcccctgccccccagatacagattcagagacctgctgctgggcgaccccagcttccagaacgacgacagagtgcaggtggagttctacgtgaacgagaacaccttcaaggagagactgaagctgttcttcatcaagaaccagagaagcagcctgagaatcagactgttcaacttcagcctgaagctgctgacctgcctgctgtacatcgtgagagtgctgctggacgaccccgccctgggcatcggctgctggggctgccccaagcagaactacagcttcaacgacagcagcagcgagatcaactgggcccccatcctgtgggtggagagaaagatgaccctgtgggccatccaggtgatcgtggccatcatcagcttcctggagaccatgctgctgatctacctgagctacaagggcaacatctgggagcagatcttcagagtgagcttcgtgctggagatgatcaacaccctgcccttcatcatcaccatcttctggccccccctgagaaacctgttcatccccgtgttcctgaactgctggctggccaagcacgccctggagaacatgatcaacgacttccacagagccatcctgagaacccagagcgccatgttcaaccaggtgctgatcctgttctgcaccctgctgtgcctggtgttcaccggcacctgcggcatccagcacctggagagagccggcgagaacctgagcctgctgaccagcttctacttctgcatcgtgaccttcagcaccgtgggctacggcgacgtgacccccaagatctggcccagccagctgctggtggtgatcatgatctgcgtggccctggtggtgctgcccctgcagttcgaggagctggtgtacctgtggatggagagacagaagagcggcggcaactacagcagacacagagcccagaccgagaagcacgtggtgctgtgcgtgagcagcctgaagatcgacctgctgatggacttcctgaacgagttctacgcccaccccagactgcaggactactacgtggtgatcctgtgccccaccgagatggacgtgcaggtgagaagagtgctgcagatccccctgtggagccagagagtgatctacctgcagggcagcgccctgaaggaccaggacctgatgagagccaagatggacaacggcgaggcctgcttcatcctgagcagcagaaacgaggtggacagaaccgccgccgaccaccagaccatcctgagagcctgggccgtgaaggacttcgcccccaactgccccctgtacgtgcagatcctgaagcccgagaacaagttccacgtgaagttcgccgaccacgtggtgtgcgaggaggagtgcaagtacgccatgctggccctgaactgcatctgccccgccaccagcaccctgatcaccctgctggtgcacaccagcagaggccaggagggccaggagagccccgagcagtggcagagaatgtacggcagatgcagcggcaacgaggtgtaccacatcagaatgggcgacagcaagttcttcagagagtacgagggcaagagcttcacctacgccgccttccacgcccacaagaagtacggcgtgtgcctgatcggcctgaagagagaggacaacaagagcatcctgctgaaccccggccccagacacatcctggccgccagcgacacctgcttctacatcaacatcaccaaggaggagaacagcgccttcatcttcaagcaggaggagaagagaaagaagagagccttcagcggccagggcctgcacgagggccccgccagactgcccgtgcacagcatcatcgccagcatgggcaccgtggccatggacctgcagggcaccgagcacagacccacccagagcggcggcggcggcggcggcagcaagctggccctgcccaccgagaacggcagcggcagcagaagacccagcatcgcccccgtgctggagctggccgacagcagcgccctgctgccctgcgacctgctgagcgaccagagcgaggacgaggtgacccccagcgacgacgagggcctgagcgtggtggagtacgtgaagggctacccccccaacagcccctacatcggcagcagccccaccctgtgccacctgctgcccgtgaaggcccccttctgctgcctgagactggacaagggctgcaagcacaacagctacgaggacgccaaggcctacggcttcaagaacaagctgatcatcgtgagcgccgagaccgccggcaacggcctgtacaacttcatcgtgcccctgagagcctactacagaagcagaaaggagctgaaccccatcgtgctgctgctggacaacaagcccgaccaccacttcctggaggccatctgctgcttccccatggtgtactacatggagggcagcgtggacaacctggacagcctgctgcagtgcggcatcatctacgccgacaacctggtggtggtggacaaggagagcaccatgagcgccgaggaggactacatggccgacgccaagaccatcgtgaacgtgcagaccatgttcagactgttccccagcctgagcatcaccaccgagctgacccaccccagcaacatgagattcatgcagttcagagccaaggacagctacagcctggccctgagcaagctggagaagagagagagagagaacggcagcaacctggccttcatgttcagactgcccttcgccgccggcagagtgttcagcatcagcatgctggacaccctgctgtaccagagcttcgtgaaggactacatgatcaccatcaccagactgctgctgggcctggacaccacccccggcagcggctacctgtgcgccatgaagatcaccgagggcgacctgtggatcagaacctacggcagactgttccagaagctgtgcagcagcagcgccgagatccccatcggcatctacagaaccgagagccacgtgttcagcaccagcgagccccacgacctgagagcccagagccagatcagcgtgaacgtggaggactgcgaggacaccagagaggtgaagggcccctggggcagcagagccggcaccggcggcagcagccagggcagacacaccggcggcggcgaccccgccgagcaccccctgctgagaagaaagagcctgcagtgggccagaagactgagcagaaaggcccccaagcaggccggcagagccgccgccgccgagtggatcagccagcagagactgagcctgtacagaagaagcgagagacaggagctgagcgagctggtgaagaacagaatgaagcacctgggcctgcccaccaccggctacgacgagatgaacgaccaccagaacaccctgagctacgtgctgatcaaccccccccccgacaccagactggagcccagcgacatcgtgtacctgatcagaagcgaccccctggcccacgtggccagcagcagccagagcagaaagagcagctgcagccacaagctgagcagctgcaaccccgagaccagagacgagacccagctgtag

SEQ ID NO: 94011 - DNA, 3408 bp, synthetic construct
  misc_feature 1..3408: note = Description of Artificial Sequence: Synthetic coding sequence
  source 1..3408: mol_type = other DNA
atggtggacctggagagcgaggtgccccccctgccccccagatacagattcagagacctgctgctgggcgaccagggctggcagaacgacgacagagtgcaggtggagttctacatgaacgagaacaccttcaaggagagactgaagctgttcttcatcaagaaccagagaagcagcctgagaatcagactgttcaacttcagcctgaagctgctgagctgcctgctgtacatcatcagagtgctgctggagaaccccagccagggcaacgagtggagccacatcttctgggtgaacagaagcctgcccctgtggggcctgcaggtgagcgtggccctgatcagcctgttcgagaccatcctgctgggctacctgagctacaagggcaacatctgggagcagatcctgagaatccccttcatcctggagatcatcaacgccgtgcccttcatcatcagcatcttctggcccagcctgagaaacctgttcgtgcccgtgttcctgaactgctggctggccaagcacgccctggagaacatgatcaacgacctgcacagagccatccagagaacccagagcgccatgttcaaccaggtgctgatcctgatcagcaccctgctgtgcctgatcttcacctgcatctgcggcatccagcacctggagagaatcggcaagaagctgaacctgttcgacagcctgtacttctgcatcgtgaccttcagcaccgtgggcttcggcgacgtgacccccgagacctggagcagcaagctgttcgtggtggccatgatctgcgtggccctggtggtgctgcccatccagttcgagcagctggcctacctgtggatggagagacagaagagcggcggcaactacagcagacacagagcccagaccgagaagcacgtggtgctgtgcgtgagcagcctgaagatcgacctgctgatggacttcctgaacgagttctacgcccaccccagactgcaggactactacgtggtgatcctgtgccccaccgagatggacgtgcaggtgagaagagtgctgcagatccccatgtggagccagagagtgatctacctgcagggcagcgccctgaaggaccaggacctgctgagagccaagatggacgacgccgaggcctgcttcatcctgagcagcagatgcgaggtggacagaaccagcagcgaccaccagaccatcctgagagcctgggccgtgaaggacttcgcccccaactgccccctgtacgtgcagatcctgaagcccgagaacaagttccacatcaagttcgccgaccacgtggtgtgcgaggaggagttcaagtacgccatgctggccctgaactgcatctgccccgccaccagcaccctgatcaccctgctggtgcacaccagcagaggccaggagggccagcagagccccgagcagtggcagaagatgtacggcagatgcagcggcaacgaggtgtaccacatcgtgctggaggagagcaccttcttcgccgagtacgagggcaagagcttcacctacgccagcttccacgcccacaagaagttcggcgtgtgcctgatcggcgtgagaagagaggacaacaagaacatcctgctgaaccccggccccagatacatcatgaacagcaccgacatctgcttctacatcaacatcaccaaggaggagaacagcgccttcaagaaccaggaccagcagagaaagagcaacgtgagcagaagcttctaccacggccccagcagactgcccgtgcacagcatcatcgccagcatgggcaccgtggccatcgacctgcaggacaccagctgcagaagcgccagcggccccaccctgagcctgcccaccgagggcagcaaggagatcagaagacccagcatcgcccccgtgctggaggtggccgacaccagcagcatccagacctgcgacctgctgagcgaccagagcgaggacgagaccacccccgacgaggagatgagcagcaacctggagtacgccaagggctaccccccctacagcccctacatcggcagcagccccaccttctgccacctgctgcacgagaaggtgcccttctgctgcctgagactggacaagagctgccagcacaactactacgaggacgccaaggcctacggcttcaagaacaagctgatcatcgtggccgccgagaccgccggcaacggcctgtacaacttcatcgtgcccctgagagcctactacagacccaagaaggagctgaaccccatcgtgctgctgctggacaacccccccgacatgcacttcctggacgccatctgctggttccccatggtgtactacatggtgggcagcatcgacaacctggacgacctgctgagatgcggcgtgaccttcgccgccaacatggtggtggtggacaaggagagcaccatgagcgccgaggaggactacatggccgacgccaagaccatcgtgaacgtgcagaccctgttcagactgttcagcagcctgagcatcatcaccgagctgacccaccccgccaacatgagattcatgcagttcagagccaaggactgctacagcctggccctgagcaagctggagaagaaggagagagagagaggcagcaacctggccttcatgttcagactgcccttcgccgccggcagagtgttcagcatcagcatgctggacaccctgctgtaccagagcttcgtgaaggactacatgatcagcatcaccagactgctgctgggcctggacaccacccccggcagcggcttcctgtgcagcatgaagatcaccgccgacgacctgtggatcagaacctacgccagactgtaccagaagctgtgcagcagcaccggcgacgtgcccatcggcatctacagaaccgagagccagaagctgaccaccagcgagagccagatcagcatcagcgtggaggagtgggaggacaccaaggacagcaaggagcagggccaccacagaagcaaccacagaaacagcaccagcagcgaccagagcgaccaccccctgctgagaagaaagagcatgcagtgggccagaagactgagcagaaagggccccaagcacagcggcaagaccgccgagaagatcacccagcagagactgaacctgtacagaagaagcgagagacaggagctggccgagctggtgaagaacagaatgaagcacctgggcctgagcaccgtgggctacgacgagatgaacgaccaccagagcaccctgagctacatcctgatcaaccccagccccgacaccagaatcgagctgaacgacgtggtgtacctgatcagacccgaccccctggcctacctgcccaacagcgagcccagcagaagaaacagcatctgcaacgtgaccggccaggacagcagagaggagacccagctgtag

SEQ ID NO: 94012 - DNA, 3210 bp, synthetic construct
  misc_feature 1..3210: note = Description of Artificial Sequence: Synthetic coding sequence
  source 1..3210: mol_type = other DNA
atggtggacctggagagcgaggtgccccccctgccccccagatacagattcagagacctgctgctgggcgaccagggctggcagaacgacgacagagtgcaggtggagttctacatgaacgagaacaccttcaaggagagactgaagctgttcttcatcaagaaccagagaagcagcctgagaatcagactgttcaacttcagcctgaagctgctgagctgcctgctgtacatcatcagagtgctgctggagaaccccagccagggcaacgagtggagccacatcttctgggtgaacagaagcctgcccctgtggggcctgcaggtgagcgtggccctgatcagcctgttcgagaccatcctgctgggctacctgagctacaagggcaacatctgggagcagatcctgagaatccccttcatcctggagatcatcaacgccgtgcccttcatcatcagcatcttctggcccagcctgagaaacctgttcgtgcccgtgttcctgaactgctggctggccaagcacgccctggagaacatgatcaacgacctgcacagagccatccagagaacccagagcgccatgttcaaccaggtgctgatcctgatcagcaccctgctgtgcctgatcttcacctgcatctgcggcatccagcacctggagagaatcggcaagaagctgaacctgttcgacagcctgtacttctgcatcgtgaccttcagcaccgtgggcttcggcgacgtgacccccgagacctggagcagcaagctgttcgtggtggccatgatctgcgtggccctggtggtgctgcccatccagttcgagcagctggcctacctgtggatggagagacagaagagcggcggcaactacagcagacacagagcccagaccgagaagcacgtggtgctgtgcgtgagcagcctgaagatcgacctgctgatggacttcctgaacgagttctacgcccaccccagactgcaggactactacgtggtgatcctgtgccccaccgagatggacgtgcaggtgagaagagtgctgcagatccccatgtggagccagagagtgatctacctgcagggcagcgccctgaaggaccaggacctgctgagagccaagatggacgacgccgaggcctgcttcatcctgagcagcagatgcgaggtggacagaaccagcagcgaccaccagaccatcctgagagcctgggccgtgaaggacttcgcccccaactgccccctgtacgtgcagatcctgaagcccgagaacaagttccacatcaagttcgccgaccacgtggtgtgcgaggaggagttcaagtacgccatgctggccctgaactgcatctgccccgccaccagcaccctgatcaccctgctggtgcacaccagcagaggccagttcggcgtgtgcctgatcggcgtgagaagagaggacaacaagaacatcctgctgaaccccggccccagatacatcatgaacagcaccgacatctgcttctacatcaacatcaccaaggaggagaacagcgccttcaagaaccaggaccagcagagaaagagcaacgtgagcagaagcttctaccacggccccagcagactgcccgtgcacagcatcatcgccagcatgggcaccgtggccatcgacctgcaggacaccagctgcagaagcgccagcggccccaccctgagcctgcccaccgagggcagcaaggagatcagaagacccagcatcgcccccgtgctggaggtggccgacaccagcagcatccagacctgcgacctgctgagcgaccagagcgaggacgagaccacccccgacgaggagatgagcagcaacctggagtacgccaagggctaccccccctacagcccctacatcggcagcagccccaccttctgccacctgctgcacgagaaggtgcccttctgctgcctgagactggacaagagctgccagcacaactactacgaggacgccaaggcctacggcttcaagaacaagctgatcatcgtggccgccgagaccgccggcaacggcctgtacaacttcatcgtgcccctgagagcctactacagacccaagaaggagctgaaccccatcgtgctgctgctggacaaccccctggacgacctgctgagatgcggcgtgaccttcgccgccaacatggtggtggtggacaaggagagcaccatgagcgccgaggaggactacatggccgacgccaagaccatcgtgaacgtgcagaccctgttcagactgttcagcagcctgagcatcatcaccgagctgacccaccccgccaacatgagattcatgcagttcagagccaaggactgctacagcctggccctgagcaagctggagaagaaggagagagagagaggcagcaacctggccttcatgttcagactgcccttcgccgccggcagagtgttcagcatcagcatgctggacaccctgctgtaccagagcttcgtgaaggactacatgatcagcatcaccagactgctgctgggcctggacaccacccccggcagcggcttcctgtgcagcatgaagatcaccgccgacgacctgtggatcagaacctacgccagactgtaccagaagctgtgcagcagcaccggcgacgtgcccatcggcatctacagaaccgagagccagaagctgaccaccagcgaggagacctacatcctgatcttcctgagccagatcagcatcagcgtggaggagtgggaggacaccaaggacagcaaggagcagggccaccacagaagcaaccacagaaacagcaccagcagcgaccagagcgaccaccccctgctgagaagaaagagcatgcagtgggccagaagactgagcagaaagggccccaagcacagcggcaagaccgccgagaagatcacccagcagagactgaacctgtacagaagaagcgagagacaggagctggccgagctggtgaagaacagaatgaagcacctgggcctgagcaccgtgggctacgacgagatgaacgaccaccagagcaccctgagctacatcctgatcaaccccagccccgacaccagaatcgagctgaacgacgtggtgtacctgatcagacccgaccccctggcctacctgcccaacagcgagcccagcagaagaaacagcatctgcaacgtgaccggccaggacagcagagaggagacccagctgtag

SEQ ID NO: 94013 - DNA, 3336 bp, synthetic construct
  misc_feature 1..3336: note = Description of Artificial Sequence: Synthetic coding sequence
  source 1..3336: mol_type = other DNA
atggtggacctggagagcgaggtgccccccctgccccccagatacagattcagagacctgctgctgggcgaccagggctggcagaacgacgacagagtgcaggtggagttctacatgaacgagaacaccttcaaggagagactgaagctgttcttcatcaagaaccagagaagcagcctgagaatcagactgttcaacttcagcctgaagctgctgagctgcctgctgtacatcatcagagtgctgctggagaaccccagccagggcaacgagtggagccacatcttctgggtgaacagaagcctgcccctgtggggcctgcaggtgagcgtggccctgatcagcctgttcgagaccatcctgctgggctacctgagctacaagggcaacatctgggagcagatcctgagaatccccttcatcctggagatcatcaacgccgtgcccttcatcatcagcatcttctggcccagcctgagaaacctgttcgtgcccgtgttcctgaactgctggctggccaagcacgccctggagaacatgatcaacgacctgcacagagccatccagagaacccagagcgccatgttcaaccaggtgctgatcctgatcagcaccctgctgtgcctgatcttcacctgcatctgcggcatccagcacctggagagaatcggcaagaagctgaacctgttcgacagcctgtacttctgcatcgtgaccttcagcaccgtgggcttcggcgacgtgacccccgagacctggagcagcaagctgttcgtggtggccatgatctgcgtggccctggtggtgctgcccatccagttcgagcagctggcctacctgtggatggagagacagaagagcggcggcaactacagcagacacagagcccagaccgagaagcacgtggtgctgtgcgtgagcagcctgaagatcgacctgctgatggacttcctgaacgagttctacgcccaccccagactgcaggactactacgtggtgatcctgtgccccaccgagatggacgtgcaggtgagaagagtgctgcagatccccatgtggagccagagagtgatctacctgcagggcagcgccctgaaggaccaggacctgctgagagccaagatggacgacgccgaggcctgcttcatcctgagcagcagatgcgaggtggacagaaccagcagcgaccaccagaccatcctgagagcctgggccgtgaaggacttcgcccccaactgccccctgtacgtgcagatcctgaagcccgagaacaagttccacatcaagttcgccgaccacgtggtgtgcgaggaggagttcaagtacgccatgctggccctgaactgcatctgccccgccaccagcaccctgatcaccctgctggtgcacaccagcagaggccaggagggccagcagagccccgagcagtggcagaagatgtacggcagatgcagcggcaacgaggtgtaccacatcgtgctggaggagagcaccttcttcgccgagtacgagggcaagagcttcacctacgccagcttccacgcccacaagaagttcggcgtgtgcctgatcggcgtgagaagagaggacaacaagaacatcctgctgaaccccggccccagatacatcatgaacagcaccgacatctgcttctacatcaacatcaccaaggaggagaacagcgccttcaagaaccaggaccagcagagaaagagcaacgtgagcagaagcttctaccacggccccagcagactgcccgtgcacagcatcatcgccagcatgggcaccgtggccatcgacctgcaggacaccagctgcagaagcgccagcggccccaccctgagcctgcccaccgagggcagcaaggagatcagaagacccagcatcgcccccgtgctggaggtggccgacaccagcagcatccagacctgcgacctgctgagcgaccagagcgaggacgagaccacccccgacgaggagatgagcagcaacctggagtacgccaagggctaccccccctacagcccctacatcggcagcagccccaccttctgccacctgctgcacgagaaggtgcccttctgctgcctgagactggacaagagctgccagcacaactactacgaggacgccaaggcctacggcttcaagaacaagctgatcatcgtggccgccgagaccgccggcaacggcctgtacaacttcatcgtgcccctgagagcctactacagacccaagaaggagctgaaccccatcgtgctgctgctggacaaccccctggacgacctgctgagatgcggcgtgaccttcgccgccaacatggtggtggtggacaaggagagcaccatgagcgccgaggaggactacatggccgacgccaagaccatcgtgaacgtgcagaccctgttcagactgttcagcagcctgagcatcatcaccgagctgacccaccccgccaacatgagattcatgcagttcagagccaaggactgctacagcctggccctgagcaagctggagaagaaggagagagagagaggcagcaacctggccttcatgttcagactgcccttcgccgccggcagagtgttcagcatcagcatgctggacaccctgctgtaccagagcttcgtgaaggactacatgatcagcatcaccagactgctgctgggcctggacaccacccccggcagcggcttcctgtgcagcatgaagatcaccgccgacgacctgtggatcagaacctacgccagactgtaccagaagctgtgcagcagcaccggcgacgtgcccatcggcatctacagaaccgagagccagaagctgaccaccagcgagagccagatcagcatcagcgtggaggagtgggaggacaccaaggacagcaaggagcagggccaccacagaagcaaccacagaaacagcaccagcagcgaccagagcgaccaccccctgctgagaagaaagagcatgcagtgggccagaagactgagcagaaagggccccaagcacagcggcaagaccgccgagaagatcacccagcagagactgaacctgtacagaagaagcgagagacaggagctggccgagctggtgaagaacagaatgaagcacctgggcctgagcaccgtgggctacgacgagatgaacgaccaccagagcaccctgagctacatcctgatcaaccccagccccgacaccagaatcgagctgaacgacgtggtgtacctgatcagacccgaccccctggcctacctgcccaacagcgagcccagcagaagaaacagcatctgcaacgtgaccggccaggacagcagagaggagacccagctgtag

SEQ ID NO: 94014 - DNA, 1113 bp, synthetic construct
  misc_feature 1..1113: note = Description of Artificial Sequence: Synthetic coding sequence
  source 1..1113: mol_type = other DNA
atgccctacctgcacctggaccaccagaccatcctgagagcctgggccgtgaaggacttcgcccccaactgccccctgtacgtgcagatcctgaagcccgagaacaagttccacatcaagttcgccgaccacgtggtgtgcgaggaggagttcaagtacgccatgctggccctgaactgcatctgccccgccaccagcaccctgatcaccctgctggtgcacaccagcagaggccaggagggccagcagagccccgagcagtggcagaagatgtacggcagatgcagcggcaacgaggtgtaccacatcgtgctggaggagagcaccttcttcgccgagtacgagggcaagagcttcacctacgccagcttccacgcccacaagaagttcggcgtgtgcctgatcggcgtgagaagagaggacaacaagaacatcctgctgaaccccggccccagatacatcatgaacagcaccgacatctgcttctacatcaacatcaccaaggaggagaacagcgccttcaagaaccaggaccagcagagaaagagcaacgtgagcagaagcttctaccacggccccagcagactgcccgtgcacagcatcatcgccagcatgggcaccgtggccatcgacctgcaggacaccagctgcagaagcgccagcggccccaccctgagcctgcccaccgagggcagcaaggagatcagaagacccagcatcgcccccgtgctggaggtggccgacaccagcagcatccagacctgcgacctgctgagcgaccagagcgaggacgagaccacccccgacgaggagatgagcagcaacctggagtacgccaagggctaccccccctacagcccctacatcggcagcagccccaccttctgccacctgctgcacgagaaggtgcccttctgctgcctgagactggacaagagctgccagcacaactactacgaggacgccaaggcctacggcttcaagaacaagctgatcatcgtggccgccgagaccgccggcaacggcctgtacaacttcatcgtgcccctgagagcctactacagacccaagaaggagctgaaccccatcgtgctgctgctggacaacccctag

SEQ ID NO: 94015 - DNA, 1572 bp, synthetic construct
  misc_feature 1..1572: note = Description of Artificial Sequence: Synthetic coding sequence
  source 1..1572: mol_type = other DNA
atcatcaacgacctgcacagagccatccagagaacccagagcgccatgttcaaccaggtgctgatcctgatcagcaccctgctgtgcctgatcttcacctgcatctgcggcatccagcacctggagagaatcggcaagaagctgaacctgttcgacagcctgtacttctgcatcgtgaccttcagcaccgtgggcttcggcgacgtgacccccgagacctggagcagcaagctgttcgtggtggccatgatctgcgtggccctggtggtgctgcccatccagttcgagcagctggcctacctgtggatggagagacagaagagcggcggcaactacagcagacacagagcccagaccgagaagcacgtggtgctgtgcgtgagcagcctgaagatcgacctgctgatggacttcctgaacgagttctacgcccaccccagactgcaggactactacgtggtgatcctgtgccccaccgagatggacgtgcaggtgagaagagtgctgcagatccccatgtggagccagagagtgatctacctgcagggcagcgccctgaaggaccaggacctgctgagagccaagatggacgacgccgaggcctgcttcatcctgagcagcagatgcgaggtggacagaaccagcagcgaccaccagaccatcctgagagcctgggccgtgaaggacttcgcccccaactgccccctgtacgtgcagatcctgaagcccgagaacaagttccacatcaagttcgccgaccacgtggtgtgcgaggaggagttcaagtacgccatgctggccctgaactgcatctgccccgccaccagcaccctgatcaccctgctggtgcacaccagcagaggccaggagggccagcagagccccgagcagtggcagaagatgtacggcagatgcagcggcaacgaggtgtaccacatcgtgctggaggagagcaccttcttcgccgagtacgagggcaagagcttcacctacgccagcttccacgcccacaagaagttcggcgtgtgcctgatcggcgtgagaagagaggacaacaagaacatcctgctgaaccccggccccagatacatcatgaacagcaccgacatctgcttctacatcaacatcaccaaggaggagaacagcgccttcaagaaccaggaccagcagagaaagagcaacgtgagcagaagcttctaccacggccccagcagactgcccgtgcacagcatcatcgccagcatgggcaccgtggccatcgacctgcaggacaccagctgcagaagcgccagcggccccaccctgagcctgcccaccgagggcagcaaggagatcagaagacccagcatcgcccccgtgctggaggtggccgacaccagcagcatccagacctgcgacctgctgagcgaccagagcgaggacgagaccacccccgacgaggagatgagcagcaacctggagtacgccaagggctaccccccctacagcccctacatcggcagcagccccaccttctgccacctgctgcacgagaaggtgcccttctgctgcctgagactggacaagttctag

SEQ ID NO: 94016 - DNA, 1503 bp, synthetic construct
  misc_feature 1..1503: note = Description of Artificial Sequence: Synthetic coding sequence
  source 1..1503: mol_type = other DNA
atgcccagcagcggcagagccctgctggacagccccctggacagcggcagcctgaccagcctggacagcagcgtgttctgcagcgagggcgagggcgagcccctggccctgggcgactgcttcaccgtgaacgtgggcggcagcagattcgtgctgagccagcaggccctgagctgcttcccccacaccagactgggcaagctggccgtggtggtggccagctacagaagacccggcgccctggccgccgtgcccagccccctggagctgtgcgacgacgccaaccccgtggacaacgagtacttcttcgacagaagcagccaggccttcagatacgtgctgcactactacagaaccggcagactgcacgtgatggagcagctgtgcgccctgagcttcctgcaggagatccagtactggggcatcgacgagctgagcatcgacagctgctgcagagacagatacttcagaagaaaggagctgagcgagaccctggacttcaagaaggacaccgaggaccaggagagccagcacgagagcgagcaggacttcagccagggcccctgccccaccgtgagacagaagctgtggaacatcctggagaagcccggcagcagcaccgccgccagaatcttcggcgtgatcagcatcatcttcgtggtggtgagcatcatcaacatggccctgatgagcgccgagctgagctggctggacctgcagctgctggagatcctggagtacgtgtgcatcagctggttcaccggcgagttcgtgctgagattcctgtgcgtgagagacagatgcagattcctgagaaaggtgcccaacatcatcgacctgctggccatcctgcccttctacatcaccctgctggtggagagcctgagcggcagccagaccacccaggagctggagaacgtgggcagaatcgtgcaggtgctgagactgctgagagccctgagaatgctgaagctgggcagacacagcaccggcctgagaagcctgggcatgaccatcacccagtgctacgaggaggtgggcctgctgctgctgttcctgagcgtgggcatcagcatcttcagcaccgtggagtacttcgccgagcagagcatccccgacaccaccttcaccagcgtgccctgcgcctggtggtgggccaccaccagcatgaccaccgtgggctacggcgacatcagacccgacaccaccaccggcaagatcgtggccttcatgtgcatcctgagcggcatcctggtgctggccctgcccatcgccatcatcaacgacagattcagcgcctgctacttcaccctgaagctgaaggaggccgccgtgagacagagagaggccctgaagaagctgaccaagaacatcgccaccgacagctacatcagcgtgaacctgagagacgtgtacgccagaagcatcatggagatgctgagactgaagggcagagagagagccagcaccagaagcagcggcggcgacgacttctggttctag

SEQ ID NO: 94017 - DNA, 1503 bp, synthetic construct; identical to SEQ ID NO: 94016
  misc_feature 1..1503: note = Description of Artificial Sequence: Synthetic coding sequence
  source 1..1503: mol_type = other DNA

SEQ ID NO: 94018 - DNA, 1131 bp, synthetic construct
  misc_feature 1..1131: note = Description of Artificial Sequence: Synthetic coding sequence
  source 1..1131: mol_type = other DNA
atggagcagctgtgcgccctgagcttcctgcaggagatccagtactggggcatcgacgagctgagcatcgacagctgctgcagagacagatacttcagaagaaaggagctgagcgagaccctggacttcaagaaggacaccgaggaccaggagagccagcacgagagcgagcaggacttcagccagggcccctgccccaccgtgagacagaagctgtggaacatcctggagaagcccggcagcagcaccgccgccagaatcttcggcgtgatcagcatcatcttcgtggtggtgagcatcatcaacatggccctgatgagcgccgagctgagctggctggacctgcagctgctggagatcctggagtacgtgtgcatcagctggttcaccggcgagttcgtgctgagattcctgtgcgtgagagacagatgcagattcctgagaaaggtgcccaacatcatcgacctgctggccatcctgcccttctacatcaccctgctggtggagagcctgagcggcagccagaccacccaggagctggagaacgtgggcagaatcgtgcaggtgctgagactgctgagagccctgagaatgctgaagctgggcagacacagcaccggcctgagaagcctgggcatgaccatcacccagtgctacgaggaggtgggcctgctgctgctgttcctgagcgtgggcatcagcatcttcagcaccgtggagtacttcgccgagcagagcatccccgacaccaccttcaccagcgtgccctgcgcctggtggtgggccaccaccagcatgaccaccgtgggctacggcgacatcagacccgacaccaccaccggcaagatcgtggccttcatgtgcatcctgagcggcatcctggtgctggccctgcccatcgccatcatcaacgacagattcagcgcctgctacttcaccctgaagctgaaggaggccgccgtgagacagagagaggccctgaagaagctgaccaagaacatcgccaccgacagctacatcagcgtgaacctgagagacgtgtacgccagaagcatcatggagatgctgagactgaagggcagagagagagccagcaccagaagcagcggcggcgacgacttctggttctag

SEQ ID NO: 94019 - DNA, 1638 bp, synthetic construct
  misc_feature 1..1638: note = Description of Artificial Sequence: Synthetic coding sequence
  source 1..1638: mol_type = other DNA
atgctgaagcagagcgagagaagaagaagctggagctacagaccctggaacaccaccgagaacgagggcagccagcacagaagaagcatctgcagcctgggcgccagaagcggcagccaggccagcatccacggctggaccgagggcaactacaactactacatcgaggaggacgaggacggcgaggaggaggaccagtggaaggacgacctggccgaggaggaccagcaggccggcgaggtgaccaccgccaagcccgagggccccagcgacccccccgccctgctgagcaccctgaacgtgaacgtgggcggccacagctaccagctggactactgcgagctggccggcttccccaagaccagactgggcagactggccaccagcaccagcagaagcagacagctgagcctgtgcgacgactacgaggagcagaccgacgagtacttcttcgacagagaccccgccgtgttccagctggtgtacaacttctacctgagcggcgtgctgctggtgctggacggcctgtgccccagaagattcctggaggagctgggctactggggcgtgagactgaagtacacccccagatgctgcagaatctgcttcgaggagagaagagacgagctgagcgagagactgaagatccagcacgagctgagagcccaggcccaggtggaggaggccgaggagctgttcagagacatgagattctacggcccccagagaagaagactgtggaacctgatggagaagcccttcagcagcgtggccgccaaggccatcggcgtggccagcagcaccttcgtgctggtgagcgtggtggccctggccctgaacaccgtggaggagatgcagcagcacagcggccagggcgagggcggccccgacctgagacccatcctggagcacgtggagatgctgtgcatgggcttcttcaccctggagtacctgctgagactggccagcacccccgacctgagaagattcgccagaagcgccctgaacctggtggacctggtggccatcctgcccctgtacctgcagctgctgctggagtgcttcaccggcgagggccaccagagaggccagaccgtgggcagcgtgggcaaggtgggccaggtgctgagagtgatgagactgatgagaatcttcagaatcctgaagctggccagacacagcaccggcctgagagccttcggcttcaccctgagacagtgctaccagcaggtgggctgcctgctgctgttcatcgccatgggcatcttcaccttcagcgccgccgtgtacagcgtggagcacgacgtgcccagcaccaacttcaccaccatcccccacagctggtggtgggccgccgtgagcatcagcaccgtgggctacggcgacatgtaccccgagacccacctgggcagattcttcgccttcctgtgcatcgccttcggcatcatcctgaacggcatgcccatcagcatcctgtacaacaagttcagcgactactacagcaagctgaaggcctacgagtacaccaccatcagaagagagagaggcgaggtgaacttcatgcagagagccagaaagaagatcgccgagtgcctgctgggcagcaacccccagctgacccccagacaggagaactag

SEQ ID NO: 94020 - DNA, 963 bp, synthetic construct
  misc_feature 1..963: note = Description of Artificial Sequence: Synthetic coding sequence
  source 1..963: mol_type = other DNA
atgctgaagcagagcgagagaagaagaagctggagctacagaccctggaacaccaccgagaacgagggcagccagcacagaagaagcatctgcagcctgggcgccagaagcggcagccaggccagcatccacggctggaccgagggcaactacaactactacatcgaggaggacgaggacggcgaggaggaggaccagtggaaggacgacctggccgaggaggaccagcaggccggcgaggtgaccaccgccaagcccgagggccccagcgacccccccgccctgctgagcaccctgaacgtgaacgtgggcggccacagctaccagctggactactgcgagctggccggcttccccaagaccagactgggcagactggccaccagcaccagcagaagcagacagctgagcctgtgcgacgactacgaggagcagaccgacgagtacttcttcgacagagaccccgccgtgttccagctggtgtacaacttctacctgagcggcgtgctgctggtgctggacggcctgtgccccagaagattcctggaggagctgggctactggggcgtgagactgaagtacacccccagatgctgcagaatctgcttcgaggagagaagagacgagctgagcgagagactgaagatccagcacctgagagccagactgagaggcggcgccggcgcccagcacagaggcggcgacgccgccgccctgggcgccggcagaggcagacccagacccgccgcccaccccggcgccagaggcgacgccgtgcacggcctgctgcacgccagagtgcccgccgcccccagcctgcacgccagacccgaggccctgagagcccagagaccccagcccggcggccccggcggccaccccgccgccctgcccagcgccgccgccagagtgctgcacggcagaggcccccccaccagacccgacggcggccagagaggctag

SEQ ID NO: 94021 - DNA, 1740 bp, synthetic construct
  misc_feature 1..1740: note = Description of Artificial Sequence: Synthetic coding sequence
  source 1..1740: mol_type = other DNA
atgagcagctgcagatacaacggcggcgtgatgagacccctgagcaacctgagcgccagcagaagaaacctgcacgagatggacagcgaggcccagcccctgcagccccccgccagcgtgggcggcggcggcggcgccagcagccccagcgccgccgccgccgccgccgccgccgtgagcagcagcgcccccgagatcgtggtgagcaagcccgagcacaacaacagcaacaacctggccctgtacggcaccggcggcggcggcagcaccggcggcggcggcggcggcggcggcagcggccacggcagcagcagcggcaccaagagcagcaagaagaagaaccagaacatcggctacaagctgggccacagaagagccctgttcgagaagagaaagagactgagcgactacgccctgatcttcggcatgttcggcatcgtggtgatggtgatcgagaccgagctgagctggggcgcctacgacaaggccagcctgtacagcctggccctgaagtgcctgatcagcctgagcaccatcatcctgctgggcctgatcatcgtgtaccacgccagagagatccagctgttcatggtggacaacggcgccgacgactggagaatcgccatgacctacgagagaatcttcttcatctgcctggagatcctggtgtgcgccatccaccccatccccggcaactacaccttcacctggaccgccagactggccttcagctacgcccccagcaccaccaccgccgacgtggacatcatcctgagcatccccatgttcctgagactgtacctgatcgccagagtgatgctgctgcacagcaagctgttcaccgacgccagcagcagaagcatcggcgccctgaacaagatcaacttcaacaccagattcgtgatgaagaccctgatgaccatctgccccggcaccgtgctgctggtgttcagcatcagcctgtggatcatcgccgcctggaccgtgagagcctgcgagagataccacgaccagcaggacgtgaccagcaacttcctgggcgccatgtggctgatcagcatcaccttcctgagcatcggctacggcgacatggtgcccaacacctactgcggcaagggcgtgtgcctgctgaccggcatcatgggcgccggctgcaccgccctggtggtggccgtggtggccagaaagctggagctgaccaaggccgagaagcacgtgcacaacttcatgatggacacccagctgaccaagagagtgaagaacgccgccgccaacgtgctgagagagacctggctgatctacaagaacaccaagctggtgaagaagatcgaccacgccaaggtgagaaagcaccagagaaagttcctgcaggccatccaccagctgagaagcgtgaagatggagcagagaaagctgaacgaccaggccaacaccctggtggacctggccaagacccagaacatcatgtacgacatgatcagcgacctgaacgagagaagcgaggacttcgagaagagaatcgtgaccctggagaccaagctggagaccctgatcggcagcatccacgccctgcccggcctgatcagccagaccatcagacagcagcagagagacttcatcgaggcccagatggagagctacgacaagcacgtgacctacaacgccgagagaagcagaagcagcagcagaagaagaagaagcagcagcaccgccccccccaccagcagcgagagcagctag

SEQ ID NO: 94022 - DNA, 696 bp, synthetic construct
  misc_feature 1..696: note = Description of Artificial Sequence: Synthetic coding sequence
  source 1..696: mol_type = other DNA
atgtggctgatcagcatcaccttcctgagcatcggctacggcgacatggtgcccaacacctactgcggcaagggcgtgtgcctgctgaccggcatcatgggcgccggctgcaccgccctggtggtggccgtggtggccagaaagctggagctgaccaaggccgagaagcacgtgcacaacttcatgatggacacccagctgaccaagagagtgaagaacgccgccgccaacgtgctgagagagacctggctgatctacaagaacaccaagctggtgaagaagatcgaccacgccaaggtgagaaagcaccagagaaagttcctgcaggccatccaccagctgagaagcgtgaagatggagcagagaaagctgaacgaccaggccaacaccctggtggacctggccaagacccagaacatcatgtacgacatgatcagcgacctgaacgagagaagcgaggacttcgagaagagaatcgtgaccctggagaccaagctggagaccctgatcggcagcatccacgccctgcccggcctgatcagccagaccatcagacagcagcagagagacttcatcgaggcccagatggagagctacgacaagcacgtgacctacaacgccgagagaagcagaagcagcagcagaagaagaagaagcagcagcaccgccccccccaccagcagcgagagcagctag

SEQ ID NO: 94023 - DNA, 1326 bp, synthetic construct
  misc_feature 1..1326: note = Description of Artificial Sequence: Synthetic coding sequence
  source 1..1326: mol_type = other DNA
atgagcagctgcagatacaacggcggcgtgatgagacccctgagcaacctgagcgccagcagaagaaacctgcacgagatggacagcgaggcccagcccctgcagccccccgccagcgtgggcggcggcggcggcgccagcagccccagcgccgccgccgccgccgccgccgccgtgagcagcagcgcccccgagatcgtggtgagcaagcccgagcacaacaacagcaacaacctggccctgtacggcaccggcggcggcggcagcaccggcggcggcggcggcggcggcggcagcggccacggcagcagcagcggcaccaagagcagcaagaagaagaaccagaacatcggctacaagctgggccacagaagagccctgttcgagaagagaaagagactgagcgactacgccctgatcttcggcatgttcggcatcgtggtgatggtgatcgagaccgagctgagctggggcgcctacgacaaggccagcctgtacagcctggccctgaagtgcctgatcagcctgagcaccatcatcctgctgggcctgatcatcgtgtaccacgccagagagatccagctgttcatggtggacaacggcgccgacgactggagaatcgccatgacctacgagagaatcttcttcatctgcctggagatcctggtgtgcgccatccaccccatccccggcaactacaccttcacctggaccgccagactggccttcagctacgcccccagcaccaccaccgccgacgtggacatcatcctgagcatccccatgttcctgagactgtacctgatcgccagagtgatgctgctgcacagcaagctgttcaccgacgccagcagcagaagcatcggcgccctgaacaagatcaacttcaacaccagattcgtgatgaagaccctgatgaccatctgccccggcaccgtgctgctggtgttcagcatcagcctgtggatcatcgccgcctggaccgtgagagcctgcgagagataccacgaccagcaggacgtgaccagcaacttcctgggcgccatgtggctgatcagcatcaccttcctgagcatcggctacggcgacatggtgcccaacacctactgcggcaagggcgtgtgcctgctgaccggcatcatgggcgccggctgcaccgccctggtggtggccgtggtggccagaaagctggagctgaccaaggccgagaagcacgtgcacaacttcatgatggacacccagctgaccaagagagtgagctactacccctacatcttcaaggagaacatcatcgtgatcttcagcgtgctgggcaacatggcctag

SEQ ID NO: 94024 - DNA, 2196 bp, synthetic construct
  misc_feature 1..2196: note = Description of Artificial Sequence: Synthetic coding sequence
  source 1..2196: mol_type = other DNA
atggacaccagcggccacttccacgacagcggcgtgggcgacctggacgaggaccccaagtgcccctgccccagcagcggcgacgagcagcagcagcagcagcagcagcagcagcagcagcagccccccccccccgccccccccgccgccccccagcagcccctgggccccagcctgcagccccagcccccccagctgcagcagcagcagcagcagcagcagcagcagcagcagcagcagcccccccaccccctgagccagctggcccagctgcagagccagcccgtgcaccccggcctgctgcacagcagccccaccgccttcagagccccccccagcagcaacagcaccgccatcctgcaccccagcagcagacagggcagccagctgaacctgaacgaccacctgctgggccacagccccagcagcaccgccaccagcggccccggcggcggcagcagacacagacaggccagccccctggtgcacagaagagacagcaaccccttcaccgagatcgccatgagcagctgcaagtacagcggcggcgtgatgaagcccctgagcagactgagcgccagcagaagaaacctgatcgaggccgagaccgagggccagcccctgcagctgttcagccccagcaacccccccgagatcgtgatcagcagcagagaggacaaccacgcccaccagaccctgctgcaccaccccaacgccacccacaaccaccagcacgccggcaccaccgccagcagcaccaccttccccaaggccaacaagagaaagaaccagaacatcggctacaagctgggccacagaagagccctgttcgagaagagaaagagactgagcgactacgccctgatcttcggcatgttcggcatcgtggtgatggtgatcgagaccgagctgagctggggcctgtacagcaaggacagcatgttcagcctggccctgaagtgcctgatcagcctgagcaccatcatcctgctgggcctgatcatcgcctaccacaccagagaggtgcagctgttcgtgatcgacaacggcgccgacgactggagaatcgccatgacctacgagagaatcctgtacatcagcctggagatgctggtgtgcgccatccaccccatccccggcgagtacaagttcttctggaccgccagactggccttcagctacacccccagcagagccgaggccgacgtggacatcatcctgagcatccccatgttcctgagactgtacctgatcgccagagtgatgctgctgcacagcaagctgttcaccgacgccagcagcagaagcatcggcgccctgaacaagatcaacttcaacaccagattcgtgatgaagaccctgatgaccatctgccccggcaccgtgctgctggtgttcagcatcagcctgtggatcatcgccgcctggaccgtgagagtgtgcgagagataccacgaccagcaggacgtgaccagcaacttcctgggcgccatgtggctgatcagcatcaccttcctgagcatcggctacggcgacatggtgccccacacctactgcggcaagggcgtgtgcctgctgaccggcatcatgggcgccggctgcaccgccctggtggtggccgtggtggccagaaagctggagctgaccaaggccgagaagcacgtgcacaacttcatgatggacacccagctgaccaagagaatcaagaacgccgccgccaacgtgctgagagagacctggctgatctacaagcacaccaagctgctgaagaagatcgaccacgccaaggtgagaaagcaccagagaaagttcctgcaggccatccaccagctgagaagcgtgaagatggagcagagaaagctgagcgaccaggccaacaccctggtggacctgagcaagatgcagaacgtgatgtacgacctgatcaccgagctgaacgacagaagcgaggacctggagaagcagatcggcagcctggagagcaagctggagcacctgaccgccagcttcaacagcctgcccctgctgatcgccgacaccctgagacagcagcagcagcagctgctgagcgccatcatcgaggccagaggcgtgagcgtggccgtgggcaccacccacacccccatcagcgacagccccatcggcgtgagcagcaccagcttccccaccccctacaccagcagcagcagctgctag

SEQ ID NO: 94025 - DNA, 1257 bp, synthetic construct
  misc_feature 1..1257: note = Description of Artificial Sequence: Synthetic coding sequence
  source 1..1257: mol_type = other DNA
atgttcagcctggccctgaagtgcctgatcagcctgagcaccatcatcctgctgggcctgatcatcgcctaccacaccagagaggtgcagctgttcgtgatcgacaacggcgccgacgactggagaatcgccatgacctacgagagaatcctgtacatcagcctggagatgctggtgtgcgccatccaccccatccccggcgagtacaagttcttctggaccgccagactggccttcagctacacccccagcagagccgaggccgacgtggacatcatcctgagcatccccatgttcctgagactgtacctgatcgccagagtgatgctgctgcacagcaagctgttcaccgacgccagcagcagaagcatcggcgccctgaacaagatcaacttcaacaccagattcgtgatgaagaccctgatgaccatctgccccggcaccgtgctgctggtgttcagcatcagcctgtggatcatcgccgcctggaccgtgagagtgtgcgagagataccacgaccagcaggacgtgaccagcaacttcctgggcgccatgtggctgatcagcatcaccttcctgagcatcggctacggcgacatggtgccccacacctactgcggcaagggcgtgtgcctgctgaccggcatcatgggcgccggctgcaccgccctggtggtggccgtggtggccagaaagctggagctgaccaaggccgagaagcacgtgcacaacttcatgatggacacccagctgaccaagagaatcaagaacgccgccgccaacgtgctgagagagacctggctgatctacaagcacaccaagctgctgaagaagatcgaccacgccaaggtgagaaagcaccagagaaagttcctgcaggccatccaccagctgagaagcgtgaagatggagcagagaaagctgagcgaccaggccaacaccctggtggacctgagcaagatgcagaacgtgatgtacgacctgatcaccgagctgaacgacagaagcgaggacctggagaagcagatcggcagcctggagagcaagctggagcacctgaccgccagcttcaacagcctgcccctgctgatcgccgacaccctgagacagcagcagcagcagctgctgagcgccatcatcgaggccagaggcgtgagcgtggccgtgggcaccacccacacccccatcagcgacagccccatcggcgtgagcagcaccagcttccccaccccctacaccagcagcagcagctgctag

SEQ ID NO: 94026 - DNA, 1281 bp, synthetic construct
  misc_feature 1..1281: note = Description of Artificial Sequence: Synthetic coding sequence
  source 1..1281: mol_type = other DNA
atggagagacccatcaaggacagcatgttcagcctggccctgaagtgcctgatcagcctgagcaccatcatcctgctgggcctgatcatcgcctaccacaccagagaggtgcagctgttcgtgatcgacaacggcgccgacgactggagaatcgccatgacctacgagagaatcctgtacatcagcctggagatgctggtgtgcgccatccaccccatccccggcgagtacaagttcttctggaccgccagactggccttcagctacacccccagcagagccgaggccgacgtggacatcatcctgagcatccccatgttcctgagactgtacctgatcgccagagtgatgctgctgcacagcaagctgttcaccgacgccagcagcagaagcatcggcgccctgaacaagatcaacttcaacaccagattcgtgatgaagaccctgatgaccatctgccccggcaccgtgctgctggtgttcagcatcagcctgtggatcatcgccgcctggaccgtgagagtgtgcgagagataccacgaccagcaggacgtgaccagcaacttcctgggcgccatgtggctgatcagcatcaccttcctgagcatcggctacggcgacatggtgccccacacctactgcggcaagggcgtgtgcctgctgaccggcatcatgggcgccggctgcaccgccctggtggtggccgtggtggccagaaagctggagctgaccaaggccgagaagcacgtgcacaacttcatgatggacacccagctgaccaagagaatcaagaacgccgccgccaacgtgctgagagagacctggctgatctacaagcacaccaagctgctgaagaagatcgaccacgccaaggtgagaaagcaccagagaaagttcctgcaggccatccaccagctgagaagcgtgaagatggagcagagaaagctgagcgaccaggccaacaccctggtggacctgagcaagatgcagaacgtgatgtacgacctgatcaccgagctgaacgacagaagcgaggacctggagaagcagatcggcagcctggagagcaagctggagcacctgaccgccagcttcaacagcctgcccctgctgatcgccgacaccctgagacagcagcagcagcagctgctgagcgccatcatcgaggccagaggcgtgagcgtggccgtgggcaccacccacacccccatcagcgacagccccatcggcgtgagcagcaccagcttccccaccccctacaccagcagcagcagctgctag

SEQ ID NO: 94027 - DNA, 684 bp, synthetic construct
  misc_feature 1..684: note = Description of Artificial Sequence: Synthetic coding sequence
  source 1..684: mol_type = other DNA
ccccacaccctgctggaggaccacctgctgagagagttcttccaccccctgttcttcctgcaggcccccctgctgctgagcctgcccgcccagtacaacgccttcctgagcggcagcgtgtggacccccggcagccccagagagcccaagcaggccaaggagagaaccggcgccaagatcctggtgggcgagatcggctgcctggccttcttcgaggacatcttcggcgccagagtggccctgggctggggcctggtgctgcagggcatccagcccggccccaagatggacaccagcggccacttccacgacagcggcgtgggcgacctggacgaggaccccaagtgcccctgccccagcagcggcgacgagcagcagcagcagcagcagcagcagcagcagcagcagccccccccccccgccccccccgccgccccccagcagcccctgggccccagcctgcagccccagcccccccagctgcagcagcagcagcagcagcagcagcagcagcagcagcagcagcccccccaccccctgagccagctggcccagctgcagagccagcccgtgcaccccggcctgctgcacagcagccccaccgccttcagaccccccttcgtgcagctgcacagacaccccccccccttcctgcaggccagacagcccgcccagagccagtag

SEQ ID NO: 94028 - DNA, 1284 bp, synthetic construct
  misc_feature 1..1284: note = Description of Artificial Sequence: Synthetic coding sequence
  source 1..1284: mol_type = other DNA
atgggcggcgacctggtgctgggcctgggcgccctgagaagaagaaagagactgctggagcaggagaagagcctggccggctgggccctggtgctggccggcaccggcatcggcctgatggtgctgcacgccgagatgctgtggttcggcggctgcagctgggccctgtacctgttcctggtgaagtgcaccatcagcatcagcaccttcctgctgctgtgcctgatcgtggccttccacgccaaggaggtgcagctgttcatgaccgacaacggcctgagagactggagagtggccctgaccggcagacaggccgcccagatcgtgctggagctggtggtgtgcggcctgcaccccgcccccgtgagaggccccccctgcgtgcaggacctgggcgcccccctgaccagcccccagccctggcccggcttcctgggccagggcgaggccctgctgagcctggccatgctgctgagactgtacctggtgcccagagccgtgctgctgagaagcggcgtgctgctgaacgccagctacagaagcatcggcgccctgaaccaggtgagattcagacactggttcgtggccaagctgtacatgaacacccaccccggcagactgctgctgggcctgaccctgggcctgtggctgaccaccgcctgggtgctgagcgtggccgagagacaggccgtgaacgccaccggccacctgagcgacaccctgtggctgatccccatcaccttcctgaccatcggctacggcgacgtggtgcccggcaccatgtggggcaagatcgtgtgcctgtgcaccggcgtgatgggcgtgtgctgcaccgccctgctggtggccgtggtggccagaaagctggagttcaacaaggccgagaagcacgtgcacaacttcatgatggacatccagtacaccaaggagatgaaggagagcgccgccagagtgctgcaggaggcctggatgttctacaagcacaccagaagaaaggagagccacgccgccagaagacaccagagaaagctgctggccgccatcaacgccttcagacaggtgagactgaagcacagaaagctgagagagcaggtgaacagcatggtggacatcagcaagatgcacatgatcctgtacgacctgcagcagaacctgagcagcagccacagagccctggagaagcagatcgacaccctggccggcaagctggacgccctgaccgagctgctgagcaccgccctgggccccagacagctgcccgagcccagccagcagagcaagtag

SEQ ID NO: 94029 - DNA, 888 bp, synthetic construct
  misc_feature 1..888: note = Description of Artificial Sequence: Synthetic coding sequence
  source 1..888: mol_type = other DNA
atgcacgaccagcacttccacctgctgacccccctgccccacagaggcctgagctgccagagaggccccgccgtgcacgacagacagagagccgccggcctggccagaggcgccgacagagccgccggcaacgccagctacagaagcatcggcgccctgaaccaggtgagattcagacactggttcgtggccaagctgtacatgaacacccaccccggcagactgctgctgggcctgaccctgggcctgtggctgaccaccgcctgggtgctgagcgtggccgagagacaggccgtgaacgccaccggccacctgagcgacaccctgtggctgatccccatcaccttcctgaccatcggctacggcgacgtggtgcccggcaccatgtggggcaagatcgtgtgcctgtgcaccggcgtgatgggcgtgtgctgcaccgccctgctggtggccgtggtggccagaaagctggagttcaacaaggccgagaagcacgtgcacaacttcatgatggacatccagtacaccaaggagatgaaggagagcgccgccagagtgctgcaggaggcctggatgttctacaagcacaccagaagaaaggagagccacgccgccagaagacaccagagaaagctgctggccgccatcaacgccttcagacaggtgagactgaagcacagaaagctgagagagcaggtgaacagcatggtggacatcagcaagatgcacatgatcctgtacgacctgcagcagaacctgagcagcagccacagagccctggagaagcagatcgacaccctggccggcaagctggacgccctgaccgagctgctgagcaccgccctgggccccagacagctgcccgagcccagccagcagagcaagtag

SEQ ID NO: 94030 - DNA, 1119 bp, synthetic construct
  misc_feature 1..1119: note = Description of Artificial Sequence: Synthetic coding sequence
  source 1..1119: mol_type = other DNA
atgttcaagcacctgagaaagtgggtggtgaccagattcttcggccacagcagacagagagccagactggtgagcaaggacggcagatgcaacatcgagttcggcaacgtggaggcccagagcagattcatcttcttcgtggacatctggaccaccgtgctggacctgaagtggagatacaagatgaccatcttcatcaccgccttcctgggcagctggttcttcttcggcctgctgtggtacgccgtggcctacatccacaaggacctgcccgagttccaccccagcgccaaccacaccccctgcgtggagaacatcaacggcctgaccagcgccttcctgttcagcctggagacccaggtgaccatcggctacggcttcagatgcgtgaccgagcagtgcgccaccgccatcttcctgctgatcttccagagcatcctgggcgtgatcatcaacagcttcatgtgcggcgccatcctggccaagatcagcagacccaagaagagagccaagaccatcaccttcagcaagaacgccgtgatcagcaagagaggcggcaagctgtgcctgctgatcagagtggccaacctgagaaagagcctgctgatcggcagccacatctacggcaagctgctgaagaccaccgtgacccccgagggcgagaccatcatcctggaccagatcaacatcaacttcgtggtggacgccggcaacgagaacctgttcttcatcagccccctgaccatctaccacgtgatcgaccacaacagccccttcttccacatggccgccgagaccctgctgcagcaggacttcgagctggtggtgttcctggacggcaccgtggagagcaccagcgccacctgccaggtgagaaccagctacgtgcccgaggaggtgctgtggggctacagattcgcccccatcgtgagcaagaccaaggagggcaagtacagagtggacttccacaacttcagcaagaccgtggaggtggagaccccccactgcgccatgtgcctgtacaacgagaaggacgtgagagccagaatgaagagaggctacgacaaccccaacttcatcctgagcgaggtgaacgagaccgacgacaccaagatgtag

SEQ ID NO: 94031 - DNA, 1119 bp, synthetic construct; identical to SEQ ID NO: 94030
  misc_feature 1..1119: note = Description of Artificial Sequence: Synthetic coding sequence
  source 1..1119: mol_type = other DNA

SEQ ID NO: 94032 - DNA, 912 bp, synthetic construct
  misc_feature 1..912: note = Description of Artificial Sequence: Synthetic coding sequence
  source 1..912: mol_type = other DNA
atggcctggtggctgatcgccttcgcccacggcgacctggcccccagcgagggcaccgccgagccctgcgtgaccagcatccacagcttcagcagcgccttcctgttcagcatcgaggtgcaggtgaccatcggcttcggcggcagaatggtgaccgaggagtgccccctggccatcctgatcctgatcgtgcagaacatcgtgggcctgatgatcaacgccatcatgctgggctgcatcttcatgaagaccgcccaggcccacagaagagccgagaccctgatcttcagcaagcacgccgtgatcgccctgagacacggcagactgtgcttcatgctgagagtgggcgacctgagaaagagcatgatcatcagcgccaccatccacatgcaggtggtgagaaagaccaccagccccgagggcgaggtggtgcccctgcaccaggtggacatccccatggagaacggcgtgggcggcaacagcatcttcctggtggcccccctgatcatctaccacgtgatcgacgccaacagccccctgtacgacctggcccccagcgacctgcaccaccaccaggacctggagatcatcgtgatcctggagggcgtggtggagaccaccggcatcaccacccaggccagaaccagctacctggccgacgagatcctgtggggccagagattcgtgcccatcgtggccgaggaggacggcagatacagcgtggactacagcaagttcggcaacaccgtgaaggtgcccacccccctgtgcaccgccagacagctggacgaggaccacagcctgctggaggccctgaccctggccagcgccagaggccccctgagaaagagaagcgtgcccatggccaaggccaagcccaagttcagcatcagccccgacagcctgagctag

SEQ ID NO: 94033 - DNA, 1302 bp, synthetic construct
  misc_feature 1..1302: note = Description of Artificial Sequence: Synthetic coding sequence
  source 1..1302: mol_type = other DNA
atgaccgccgccagcagagccaacccctacagcatcgtgagcagcgaggaggacggcctgcacctggtgaccatgagcggcgccaacggcttcggcaacggcaaggtgcacaccagaagaagatgcagaaacagattcgtgaagaagaacggccagtgcaacatcgagttcgccaacatggacgagaagagccagagatacctggccgacatgttcaccacctgcgtggacatcagatggagatacatgctgctgatcttcagcctggccttcctggccagctggctgctgttcggcatcatcttctgggtgatcgccgtggcccacggcgacctggagcccgccgagggcagaggcagaaccccctgcgtgatgcaggtgcacggcttcatggccgccttcctgttcagcatcgagacccagaccaccatcggctacggcctgagatgcgtgaccgaggagtgccccgtggccgtgttcatggtggtggcccagagcatcgtgggctgcatcatcgacagcttcatgatcggcgccatcatggccaagatggccagacccaagaagagagcccagaccctgctgttcagccacaacgccgtggtggccctgagagacggcaagctgtgcctgatgtggagagtgggcaacctgagaaagagccacatcgtggaggcccacgtgagagcccagctgatcaagcccagagtgaccgaggagggcgagtacatccccctggaccagatcgacatcgacgtgggcttcgacaagggcctggacagaatcttcctggtgagccccatcaccatcctgcacgagatcgacgaggccagccccctgttcggcatcagcagacaggacctggagaccgacgacttcgagatcgtggtgatcctggagggcatggtggaggccaccgccatgaccacccaggccagaagcagctacctggccaacgagatcctgtggggccacagattcgagcccgtgctgttcgaggagaagaaccagtacaagatcgactacagccacttccacaagacctacgaggtgcccagcacccccagatgcagcgccaaggacctggtggagaacaagttcctgctgcccagcgccaacagcttctgctacgagaacgagctggccttcctgagcagagacgaggaggacgaggccgacggcgaccaggacggcagaagcagagacggcctgagcccccaggccagacacgacttcgacagactgcaggccggcggcggcgtgctggagcagagaccctacagaagagagagcgagatctag

SEQ ID NO: 94034 - DNA, 1257 bp, synthetic construct
  misc_feature 1..1257: note = Description of Artificial Sequence: Synthetic coding sequence
  source 1..1257: mol_type = other DNA
atgagctactacggcagcagctaccacatcatcaacgccgacgccaagtaccccggctacccccccgagcacatcatcgccgagaagagaagagccagaagaagactgctgcacaaggacggcagctgcaacgtgtacttcaagcacatcttcggcgagtggggcagctacgtggtggacatcttcaccaccctggtggacaccaagtggagacacatgttcgtgatcttcagcctgagctacatcctgagctggctgatcttcggcagcgtgttctggctgatcgccttccaccacggcgacctgctgaacgaccccgacatcaccccctgcgtggacaacgtgcacagcttcaccggcgccttcctgttcagcctggagacccagaccaccatcggctacggctacagatgcgtgaccgaggagtgcagcgtggccgtgctgatggtgatcctgcagagcatcctgagctgcatcatcaacaccttcatcatcggcgccgccctggccaagatggccaccgccagaaagagagcccagaccatcagattcagctacttcgccctgatcggcatgagagacggcaagctgtgcctgatgtggagaatcggcgacttcagacccaaccacgtggtggagggcaccgtgagagcccagctgctgagatacaccgaggacagcgagggcagaatgaccatggccttcaaggacctgaagctggtgaacgaccagatcatcctggtgacccccgtgaccatcgtgcacgagatcgaccacgagagccccctgtacgccctggacagaaaggccgtggccaaggacaacttcgagatcctggtgaccttcatctacaccggcgacagcaccggcaccagccaccagagcagaagcagctacgtgcccagagagatcctgtggggccacagattcaacgacgtgctggaggtgaagagaaagtactacaaggtgaactgcctgcagttcgagggcagcgtggaggtgtacgcccccttctgcagcgccaagcagctggactggaaggaccagcagctgcacatcgagaaggccccccccgtgagagagagctgcaccagcgacaccaaggccagaagaagaagcttcagcgccgtggccatcgtgagcagctgcgagaaccccgaggagaccaccaccagcgccacccacgagtacagagagaccccctaccagaaggccctgctgaccctgaacagaatcagcgtggagagccagatgtag

SEQ ID NO: 94035 - DNA, 1119 bp, synthetic construct; identical to SEQ ID NO: 94030
  misc_feature 1..1119: note = Description of Artificial Sequence: Synthetic coding sequence
  source 1..1119: mol_type = other DNA

SEQ ID NO: 94036 - DNA, 1176 bp, synthetic construct
  misc_feature 1..1176: note = Description of Artificial Sequence: Synthetic coding sequence
  source 1..1176: mol_type = other DNA
atgaacgccagcagcagaaacgtgttcgacaccctgatcagagtgctgaccgagagcatgttcaagcacctgagaaagtgggtggtgaccagattcttcggccacagcagacagagagccagactggtgagcaaggacggcagatgcaacatcgagttcggcaacgtggaggcccagagcagattcatcttcttcgtggacatctggaccaccgtgctggacctgaagtggagatacaagatgaccatcttcatcaccgccttcctgggcagctggttcttcttcggcctgctgtggtacgccgtggcctacatccacaaggacctgcccgagttccaccccagcgccaaccacaccccctgcgtggagaacatcaacggcctgaccagcgccttcctgttcagcctggagacccaggtgaccatcggctacggcttcagatgcgtgaccgagcagtgcgccaccgccatcttcctgctgatcttccagagcatcctgggcgtgatcatcaacagcttcatgtgcggcgccatcctggccaagatcagcagacccaagaagagagccaagaccatcaccttcagcaagaacgccgtgatcagcaagagaggcggcaagctgtgcctgctgatcagagtggccaacctgagaaagagcctgctgatcggcagccacatctacggcaagctgctgaagaccaccgtgacccccgagggcgagaccatcatcctggaccagatcaacatcaacttcgtggtggacgccggcaacgagaacctgttcttcatcagccccctgaccatctaccacgtgatcgaccacaacagccccttcttccacatggccgccgagaccctgctgcagcaggacttcgagctggtggtgttcctggacggcaccgtggagagcaccagcgccacctgccaggtgagaaccagctacgtgcccgaggaggtgctgtggggctacagattcgcccccatcgtgagcaagaccaaggagggcaagtacagagtggacttccacaacttcagcaagaccgtggaggtggagaccccccactgcgccatgtgcctgtacaacgagaaggacgtgagagccagaatgaagagaggctacgacaaccccaacttcatcctgagcgaggtgaacgagaccgacgacaccaagatgtag

SEQ ID NO: 94037 - DNA, 1119 bp, synthetic construct; identical to SEQ ID NO: 94030
  misc_feature 1..1119: note = Description of Artificial Sequence: Synthetic coding sequence
  source 1..1119: mol_type = other DNA

SEQ ID NO: 94038 - DNA, 1140 bp, synthetic construct
  misc_feature 1..1140: note = Description of Artificial Sequence: Synthetic coding sequence
  source 1..1140: mol_type = other DNA
atgaccagcgtggccaaggtgtactacagccagaccacccagaccgagagcagacccctgatgggccccggcatcagaagaagaagagtgctgaccaaggacggcagaagcaacgtgagaatggagcacatcgccgacaagagattcctgtacctgaaggacctgtggaccaccttcatcgacatgcagtggagatacaagctgctgctgttcagcgccaccttcgccggcacctggttcctgttcggcgtggtgtggtacctggtggccgtggcccacggcgacctgctggagctggacccccccgccaaccacaccccctgcgtggtgcaggtgcacaccctgaccggcgccttcctgttcagcctggagagccagaccaccatcggctacggcttcagatacatcagcgaggagtgccccctggccatcgtgctgctgatcgcccagctggtgctgaccaccatcctggagatcttcatcaccggcaccttcctggccaagatcgccagacccaagaagagagccgagaccatcagattcagccagcacgccgtggtggccagccacaacggcaagccctgcctgatgatcagagtggccaacatgagaaagagcctgctgatcggctgccaggtgaccggcaagctgctgcagacccaccagaccaaggagggcgagaacatcagactgaaccaggtgaacgtgaccttccaggtggacaccgccagcgacagccccttcctgatcctgcccctgaccttctaccacgtggtggacgagaccagccccctgaaggacctgcccctgagaagcggcgagggcgacttcgagctggtgctgatcctgagcggcaccgtggagagcaccagcgccacctgccaggtgagaaccagctacctgcccgaggagatcctgtggggctacgagttcacccccgccatcagcctgagcgccagcggcaagtacatcgccgacttcagcctgttcgaccaggtggtgaaggtggccagccccagcggcctgagagacagcaccgtgagatacggcgaccccgagaagctgaagctggaggagagcctgagagagcaggccgagaaggagggcagcgccctgagcgtgagaatcagcaacgtgtag

SEQ ID NO: 94039 - DNA, 1173 bp, synthetic construct
  misc_feature 1..1173: note = Description of Artificial Sequence: Synthetic coding sequence
  source 1..1173: mol_type = other DNA
atgctgagcagaaagggcatcatccccgaggagtacgtgctgaccagactggccgaggaccccgccaagcccagatacagagccagacagagaagagccagattcgtgagcaagaagggcaactgcaacgtggcccacaagaacatcagagagcagggcagattcctgcaggacgtgttcaccaccctggtggacctgaagtggccccacaccctgctgatcttcaccatgagcttcctgtgcagctggctgctgttcgccatggcctggtggctgatcgccttcgcccacggcgacctggcccccagcgagggcaccgccgagccctgcgtgaccagcatccacagcttcagcagcgccttcctgttcagcatcgaggtgcaggtgaccatcggcttcggcggcagaatggtgaccgaggagtgccccctggccatcctgatcctgatcgtgcagaacatcgtgggcctgatgatcaacgccatcatgctgggctgcatcttcatgaagaccgcccaggcccacagaagagccgagaccctgatcttcagcaagcacgccgtgatcgccctgagacacggcagactgtgcttcatgctgagagtgggcgacctgagaaagagcatgatcatcagcgccaccatccacatgcaggtggtgagaaagaccaccagccccgagggcgaggtggtgcccctgcaccaggtggacatccccatggagaacggcgtgggcggcaacagcatcttcctggtggcccccctgatcatctaccacgtgatcgacgccaacagccccctgtacgacctggcccccagcgacctgcaccaccaccaggacctggagatcatcgtgatcctggagggcgtggtggagaccaccggcatcaccacccaggccagaaccagctacctggccgacgagatcctgtggggccagagattcgtgcccatcgtggccgaggaggacggcagatacagcgtggactacagcaagttcggcaacaccgtgaaggtgcccacccccctgtgcaccgccagacagctggacgaggaccacagcctgctggaggccctgaccctggccagcgccagaggccccctgagaaagagaagcgtgcccatggccaaggccaagcccaagttcagcatcagccccgacagcctgagctag

SEQ ID NO: 94040 - DNA, 1302 bp, synthetic construct; identical to SEQ ID NO: 94033
  misc_feature 1..1302: note = Description of Artificial Sequence: Synthetic coding sequence
  source 1..1302: mol_type = other DNA

SEQ ID NO: 94041 - DNA, 819 bp, synthetic construct
  misc_feature 1..819: note = Description of Artificial Sequence: Synthetic coding sequence
  source 1..819: mol_type = other DNA
atggtgctgctgaccgccgtgctgctgctgctggccgcctacgccggccccgcccagagcctgggcagcttcgtgcactgcgagccctgcgacgagaaggccctgagcatgtgcccccccagccccctgggctgcgagctggtgaaggagcccggctgcggctgctgcatgacctgcgccctggccgagggccagagctgcggcgtgtacaccgagagatgcgcccagggcctgagatgcctgcccagacaggacgaggagaagcccctgcacgccctgctgcacggcagaggcgtgtgcctgaacgagaagagctacagagagcaggtgaagatcgagagagacagcagagagcacgaggagcccaccaccagcgagatggccgaggagacctacagccccaagatcttcagacccaagcacaccagaatcagcgagctgaaggccgaggccgtgaagaaggacagaagaaagaagctgacccagagcaagttcgtgggcggcgccgagaacaccgcccaccccagaatcatcagcgcccccgagatgagacaggagagcgagcagggcccctgcagaagacacatggaggccagcctgcaggagctgaaggccagccccagaatggtgcccagagccgtgtacctgcccaactgcgacagaaagggcttctacaagagaaagcagtgcaagcccagcagaggcagaaagagaggcatctgctggtgcgtggacaagtacggcatgaagctgcccggcatggagtacgtggacggcgacttccagtgccacaccttcgacagcagcaacgtggagtag

SEQ ID NO: 94042 - DNA, 285 bp, synthetic construct
  misc_feature 1..285: note = Description of Artificial Sequence: Synthetic coding sequence
  source 1..285: mol_type = other DNA
atggacagcagcaactgcaaggtgatcgcccccctgctgagccagagatacagaagaatggtgaccaaggacggccacagcaccctgcagatggacggcgcccagagaggcctggcctacctgagagacgcctggggcatcctgatggacatgagatggagatggatgatgctggtgttcagcgccagcttcgtggtgcactggctggtgttcgccgtgctgtggtgcttctgcggcgaggactgccccgccaagaagagcagcttcttcaacagcctgtactag

SEQ ID NO: 94043 - DNA, 1083 bp, synthetic construct; identical to SEQ ID NO: 82685
  misc_feature 1..1083: note = Description of Artificial Sequence: Synthetic coding sequence
  source 1..1083: mol_type = other DNA

SEQ ID NO: 94044 - DNA, 1128 bp, synthetic construct
  misc_feature 1..1128: note = Description of Artificial Sequence: Synthetic coding sequence
  source 1..1128: mol_type = other DNA
atggacgccatccacatcggcatgagcagcacccccctggtgaagcacaccgccggcgccggcctgaaggccaacagacccagagtgatgagcaagagcggccacagcaacgtgagaatcgacaaggtggacggcatctacctgctgtacctgcaggacctgtggaccaccgtgatcgacatgaagtggagatacaagctgaccctgttcgccgccaccttcgtgatgacctggttcctgttcggcgtgatctactacgccatcgccttcatccacggcgacctggagcccggcgagcccatcagcaaccacaccccctgcatcatgaaggtggacagcctgaccggcgccttcctgttcagcctggagagccagaccaccatcggctacggcgtgagaagcatcaccgaggagtgcccccacgccatcttcctgctggtggcccagctggtgatcaccaccctgatcgagatcttcatcaccggcaccttcctggccaagatcgccagacccaagaagagagccgagaccatcaagttcagccactgcgccgtgatcaccaagcagaacggcaagctgtgcctggtgatccaggtggccaacatgagaaagagcctgctgatccagtgccagctgagcggcaagctgctgcagacccacgtgaccaaggagggcgagagaatcctgctgaaccaggccaccgtgaagttccacgtggacagcagcagcgagagccccttcctgatcctgcccatgaccttctaccacgtgctggacgagaccagccccctgagagacctgaccccccagaacctgaaggagaaggagttcgagctggtggtgctgctgaacgccaccgtggagagcaccagcgccgtgtgccagagcagaaccagctacatccccgaggagatctactggggcttcgagttcgtgcccgtggtgagcctgagcaagaacggcaagtacgtggccgacttcagccagttcgagcagatcagaaagagccccgactgcaccttctactgcgccgacagcgagaagcagcagctggaggagaagtacagacaggaggaccagagagagagagagctgagaaccctgctgctgcagcagagcaacgtgtag

SEQ ID NO: 94045 - DNA, 186 bp, synthetic construct
  misc_feature 1..186: note = Description of Artificial Sequence: Synthetic coding sequence
  source 1..186: mol_type = other DNA
atggacgccatccacatcggcatgagcagcacccccctggtgaagcacaccgccggcgccggcctgaaggccaacagacccagagtgatgagcaagagcggccacagcaacgtgagaatcgacaaggtggacggcatctacctgctgtacctgcaggacctgtggaccaccgtgatcgacatgtag

SEQ ID NO: 94046 - DNA, 471 bp, synthetic construct
  misc_feature 1..471: note = Description of Artificial Sequence: Synthetic coding sequence
  source 1..471: mol_type = other DNA
atggacgccatccacatcggcatgagcagcacccccctggtgaagcacaccgccggcgccggcctgaaggccaacagacccagagtgatgagcaagagcggccacagcaacgtgagaatcgacaaggtggacggcatctacctgctgtacctgcaggacctgtggaccaccgtgatcgacatgaagtggagatacaagctgaccctgttcgccgccaccttcgtgatgacctggttcctgttcggcgtgatctactacgccatcgccttcatccacggcgacctggagcccggcgagcccatcagcaaccacaccccctgcatcatgaaggtggacagcctgaccggcgccttcctgttcagcctggagagccagaccaccatcggctacggcgtgagaagcatcaccgaggagtgcccccacgccatcttcctgctggtggcccagctggtgatcaccaccctgatctag

SEQ ID NO: 94047 - DNA, 471 bp, synthetic construct; identical to SEQ ID NO: 94046
  misc_feature 1..471: note = Description of Artificial Sequence: Synthetic coding sequence
  source 1..471: mol_type = other DNA

SEQ ID NO: 94048 - DNA, 1128 bp, synthetic construct; identical to SEQ ID NO: 94044
  misc_feature 1..1128: note = Description of Artificial Sequence: Synthetic coding sequence
  source 1..1128: mol_type = other DNA

SEQ ID NO: 94049 - DNA, 1128 bp, synthetic construct; identical to SEQ ID NO: 94044
  misc_feature 1..1128: note = Description of Artificial Sequence: Synthetic coding sequence
  source 1..1128: mol_type = other DNA

SEQ ID NO: 94050 - DNA, 1128 bp, synthetic construct; identical to SEQ ID NO: 94044
  misc_feature 1..1128: note = Description of Artificial Sequence: Synthetic coding sequence
  source 1..1128: mol_type = other DNA

SEQ ID NO: 94051 - DNA, 1128 bp, synthetic construct; identical to SEQ ID NO: 94044
  misc_feature 1..1128: note = Description of Artificial Sequence: Synthetic coding sequence
  source 1..1128: mol_type = other DNA

SEQ ID NO: 94052 - DNA, 60 bp, synthetic construct
  misc_feature 1..60: note = Description of Artificial Sequence: Synthetic coding sequence
  source 1..60: mol_type = other DNA
atggacgccatccacatcggcatgagcagcacccccctggtgaagcacaccgccggctag

SEQ ID NO: 94053 - DNA, 420 bp, synthetic construct
  misc_feature 1..420: note = Description of Artificial Sequence: Synthetic coding sequence
  source 1..420: mol_type = other DNA
atggacgccatccacatcggcatgagcagcacccccctggtgaagcacaccgccggcgccggcctgaaggccaacagacccagagtgatgagcaagagcggccacagcaacgtgagaatcgacaaggtggacggcatctacctgctgtacctgcaggacctgtggaccaccgtgatcgacatgaagtggagatacaagctgaccctgttcgccgccaccttcgtgatgacctggttcctgttcggcgtgatctactacgccatcgccttcatccacggcgacctggagcccggcgagcccatcagcaaccacaccccctgcatcatgaaggtggacagcctgaccggcgccttcctgttcagcctggagagccagaccaccatcggctacggcgtgagaagcatcaccgaggagtgctag

SEQ ID NO: 94054 - DNA, 738 bp, synthetic construct
  misc_feature 1..738: note = Description of Artificial Sequence: Synthetic coding sequence
  source 1..738: mol_type = other DNA
atggacgccatccacatcggcatgagcagcacccccctggtgaagcacaccgccggcgccggcctgaaggccaacagacccagagtgatgagcaagagcggccacagcaacgtgagaatcgacaaggtggacggcatctacctgctgtacctgcaggacctgtggaccaccgtgatcgacatgaagtggagatacaagctgaccctgttcgccgccaccttcgtgatgacctggttcctgttcggcgtgatctactacgccatcgccttcatccacggcgacctggagcccggcgagcccatcagcaaccacaccccctgcatcatgaaggtggacagcctgaccggcgccttcctgttcagcctggagagccagaccaccatcggctacggcgtgagaagcatcaccgaggagtgcccccacgccatcttcctgctggtggcccagctggtgatcaccaccctgatcgagatcttcatcaccggcaccttcctggccaagatcgccagacccaagaagagagccgagaccatcaagttcagccactgcgccgtgatcaccaagcagaacggcaagctgtgcctggtgatccaggtggccaacatgagaaagagcctgctgatccagtgccagctgagcggcaagctgctgcagacccacgtgaccaaggagggcgagagaatcctgctgaaccaggccaccgtgaagttccacgtggacagcagcagcgagagctag

SEQ ID NO: 94055 - DNA, 120 bp, synthetic construct
  misc_feature 1..120: note = Description of Artificial Sequence: Synthetic coding sequence
  source 1..120: mol_type = other DNA
atggacgccatccacatcggcatgagcagcacccccctggtgaagcacaccgccggcgccggcctgaaggccaacagacccagagtgatgagcaagagcggccacagcaacgtgagatag

SEQ ID NO: 94056 - DNA, 147 bp, synthetic construct
  misc_feature 1..147: note = Description of Artificial Sequence: Synthetic coding sequence
  source 1..147: mol_type = other DNA
atggacgccatccacatcggcatgagcagcacccccctggtgaagcacaccgccggcgccggcctgaaggccaacagacccagagtgatgagcaagagcggccacagcaacgtgagaatcgacaaggtggacggcatctacctgtag

SEQ ID NO: 94057 - DNA, 147 bp, synthetic construct; identical to SEQ ID NO: 94056
  misc_feature 1..147: note = Description of Artificial Sequence: Synthetic coding sequence
  source 1..147: mol_type = other DNA

SEQ ID NO: 94058 - DNA, 147 bp, synthetic construct; identical to SEQ ID NO: 94056
  misc_feature 1..147: note = Description of Artificial Sequence: Synthetic coding sequence
  source 1..147: mol_type = other DNA

SEQ ID NO: 94059 - DNA, 78 bp, synthetic construct
  misc_feature 1..78: note = Description of Artificial Sequence: Synthetic coding sequence
  source 1..78: mol_type = other DNA
atggacgccatccacatcggcatgagcagcacccccctggtgaagcacaccgccggcgccggcctgaaggccaactag

SEQ ID NO: 94060 - DNA, 147 bp, synthetic construct; identical to SEQ ID NO: 94056
  misc_feature 1..147: note = Description of Artificial Sequence: Synthetic coding sequence
  source 1..147: mol_type = other DNA

SEQ ID NO: 94061 - DNA, 147 bp, synthetic construct; identical to SEQ ID NO: 94056
  misc_feature 1..147: note = Description of Artificial Sequence: Synthetic coding sequence
  source 1..147: mol_type = other DNA

SEQ ID NO: 94062 - DNA, 147 bp, synthetic construct; identical to SEQ ID NO: 94056
  misc_feature 1..147: note = Description of Artificial Sequence: Synthetic coding sequence
  source 1..147: mol_type = other DNA

SEQ ID NO: 94063 - DNA, 1257 bp, synthetic construct; identical to SEQ ID NO: 94034
  misc_feature 1..1257: note = Description of Artificial Sequence: Synthetic coding sequence
  source 1..1257: mol_type = other DNA

SEQ ID NO: 94064 - DNA, 1257 bp, synthetic construct; identical to SEQ ID NO: 94034
  misc_feature 1..1257: note = Description of Artificial Sequence: Synthetic coding sequence
  source 1..1257: mol_type = other DNA

SEQ ID NO: 94065 - DNA, 1257 bp, synthetic construct; identical to SEQ ID NO: 94034
  misc_feature 1..1257: note = Description of Artificial Sequence: Synthetic coding sequence
  source 1..1257: mol_type = other DNA

SEQ ID NO: 94066 - DNA, 1284 bp, synthetic construct
  misc_feature 1..1284: note = Description of Artificial Sequence: Synthetic coding sequence
  source 1..1284: mol_type = other DNA
atgggcagcgtgagaaccaacagatacagcatcgtgagcagcgaggaggacggcatgaagctggccaccatggccgtggccaacggcttcggcaacggcaagagcaaggtgcacaccagacagcagtgcagaagcagattcgtgaagaaggacggccactgcaacgtgcagttcatcaacgtgggcgagaagggccagagatacctggccgacatcttcaccacctgcgtggacatcagatggagatggatgctggtgatcttctgcctggccttcgtgctgagctggctgttcttcggctgcgtgttctggctgatcgccctgctgcacggcgacctggacgccagcaaggagggcaaggcctgcgtgagcgaggtgaacagcttcaccgccgccttcctgttcagcatcgagacccagaccaccatcggctacggcttcagatgcgtgaccgacgagtgccccatcgccgtgttcatggtggtgttccagagcatcgtgggctgcatcatcgacgccttcatcatcggcgccgtgatggccaagatggccaagcccaagaagagaaacgagaccctggtgttcagccacaacgccgtgatcgccatgagagacggcaagctgtgcctgatgtggagagtgggcaacctgagaaagagccacctggtggaggcccacgtgagagcccagctgctgaagagcagaatcaccagcgagggcgagtacatccccctggaccagatcgacatcaacgtgggcttcgacagcggcatcgacagaatcttcctggtgagccccatcaccatcgtgcacgagatcgacgaggacagccccctgtacgacctgagcaagcaggacatcgacaacgccgacttcgagatcgtggtgatcctggagggcatggtggaggccaccgccatgaccacccagtgcagaagcagctacctggccaacgagatcctgtggggccacagatacgagcccgtgctgttcgaggagaagcactactacaaggtggactacagcagattccacaagacctacgaggtgcccaacacccccctgtgcagcgccagagacctggccgagaagaagtacatcctgagcaacgccaacagcttctgctacgagaacgaggtggccctgaccagcaaggaggaggacgacagcgagaacggcgtgcccgagagcaccagcaccgacaccccccccgacatcgacctgcacaaccaggccagcgtgcccctggagcccagacccctgagaagagagagcgagatctag

SEQ ID NO: 94067 - DNA, 1284 bp, synthetic construct; identical to SEQ ID NO: 94066
  misc_feature 1..1284: note = Description of Artificial Sequence: Synthetic coding sequence
  source 1..1284: mol_type = other DNA

SEQ ID NO: 94068 - DNA, 1506 bp, synthetic construct
  misc_feature 1..1506: note = Description of Artificial Sequence: Synthetic coding sequence
  source 1..1506: mol_type = other DNA
atgagcgccctgagaagaaagttcggcgacgactaccaggtggtgaccaccagcagcagcggcagcggcctgcagccccagggccccggccaggacccccagcagcagctggtgcccaagaagaagagacagagattcgtggacaagaacggcagatgcaacgtgcagcacggcaacctgggcagcgagaccagcagatacctgagcgacctgttcaccaccctggtggacctgaagtggagatggaacctgttcatcttcatcctgacctacaccgtggcctggctgttcatggccagcatgtggtgggtgatcgcctacaccagaggcgacctgaacaaggcccacgtgggcaactacaccccctgcgtggccaacgtgtacaacttccccagcgccttcctgttcttcatcgagaccgaggccaccatcggctacggctacagatacatcaccgacaagtgccccgagggcatcatcctgttcctgttccagagcatcctgggcagcatcgtggacgccttcctgatcggctgcatgttcatcaagatgagccagcccaagaagagagccgagaccctgatgttcagcgagcacgccgtgatcagcatgagagacggcaagctgaccctgatgttcagagtgggcaacctgagaaacagccacatggtgagcgcccagatcagatgcaagctgctgaagagcagacagacccccgagggcgagttcctgcccctggaccagctggagctggacgtgggcttcagcaccggcgccgaccagctgttcctggtgagccccctgaccatctgccacgtgatcgacgccaagagccccttctacgacctgagccagagaagcatgcagaccgagcagttcgagatcgtggtgatcctggagggcatcgtggagaccaccggcatgacctgccaggccagaaccagctacaccgaggacgaggtgctgtggggccacagattcttccccgtgatcagcctggaggagggcttcttcaaggtggactacagccagttccacgccaccttcgaggtgcccacccccccctacagcgtgaaggagcaggaggagatgctgctgatgagcagccccctgatcgcccccgccatcaccaacagcaaggagagacacaacagcgtggagtgcctggacggcctggacgacatcaccaccaagctgcccagcaagctgcagaagatcaccggcagagaggacttccccaagaagctgctgagaatgagcagcaccaccagcgagaaggcctacagcctgggcgacctgcccatgaagctgcagagaatcagcagcgtgcccggcaacagcgaggagaagctggtgagcaagaccaccaagatgctgagcgaccccatgagccagagcgtggccgacctgccccccaagctgcagaagatggccggcggcgccgccagaatggagggcaacctgcccgccaagctgagaaagatgaacagcgacagattcacctag

SEQ ID NO: 94069 - DNA, 708 bp, synthetic construct
  misc_feature 1..708: note = Description of Artificial Sequence: Synthetic coding sequence
  source 1..708: mol_type = other DNA
atgagcgccctgagaagaaagttcggcgacgactaccaggtggtgaccaccagcagcagcggcagcggcctgcagccccagggccccggccaggacccccagcagcagctggtgcccaagaagaagagacagagattcgtggacaagaacggcagatgcaacgtgcagcacggcaacctgggcagcgagaccagcagatacctgagcgacctgttcaccaccctggtggacctgaagtggagatggaacctgttcatcttcatcctgacctacaccgtggcctggctgttcatggccagcatgtggtgggtgatcgcctacaccagaggcgacctgaacaaggcccacgtgggcaactacaccccctgcgtggccaacgtgtacaacttccccagcgccttcctgttcttcatcgagaccgaggccaccatcggctacggctacagatacatcaccgacaagtgccccgagggcatcatcctgttcctgttccagagcatcctgggcagcatcgtggacgccttcctgatcggctgcatgttcatcaagatgagccagcccaagaagagagccgagaccctgatgttcagcgagcacgccgtgatcagcatgagagacggcaagctgaccctgatgttcagagtgggcaacctgagaaacagccacatggtgagcgcccagatcagatgcaagctgctgaagggctag

SEQ ID NO: 94070 - DNA, 1338 bp, synthetic construct
  misc_feature 1..1338: note = Description of Artificial Sequence: Synthetic coding sequence
  source 1..1338: mol_type = other DNA
atgcacggccacagcagaaacggccaggcccacgtgcccagaagaaagagaagaaacagattcgtgaagaagaacggccagtgcaacgtgtacttcgccaacctgagcaacaagagccagagatacatggccgacatcttcaccacctgcgtggacaccagatggagatacatgctgatgatcttcagcgccgccttcctggtgagctggctgttcttcggcctgctgttctggtgcatcgccttcttccacggcgacctggaggccagccccggcgtgcccgccgccggcggccccgccgccggcggcggcggcgccgcccccgtggcccccaagccctgcatcatgcacgtgaacggcttcctgggcgccttcctgttcagcgtggagacccagaccaccatcggctacggcttcagatgcgtgaccgaggagtgccccctggccgtgatcgccgtggtggtgcagagcatcgtgggctgcgtgatcgacagcttcatgatcggcaccatcatggccaagatggccagacccaagaagagagcccagaccctgctgttcagccaccacgccgtgatcagcgtgagagacggcaagctgtgcctgatgtggagagtgggcaacctgagaaagagccacatcgtggaggcccacgtgagagcccagctgatcaagccctacatgacccaggagggcgagtacctgcccctggaccagagagacctgaacgtgggctacgacatcggcctggacagaatcttcctggtgagccccatcatcatcgtgcacgagatcgacgaggacagccccctgtacggcatgggcaaggaggagctggagagcgaggacttcgagatcgtggtgatcctggagggcatggtggaggccaccgccatgaccacccaggccagaagcagctacctggccagcgagatcctgtggggccacagattcgagcccgtggtgttcgaggagaagagccactacaaggtggactacagcagattccacaagacctacgaggtggccggcaccccctgctgcagcgccagagagctgcaggagagcaagatcaccgtgctgcccgcccccccccccccccccagcgccttctgctacgagaacgagctggccctgatgagccaggaggaggaggagatggaggaggaggccgccgccgccgccgccgtggccgccggcctgggcctggaggccggcagcaaggaggaggccggcatcatcagaatgctggagttcggcagccacctggacctggagagaatgcaggccagcctgcccctggacaacatcagctacagaagagagagcgccatctag

SEQ ID NO: 94071 - DNA, 1260 bp, synthetic construct
  misc_feature 1..1260: note = Description of Artificial Sequence: Synthetic coding sequence
  source 1..1260: mol_type = other DNA
atggccggcgacagcagaaacgccatgaaccaggacatggagatcggcgtgaccccctgggaccccaagaagatccccaagcaggccagagactacgtgcccatcgccaccgacagaaccagactgctggccgagggcaagaagcccagacagagatacatggagaagagcggcaagtgcaacgtgcaccacggcaacgtgcaggagacctacagatacctgagcgacctgttcaccaccctggtggacctgaagtggagattcaacctgctggtgttcaccatggtgtacaccgtgacctggctgttcttcggcttcatctggtggctgatcgcctacatcagaggcgacctggaccacgtgggcgaccaggagtggatcccctgcgtggagaacctgagcggcttcgtgagcgccttcctgttcagcatcgagaccgagaccaccatcggctacggcttcagagtgatcaccgagaagtgccccgagggcatcatcctgctgctggtgcaggccatcctgggcagcatcgtgaacgccttcatggtgggctgcatgttcgtgaagatcagccagcccaagaagagagccgagaccctgatgttcagcaacaacgccgtgatcagcatgagagacgagaagctgtgcctgatgttcagagtgggcgacctgagaaacagccacatcgtggaggccagcatcagagccaagctgatcaagagcagacagaccaaggagggcgagttcatccccctgaaccagaccgacatcaacgtgggcttcgacaccggcgacgacagactgttcctggtgagccccctgatcatcagccacgagatcaaccagaagagccccttctgggagatgagccaggcccagctgcaccaggaggagttcgaggtggtggtgatcctggagggcatggtggaggccaccggcatgacctgccaggccagaagcagctacatggacaccgaggtgctgtggggccacagattcacccccgtgctgaccctggagaagggcttctacgaggtggactacaacaccttccacgacacctacgagaccaacacccccagctgctgcgccaaggagctggccgagatgaagagagagggcagactgctgcagtacctgcccagcccccccctgctgggcggctgcgccgaggccggcctggacgccgaggccgagcagaacgaggaggacgagcccaagggcctgggcggcagcagagaggccagaggcagcgtgtag

SEQ ID NO: 94072 - DNA, 1260 bp, synthetic construct; identical to SEQ ID NO: 94071
  misc_feature 1..1260: note = Description of Artificial Sequence: Synthetic coding sequence
  source 1..1260: mol_type = other DNA

SEQ ID NO: 94073 - DNA, 1260 bp, synthetic construct; identical to SEQ ID NO: 94071
  misc_feature 1..1260: note = Description of Artificial Sequence: Synthetic coding sequence
  source 1..1260: mol_type = other DNA

SEQ ID NO: 94074 - DNA, 1272 bp, synthetic construct
  misc_feature 1..1272: note = Description of Artificial Sequence: Synthetic coding sequence
  source 1..1272: mol_type = other DNA
atggccaagctgaccgagagcatgaccaacgtgctggagggcgacagcatggaccaggacgtggagagccccgtggccatccaccagcccaagctgcccaagcaggccagagacgacctgcccagacacatcagcagagacagaaccaagagaaagatccagagatacgtgagaaaggacggcaagtgcaacgtgcaccacggcaacgtgagagagacctacagatacctgaccgacatcttcaccaccctggtggacctgaagtggagattcaacctgctgatcttcgtgatggtgtacaccgtgacctggctgttcttcggcatgatctggtggctgatcgcctacatcagaggcgacatggaccacatcgaggaccccagctggaccccctgcgtgaccaacctgaacggcttcgtgagcgccttcctgttcagcatcgagaccgagaccaccatcggctacggctacagagtgatcaccgacaagtgccccgagggcatcatcctgctgctgatccagagcgtgctgggcagcatcgtgaacgccttcatggtgggctgcatgttcgtgaagatcagccagcccaagaagagagccgagaccctggtgttcagcacccacgccgtgatcagcatgagagacggcaagctgtgcctgatgttcagagtgggcgacctgagaaacagccacatcgtggaggccagcatcagagccaagctgatcaagagcaagcagaccagcgagggcgagttcatccccctgaaccagaccgacatcaacgtgggctactacaccggcgacgacagactgttcctggtgagccccctgatcatcagccacgagatcaaccagcagagccccttctgggagatcagcaaggcccagctgcccaaggaggagctggagatcgtggtgatcctggagggcatggtggaggccaccggcatgacctgccaggccagaagcagctacatcaccagcgagatcctgtggggctacagattcacccccgtgctgaccctggaggacggcttctacgaggtggactacaacagcttccacgagacctacgagaccagcacccccagcctgagcgccaaggagctggccgagctggccagcagagccgagctgcccctgagctggagcgtgagcagcaagctgaaccagcacgccgagctggagaccgaggaggaggagaagaacctggaggagcagaccgagagaaacggcgacgtggccaacctggagaacgagagcaaggtgtag

SEQ ID NO: 94075 - DNA, 1272 bp, synthetic construct; identical to SEQ ID NO: 94074
  misc_feature 1..1272: note = Description of Artificial Sequence: Synthetic coding sequence
  source 1..1272: mol_type = other DNA

SEQ ID NO: 94076 - DNA, 1275 bp, synthetic construct
  misc_feature 1..1275: note = Description of Artificial Sequence: Synthetic coding sequence
  source 1..1275: mol_type = other DNA
atgctggccagaaagagcatcatccccgaggagtacgtgctggccagaatcgccgccgagaacctgagaaagcccagaatcagagacagactgcccaaggccagattcatcgccaagagcggcgcctgcaacctggcccacaagaacatcagagagcagggcagattcctgcaggacatcttcaccaccctggtggacctgaagtggagacacaccctggtgatcttcaccatgagcttcctgtgcagctggctgctgttcgccatcatgtggtggctggtggccttcgcccacggcgacatctacgcctacatggagaagagcggcatggagaagagcggcctggagagcaccgtgtgcgtgaccaacgtgagaagcttcaccagcgccttcctgttcagcatcgaggtgcaggtgaccatcggcttcggcggcagaatgatgaccgaggagtgccccctggccatcaccgtgctgatcctgcagaacatcgtgggcctgatcatcaacgccgtgatgctgggctgcatcttcatgaagaccgcccaggcccacagaagagccgagaccctgatcttcagcagacacgccgtgatcgccgtgagaaacggcaagctgtgcttcatgttcagagtgggcgacctgagaaagagcatgatcatcagcgccagcgtgagaatccaggtggtgaagaagaccaccacccccgagggcgaggtggtgcccatccaccagctggacatccccgtggacaaccccatcgagagcaacaacatcttcctggtggcccccctgatcatctgccacgtgatcgacaagagaagccccctgtacgacatcagcgccaccgacctggccaaccaggacctggaggtgatcgtgatcctggagggcgtggtggagaccaccggcatcaccacccaggccagaaccagctacatcgccgaggagatccagtggggccacagattcgtgagcatcgtgaccgaggaggagggcgtgtacagcgtggactacagcaagttcggcaacaccgtgaaggtggccgcccccagatgcagcgccagagagctggacgagaagcccagcatcctgatccagaccctgcagaagagcgagctgagccaccagaacagcctgagaaagagaaacagcatgagaagaaacaacagcatgagaagaaacaacagcatcagaagaaacaacagcagcctgatggtgcccaaggtgcagttcatgacccccgagggcaaccagaacaccagcgagagctag

SEQ ID NO: 94077 - DNA, 345 bp, synthetic construct
  misc_feature 1..345: note = Description of Artificial Sequence: Synthetic coding sequence
  source 1..345: mol_type = other DNA
atgctggccagaaagagcatcatccccgaggagtacgtgctggccagaatcgccgccgagaacctgagaaagcccagaatcagagacagactgcccaaggccagattcatcgccaagagcggcgcctgcaacctggcccacaagaacatcagagagcagggcagattcctgcaggacatcttcaccaccctggtggacctgaagtggagacacaccctggtgatcttcaccatgagcttcctgtgcagctggctgctgttcgccatcatgtggtggctggtggccttcgcccacggcgacatctacgcctacatggagaagagcggcatggagaagagcggctag

SEQ ID NO: 94078 - DNA, 1275 bp, synthetic construct; identical to SEQ ID NO: 94076
  misc_feature 1..1275: note = Description of Artificial Sequence: Synthetic coding sequence
  source 1..1275: mol_type = other DNA

SEQ ID NO: 94079 - DNA, 774 bp, synthetic construct
  misc_feature 1..774: note = Description of Artificial Sequence: Synthetic coding sequence
  source 1..774: mol_type = other DNA
atgaccgccttccccgccagcggcaagaagagagagaccgactacagcgacggcgaccccctggacgtgcacaagagactgcccagcagcgccggcgaggacagagccgtgatgctgggcttcgccatgatgggcttcagcgtgctgatgttcttcctgctgggcaccaccatcctgaagcccttcatgctgagcatccagagagaggagagcacctgcaccgccatccacaccgacatcatggacgactggctggactgcgccttcacctgcggcgtgcactgccacggccagggcaagtacccctgcctgcaggtgttcgtgaacctgagccaccccggccagaaggccctgctgcactacaacgaggaggccgtgcagatcaaccccaagtgcttctacacccccaagtgccaccaggacagaaacgacctgctgaacagcgccctggacatcaaggagttcttcgaccacaagaacggcacccccttcagctgcttctacagccccgccagccagagcgaggacgtgatcctgatcaagaagtacgaccagatggccatcttccactgcctgttctggcccagcctgaccctgctgggcggcgccctgatcgtgggcatggtgagactgacccagcacctgagcctgctgtgcgagaagtacagcaccgtggtgagagacgaggtgggcggcaaggtgccctacatcgagcagcaccagttcaagctgtgcatcatgagaagaagcaagggcagagccgagaagagctag

SEQ ID NO: 94080 - DNA, 522 bp, synthetic construct
  misc_feature 1..522: note = Description of Artificial Sequence: Synthetic coding sequence
  source 1..522: mol_type = other DNA
atgcagcccttcagcatccccgtgcagatcaccctgcagggcagcagaagaagacagggcagaaccgccttccccgccagcggcaagaagagagagaccgactacagcgacggcgaccccctggacgtgcacaagagactgcccagcagcgccggcgaggacagagccgtgatgctgggcttcgccatgatgggcttcagcgtgctgatgttcttcctgctgggcaccaccatcctgaagcccttcatgctgagcatccagagagaggagagcacctgcaccgccatccacaccgacatcatggacgactggctggactgcgccttcacctgcggcgtgcactgccacggccagggcaagtacccctgcctgcaggtgttcgtgaacctgagccaccccggccagaaggccctgctgcactacaacgaggaggccgtgcagatcaaccccaagagagacgtgaccgactgcagagtgaaggagaagcagaccctgaccgtgagcgacgagcacaagcagtag

SEQ ID NO: 94081 - DNA, 840 bp, synthetic construct
  misc_feature 1..840: note = Description of Artificial Sequence: Synthetic coding sequence
  source 1..840: mol_type = other DNA
atggacttcagccccagcagcgagctgggcttccacttcgtggccttcatcctgctgaccagacacagaaccgccttccccgccagcggcaagaagagagagaccgactacagcgacggcgaccccctggacgtgcacaagagactgcccagcagcgccggcgaggacagagccgtgatgctgggcttcgccatgatgggcttcagcgtgctgatgttcttcctgctgggcaccaccatcctgaagcccttcatgctgagcatccagagagaggagagcacctgcaccgccatccacaccgacatcatggacgactggctggactgcgccttcacctgcggcgtgcactgccacggccagggcaagtacccctgcctgcaggtgttcgtgaacctgagccaccccggccagaaggccctgctgcactacaacgaggaggccgtgcagatcaaccccaagtgcttctacacccccaagtgccaccaggacagaaacgacctgctgaacagcgccctggacatcaaggagttcttcgaccacaagaacggcacccccttcagctgcttctacagccccgccagccagagcgaggacgtgatcctgatcaagaagtacgaccagatggccatcttccactgcctgttctggcccagcctgaccctgctgggcggcgccctgatcgtgggcatggtgagactgacccagcacctgagcctgctgtgcgagaagtacagcaccgtggtgagagacgaggtgggcggcaaggtgccctacatcgagcagcaccagttcaagctgtgcatcatgagaagaagcaagggcagagccgagaagagctag

SEQ ID NO: 94082 - DNA, 834 bp, synthetic construct
  misc_feature 1..834: note = Description of Artificial Sequence: Synthetic coding sequence
  source 1..834: mol_type = other DNA
atgcagcccttcagcatccccgtgcagatcaccctgcagggcagcagaagaagacagggcagaaccgccttccccgccagcggcaagaagagagagaccgactacagcgacggcgaccccctggacgtgcacaagagactgcccagcagcgccggcgaggacagagccgtgatgctgggcttcgccatgatgggcttcagcgtgctgatgttcttcctgctgggcaccaccatcctgaagcccttcatgctgagcatccagagagaggagagcacctgcaccgccatccacaccgacatcatggacgactggctggactgcgccttcacctgcggcgtgcactgccacggccagggcaagtacccctgcctgcaggtgttcgtgaacctgagccaccccggccagaaggccctgctgcactacaacgaggaggccgtgcagatcaaccccaagtgcttctacacccccaagtgccaccaggacagaaacgacctgctgaacagcgccctggacatcaaggagttcttcgaccacaagaacggcacccccttcagctgcttctacagccccgccagccagagcgaggacgtgatcctgatcaagaagtacgaccagatggccatcttccactgcctgttctggcccagcctgaccctgctgggcggcgccctgatcgtgggcatggtgagactgacccagcacctgagcctgctgtgcgagaagtacagcaccgtggtgagagacgaggtgggcggcaaggtgccctacatcgagcagcaccagttcaagctgtgcatcatgagaagaagcaagggcagagccgagaagagctag

SEQ ID NO: 94083 - DNA, 828 bp, synthetic construct
  misc_feature 1..828: note = Description of Artificial Sequence: Synthetic coding sequence
  source 1..828: mol_type = other DNA
atgttccccctgctgtacgagctgaccgccgtgagccccagccccttcccccagagaaccgccttccccgccagcggcaagaagagagagaccgactacagcgacggcgaccccctggacgtgcacaagagactgcccagcagcgccggcgaggacagagccgtgatgctgggcttcgccatgatgggcttcagcgtgctgatgttcttcctgctgggcaccaccatcctgaagcccttcatgctgagcatccagagagaggagagcacctgcaccgccatccacaccgacatcatggacgactggctggactgcgccttcacctgcggcgtgcactgccacggccagggcaagtacccctgcctgcaggtgttcgtgaacctgagccaccccggccagaaggccctgctgcactacaacgaggaggccgtgcagatcaaccccaagtgcttctacacccccaagtgccaccaggacagaaacgacctgctgaacagcgccctggacatcaaggagttcttcgaccacaagaacggcacccccttcagctgcttctacagccccgccagccagagcgaggacgtgatcctgatcaagaagtacgaccagatggccatcttccactgcctgttctggcccagcctgaccctgctgggcggcgccctgatcgtgggcatggtgagactgacccagcacctgagcctgctgtgcgagaagtacagcaccgtggtgagagacgaggtgggcggcaaggtgccctacatcgagcagcaccagttcaagctgtgcatcatgagaagaagcaagggcagagccgagaagagctag

SEQ ID NO: 94084 - DNA, 774 bp, synthetic construct; identical to SEQ ID NO: 94079
  misc_feature 1..774: note = Description of Artificial Sequence: Synthetic coding sequence
  source 1..774: mol_type = other DNA

SEQ ID NO: 94085 - DNA, 3537 bp, synthetic construct
  misc_feature 1..3537: note = Description of Artificial Sequence: Synthetic coding sequence
  source 1..3537: mol_type = other DNA
atggccaacggcggcggcggcggcggcggcagcagcggcggcggcggcggcggcggcggcagcagcctgagaatgagcagcaacatccacgccaaccacctgagcctggacgccagcagcagcagcagcagcagcagcagcagcagcagcagcagcagcagcagcagcagcagcagcagcgtgcacgagcccaagatggacgccctgatcatccccgtgaccatggaggtgccctgcgacagcagaggccagagaatgtggtgggccttcctggccagcagcatggtgaccttcttcggcggcctgttcatcatcctgctgtggagaaccctgaagtacctgtggaccgtgtgctgccactgcggcggcaagaccaaggaggcccagaagatcaacaacggcagcagccaggccgacggcaccctgaagcccgtggacgagaaggaggaggccgtggccgccgaggtgggctggatgaccagcgtgaaggactgggccggcgtgatgatcagcgcccagaccctgaccggcagagtgctggtggtgctggtgttcgccctgagcatcggcgccctggtgatctacttcatcgacagcagcaaccccatcgagagctgccagaacttctacaaggacttcaccctgcagatcgacatggccttcaacgtgttcttcctgctgtacttcggcctgagattcatcgccgccaacgacaagctgtggttctggctggaggtgaacagcgtggtggacttcttcaccgtgccccccgtgttcgtgagcgtgtacctgaacagaagctggctgggcctgagattcctgagagccctgagactgatccagttcagcgagatcctgcagttcctgaacatcctgaagaccagcaacagcatcaagctggtgaacctgctgagcatcttcatcagcacctggctgaccgccgccggcttcatccacctggtggagaacagcggcgacccctgggagaacttccagaacaaccaggccctgacctactgggagtgcgtgtacctgctgatggtgaccatgagcaccgtgggctacggcgacgtgtacgccaagaccaccctgggcagactgttcatggtgttcttcatcctgggcggcctggccatgttcgccagctacgtgcccgagatcatcgagctgatcggcaacagaaagaagtacggcggcagctacagcgccgtgagcggcagaaagcacatcgtggtgtgcggccacatcaccctggagagcgtgagcaacttcctgaaggacttcctgcacaaggacagagacgacgtgaacgtggagatcgtgttcctgcacaacatcagccccaacctggagctggaggccctgttcaagagacacttcacccaggtggagttctaccagggcagcgtgctgaacccccacgacctggccagagtgaagatcgagagcgccgacgcctgcctgatcctggccaacaagtactgcgccgaccccgacgccgaggacgccagcaacatcatgagagtgatcagcatcaagaactaccaccccaagatcagaatcatcacccagatgctgcagtaccacaacaaggcccacctgctgaacatccccagctggaactggaaggagggcgacgacgccatctgcctggccgagctgaagctgggcttcatcgcccagagctgcctggcccagggcctgagcaccatgctggccaacctgttcagcatgagaagcttcatcaagatcgaggaggacacctggcagaagtactacctggagggcgtgagcaacgagatgtacaccgagtacctgagcagcgccttcgtgggcctgagcttccccaccgtgtgcgagctgtgcttcgtgaagctgaagctgctgatgatcgccatcgagtacaagagcgccaacagagagagcagaatcctgatcaaccccggcaaccacctgaagatccaggagggcaccctgggcttcttcatcgccagcgacgccaaggaggtgaagagagccttcttctactgcaaggcctgccacgacgacatcaccgaccccaagagaatcaagaagtgcggctgcaagagactggaggacgagcagcccagcaccctgagccccaagaagaagcagagaaacggcggcatgagaaacagccccaacaccagccccaagctgatgagacacgaccccctgctgatccccggcaacgaccagatcgacaacatggacagcaacgtgaagaagtacgacagcaccggcatgttccactggtgcgcccccaaggagatcgagaaggtgatcctgaccagaagcgaggccgccatgaccgtgctgagcggccacgtggtggtgtgcatcttcggcgacgtgagcagcgccctgatcggcctgagaaacctggtgatgcccctgagagccagcaacttccactaccacgagctgaagcacatcgtgttcgtgggcagcatcgagtacctgaagagagagtgggagaccctgcacaacttccccaaggtgagcatcctgcccggcacccccctgagcagagccgacctgagagccgtgaacatcaacctgtgcgacatgtgcgtgatcctgagcgccaaccagaacaacatcgacgacaccagcctgcaggacaaggagtgcatcctggccagcctgaacatcaagagcatgcagttcgacgacagcatcggcgtgctgcaggccaacagccagggcttcaccccccccggcatggacagaagcagccccgacaacagccccgtgcacggcatgctgagacagcccagcatcaccaccggcgtgaacatccccatcatcaccgagctggtgaacgacaccaacgtgcagttcctggaccaggacgacgacgacgaccccgacaccgagctgtacctgacccagcccttcgcctgcggcaccgccttcgccgtgagcgtgctggacagcctgatgagcgccacctacttcaacgacaacatcctgaccctgatcagaaccctggtgaccggcggcgccacccccgagctggaggccctgatcgccgaggagaacgccctgagaggcggctacagcaccccccagaccctggccaacagagacagatgcagagtggcccagctggccctgctggacggccccttcgccgacctgggcgacggcggctgctacggcgacctgttctgcaaggccctgaagacctacaacatgctgtgcttcggcatctacagactgagagacgcccacctgagcacccccagccagtgcaccaagagatacgtgatcaccaaccccccctacgagttcgagctggtgcccaccgacctgatcttctgcctgatgcagttcgaccacaacgccggccagagcagagccagcctgagccacagcagccacagcagccagagcagcagcaagaagagcagcagcgtgcacagcatccccagcaccgccaacagacagaacagacccaagagcagagagagcagagacaagcagaagtacgtgcaggaggagagactgtag

SEQ ID NO: 94086 - DNA, 3633 bp, synthetic construct
  misc_feature 1..3633: note = Description of Artificial Sequence: Synthetic coding sequence
  source 1..3633: mol_type = other DNA
agcaacatccacgccaaccacctgagcctggacgccagcagcagcagcagcagcagcagcagcagcagcagcagcagcagcagcagcagcagcagcagcagcgtgcacgagcccaagatggacgccctgatcatccccgtgaccatggaggtgccctgcgacagcagaggccagagaatgtggtgggccttcctggccagcagcatggtgaccttcttcggcggcctgttcatcatcctgctgtggagaaccctgaagtacctgtggaccgtgtgctgccactgcggcggcaagaccaaggaggcccagaagatcaacaacggcagcagccaggccgacggcaccctgaagcccgtggacgagaaggaggaggccgtggccgccgaggtgggctggatgaccagcgtgaaggactgggccggcgtgatgatcagcgcccagaccctgaccggcagagtgctggtggtgctggtgttcgccctgagcatcggcgccctggtgatctacttcatcgacagcagcaaccccatcgagagctgccagaacttctacaaggacttcaccctgcagatcgacatggccttcaacgtgttcttcctgctgtacttcggcctgagattcatcgccgccaacgacaagctgtggttctggctggaggtgaacagcgtggtggacttcttcaccgtgccccccgtgttcgtgagcgtgtacctgaacagaagctggctgggcctgagattcctgagagccctgagactgatccagttcagcgagatcctgcagttcctgaacatcctgaagaccagcaacagcatcaagctggtgaacctgctgagcatcttcatcagcacctggctgaccgccgccggcttcatccacctggtggagaacagcggcgacccctgggagaacttccagaacaaccaggccctgacctactgggagtgcgtgtacctgctgatggtgaccatgagcaccgtgggctacggcgacgtgtacgccaagaccaccctgggcagactgttcatggtgttcttcatcctgggcggcctggccatgttcgccagctacgtgcccgagatcatcgagctgatcggcaacagaaagaagtacggcggcagctacagcgccgtgagcggcagaaagcacatcgtggtgtgcggccacatcaccctggagagcgtgagcaacttcctgaaggacttcctgcacaaggacagagacgacgtgaacgtggagatcgtgttcctgcacaacatcagccccaacctggagctggaggccctgttcaagagacacttcacccaggtggagttctaccagggcagcgtgctgaacccccacgacctggccagagtgaagatcgagagcgccgacgcctgcctgatcctggccaacaagtactgcgccgaccccgacgccgaggacgccagcaacatcatgagagtgatcagcatcaagaactaccaccccaagatcagaatcatcacccagatgctgcagtaccacaacaaggcccacctgctgaacatccccagctggaactggaaggagggcgacgacgccatctgcctggccgagctgaagctgggcttcatcgcccagagctgcctggcccagggcctgagcaccatgctggccaacctgttcagcatgagaagcttcatcaagatcgaggaggacacctggcagaagtactacctggagggcgtgagcaacgagatgtacaccgagtacctgagcagcgccttcgtgggcctgagcttccccaccgtgtgcgagctgtgcttcgtgaagctgaagctgctgatgatcgccatcgagtacaagagcgccaacagagagagcagaatcctgatcaaccccggcaaccacctgaagatccaggagggcaccctgggcttcttcatcgccagcgacgccaaggaggtgaagagagccttcttctactgcaaggcctgccacgacgacatcaccgaccccaagagaatcaagaagtgcggctgcaagagacccaagatgagcatctacaagagaatgagaagagcctgctgcttcgactgcggcagaagcgagagagactgcagctgcatgagcggcagagtgagaggcaacgtggacaccctggagagagccttccccctgagcagcgtgagcgtgaacgactgcagcaccagcttcagagccttcgaggacgagcagcccagcaccctgagccccaagaagaagcagagaaacggcggcatgagaaacagccccaacaccagccccaagctgatgagacacgaccccctgctgatccccggcaacgaccagatcgacaacatggacagcaacgtgaagaagtacgacagcaccggcatgttccactggtgcgcccccaaggagatcgagaaggtgatcctgaccagaagcgaggccgccatgaccgtgctgagcggccacgtggtggtgtgcatcttcggcgacgtgagcagcgccctgatcggcctgagaaacctggtgatgcccctgagagccagcaacttccactaccacgagctgaagcacatcgtgttcgtgggcagcatcgagtacctgaagagagagtgggagaccctgcacaacttccccaaggtgagcatcctgcccggcacccccctgagcagagccgacctgagagccgtgaacatcaacctgtgcgacatgtgcgtgatcctgagcgccaaccagaacaacatcgacgacaccagcctgcaggacaaggagtgcatcctggccagcctgaacatcaagagcatgcagttcgacgacagcatcggcgtgctgcaggccaacagccagggcttcaccccccccggcatggacagaagcagccccgacaacagccccgtgcacggcatgctgagacagcccagcatcaccaccggcgtgaacatccccatcatcaccgagctggtgaacgacaccaacgtgcagttcctggaccaggacgacgacgacgaccccgacaccgagctgtacctgacccagcccttcgcctgcggcaccgccttcgccgtgagcgtgctggacagcctgatgagcgccacctacttcaacgacaacatcctgaccctgatcagaaccctggtgaccggcggcgccacccccgagctggaggccctgatcgccgaggagaacgccctgagaggcggctacagcaccccccagaccctggccaacagagacagatgcagagtggcccagctggccctgctggacggccccttcgccgacctgggcgacggcggctgctacggcgacctgttctgcaaggccctgaagacctacaacatgctgtgcttcggcatctacagactgagagacgcccacctgagcacccccagccagtgcaccaagagatacgtgatcaccaaccccccctacgagttcgagctggtgcccaccgacctgatcttctgcctgatgcagttcgaccacaacgccggccagagcagagccagcctgagccacagcagccacagcagccagagcagcagcaagaagagcagcagcgtgcacagcatccccagcaccgccaacagacagaacagacccaagagcagagagagcagagacaagcagaagtacgtgcaggaggagagactgtag

SEQ ID NO: 94087 - DNA, 3720 bp, synthetic construct
  misc_feature 1..3720: note = Description of Artificial Sequence: Synthetic coding sequence
  source 1..3720: mol_type = other DNA
atggccaacggcggcggcggcggcggcggcagcagcggcggcggcggcggcggcggcggcagcagcctgagaatgagcagcaacatccacgccaaccacctgagcctggacgccagcagcagcagcagcagcagcagcagcagcagcagcagcagcagcagcagcagcagcagcagcagcgtgcacgagcccaagatggacgccctgatcatccccgtgaccatggaggtgccctgcgacagcagaggccagagaatgtggtgggccttcctggccagcagcatggtgaccttcttcggcggcctgttcatcatcctgctgtggagaaccctgaagtacctgtggaccgtgtgctgccactgcggcggcaagaccaaggaggcccagaagatcaacaacggcagcagccaggccgacggcaccctgaagcccgtggacgagaaggaggaggccgtggccgccgaggtgggctggatgaccagcgtgaaggactgggccggcgtgatgatcagcgcccagaccctgaccggcagagtgctggtggtgctggtgttcgccctgagcatcggcgccctggtgatctacttcatcgacagcagcaaccccatcgagagctgccagaacttctacaaggacttcaccctgcagatcgacatggccttcaacgtgttcttcctgctgtacttcggcctgagattcatcgccgccaacgacaagctgtggttctggctggaggtgaacagcgtggtggacttcttcaccgtgccccccgtgttcgtgagcgtgtacctgaacagaagctggctgggcctgagattcctgagagccctgagactgatccagttcagcgagatcctgcagttcctgaacatcctgaagaccagcaacagcatcaagctggtgaacctgctgagcatcttcatcagcacctggctgaccgccgccggcttcatccacctggtggagaacagcggcgacccctgggagaacttccagaacaaccaggccctgacctactgggagtgcgtgtacctgctgatggtgaccatgagcaccgtgggctacggcgacgtgtacgccaagaccaccctgggcagactgttcatggtgttcttcatcctgggcggcctggccatgttcgccagctacgtgcccgagatcatcgagctgatcggcaacagaaagaagtacggcggcagctacagcgccgtgagcggcagaaagcacatcgtggtgtgcggccacatcaccctggagagcgtgagcaacttcctgaaggacttcctgcacaaggacagagacgacgtgaacgtggagatcgtgttcctgcacaacatcagccccaacctggagctggaggccctgttcaagagacacttcacccaggtggagttctaccagggcagcgtgctgaacccccacgacctggccagagtgaagatcgagagcgccgacgcctgcctgatcctggccaacaagtactgcgccgaccccgacgccgaggacgccagcaacatcatgagagtgatcagcatcaagaactaccaccccaagatcagaatcatcacccagatgctgcagtaccacaacaaggcccacctgctgaacatccccagctggaactggaaggagggcgacgacgccatctgcctggccgagctgaagctgggcttcatcgcccagagctgcctggcccagggcctgagcaccatgctggccaacctgttcagcatgagaagcttcatcaagatcgaggaggacacctggcagaagtactacctggagggcgtgagcaacgagatgtacaccgagtacctgagcagcgccttcgtgggcctgagcttccccaccgtgtgcgagctgtgcttcgtgaagctgaagctgctgatgatcgccatcgagtacaagagcgccaacagagagagcagaatcctgatcaaccccggcaaccacctgaagatccaggagggcaccctgggcttcttcatcgccagcgacgccaaggaggtgaagagagccttcttctactgcaaggcctgccacgacgacatcaccgaccccaagagaatcaagaagtgcggctgcaagagaagatgggaggagcactgcagcctgtggagactggagagcaagggcaacgtgagaagactgaactactgcagaggccagcagaccttcagcgtgaaggtgaaggtggccgccagaagcagatacagcaaggaccccttcgagttcaagaaggagacccccaacagcagactggtgaccgagcccgtggaggacgagcagcccagcaccctgagccccaagaagaagcagagaaacggcggcatgagaaacagccccaacaccagccccaagctgatgagacacgaccccctgctgatccccggcaacgaccagatcgacaacatggacagcaacgtgaagaagtacgacagcaccggcatgttccactggtgcgcccccaaggagatcgagaaggtgatcctgaccagaagcgaggccgccatgaccgtgctgagcggccacgtggtggtgtgcatcttcggcgacgtgagcagcgccctgatcggcctgagaaacctggtgatgcccctgagagccagcaacttccactaccacgagctgaagcacatcgtgttcgtgggcagcatcgagtacctgaagagagagtgggagaccctgcacaacttccccaaggtgagcatcctgcccggcacccccctgagcagagccgacctgagagccgtgaacatcaacctgtgcgacatgtgcgtgatcctgagcgccaaccagaacaacatcgacgacaccagcctgcaggacaaggagtgcatcctggccagcctgaacatcaagagcatgcagttcgacgacagcatcggcgtgctgcaggccaacagccagggcttcaccccccccggcatggacagaagcagccccgacaacagccccgtgcacggcatgctgagacagcccagcatcaccaccggcgtgaacatccccatcatcaccgagctggtgaacgacaccaacgtgcagttcctggaccaggacgacgacgacgaccccgacaccgagctgtacctgacccagcccttcgcctgcggcaccgccttcgccgtgagcgtgctggacagcctgatgagcgccacctacttcaacgacaacatcctgaccctgatcagaaccctggtgaccggcggcgccacccccgagctggaggccctgatcgccgaggagaacgccctgagaggcggctacagcaccccccagaccctggccaacagagacagatgcagagtggcccagctggccctgctggacggccccttcgccgacctgggcgacggcggctgctacggcgacctgttctgcaaggccctgaagacctacaacatgctgtgcttcggcatctacagactgagagacgcccacctgagcacccccagccagtgcaccaagagatacgtgatcaccaaccccccctacgagttcgagctggtgcccaccgacctgatcttctgcctgatgcagttcgaccacaacgccggccagagcagagccagcctgagccacagcagccacagcagccagagcagcagcaagaagagcagcagcgtgcacagcatccccagcaccgccaacagacagaacagacccaagagcagagagagcagagacaagcagaagtacgtgcaggaggagagactgtag

SEQ ID NO: 94088 - DNA, 3549 bp, synthetic construct
  misc_feature 1..3549: note = Description of Artificial Sequence: Synthetic coding sequence
  source 1..3549: mol_type = other DNA
tgaagcagcagcagcagcagcagcagcagcagcgtgcacgagcccaagatggacgccctgatcatccccgtgaccatggaggtgccctgcgacagcagaggccagagaatgtggtgggccttcctggccagcagcatggtgaccttcttcggcggcctgttcatcatcctgctgtggagaaccctgaagtacctgtggaccgtgtgctgccactgcggcggcaagaccaaggaggcccagaagatcaacaacggcagcagccaggccgacggcaccctgaagcccgtggacgagaaggaggaggccgtggccgccgaggtgggctggatgaccagcgtgaaggactgggccggcgtgatgatcagcgcccagaccctgaccggcagagtgctggtggtgctggtgttcgccctgagcatcggcgccctggtgatctacttcatcgacagcagcaaccccatcgagagctgccagaacttctacaaggacttcaccctgcagatcgacatggccttcaacgtgttcttcctgctgtacttcggcctgagattcatcgccgccaacgacaagctgtggttctggctggaggtgaacagcgtggtggacttcttcaccgtgccccccgtgttcgtgagcgtgtacctgaacagaagctggctgggcctgagattcctgagagccctgagactgatccagttcagcgagatcctgcagttcctgaacatcctgaagaccagcaacagcatcaagctggtgaacctgctgagcatcttcatcagcacctggctgaccgccgccggcttcatccacctggtggagaacagcggcgacccctgggagaacttccagaacaaccaggccctgacctactgggagtgcgtgtacctgctgatggtgaccatgagcaccgtgggctacggcgacgtgtacgccaagaccaccctgggcagactgttcatggtgttcttcatcctgggcggcctggccatgttcgccagctacgtgcccgagatcatcgagctgatcggcaacagaaagaagtacggcggcagctacagcgccgtgagcggcagaaagcacatcgtggtgtgcggccacatcaccctggagagcgtgagcaacttcctgaaggacttcctgcacaaggacagagacgacgtgaacgtggagatcgtgttcctgcacaacatcagccccaacctggagctggaggccctgttcaagagacacttcacccaggtggagttctaccagggcagcgtgctgaacccccacgacctggccagagtgaagatcgagagcgccgacgcctgcctgatcctggccaacaagtactgcgccgaccccgacgccgaggacgccagcaacatcatgagagtgatcagcatcaagaactaccaccccaagatcagaatcatcacccagatgctgcagtaccacaacaaggcccacctgctgaacatccccagctggaactggaaggagggcgacgacgccatctgcctggccgagctgaagctgggcttcatcgcccagagctgcctggcccagggcctgagcaccatgctggccaacctgttcagcatgagaagcttcatcaagatcgaggaggacacctggcagaagtactacctggagggcgtgagcaacgagatgtacaccgagtacctgagcagcgccttcgtgggcctgagcttccccaccgtgtgcgagctgtgcttcgtgaagctgaagctgctgatgatcgccatcgagtacaagagcgccaacagagagagcagaatcctgatcaaccccggcaaccacctgaagatccaggagggcaccctgggcttcttcatcgccagcgacgccaaggaggtgaagagagccttcttctactgcaaggcctgccacgacgacatcaccgaccccaagagaatcaagaagtgcggctgcaagagactggaggacgagcagcccagcaccctgagccccaagaagaagcagagaaacggcggcatgagaaacagccccaacaccagccccaagctgatgagacacgaccccctgctgatccccggcaacgaccagatcgacaacatggacagcaacgtgaagaagtacgacagcaccggcatgttccactggtgcgcccccaaggagatcgagaaggtgatcctgaccagaagcgaggccgccatgaccgtgctgagcggccacgtggtggtgtgcatcttcggcgacgtgagcagcgccctgatcggcctgagaaacctggtgatgcccctgagagccagcaacttccactaccacgagctgaagcacatcgtgttcgtgggcagcatcgagtacctgaagagagagtgggagaccctgcacaacttccccaaggtgagcatcctgcccggcacccccctgagcagagccgacctgagagccgtgaacatcaacctgtgcgacatgtgcgtgatcctgagcgccaaccagaacaacatcgacgacaccagcctgcaggacaaggagtgcatcctggccagcctgaacatcaagagcatgcagttcgacgacagcatcggcgtgctgcaggccaacagccagggcttcaccccccccggcatggacagaagcagccccgacaacagccccgtgcacggcatgctgagacagcccagcatcaccaccggcgtgaacatccccatcatcaccgagctggtgaacgacaccaacgtgcagttcctggaccaggacgacgacgacgaccccgacaccgagctgtacctgacccagcccttcgcctgcggcaccgccttcgccgtgagcgtgctggacagcctgatgagcgccacctacttcaacgacaacatcctgaccctgatcagaaccctggtgaccggcggcgccacccccgagctggaggccctgatcgccgaggagaacgccctgagaggcggctacagcaccccccagaccctggccaacagagacagatgcagagtggcccagctggccctgctggacggccccttcgccgacctgggcgacggcggctgctacggcgacctgttctgcaaggccctgaagacctacaacatgctgtgcttcggcatctacagactgagagacgcccacctgagcacccccagccagtgcaccaagagatacgtgatcaccaaccccccctacgagttcgagctggtgcccaccgacctgatcttctgcctgatgcagttcgaccacaacgccggccagagcagagccagcctgagccacagcagccacagcagccagagcagcagcaagaagagcagcagcgtgcacagcatccccagcaccgccaacagacagaacagacccaagagcagagagagcagagacaagcagaacgccaccagaatgaacagaatgggccaggccgagaagaagtggttcaccgacgagcccgacaacgcctaccccagaaacatccagatcaagcccatgagcacccacatggccaaccagatcaaccagtacaagagcaccagcagcctgatcccccccatcagagaggtggaggacgagtgctag

SEQ ID NO: 94089 - DNA, 3504 bp, synthetic construct
  misc_feature 1..3504: note = Description of Artificial Sequence: Synthetic coding sequence
  source 1..3504: mol_type = other DNA
cccaagatggacgccctgatcatccccgtgaccatggaggtgccctgcgacagcagaggccagagaatgtggtgggccttcctggccagcagcatggtgaccttcttcggcggcctgttcatcatcctgctgtggagaaccctgaagtacctgtggaccgtgtgctgccactgcggcggcaagaccaaggaggcccagaagatcaacaacggcagcagccaggccgacggcaccctgaagcccgtggacgagaaggaggaggccgtggccgccgaggtgggctggatgaccagcgtgaaggactgggccggcgtgatgatcagcgcccagaccctgaccggcagagtgctggtggtgctggtgttcgccctgagcatcggcgccctggtgatctacttcatcgacagcagcaaccccatcgagagctgccagaacttctacaaggacttcaccctgcagatcgacatggccttcaacgtgttcttcctgctgtacttcggcctgagattcatcgccgccaacgacaagctgtggttctggctggaggtgaacagcgtggtggacttcttcaccgtgccccccgtgttcgtgagcgtgtacctgaacagaagctggctgggcctgagattcctgagagccctgagactgatccagttcagcgagatcctgcagttcctgaacatcctgaagaccagcaacagcatcaagctggtgaacctgctgagcatcttcatcagcacctggctgaccgccgccggcttcatccacctggtggagaacagcggcgacccctgggagaacttccagaacaaccaggccctgacctactgggagtgcgtgtacctgctgatggtgaccatgagcaccgtgggctacggcgacgtgtacgccaagaccaccctgggcagactgttcatggtgttcttcatcctgggcggcctggccatgttcgccagctacgtgcccgagatcatcgagctgatcggcaacagaaagaagtacggcggcagctacagcgccgtgagcggcagaaagcacatcgtggtgtgcggccacatcaccctggagagcgtgagcaacttcctgaaggacttcctgcacaaggacagagacgacgtgaacgtggagatcgtgttcctgcacaacatcagccccaacctggagctggaggccctgttcaagagacacttcacccaggtggagttctaccagggcagcgtgctgaacccccacgacctggccagagtgaagatcgagagcgccgacgcctgcctgatcctggccaacaagtactgcgccgaccccgacgccgaggacgccagcaacatcatgagagtgatcagcatcaagaactaccaccccaagatcagaatcatcacccagatgctgcagtaccacaacaaggcccacctgctgaacatccccagctggaactggaaggagggcgacgacgccatctgcctggccgagctgaagctgggcttcatcgcccagagctgcctggcccagggcctgagcaccatgctggccaacctgttcagcatgagaagcttcatcaagatcgaggaggacacctggcagaagtactacctggagggcgtgagcaacgagatgtacaccgagtacctgagcagcgccttcgtgggcctgagcttccccaccgtgtgcgagctgtgcttcgtgaagctgaagctgctgatgatcgccatcgagtacaagagcgccaacagagagagcagaatcctgatcaaccccggcaaccacctgaagatccaggagggcaccctgggcttcttcatcgccagcgacgccaaggaggtgaagagagccttcttctactgcaaggcctgccacgacgacatcaccgaccccaagagaatcaagaagtgcggctgcaagagactggaggacgagcagcccagcaccctgagccccaagaagaagcagagaaacggcggcatgagaaacagccccaacaccagccccaagctgatgagacacgaccccctgctgatccccggcaacgaccagatcgacaacatggacagcaacgtgaagaagtacgacagcaccggcatgttccactggtgcgcccccaaggagatcgagaaggtgatcctgaccagaagcgaggccgccatgaccgtgctgagcggccacgtggtggtgtgcatcttcggcgacgtgagcagcgccctgatcggcctgagaaacctggtgatgcccctgagagccagcaacttccactaccacgagctgaagcacatcgtgttcgtgggcagcatcgagtacctgaagagagagtgggagaccctgcacaacttccccaaggtgagcatcctgcccggcacccccctgagcagagccgacctgagagccgtgaacatcaacctgtgcgacatgtgcgtgatcctgagcgccaaccagaacaacatcgacgacaccagcctgcaggacaaggagtgcatcctggccagcctgaacatcaagagcatgcagttcgacgacagcatcggcgtgctgcaggccaacagccagggcttcaccccccccggcatggacagaagcagccccgacaacagccccgtgcacggcatgctgagacagcccagcatcaccaccggcgtgaacatccccatcatcaccgagctggtgaacgacaccaacgtgcagttcctggaccaggacgacgacgacgaccccgacaccgagctgtacctgacccagcccttcgcctgcggcaccgccttcgccgtgagcgtgctggacagcctgatgagcgccacctacttcaacgacaacatcctgaccctgatcagaaccctggtgaccggcggcgccacccccgagctggaggccctgatcgccgaggagaacgccctgagaggcggctacagcaccccccagaccctggccaacagagacagatgcagagtggcccagctggccctgctggacggccccttcgccgacctgggcgacggcggctgctacggcgacctgttctgcaaggccctgaagacctacaacatgctgtgcttcggcatctacagactgagagacgcccacctgagcacccccagccagtgcaccaagagatacgtgatcaccaaccccccctacgagttcgagctggtgcccaccgacctgatcttctgcctgatgcagttcgaccacaacgccggccagagcagagccagcctgagccacagcagccacagcagccagagcagcagcaagaagagcagcagcgtgcacagcatccccagcaccgccaacagacagaacagacccaagagcagagagagcagagacaagcagaacgccaccagaatgaacagaatgggccaggagaagaagtggttcaccgacgagcccgacaacgcctaccccagaaacatccagatcaagcccatgagcacccacatggccaaccagatcaaccagtacaagagcaccagcagcctgatcccccccatcagagaggtggaggacgagtgctag

SEQ ID NO: 94090 - DNA, 3504 bp, synthetic construct
  misc_feature 1..3504: note = Description of Artificial Sequence: Synthetic coding sequence
  source 1..3504: mol_type = other DNA
tgaggcggcggcggcggcggcggcggcagcagcctgagaatgagcagcaacatccacgccaaccacctgagcctggacgccagcagcagcagcagcagcagcagcagcagcagcagcagcagcagcagcagcagcagcagcagcagcgtgcacgagcccaagatggacgccctgatcatccccgtgaccatggaggtgccctgcgacagcagaggccagagaatgtggtgggccttcctggccagcagcatggtgaccttcttcggcggcctgttcatcatcctgctgtggagaaccctgaagtacctgtggaccgtgtgctgccactgcggcggcaagaccaaggaggcccagaagatcaacaacggcagcagccaggccgacggcaccctgaagcccgtggacgagaaggaggaggccgtggccgccgaggtgggctggatgaccagcgtgaaggactgggccggcgtgatgatcagcgcccagaccctgaccggcagagtgctggtggtgctggtgttcgccctgagcatcggcgccctggtgatctacttcatcgacagcagcaaccccatcgagagctgccagaacttctacaaggacttcaccctgcagatcgacatggccttcaacgtgttcttcctgctgtacttcggcctgagattcatcgccgccaacgacaagctgtggttctggctggaggtgaacagcgtggtggacttcttcaccgtgccccccgtgttcgtgagcgtgtacctgaacagaagctggctgggcctgagattcctgagagccctgagactgatccagttcagcgagatcctgcagttcctgaacatcctgaagaccagcaacagcatcaagctggtgaacctgctgagcatcttcatcagcacctggctgaccgccgccggcttcatccacctggtggagaacagcggcgacccctgggagaacttccagaacaaccaggccctgacctactgggagtgcgtgtacctgctgatggtgaccatgagcaccgtgggctacggcgacgtgtacgccaagaccaccctgggcagactgttcatggtgttcttcatcctgggcggcctggccatgttcgccagctacgtgcccgagatcatcgagctgatcggcaacagaaagaagtacggcggcagctacagcgccgtgagcggcagaaagcacatcgtggtgtgcggccacatcaccctggagagcgtgagcaacttcctgaaggacttcctgcacaaggacagagacgacgtgaacgtggagatcgtgttcctgcacaacatcagccccaacctggagctggaggccctgttcaagagacacttcacccaggtggagttctaccagggcagcgtgctgaacccccacgacctggccagagtgaagatcgagagcgccgacgcctgcctgatcctggccaacaagtactgcgccgaccccgacgccgaggacgccagcaacatcatgagagtgatcagcatcaagaactaccaccccaagatcagaatcatcacccagatgctgcagtaccacaacaaggcccacctgctgaacatccccagctggaactggaaggagggcgacgacgccatctgcctggccgagctgaagctgggcttcatcgcccagagctgcctggcccagggcctgagcaccatgctggccaacctgttcagcatgagaagcttcatcaagatcgaggaggacacctggcagaagtactacctggagggcgtgagcaacgagatgtacaccgagtacctgagcagcgccttcgtgggcctgagcttccccaccgtgtgcgagctgtgcttcgtgaagctgaagctgctgatgatcgccatcgagtacaagagcgccaacagagagagcagaatcctgatcaaccccggcaaccacctgaagatccaggagggcaccctgggcttcttcatcgccagcgacgccaaggaggtgaagagagccttcttctactgcaaggcctgccacgacgacatcaccgaccccaagagaatcaagaagtgcggctgcaagagactggaggacgagcagcccagcaccctgagccccaagaagaagcagagaaacggcggcatgagaaacagccccaacaccagccccaagctgatgagacacgaccccctgctgatccccggcaacgaccagatcgacaacatggacagcaacgtgaagaagtacgacagcaccggcatgttccactggtgcgcccccaaggagatcgagaaggtgatcctgaccagaagcgaggccgccatgaccgtgctgagcggccacgtggtggtgtgcatcttcggcgacgtgagcagcgccctgatcggcctgagaaacctggtgatgcccctgagagccagcaacttccactaccacgagctgaagcacatcgtgttcgtgggcagcatcgagtacctgaagagagagtgggagaccctgcacaacttccccaaggtgagcatcctgcccggcacccccctgagcagagccgacctgagagccgtgaacatcaacctgtgcgacatgtgcgtgatcctgagcgccaaccagaacaacatcgacgacaccagcctgcaggacaaggagtgcatcctggccagcctgaacatcaagagcatgcagttcgacgacagcatcggcgtgctgcaggccaacagccagggcttcaccccccccggcatggacagaagcagccccgacaacagccccgtgcacggcatgctgagacagcccagcatcaccaccggcgtgaacatccccatcatcaccgagctggtgaacgacaccaacgtgcagttcctggaccaggacgacgacgacgaccccgacaccgagctgtacctgacccagcccttcgcctgcggcaccgccttcgccgtgagcgtgctggacagcctgatgagcgccacctacttcaacgacaacatcctgaccctgatcagaaccctggtgaccggcggcgccacccccgagctggaggccctgatcgccgaggagaacgccctgagaggcggctacagcaccccccagaccctggccaacagagacagatgcagagtggcccagctggccctgctggacggccccttcgccgacctgggcgacggcggctgctacggcgacctgttctgcaaggccctgaagacctacaacatgctgtgcttcggcatctacagactgagagacgcccacctgagcacccccagccagtgcaccaagagatacgtgatcaccaaccccccctacgagttcgagctggtgcccaccgacctgatcttctgcctgatgcagttcgaccacaacgccggccagagcagagccagcctgagccacagcagccacagcagccagagcagcagcaagaagagcagcagcgtgcacagcatccccagcaccgccaacagacagaacagacccaagagcagagagagcagagacaagcagaacagaaaggagatggtgtacagatag

SEQ ID NO: 94091 - DNA, 3516 bp, synthetic construct
  misc_feature 1..3516: note = Description of Artificial Sequence: Synthetic coding sequence
  source 1..3516: mol_type = other DNA
atggacgccctgatcatccccgtgaccatggaggtgccctgcgacagcagaggccagagaatgtggtgggccttcctggccagcagcatggtgaccttcttcggcggcctgttcatcatcctgctgtggagaaccctgaagtacctgtggaccgtgtgctgccactgcggcggcaagaccaaggaggcccagaagatcaacaacggcagcagccaggccgacggcaccctgaagcccgtggacgagaaggaggaggccgtggccgccgaggtgggctggatgaccagcgtgaaggactgggccggcgtgatgatcagcgcccagaccctgaccggcagagtgctggtggtgctggtgttcgccctgagcatcggcgccctggtgatctacttcatcgacagcagcaaccccatcgagagctgccagaacttctacaaggacttcaccctgcagatcgacatggccttcaacgtgttcttcctgctgtacttcggcctgagattcatcgccgccaacgacaagctgtggttctggctggaggtgaacagcgtggtggacttcttcaccgtgccccccgtgttcgtgagcgtgtacctgaacagaagctggctgggcctgagattcctgagagccctgagactgatccagttcagcgagatcctgcagttcctgaacatcctgaagaccagcaacagcatcaagctggtgaacctgctgagcatcttcatcagcacctggctgaccgccgccggcttcatccacctggtggagaacagcggcgacccctgggagaacttccagaacaaccaggccctgacctactgggagtgcgtgtacctgctgatggtgaccatgagcaccgtgggctacggcgacgtgtacgccaagaccaccctgggcagactgttcatggtgttcttcatcctgggcggcctggccatgttcgccagctacgtgcccgagatcatcgagctgatcggcaacagaaagaagtacggcggcagctacagcgccgtgagcggcagaaagcacatcgtggtgtgcggccacatcaccctggagagcgtgagcaacttcctgaaggacttcctgcacaaggacagagacgacgtgaacgtggagatcgtgttcctgcacaacatcagccccaacctggagctggaggccctgttcaagagacacttcacccaggtggagttctaccagggcagcgtgctgaacccccacgacctggccagagtgaagatcgagagcgccgacgcctgcctgatcctggccaacaagtactgcgccgaccccgacgccgaggacgccagcaacatcatgagagtgatcagcatcaagaactaccaccccaagatcagaatcatcacccagatgctgcagtaccacaacaaggcccacctgctgaacatccccagctggaactggaaggagggcgacgacgccatctgcctggccgagctgaagctgggcttcatcgcccagagctgcctggcccagggcctgagcaccatgctggccaacctgttcagcatgagaagcttcatcaagatcgaggaggacacctggcagaagtactacctggagggcgtgagcaacgagatgtacaccgagtacctgagcagcgccttcgtgggcctgagcttccccaccgtgtgcgagctgtgcttcgtgaagctgaagctgctgatgatcgccatcgagtacaagagcgccaacagagagagcagaatcctgatcaaccccggcaaccacctgaagatccaggagggcaccctgggcttcttcatcgccagcgacgccaaggaggtgaagagagccttcttctactgcaaggcctgccacgacgacatcaccgaccccaagagaatcaagaagtgcggctgcaagagacccaagatgagcatctacaagagaatgagaagagcctgctgcttcgactgcggcagaagcgagagagactgcagctgcatgagcggcagagtgagaggcaacgtggacaccctggagagagccttccccctgagcagcgtgagcgtgaacgactgcagcaccagcttcagagccttcgaggacgagcagcccagcaccctgagccccaagaagaagcagagaaacggcggcatgagaaacagccccaacaccagccccaagctgatgagacacgaccccctgctgatccccggcaacgaccagatcgacaacatggacagcaacgtgaagaagtacgacagcaccggcatgttccactggtgcgcccccaaggagatcgagaaggtgatcctgaccagaagcgaggccgccatgaccgtgctgagcggccacgtggtggtgtgcatcttcggcgacgtgagcagcgccctgatcggcctgagaaacctggtgatgcccctgagagccagcaacttccactaccacgagctgaagcacatcgtgttcgtgggcagcatcgagtacctgaagagagagtgggagaccctgcacaacttccccaaggtgagcatcctgcccggcacccccctgagcagagccgacctgagagccgtgaacatcaacctgtgcgacatgtgcgtgatcctgagcgccaaccagaacaacatcgacgacaccagcctgcaggacaaggagtgcatcctggccagcctgaacatcaagagcatgcagttcgacgacagcatcggcgtgctgcaggccaacagccagggcttcaccccccccggcatggacagaagcagccccgacaacagccccgtgcacggcatgctgagacagcccagcatcaccaccggcgtgaacatccccatcatcaccgagctggtgaacgacaccaacgtgcagttcctggaccaggacgacgacgacgaccccgacaccgagctgtacctgacccagcccttcgcctgcggcaccgccttcgccgtgagcgtgctggacagcctgatgagcgccacctacttcaacgacaacatcctgaccctgatcagaaccctggtgaccggcggcgccacccccgagctggaggccctgatcgccgaggagaacgccctgagaggcggctacagcaccccccagaccctggccaacagagacagatgcagagtggcccagctggccctgctggacggccccttcgccgacctgggcgacggcggctgctacggcgacctgttctgcaaggccctgaagacctacaacatgctgtgcttcggcatctacagactgagagacgcccacctgagcacccccagccagtgcaccaagagatacgtgatcaccaaccccccctacgagttcgagctggtgcccaccgacctgatcttctgcctgatgcagttcgaccacaacgccggccagagcagagccagcctgagccacagcagccacagcagccagagcagcagcaagaagagcagcagcgtgcacagcatccccagcaccgccaacagacagaacagacccaagagcagagagagcagagacaagcagaacagaaaggagatggtgtacagatag

SEQ ID NO: 94092 - DNA, 3534 bp, synthetic construct
  misc_feature 1..3534: note = Description of Artificial Sequence: Synthetic coding sequence
  source 1..3534: mol_type = other DNA
atggccaacggcggcggcggcggcggcggcagcagcggcggcggcggcggcggcggcggcagcagcctgagaatgagcagcaacatccacgccaaccacctgagcctggacgccagcagcagcagcagcagcagcagcagcagcagcagcagcagcagcagcagcagcagcagcagcagcgtgcacgagcccaagatggacgccctgatcatccccgtgaccatggaggtgccctgcgacagcagaggccagagaatgtggtgggccttcctggccagcagcatggtgaccttcttcggcggcctgttcatcatcctgctgtggagaaccctgaagtacctgtggaccgtgtgctgccactgcggcggcaagaccaaggaggcccagaagatcaacaacggcagcagccaggccgacggcaccctgaagcccgtggacgagaaggaggaggccgtggccgccgaggtgggctggatgaccagcgtgaaggactgggccggcgtgatgatcagcgcccagaccctgaccggcagagtgctggtggtgctggtgttcgccctgagcatcggcgccctggtgatctacttcatcgacagcagcaaccccatcgagagctgccagaacttctacaaggacttcaccctgcagatcgacatggccttcaacgtgttcttcctgctgtacttcggcctgagattcatcgccgccaacgacaagctgtggttctggctggaggtgaacagcgtggtggacttcttcaccgtgccccccgtgttcgtgagcgtgtacctgaacagaagctggctgggcctgagattcctgagagccctgagactgatccagttcagcgagatcctgcagttcctgaacatcctgaagaccagcaacagcatcaagctggtgaacctgctgagcatcttcatcagcacctggctgaccgccgccggcttcatccacctggtggagaacagcggcgacccctgggagaacttccagaacaaccaggccctgacctactgggagtgcgtgtacctgctgatggtgaccatgagcaccgtgggctacggcgacgtgtacgccaagaccaccctgggcagactgttcatggtgttcttcatcctgggcggcctggccatgttcgccagctacgtgcccgagatcatcgagctgatcggcaacagaaagaagtacggcggcagctacagcgccgtgagcggcagaaagcacatcgtggtgtgcggccacatcaccctggagagcgtgagcaacttcctgaaggacttcctgcacaaggacagagacgacgtgaacgtggagatcgtgttcctgcacaacatcagccccaacctggagctggaggccctgttcaagagacacttcacccaggtggagttctaccagggcagcgtgctgaacccccacgacctggccagagtgaagatcgagagcgccgacgcctgcctgatcctggccaacaagtactgcgccgaccccgacgccgaggacgccagcaacatcatgagagtgatcagcatcaagaactaccaccccaagatcagaatcatcacccagatgctgcagtaccacaacaaggcccacctgctgaacatccccagctggaactggaaggagggcgacgacgccatctgcctggccgagctgaagctgggcttcatcgcccagagctgcctggcccagggcctgagcaccatgctggccaacctgttcagcatgagaagcttcatcaagatcgaggaggacacctggcagaagtactacctggagggcgtgagcaacgagatgtacaccgagtacctgagcagcgccttcgtgggcctgagcttccccaccgtgtgcgagctgtgcttcgtgaagctgaagctgctgatgatcgccatcgagtacaagagcgccaacagagagagcagaatcctgatcaaccccggcaaccacctgaagatccaggagggcaccctgggcttcttcatcgccagcgacgccaaggaggtgaagagagccttcttctactgcaaggcctgccacgacgacatcaccgaccccaagagaatcaagaagtgcggctgcaagagactggaggacgagcagcccagcaccctgagccccaagaagaagcagagaaacggcggcatgagaaacagccccaacaccagccccaagctgatgagacacgaccccctgctgatccccggcaacgaccagatcgacaacatggacagcaacgtgaagaagtacgacagcaccggcatgttccactggtgcgcccccaaggagatcgagaaggtgatcctgaccagaagcgaggccgccatgaccgtgctgagcggccacgtggtggtgtgcatcttcggcgacgtgagcagcgccctgatcggcctgagaaacctggtgatgcccctgagagccagcaacttccactaccacgagctgaagcacatcgtgttcgtgggcagcatcgagtacctgaagagagagtgggagaccctgcacaacttccccaaggtgagcatcctgcccggcacccccctgagcagagccgacctgagagccgtgaacatcaacctgtgcgacatgtgcgtgatcctgagcgccaaccagaacaacatcgacgacaccagcctgcaggacaaggagtgcatcctggccagcctgaacatcaagagcatgcagttcgacgacagcatcggcgtgctgcaggccaacagccagggcttcaccccccccggcatggacagaagcagccccgacaacagccccgtgcacggcatgctgagacagcccagcatcaccaccggcgtgaacatccccatcatcaccgagctggtgaacgacaccaacgtgcagttcctggaccaggacgacgacgacgaccccgacaccgagctgtacctgacccagcccttcgcctgcggcaccgccttcgccgtgagcgtgctggacagcctgatgagcgccacctacttcaacgacaacatcctgaccctgatcagaaccctggtgaccggcggcgccacccccgagctggaggccctgatcgccgaggagaacgccctgagaggcggctacagcaccccccagaccctggccaacagagacagatgcagagtggcccagctggccctgctggacggccccttcgccgacctgggcgacggcggctgctacggcgacctgttctgcaaggccctgaagacctacaacatgctgtgcttcggcatctacagactgagagacgcccacctgagcacccccagccagtgcaccaagagatacgtgatcaccaaccccccctacgagttcgagctggtgcccaccgacctgatcttctgcctgatgcagttcgaccacaacgccggccagagcagagccagcctgagccacagcagccacagcagccagagcagcagcaagaagagcagcagcgtgcacagcatccccagcaccgccaacagacagaacagacccaagagcagagagagcagagacaagcagaagaaggagatggtgtacagatag

SEQ ID NO: 94093 - DNA, 3618 bp, synthetic construct
  misc_feature 1..3618: note = Description of Artificial Sequence: Synthetic coding sequence
  source 1..3618: mol_type = other DNA
atggccaacggcggcggcggcggcggcggcagcagcggcggcggcggcggcggcggcggcagcagcctgagaatgagcagcaacatccacgccaaccacctgagcctggacgccagcagcagcagcagcagcagcagcagcagcagcagcagcagcagcagcagcagcagcagcagcagcgtgcacgagcccaagatggacgccctgatcatccccgtgaccatggaggtgccctgcgacagcagaggccagagaatgtggtgggccttcctggccagcagcatggtgaccttcttcggcggcctgttcatcatcctgctgtggagaaccctgaagtacctgtggaccgtgtgctgccactgcggcggcaagaccaaggaggcccagaagatcaacaacggcagcagccaggccgacggcaccctgaagcccgtggacgagaaggaggaggccgtggccgccgaggtgggctggatgaccagcgtgaaggactgggccggcgtgatgatcagcgcccagaccctgaccggcagagtgctggtggtgctggtgttcgccctgagcatcggcgccctggtgatctacttcatcgacagcagcaaccccatcgagagctgccagaacttctacaaggacttcaccctgcagatcgacatggccttcaacgtgttcttcctgctgtacttcggcctgagattcatcgccgccaacgacaagctgtggttctggctggaggtgaacagcgtggtggacttcttcaccgtgccccccgtgttcgtgagcgtgtacctgaacagaagctggctgggcctgagattcctgagagccctgagactgatccagttcagcgagatcctgcagttcctgaacatcctgaagaccagcaacagcatcaagctggtgaacctgctgagcatcttcatcagcacctggctgaccgccgccggcttcatccacctggtggagaacagcggcgacccctgggagaacttccagaacaaccaggccctgacctactgggagtgcgtgtacctgctgatggtgaccatgagcaccgtgggctacggcgacgtgtacgccaagaccaccctgggcagactgttcatggtgttcttcatcctgggcggcctggccatgttcgccagctacgtgcccgagatcatcgagctgatcggcaacagaaagaagtacggcggcagctacagcgccgtgagcggcagaaagcacatcgtggtgtgcggccacatcaccctggagagcgtgagcaacttcctgaaggacttcctgcacaaggacagagacgacgtgaacgtggagatcgtgttcctgcacaacatcagccccaacctggagctggaggccctgttcaagagacacttcacccaggtggagttctaccagggcagcgtgctgaacccccacgacctggccagagtgaagatcgagagcgccgacgcctgcctgatcctggccaacaagtactgcgccgaccccgacgccgaggacgccagcaacatcatgagagtgatcagcatcaagaactaccaccccaagatcagaatcatcacccagatgctgcagtaccacaacaaggcccacctgctgaacatccccagctggaactggaaggagggcgacgacgccatctgcctggccgagctgaagctgggcttcatcgcccagagctgcctggcccagggcctgagcaccatgctggccaacctgttcagcatgagaagcttcatcaagatcgaggaggacacctggcagaagtactacctggagggcgtgagcaacgagatgtacaccgagtacctgagcagcgccttcgtgggcctgagcttccccaccgtgtgcgagctgtgcttcgtgaagctgaagctgctgatgatcgccatcgagtacaagagcgccaacagagagagcagaatcctgatcaaccccggcaaccacctgaagatccaggagggcaccctgggcttcttcatcgccagcgacgccaaggaggtgaagagagccttcttctactgcaaggcctgccacgacgacatcaccgaccccaagagaatcaagaagtgcggctgcaagagactggaggacgagcagcccagcaccctgagccccaagaagaagcagagaaacggcggcatgagaaacagccccaacaccagccccaagctgatgagacacgaccccctgctgatccccggcaacgaccagatcgacaacatggacagcaacgtgaagaagtacgacagcaccggcatgttccactggtgcgcccccaaggagatcgagaaggtgatcctgaccagaagcgaggccgccatgaccgtgctgagcggccacgtggtggtgtgcatcttcggcgacgtgagcagcgccctgatcggcctgagaaacctggtgatgcccctgagagccagcaacttccactaccacgagctgaagcacatcgtgttcgtgggcagcatcgagtacctgaagagagagtgggagaccctgcacaacttccccaaggtgagcatcctgcccggcacccccctgagcagagccgacctgagagccgtgaacatcaacctgtgcgacatgtgcgtgatcctgagcgccaaccagaacaacatcgacgacaccagcctgcaggacaaggagtgcatcctggccagcctgaacatcaagagcatgcagttcgacgacagcatcggcgtgctgcaggccaacagccagggcttcaccccccccggcatggacagaagcagccccgacaacagccccgtgcacggcatgctgagacagcccagcatcaccaccggcgtgaacatccccatcatcaccgagctggccaagcccggcaagctgcccctggtgagcgtgaaccaggagaagaacagcggcacccacatcctgatgatcaccgagctggtgaacgacaccaacgtgcagttcctggaccaggacgacgacgacgaccccgacaccgagctgtacctgacccagcccttcgcctgcggcaccgccttcgccgtgagcgtgctggacagcctgatgagcgccacctacttcaacgacaacatcctgaccctgatcagaaccctggtgaccggcggcgccacccccgagctggaggccctgatcgccgaggagaacgccctgagaggcggctacagcaccccccagaccctggccaacagagacagatgcagagtggcccagctggccctgctggacggccccttcgccgacctgggcgacggcggctgctacggcgacctgttctgcaaggccctgaagacctacaacatgctgtgcttcggcatctacagactgagagacgcccacctgagcacccccagccagtgcaccaagagatacgtgatcaccaaccccccctacgagttcgagctggtgcccaccgacctgatcttctgcctgatgcagttcgaccacaacgccggccagagcagagccagcctgagccacagcagccacagcagccagagcagcagcaagaagagcagcagcgtgcacagcatccccagcaccgccaacagacagaacagacccaagagcagagagagcagagacaagcagaacagaaaggagatggtgtacagatag

SEQ ID NO: 94094 - DNA, 3678 bp, synthetic construct
  misc_feature 1..3678: note = Description of Artificial Sequence: Synthetic coding sequence
  source 1..3678: mol_type = other DNA
cccaagatggacgccctgatcatccccgtgaccatggaggtgccctgcgacagcagaggccagagaatgtggtgggccttcctggccagcagcatggtgaccttcttcggcggcctgttcatcatcctgctgtggagaaccctgaagtacctgtggaccgtgtgctgccactgcggcggcaagaccaaggaggcccagaagatcaacaacggcagcagccaggccgacggcaccctgaagcccgtggacgagaaggaggaggccgtggccgccgaggtgggctggatgaccagcgtgaaggactgggccggcgtgatgatcagcgcccagaccctgaccggcagagtgctggtggtgctggtgttcgccctgagcatcggcgccctggtgatctacttcatcgacagcagcaaccccatcgagagctgccagaacttctacaaggacttcaccctgcagatcgacatggccttcaacgtgttcttcctgctgtacttcggcctgagattcatcgccgccaacgacaagctgtggttctggctggaggtgaacagcgtggtggacttcttcaccgtgccccccgtgttcgtgagcgtgtacctgaacagaagctggctgggcctgagattcctgagagccctgagactgatccagttcagcgagatcctgcagttcctgaacatcctgaagaccagcaacagcatcaagctggtgaacctgctgagcatcttcatcagcacctggctgaccgccgccggcttcatccacctggtggagaacagcggcgacccctgggagaacttccagaacaaccaggccctgacctactgggagtgcgtgtacctgctgatggtgaccatgagcaccgtgggctacggcgacgtgtacgccaagaccaccctgggcagactgttcatggtgttcttcatcctgggcggcctggccatgttcgccagctacgtgcccgagatcatcgagctgatcggcaacagaaagaagtacggcggcagctacagcgccgtgagcggcagaaagcacatcgtggtgtgcggccacatcaccctggagagcgtgagcaacttcctgaaggacttcctgcacaaggacagagacgacgtgaacgtggagatcgtgttcctgcacaacatcagccccaacctggagctggaggccctgttcaagagacacttcacccaggtggagttctaccagggcagcgtgctgaacccccacgacctggccagagtgaagatcgagagcgccgacgcctgcctgatcctggccaacaagtactgcgccgaccccgacgccgaggacgccagcaacatcatgagagtgatcagcatcaagaactaccaccccaagatcagaatcatcacccagatgctgcagtaccacaacaaggcccacctgctgaacatccccagctggaactggaaggagggcgacgacgccatctgcctggccgagctgaagctgggcttcatcgcccagagctgcctggcccagggcctgagcaccatgctggccaacctgttcagcatgagaagcttcatcaagatcgaggaggacacctggcagaagtactacctggagggcgtgagcaacgagatgtacaccgagtacctgagcagcgccttcgtgggcctgagcttccccaccgtgtgcgagctgtgcttcgtgaagctgaagctgctgatgatcgccatcgagtacaagagcgccaacagagagagcagaatcctgatcaaccccggcaaccacctgaagatccaggagggcaccctgggcttcttcatcgccagcgacgccaaggaggtgaagagagccttcttctactgcaaggcctgccacgacgacatcaccgaccccaagagaatcaagaagtgcggctgcaagagacccaagatgagcatctacaagagaatgagaagagcctgctgcttcgactgcggcagaagcgagagagactgcagctgcatgagcggcagagtgagaggcaacgtggacaccctggagagagccttccccctgagcagcgtgagcgtgaacgactgcagcaccagcttcagagccttcgaggacgagcagcccagcaccctgagccccaagaagaagcagagaaacggcggcatgagaaacagccccaacaccagccccaagctgatgagacacgaccccctgctgatccccggcaacgaccagatcgacaacatggacagcaacgtgaagaagtacgacagcaccggcatgttccactggtgcgcccccaaggagatcgagaaggtgatcctgaccagaagcgaggccgccatgaccgtgctgagcggccacgtggtggtgtgcatcttcggcgacgtgagcagcgccctgatcggcctgagaaacctggtgatgcccctgagagccagcaacttccactaccacgagctgaagcacatcgtgttcgtgggcagcatcgagtacctgaagagagagtgggagaccctgcacaacttccccaaggtgagcatcctgcccggcacccccctgagcagagccgacctgagagccgtgaacatcaacctgtgcgacatgtgcgtgatcctgagcgccaaccagaacaacatcgacgacaccagcctgcaggacaaggagtgcatcctggccagcctgaacatcaagagcatgcagttcgacgacagcatcggcgtgctgcaggccaacagccagggcttcaccccccccggcatggacagaagcagccccgacaacagccccgtgcacggcatgctgagacagcccagcatcaccaccggcgtgaacatccccatcatcaccgagctggtgaacgacaccaacgtgcagttcctggaccaggacgacgacgacgaccccgacaccgagctgtacctgacccagcccttcgcctgcggcaccgccttcgccgtgagcgtgctggacagcctgatgagcgccacctacttcaacgacaacatcctgaccctgatcagaaccctggtgaccggcggcgccacccccgagctggaggccctgatcgccgaggagaacgccctgagaggcggctacagcaccccccagaccctggccaacagagacagatgcagagtggcccagctggccctgctggacggccccttcgccgacctgggcgacggcggctgctacggcgacctgttctgcaaggccctgaagacctacaacatgctgtgcttcggcatctacagactgagagacgcccacctgagcacccccagccagtgcaccaagagatacgtgatcaccaaccccccctacgagttcgagctggtgcccaccgacctgatcttctgcctgatgcagttcgaccacaacgccggccagagcagagccagcctgagccacagcagccacagcagccagagcagcagcaagaagagcagcagcgtgcacagcatccccagcaccgccaacagacagaacagacccaagagcagagagagcagagacaagcagaacgccaccagaatgaacagaatgggccaggagaagaagtggttcaccgacgagcccgacaacgcctaccccagaaacatccagatcaagcccatgagcacccacatggccaaccagatcaaccagtacaagagcaccagcagcctgatcccccccatcagagaggtggaggacgagtgctag

SEQ ID NO: 94095 - DNA, 3660 bp, synthetic construct
  misc_feature 1..3660: note = Description of Artificial Sequence: Synthetic coding sequence
  source 1..3660: mol_type = other DNA
atggccaacggcggcggcggcggcggcggcagcagcggcggcggcggcggcggcggcggcagcagcctgagaatgagcagcaacatccacgccaaccacctgagcctggacgccagcagcagcagcagcagcagcagcagcagcagcagcagcagcagcagcagcagcagcagcagcagcgtgcacgagcccaagatggacgccctgatcatccccgtgaccatggaggtgccctgcgacagcagaggccagagaatgtggtgggccttcctggccagcagcatggtgaccttcttcggcggcctgttcatcatcctgctgtggagaaccctgaagtacctgtggaccgtgtgctgccactgcggcggcaagaccaaggaggcccagaagatcaacaacggcagcagccaggccgacggcaccctgaagcccgtggacgagaaggaggaggccgtggccgccgaggtgggctggatgaccagcgtgaaggactgggccggcgtgatgatcagcgcccagaccctgaccggcagagtgctggtggtgctggtgttcgccctgagcatcggcgccctggtgatctacttcatcgacagcagcaaccccatcgagagctgccagaacttctacaaggacttcaccctgcagatcgacatggccttcaacgtgttcttcctgctgtacttcggcctgagattcatcgccgccaacgacaagctgtggttctggctggaggtgaacagcgtggtggacttcttcaccgtgccccccgtgttcgtgagcgtgtacctgaacagaagctggctgggcctgagattcctgagagccctgagactgatccagttcagcgagatcctgcagttcctgaacatcctgaagaccagcaacagcatcaagctggtgaacctgctgagcatcttcatcagcacctggctgaccgccgccggcttcatccacctggtggagaacagcggcgacccctgggagaacttccagaacaaccaggccctgacctactgggagtgcgtgtacctgctgatggtgaccatgagcaccgtgggctacggcgacgtgtacgccaagaccaccctgggcagactgttcatggtgttcttcatcctgggcggcctggccatgttcgccagctacgtgcccgagatcatcgagctgatcggcaacagaaagaagtacggcggcagctacagcgccgtgagcggcagaaagcacatcgtggtgtgcggccacatcaccctggagagcgtgagcaacttcctgaaggacttcctgcacaaggacagagacgacgtgaacgtggagatcgtgttcctgcacaacatcagccccaacctggagctggaggccctgttcaagagacacttcacccaggtggagttctaccagggcagcgtgctgaacccccacgacctggccagagtgaagatcgagagcgccgacgcctgcctgatcctggccaacaagtactgcgccgaccccgacgccgaggacgccagcaacatcatgagagtgatcagcatcaagaactaccaccccaagatcagaatcatcacccagatgctgcagtaccacaacaaggcccacctgctgaacatccccagctggaactggaaggagggcgacgacgccatctgcctggccgagctgaagctgggcttcatcgcccagagctgcctggcccagggcctgagcaccatgctggccaacctgttcagcatgagaagcttcatcaagatcgaggaggacacctggcagaagtactacctggagggcgtgagcaacgagatgtacaccgagtacctgagcagcgccttcgtgggcctgagcttccccaccgtgtgcgagctgtgcttcgtgaagctgaagctgctgatgatcgccatcgagtacaagagcgccaacagagagagcagaatcctgatcaaccccggcaaccacctgaagatccaggagggcaccctgggcttcttcatcgccagcgacgccaaggaggtgaagagagccttcttctactgcaaggcctgccacgacgacatcaccgaccccaagagaatcaagaagtgcggctgcaagagactggaggacgagcagcccagcaccctgagccccaagaagaagcagagaaacggcggcatgagaaacagccccaacaccagccccaagctgatgagacacgaccccctgctgatccccggcaacgaccagatcgacaacatggacagcaacgtgaagaagtacgacagcaccggcatgttccactggtgcgcccccaaggagatcgagaaggtgatcctggtgaccggctggatgccctacctgggccccagagtgctgatgacctgcctggacatcggcgtggtgtgcatgcccaccgacatccagagcaccagccccgccagcatcaagaagttcaaggagaccagaagcgaggccgccatgaccgtgctgagcggccacgtggtggtgtgcatcttcggcgacgtgagcagcgccctgatcggcctgagaaacctggtgatgcccctgagagccagcaacttccactaccacgagctgaagcacatcgtgttcgtgggcagcatcgagtacctgaagagagagtgggagaccctgcacaacttccccaaggtgagcatcctgcccggcacccccctgagcagagccgacctgagagccgtgaacatcaacctgtgcgacatgtgcgtgatcctgagcgccaaccagaacaacatcgacgacaccagcctgcaggacaaggagtgcatcctggccagcctgaacatcaagagcatgcagttcgacgacagcatcggcgtgctgcaggccaacagccagggcttcaccccccccggcatggacagaagcagccccgacaacagccccgtgcacggcatgctgagacagcccagcatcaccaccggcgtgaacatccccatcatcaccgagctggtgaacgacaccaacgtgcagttcctggaccaggacgacgacgacgaccccgacaccgagctgtacctgacccagcccttcgcctgcggcaccgccttcgccgtgagcgtgctggacagcctgatgagcgccacctacttcaacgacaacatcctgaccctgatcagaaccctggtgaccggcggcgccacccccgagctggaggccctgatcgccgaggagaacgccctgagaggcggctacagcaccccccagaccctggccaacagagacagatgcagagtggcccagctggccctgctggacggccccttcgccgacctgggcgacggcggctgctacggcgacctgttctgcaaggccctgaagacctacaacatgctgtgcttcggcatctacagactgagagacgcccacctgagcacccccagccagtgcaccaagagatacgtgatcaccaaccccccctacgagttcgagctggtgcccaccgacctgatcttctgcctgatgcagttcgaccacaacgccggccagagcagagccagcctgagccacagcagccacagcagccagagcagcagcaagaagagcagcagcgtgcacagcatccccagcaccgccaacagacagaacagacccaagagcagagagagcagagacaagcagaagtacgtgcaggaggagagactgtag

SEQ ID NO: 94096 - DNA, 3723 bp, synthetic construct
  misc_feature 1..3723: note = Description of Artificial Sequence: Synthetic coding sequence
  source 1..3723: mol_type = other DNA
atggccaacggcggcggcggcggcggcggcagcagcggcggcggcggcggcggcggcggcagcagcctgagaatgagcagcaacatccacgccaaccacctgagcctggacgccagcagcagcagcagcagcagcagcagcagcagcagcagcagcagcagcagcagcagcagcagcagcgtgcacgagcccaagatggacgccctgatcatccccgtgaccatggaggtgccctgcgacagcagaggccagagaatgtggtgggccttcctggccagcagcatggtgaccttcttcggcggcctgttcatcatcctgctgtggagaaccctgaagtacctgtggaccgtgtgctgccactgcggcggcaagaccaaggaggcccagaagatcaacaacggcagcagccaggccgacggcaccctgaagcccgtggacgagaaggaggaggccgtggccgccgaggtgggctggatgaccagcgtgaaggactgggccggcgtgatgatcagcgcccagaccctgaccggcagagtgctggtggtgctggtgttcgccctgagcatcggcgccctggtgatctacttcatcgacagcagcaaccccatcgagagctgccagaacttctacaaggacttcaccctgcagatcgacatggccttcaacgtgttcttcctgctgtacttcggcctgagattcatcgccgccaacgacaagctgtggttctggctggaggtgaacagcgtggtggacttcttcaccgtgccccccgtgttcgtgagcgtgtacctgaacagaagctggctgggcctgagattcctgagagccctgagactgatccagttcagcgagatcctgcagttcctgaacatcctgaagaccagcaacagcatcaagctggtgaacctgctgagcatcttcatcagcacctggctgaccgccgccggcttcatccacctggtggagaacagcggcgacccctgggagaacttccagaacaaccaggccctgacctactgggagtgcgtgtacctgctgatggtgaccatgagcaccgtgggctacggcgacgtgtacgccaagaccaccctgggcagactgttcatggtgttcttcatcctgggcggcctggccatgttcgccagctacgtgcccgagatcatcgagctgatcggcaacagaaagaagtacggcggcagctacagcgccgtgagcggcagaaagcacatcgtggtgtgcggccacatcaccctggagagcgtgagcaacttcctgaaggacttcctgcacaaggacagagacgacgtgaacgtggagatcgtgttcctgcacaacatcagccccaacctggagctggaggccctgttcaagagacacttcacccaggtggagttctaccagggcagcgtgctgaacccccacgacctggccagagtgaagatcgagagcgccgacgcctgcctgatcctggccaacaagtactgcgccgaccccgacgccgaggacgccagcaacatcatgagagtgatcagcatcaagaactaccaccccaagatcagaatcatcacccagatgctgcagtaccacaacaaggcccacctgctgaacatccccagctggaactggaaggagggcgacgacgccatctgcctggccgagctgaagctgggcttcatcgcccagagctgcctggcccagggcctgagcaccatgctggccaacctgttcagcatgagaagcttcatcaagatcgaggaggacacctggcagaagtactacctggagggcgtgagcaacgagatgtacaccgagtacctgagcagcgccttcgtgggcctgagcttccccaccgtgtgcgagctgtgcttcgtgaagctgaagctgctgatgatcgccatcgagtacaagagcgccaacagagagagcagaggcagactgagcatcctgatcaaccccggcaaccacctgaagatccaggagggcaccctgggcttcttcatcgccagcgacgccaaggaggtgaagagagccttcttctactgcaaggcctgccacgacgacatcaccgaccccaagagaatcaagaagtgcggctgcaagagacccaagatgagcatctacaagagaatgagaagagcctgctgcttcgactgcggcagaagcgagagagactgcagctgcatgagcggcagagtgagaggcaacgtggacaccctggagagagccttccccctgagcagcgtgagcgtgaacgactgcagcaccagcttcagagccttcgaggacgagcagcccagcaccctgagccccaagaagaagcagagaaacggcggcatgagaaacagccccaacaccagccccaagctgatgagacacgaccccctgctgatccccggcaacgaccagatcgacaacatggacagcaacgtgaagaagtacgacagcaccggcatgttccactggtgcgcccccaaggagatcgagaaggtgatcctgaccagaagcgaggccgccatgaccgtgctgagcggccacgtggtggtgtgcatcttcggcgacgtgagcagcgccctgatcggcctgagaaacctggtgatgcccctgagagccagcaacttccactaccacgagctgaagcacatcgtgttcgtgggcagcatcgagtacctgaagagagagtgggagaccctgcacaacttccccaaggtgagcatcctgcccggcacccccctgagcagagccgacctgagagccgtgaacatcaacctgtgcgacatgtgcgtgatcctgagcgccaaccagaacaacatcgacgacaccagcctgcaggacaaggagtgcatcctggccagcctgaacatcaagagcatgcagttcgacgacagcatcggcgtgctgcaggccaacagccagggcttcaccccccccggcatggacagaagcagccccgacaacagccccgtgcacggcatgctgagacagcccagcatcaccaccggcgtgaacatccccatcatcaccgagctggtgaacgacaccaacgtgcagttcctggaccaggacgacgacgacgaccccgacaccgagctgtacctgacccagcccttcgcctgcggcaccgccttcgccgtgagcgtgctggacagcctgatgagcgccacctacttcaacgacaacatcctgaccctgatcagaaccctggtgaccggcggcgccacccccgagctggaggccctgatcgccgaggagaacgccctgagaggcggctacagcaccccccagaccctggccaacagagacagatgcagagtggcccagctggccctgctggacggccccttcgccgacctgggcgacggcggctgctacggcgacctgttctgcaaggccctgaagacctacaacatgctgtgcttcggcatctacagactgagagacgcccacctgagcacccccagccagtgcaccaagagatacgtgatcaccaaccccccctacgagttcgagctggtgcccaccgacctgatcttctgcctgatgcagttcgaccacaacgccggccagagcagagccagcctgagccacagcagccacagcagccagagcagcagcaagaagagcagcagcgtgcacagcatccccagcaccgccaacagacagaacagacccaagagcagagagagcagagacaagcagaagtacgtgcaggaggagagactgtag

SEQ ID NO: 94097 - DNA, 2970 bp, synthetic construct
  misc_feature 1..2970: note = Description of Artificial Sequence: Synthetic coding sequence
  source 1..2970: mol_type = other DNA
atggccttcaacgtgttcttcctgctgtacttcggcctgagattcatcgccgccaacgacaagctgtggttctggctggaggtgaacagcgtggtggacttcttcaccgtgccccccgtgttcgtgagcgtgtacctgaacagaagctggctgggcctgagattcctgagagccctgagactgatccagttcagcgagatcctgcagttcctgaacatcctgaagaccagcaacagcatcaagctggtgaacctgctgagcatcttcatcagcacctggctgaccgccgccggcttcatccacctggtggagaacagcggcgacccctgggagaacttccagaacaaccaggccctgacctactgggagtgcgtgtacctgctgatggtgaccatgagcaccgtgggctacggcgacgtgtacgccaagaccaccctgggcagactgttcatggtgttcttcatcctgggcggcctggccatgttcgccagctacgtgcccgagatcatcgagctgatcggcaacagaaagaagtacggcggcagctacagcgccgtgagcggcagaaagcacatcgtggtgtgcggccacatcaccctggagagcgtgagcaacttcctgaaggacttcctgcacaaggacagagacgacgtgaacgtggagatcgtgttcctgcacaacatcagccccaacctggagctggaggccctgttcaagagacacttcacccaggtggagttctaccagggcagcgtgctgaacccccacgacctggccagagtgaagatcgagagcgccgacgcctgcctgatcctggccaacaagtactgcgccgaccccgacgccgaggacgccagcaacatcatgagagtgatcagcatcaagaactaccaccccaagatcagaatcatcacccagatgctgcagtaccacaacaaggcccacctgctgaacatccccagctggaactggaaggagggcgacgacgccatctgcctggccgagctgaagctgggcttcatcgcccagagctgcctggcccagggcctgagcaccatgctggccaacctgttcagcatgagaagcttcatcaagatcgaggaggacacctggcagaagtactacctggagggcgtgagcaacgagatgtacaccgagtacctgagcagcgccttcgtgggcctgagcttccccaccgtgtgcgagctgtgcttcgtgaagctgaagctgctgatgatcgccatcgagtacaagagcgccaacagagagagcagaatcctgatcaaccccggcaaccacctgaagatccaggagggcaccctgggcttcttcatcgccagcgacgccaaggaggtgaagagagccttcttctactgcaaggcctgccacgacgacatcaccgaccccaagagaatcaagaagtgcggctgcaagagactgaaggtggccgccagaagcagatacagcaaggaccccttcgagttcaagaaggagacccccaacagcagactggtgaccgagcccgtggaggacgagcagcccagcaccctgagccccaagaagaagcagagaaacggcggcatgagaaacagccccaacaccagccccaagctgatgagacacgaccccctgctgatccccggcaacgaccagatcgacaacatggacagcaacgtgaagaagtacgacagcaccggcatgttccactggtgcgcccccaaggagatcgagaaggtgatcctgaccagaagcgaggccgccatgaccgtgctgagcggccacgtggtggtgtgcatcttcggcgacgtgagcagcgccctgatcggcctgagaaacctggtgatgcccctgagagccagcaacttccactaccacgagctgaagcacatcgtgttcgtgggcagcatcgagtacctgaagagagagtgggagaccctgcacaacttccccaaggtgagcatcctgcccggcacccccctgagcagagccgacctgagagccgtgaacatcaacctgtgcgacatgtgcgtgatcctgagcgccaaccagaacaacatcgacgacaccagcctgcaggacaaggagtgcatcctggccagcctgaacatcaagagcatgcagttcgacgacagcatcggcgtgctgcaggccaacagccagggcttcaccccccccggcatggacagaagcagccccgacaacagccccgtgcacggcatgctgagacagcccagcatcaccaccggcgtgaacatccccatcatcaccgagctggtgaacgacaccaacgtgcagttcctggaccaggacgacgacgacgaccccgacaccgagctgtacctgacccagcccttcgcctgcggcaccgccttcgccgtgagcgtgctggacagcctgatgagcgccacctacttcaacgacaacatcctgaccctgatcagaaccctggtgaccggcggcgccacccccgagctggaggccctgatcgccgaggagaacgccctgagaggcggctacagcaccccccagaccctggccaacagagacagatgcagagtggcccagctggccctgctggacggccccttcgccgacctgggcgacggcggctgctacggcgacctgttctgcaaggccctgaagacctacaacatgctgtgcttcggcatctacagactgagagacgcccacctgagcacccccagccagtgcaccaagagatacgtgatcaccaaccccccctacgagttcgagctggtgcccaccgacctgatcttctgcctgatgcagttcgaccacaacgccggccagagcagagccagcctgagccacagcagccacagcagccagagcagcagcaagaagagcagcagcgtgcacagcatccccagcaccgccaacagacagaacagacccaagagcagagagagcagagacaagcagaagtacgtgcaggaggagagactgtag

SEQ ID NO: 94098 - DNA, 543 bp, synthetic construct
  misc_feature 1..543: note = Description of Artificial Sequence: Synthetic coding sequence
  source 1..543: mol_type = other DNA
tgaaagatcagaatcatcacccagatgctgcagtaccacaacaaggcccacctgctgaacatccccagctggaactggaaggagggcgacgacgccatctgcctggccgagctgaagctgggcttcatcgcccagagctgcctggcccagggcctgagcaccatgctggccaacctgttcagcatgagaagcttcatcaagatcgaggaggacacctggcagaagtactacctggagggcgtgagcaacgagatgtacaccgagtacctgagcagcgccttcgtgggcctgagcttccccaccgtgtgcgagctgtgcttcgtgaagctgaagctgctgatgatcgccatcgagtacaagagcgccaacagagagagcagaatcctgatcaaccccggcaaccacctgaagatccaggagggcaccctgggcttcttcatcgccagcgacgccaaggaggtgaagagacccccccagctgtgcctgcccctggccgcccagaagagatgcttccagagcgacaagctggacatcttcatctag

SEQ ID NO: 94099 - DNA, 2661 bp, synthetic construct
  misc_feature 1..2661: note = Description of Artificial Sequence: Synthetic coding sequence
  source 1..2661: mol_type = other DNA
tgaaacagcggcgacccctgggagaacttccagaacaaccaggccctgacctactgggagtgcgtgtacctgctgatggtgaccatgagcaccgtgggctacggcgacgtgtacgccaagaccaccctgggcagactgttcatggtgttcttcatcctgggcggcctggccatgttcgccagctacgtgcccgagatcatcgagctgatcggcaacagaaagaagtacggcggcagctacagcgccgtgagcggcagaaagcacatcgtggtgtgcggccacatcaccctggagagcgtgagcaacttcctgaaggacttcctgcacaaggacagagacgacgtgaacgtggagatcgtgttcctgcacaacatcagccccaacctggagctggaggccctgttcaagagacacttcacccaggtggagttctaccagggcagcgtgctgaacccccacgacctggccagagtgaagatcgagagcgccgacgcctgcctgatcctggccaacaagtactgcgccgaccccgacgccgaggacgccagcaacatcatgagagtgatcagcatcaagaactaccaccccaagatcagaatcatcacccagatgctgcagtaccacaacaaggcccacctgctgaacatccccagctggaactggaaggagggcgacgacgccatctgcctggccgagctgaagctgggcttcatcgcccagagctgcctggcccagggcctgagcaccatgctggccaacctgttcagcatgagaagcttcatcaagatcgaggaggacacctggcagaagtactacctggagggcgtgagcaacgagatgtacaccgagtacctgagcagcgccttcgtgggcctgagcttccccaccgtgtgcgagctgtgcttcgtgaagctgaagctgctgatgatcgccatcgagtacaagagcgccaacagagagagcagaatcctgatcaaccccggcaaccacctgaagatccaggagggcaccctgggcttcttcatcgccagcgacgccaaggaggtgaagagagccttcttctactgcaaggcctgccacgacgacatcaccgaccccaagagaatcaagaagtgcggctgcaagagactgaaggtggccgccagaagcagatacagcaaggaccccttcgagttcaagaaggagacccccaacagcagactggtgaccgagcccgtggaggacgagcagcccagcaccctgagccccaagaagaagcagagaaacggcggcatgagaaacagccccaacaccagccccaagctgatgagacacgaccccctgctgatccccggcaacgaccagatcgacaacatggacagcaacgtgaagaagtacgacagcaccggcatgttccactggtgcgcccccaaggagatcgagaaggtgatcctgaccagaagcgaggccgccatgaccgtgctgagcggccacgtggtggtgtgcatcttcggcgacgtgagcagcgccctgatcggcctgagaaacctggtgatgcccctgagagccagcaacttccactaccacgagctgaagcacatcgtgttcgtgggcagcatcgagtacctgaagagagagtgggagaccctgcacaacttccccaaggtgagcatcctgcccggcacccccctgagcagagccgacctgagagccgtgaacatcaacctgtgcgacatgtgcgtgatcctgagcgccaaccagaacaacatcgacgacaccagcctgcaggacaaggagtgcatcctggccagcctgaacatcaagagcatgcagttcgacgacagcatcggcgtgctgcaggccaacagccagggcttcaccccccccggcatggacagaagcagccccgacaacagccccgtgcacggcatgctgagacagcccagcatcaccaccggcgtgaacatccccatcatcaccgagctggtgaacgacaccaacgtgcagttcctggaccaggacgacgacgacgaccccgacaccgagctgtacctgacccagcccttcgcctgcggcaccgccttcgccgtgagcgtgctggacagcctgatgagcgccacctacttcaacgacaacatcctgaccctgatcagaaccctggtgaccggcggcgccacccccgagctggaggccctgatcgccgaggagaacgccctgagaggcggctacagcaccccccagaccctggccaacagagacagatgcagagtggcccagctggccctgctggacggccccttcgccgacctgggcgacggcggctgctacggcgacctgttctgcaaggccctgaagacctacaacatgctgtgcttcggcatctacagactgagagacgcccacctgagcacccccagccagtgcaccaagagatacgtgatcaccaaccccccctacgagttcgagctggtgcccaccgacctgatcttctgcctgatgcagttcgaccacaacgccggccagagcagagccagcctgagccacagcagccacagcagccagagcagcagcaagaagagcagcagcgtgcacagcatccccagcaccgccaacagacagaacagacccaagagcagagagagcagagacaagcagaagtacgtgcaggaggagagactgtag

SEQ ID NO: 94100 - DNA, 795 bp, synthetic construct
  misc_feature 1..795: note = Description of Artificial Sequence: Synthetic coding sequence
  source 1..795: mol_type = other DNA
tgagtgatcagcatcaagaactaccaccccaagatcagaatcatcacccagatgctgcagtaccacaacaaggcccacctgctgaacatccccagctggaactggaaggagggcgacgacgccatctgcctggccgagctgaagctgggcttcatcgcccagagctgcctggcccagggcctgagcaccatgctggccaacctgttcagcatgagaagcttcatcaagatcgaggaggacacctggcagaagtactacctggagggcgtgagcaacgagatgtacaccgagtacctgagcagcgccttcgtgggcctgagcttccccaccgtgtgcgagctgtgcttcgtgaagctgaagctgctgatgatcgccatcgagtacaagagcgccaacagagagagcagaatcctgatcaaccccggcaaccacctgaagatccaggagggcaccctgggcttcttcatcgccagcgacgccaaggaggtgaagagagccttcttctactgcaaggcctgccacgacgacatcaccgaccccaagagaatcaagaagtgcggctgcaagagactggccggcagccaggacacccaccccgacagcttctaccaccaggccgtgaacgccagcagctacctgcacggcggcggccagatgtggcccgtgagcagcagcagcagcatcctgctgcactacctgagaagacagatgcccggccccgccagactgcccctggagctgagctgccagggcagcgccctgagccccaaccccgacctgtactgcatgaagtag

SEQ ID NO: 94101 - DNA, 3630 bp, synthetic construct
  misc_feature 1..3630: note = Description of Artificial Sequence: Synthetic coding sequence
  source 1..3630: mol_type = other DNA
agcaacatccacgccaaccacctgagcctggacgccagcagcagcagcagcagcagcagcagcagcagcagcagcagcagcagcagcagcagcagcagcagcgtgcacgagcccaagatggacgccctgatcatccccgtgaccatggaggtgccctgcgacagcagaggccagagaatgtggtgggccttcctggccagcagcatggtgaccttcttcggcggcctgttcatcatcctgctgtggagaaccctgaagtacctgtggaccgtgtgctgccactgcggcggcaagaccaaggaggcccagaagatcaacaacggcagcagccaggccgacggcaccctgaagcccgtggacgagaaggaggaggccgtggccgccgaggtgggctggatgaccagcgtgaaggactgggccggcgtgatgatcagcgcccagaccctgaccggcagagtgctggtggtgctggtgttcgccctgagcatcggcgccctggtgatctacttcatcgacagcagcaaccccatcgagagctgccagaacttctacaaggacttcaccctgcagatcgacatggccttcaacgtgttcttcctgctgtacttcggcctgagattcatcgccgccaacgacaagctgtggttctggctggaggtgaacagcgtggtggacttcttcaccgtgccccccgtgttcgtgagcgtgtacctgaacagaagctggctgggcctgagattcctgagagccctgagactgatccagttcagcgagatcctgcagttcctgaacatcctgaagaccagcaacagcatcaagctggtgaacctgctgagcatcttcatcagcacctggctgaccgccgccggcttcatccacctggtggagaacagcggcgacccctgggagaacttccagaacaaccaggccctgacctactgggagtgcgtgtacctgctgatggtgaccatgagcaccgtgggctacggcgacgtgtacgccaagaccaccctgggcagactgttcatggtgttcttcatcctgggcggcctggccatgttcgccagctacgtgcccgagatcatcgagctgatcggcaacagaaagaagtacggcggcagctacagcgccgtgagcggcagaaagcacatcgtggtgtgcggccacatcaccctggagagcgtgagcaacttcctgaaggacttcctgcacaaggacagagacgacgtgaacgtggagatcgtgttcctgcacaacatcagccccaacctggagctggaggccctgttcaagagacacttcacccaggtggagttctaccagggcagcgtgctgaacccccacgacctggccagagtgaagatcgagagcgccgacgcctgcctgatcctggccaacaagtactgcgccgaccccgacgccgaggacgccagcaacatcatgagagtgatcagcatcaagaactaccaccccaagatcagaatcatcacccagatgctgcagtaccacaacaaggcccacctgctgaacatccccagctggaactggaaggagggcgacgacgccatctgcctggccgagctgaagctgggcttcatcgcccagagctgcctggcccagggcctgagcaccatgctggccaacctgttcagcatgagaagcttcatcaagatcgaggaggacacctggcagaagtactacctggagggcgtgagcaacgagatgtacaccgagtacctgagcagcgccttcgtgggcctgagcttccccaccgtgtgcgagctgtgcttcgtgaagctgaagctgctgatgatcgccatcgagtacaagagcgccaacagagagagcagaatcctgatcaaccccggcaaccacctgaagatccaggagggcaccctgggcttcttcatcgccagcgacgccaaggaggtgaagagagccttcttctactgcaaggcctgccacgacgacatcaccgaccccaagagaatcaagaagtgcggctgcaagagacccaagatgagcatctacaagagaatgagaagagcctgctgcttcgactgcggcagaagcgagagagactgcagctgcatgagcggcagagtgagaggcaacgtggacaccctggagagagccttccccctgagcagcgtgagcgtgaacgactgcagcaccagcttcagagccttcgaggacgagcagcccagcaccctgagccccaagaagaagcagagaaacggcggcatgagaaacagccccaacaccagccccaagctgatgagacacgaccccctgctgatccccggcaacgaccagatcgacaacatggacagcaacgtgaagaagtacgacagcaccggcatgttccactggtgcgcccccaaggagatcgagaaggtgatcctgaccagaagcgaggccgccatgaccgtgctgagcggccacgtggtggtgtgcatcttcggcgacgtgagcagcgccctgatcggcctgagaaacctggtgatgcccctgagagccagcaacttccactaccacgagctgaagcacatcgtgttcgtgggcagcatcgagtacctgaagagagagtgggagaccctgcacaacttccccaaggtgagcatcctgcccggcacccccctgagcagagccgacctgagagccgtgaacatcaacctgtgcgacatgtgcgtgatcctgagcgccaaccagaacaacatcgacgacaccagcctgcaggacaaggagtgcatcctggccagcctgaacatcaagagcatgcagttcgacgacagcatcggcgtgctgcaggccaacagccagggcttcaccccccccggcatggacagaagcagccccgacaacagccccgtgcacggcatgctgagacagcccagcatcaccaccggcgtgaacatccccatcatcaccgagctggtgaacgacaccaacgtgcagttcctggaccaggacgacgacgacgaccccgacaccgagctgtacctgacccagcccttcgcctgcggcaccgccttcgccgtgagcgtgctggacagcctgatgagcgccacctacttcaacgacaacatcctgaccctgatcagaaccctggtgaccggcggcgccacccccgagctggaggccctgatcgccgaggagaacgccctgagaggcggctacagcaccccccagaccctggccaacagagacagatgcagagtggcccagctggccctgctggacggccccttcgccgacctgggcgacggcggctgctacggcgacctgttctgcaaggccctgaagacctacaacatgctgtgcttcggcatctacagactgagagacgcccacctgagcacccccagccagtgcaccaagagatacgtgatcaccaaccccccctacgagttcgagctggtgcccaccgacctgatcttctgcctgatgcagttcgaccacaacgccggccagagcagagccagcctgagccacagcagccacagcagccagagcagcagcaagaagagcagcagcgtgcacagcatccccagcaccgccaacagacagaacagacccaagagcagagagagcagagacaagcagaagaaggagatggtgtacagatag

SEQ ID NO: 94102 - DNA, 576 bp, synthetic construct
  misc_feature 1..576: note = Description of Artificial Sequence: Synthetic coding sequence
  source 1..576: mol_type = other DNA
atggtgaagaagctggtgatggcccagaagagaggcgagaccagagccctgtgcctgggcgtgaccatggtggtgtgcgccgtgatcacctactacatcctggtgaccaccgtgctgcccctgtaccagaagagcgtgtggacccaggagagcaagtgccacctgatcgagaccaacatcagagaccaggaggagctgaagggcaagaaggtgccccagtacccctgcctgtgggtgaacgtgagcgccgccggcagatgggccgtgctgtaccacaccgaggacaccagagaccagaaccagcagtgcagctacatccccggcagcgtggacaactaccagaccgccagagccgacgtggagaaggtgagagccaagttccaggagcagcaggtgttctactgcttcagcgcccccagaggcaacgagaccagcgtgctgttccagagactgtacggcccccaggccctgctgttcagcctgttctggcccaccttcctgctgaccggcggcctgctgatcatcgccatggtgaagagcaaccagtacctgagcatcctggccgcccagaagtag

SEQ ID NO: 94103 - DNA, 393 bp, synthetic construct
  misc_feature 1..393: note = Description of Artificial Sequence: Synthetic coding sequence
  source 1..393: mol_type = other DNA
atggtgaagaagctggtgatggcccagaagagaggcgagaccagagccctgtgcctgggcgtgaccatggtggtgtgcgccgtgatcacctactacatcctggtgaccaccgtgctgcccctgtaccagaagagcgtgtggacccaggagagcaagtgccacctgatcgagaccaacatcagagaccaggaggagctgaagggcaagaaggtgccccagtacccctgcctgtgggtgaacgtgagcgccgccggcagatgggccgtgctgtaccacaccgaggacaccagagaccagaaccagcaggtgctgaactggagagacggcgacaccagcctgtacccctgccaggtgtgcgagcccgtgcccaactgcccctgccccagaggctag

SEQ ID NO: 94104 - DNA, 633 bp, synthetic construct
  misc_feature 1..633: note = Description of Artificial Sequence: Synthetic coding sequence
  source 1..633: mol_type = other DNA
atggccaagctgagagtggcctacgagtacaccgaggccgaggacaagagcatcagactgggcctgttcctgatcatcagcggcgtggtgagcctgttcatcttcggcttctgctggctgagccccgccctgcaggacctgcaggccaccgaggccaactgcaccgtgctgagcgtgcagcagatcggcgaggtgttcgagtgcaccttcacctgcggcgccgactgcagaggcaccagccagtacccctgcgtgcaggtgtacgtgaacaacagcgagagcaacagcagagccctgctgcacagcgacgagcaccagctgctgaccaaccccaagtgcagctacatccccccctgcaagagagagaaccagaagaacctggagagcgtgatgaactggcagcagtactggaaggacgagatcggcagccagcccttcacctgctacttcaaccagcaccagagacccgacgacgtgctgctgcacagaacccacgacgagatcgtgctgctgcactgcttcctgtggcccctggtgaccttcgtggtgggcgtgctgatcgtggtgctgaccatctgcgccaagagcctggccgtgaaggccgaggccatgaagaagagaaagttcagctag

SEQ ID NO: 94105 - DNA, 2259 bp, synthetic construct
  misc_feature 1..2259: note = Description of Artificial Sequence: Synthetic coding sequence
  source 1..2259: mol_type = other DNA
atgaagcccgccgagcacgccaccatgttcctgatcgtgctgggctgcctgatcctggccgtgctgaccaccttcaaggagtacgagaccgtgagcggcgactggctgctgctgctggagaccttcgccatcttcatcttcggcgccgagttcgccctgagaatctgggccgccggctgctgctgcagatacaagggctggagaggcagactgaagttcgccagaaagcccctgtgcatgctggacatcttcgtgctgatcgccagcgtgcccgtggtggccgtgggcaaccagggcaacgtgctggccaccagcctgagaagcctgagattcctgcagatcctgagaatgctgagaatggacagaagaggcggcacctggaagctgctgggcagcgccatctgcgcccacagcaaggagctgatcaccgcctggtacatcggcttcctgaccctgatcctgagcagcttcctggtgtacctggtggagaaggacgtgcccgaggtggacgcccagggcgaggagatgaaggaggagttcgagacctacgccgacgccctgtggtggggcctgatcaccctggccaccatcggctacggcgacaagacccccaagacctgggagggcagactgatcgccgccaccttcagcctgatcggcgtgagcttcttcgccctgcccgccggcatcctgggcagcggcctggccctgaaggtgcaggagcagcacagacagaagcacttcgagaagagaagaaagcccgccgccgagctgatccaggccgcctggagatactacgccaccaaccccaacagaatcgacctggtggccacctggagattctacgagagcgtggtgagcttccccttcttcagaaaggagcagctggaggccgccagcagccagaagctgggcctgctggacagagtgagactgagcaaccccagaggcagcaacaccaagggcaagctgttcacccccctgaacgtggacgccatcgaggagagccccagcaaggagcccaagcccgtgggcctgaacaacaaggagagattcagaaccgccttcagaatgaaggcctacgccttctggcagagcagcgaggacgccggcaccggcgaccccatggccgaggacagaggctacggcaacgacttccccatcgaggacatgatccccaccctgaaggccgccatcagagccgtgagaatcctgcagttcagactgtacaagaagaagttcaaggagaccctgagaccctacgacgtgaaggacgtgatcgagcagtacagcgccggccacctggacatgctgagcagaatcaagtacctgcagaccagaatcgacatgatcttcacccccggcccccccagcacccccaagcacaagaagagccagaagggcagcgccttcaccttccccagccagcagagccccagaaacgagccctacgtggccagacccagcaccagcgagatcgaggaccagagcatgatgggcaagttcgtgaaggtggagagacaggtgcaggacatgggcaagaagctggacttcctggtggacatgcacatgcagcacatggagagactgcaggtgcaggtgaccgagtactaccccaccaagggcaccagcagccccgccgaggccgagaagaaggaggacaacagatacagcgacctgaagaccatcatctgcaactacagcgagaccggcccccccgagcccccctacagcttccaccaggtgaccatcgacaaggtgagcccctacggcttcttcgcccacgaccccgtgaacctgcccagaggcggccccagcagcggcaaggtgcaggccaccccccccagcagcgccaccacctacgtggagagacccaccgtgctgcccatcctgaccctgctggacagcagagtgagctgccacagccaggccgacctgcagggcccctacagcgacagaatcagccccagacagagaagaagcatcaccagagacagcgacacccccctgagcctgatgagcgtgaaccacgaggagctggagagaagccccagcggcttcagcatcagccaggacagagacgactacgtgttcggccccaacggcggcagcagctggatgagagagaagagatacctggccgagggcgagaccgacaccgacaccgaccccttcacccccagcggcagcatgcccctgagcagcaccggcgacggcatcagcgacagcgtgtggacccccagcaacaagcccatctag

SEQ ID NO: 94106 - DNA, 1434 bp, synthetic construct
  misc_feature 1..1434: note = Description of Artificial Sequence: Synthetic coding sequence
  source 1..1434: mol_type = other DNA
atgaccggccagagcctgtgggacgtgagcgaggccaacgtggaggacggcgagatcagaatcaacgtgggcggcttcaagagaagactgagaagccacaccctgctgagattccccgagaccagactgggcagactgctgctgtgccacagcagagaggccatcctggagctgtgcgacgactacgacgacgtgcagagagagttctacttcgacagaaaccccgagctgttcccctacgtgctgcacttctaccacaccggcaagctgcacgtgatggccgagctgtgcgtgttcagcttcagccaggagatcgagtactggggcatcaacgagttcttcatcgacagctgctgcagctacagctaccacggcagaaaggtggagcccgagcaggagaagtgggacgagcagagcgaccaggagagcaccaccagcagcttcgacgagatcctggccttctacaacgacgccagcaagttcgacggccagcccctgggcaacttcagaagacagctgtggctggccctggacaaccccggctacagcgtgctgagcagagtgttcagcatcctgagcatcctggtggtgatgggcagcatcatcaccatgtgcctgaacagcctgcccgacttccagatccccgacagccagggcaaccccggcgaggaccccagattcgagatcgtggagcacttcggcatcgcctggttcaccttcgagctggtggccagattcgccgtggcccccgacttcctgaagttcttcaagaacgccctgaacctgatcgacctgatgagcatcgtgcccttctacatcaccctggtggtgaacctggtggtggagagcacccccaccctggccaacctgggcagagtggcccaggtgctgagactgatgagaatcttcagaatcctgaagctggccagacacagcaccggcctgagaagcctgggcgccaccctgaagtacagctacaaggaggtgggcctgctgctgctgtacctgagcgtgggcatcagcatcttcagcgtggtggcctacaccatcgagaaggaggagaacgagggcctggccaccatccccgcctgctggtggtgggccaccgtgagcatgaccaccgtgggctacggcgacgtggtgcccggcaccaccgccggcaagctgaccgccagcgcctgcatcctggccggcatcctggtggtggtgctgcccatcaccctgatcttcaacaagttcagccacttctacagaagacagaagcagctggagagcgccatgagaagctgcgacttcggcgacggcatgaaggaggtgcccagcgtgaacctgagagactactacgcccacaaggtgaagagcctgatggccagcctgaccaacatgagcagaagcagccccagcgagctgagcctgaacgacagcctgagatag

SEQ ID NO: 94107 - DNA, 1434 bp, synthetic construct; identical to SEQ ID NO: 94106
  misc_feature 1..1434: note = Description of Artificial Sequence: Synthetic coding sequence
  source 1..1434: mol_type = other DNA

SEQ ID NO: 94108 - DNA, 1476 bp, synthetic construct
  misc_feature 1..1476: note = Description of Artificial Sequence: Synthetic coding sequence
  source 1..1476: mol_type = other DNA
atggtgttcggcgagttcttccacagacccggccaggacgaggagctggtgaacctgaacgtgggcggcttcaagcagagcgtggaccagagcaccctgctgagattcccccacaccagactgggcaagctgctgacctgccacagcgaggaggccatcctggagctgtgcgacgactacagcgtggccgacaaggagtactacttcgacagaaaccccagcctgttcagatacgtgctgaacttctactacaccggcaagctgcacgtgatggaggagctgtgcgtgttcagcttctgccaggagatcgagtactggggcatcaacgagctgttcatcgacagctgctgcagcaacagataccaggagagaaaggaggagaaccacgagaaggactgggaccagaagagccacgacgtgagcaccgacagcagcttcgaggagagcagcctgttcgagaaggagctggagaagttcgacaccctgagattcggccagctgagaaagaagatctggatcagaatggagaaccccgcctactgcctgagcgccaagctgatcgccatcagcagcctgagcgtggtgctggccagcatcgtggccatgtgcgtgcacagcatgagcgagttccagaacgaggacggcgaggtggacgaccccgtgctggagggcgtggagatcgcctgcatcgcctggttcaccggcgagctggccgtgagactggccgccgccccctgccagaagaagttctggaagaaccccctgaacatcatcgacttcgtgagcatcatccccttctacgccaccctggccgtggacaccaaggaggaggagagcgaggacatcgagaacatgggcaaggtggtgcagatcctgagactgatgagaatcttcagaatcctgaagctggccagacacagcgtgggcctgagaagcctgggcgccaccctgagacacagctaccacgaggtgggcctgctgctgctgttcctgagcgtgggcatcagcatcttcagcgtgctgatctacagcgtggagaaggacgaccacaccagcagcctgaccagcatccccatctgctggtggtgggccaccatcagcatgaccaccgtgggctacggcgacacccaccccgtgaccctggccggcaagctgatcgccagcacctgcatcatctgcggcatcctggtggtggccctgcccatcaccatcatcttcaacaagttcagcaagtactaccagaagcagaaggacatcgacgtggaccagtgcagcgaggacgcccccgagaagtgccacgagctgccctacttcaacatcagagacatctacgcccagagaatgcacaccttcatcaccagcctgagcagcgtgggcatcgtggtgagcgaccccgacagcaccgacgccagcagcatcgaggacaacgaggacatctgcaacaccaccagcctggagaactgcaccgccaagtag

SEQ ID NO: 94109 - DNA, 1476 bp, synthetic construct; identical to SEQ ID NO: 94108
  misc_feature 1..1476: note = Description of Artificial Sequence: Synthetic coding sequence
  source 1..1476: mol_type = other DNA

SEQ ID NO: 94110 - DNA, 225 bp, synthetic construct
  misc_feature 1..225: note = Description of Artificial Sequence: Synthetic coding sequence
  source 1..225: mol_type = other DNA
atggtgttcggcgagttcttccacagacccggccaggacgaggagctggtgaacctgaacgtgggcggcttcaagcagagcgtggaccagagcaccctgctgagattcccccacaccagactgggcaagctgctgacctgccacagcgaggaggccatcctggagctgtgcgacgactacagcgtggccgacaaggagtactacttcgacagaaaccccagctag

SEQ ID NO: 94111 - DNA, 390 bp, synthetic construct
  misc_feature 1..390: note = Description of Artificial Sequence: Synthetic coding sequence
  source 1..390: mol_type = other DNA
atgatcctgagcaacaccaccgccgtgacccccttcctgaccaagctgtggcaggagaccgtgcagcagggcggcaacatgagcggcctggccagaagaagccccagaagcagcgacggcaagctggaggccctgtacgtgctgatggtgctgggcttcttcggcttcttcaccctgggcatcatgctgagctacatcagaagcaagaagctggagcacagcaacgaccccttcaacgtgtacatcgagagcgacgcctggcaggagaaggacaaggcctacgtgcaggccagagtgctggagagctacagaagctgctacgtggtggagaaccacctggccatcgagcagcccaacacccacctgcccgagaccaagcccagcccctag

SEQ ID NO: 94112 - DNA, 390 bp, synthetic construct; identical to SEQ ID NO: 94111
  misc_feature 1..390: note = Description of Artificial Sequence: Synthetic coding sequence
  source 1..390: mol_type = other DNA

SEQ ID NO: 94113 - DNA, 390 bp, synthetic construct; identical to SEQ ID NO: 94111
  misc_feature 1..390: note = Description of Artificial Sequence: Synthetic coding sequence
  source 1..390: mol_type = other DNA

SEQ ID NO: 94114 - DNA, 390 bp, synthetic construct; identical to SEQ ID NO: 94111
  misc_feature 1..390: note = Description of Artificial Sequence: Synthetic coding sequence
  source 1..390: mol_type = other DNA

SEQ ID NO: 94115 - DNA, 390 bp, synthetic construct; identical to SEQ ID NO: 94111
  misc_feature 1..390: note = Description of Artificial Sequence: Synthetic coding sequence
  source 1..390: mol_type = other DNA

SEQ ID NO: 94116 - DNA, 390 bp, synthetic construct; identical to SEQ ID NO: 94111
  misc_feature 1..390: note = Description of Artificial Sequence: Synthetic coding sequence
  source 1..390: mol_type = other DNA

SEQ ID NO: 94117 - DNA, 372 bp, synthetic construct
  misc_feature 1..372: note = Description of Artificial Sequence: Synthetic coding sequence
  source 1..372: mol_type = other DNA
atgagcaccctgagcaacttcacccagaccctggaggacgtgttcagaagaatcttcatcacctacatggacaactggagacagaacaccaccgccgagcaggaggccctgcaggccaaggtggacgccgagaacttctactacgtgatcctgtacctgatggtgatgatcggcatgttcagcttcatcatcgtggccatcctggtgagcaccgtgaagagcaagagaagagagcacagcaacgacccctaccaccagtacatcgtggaggactggcaggagaagtacaagagccagatcctgaacctggaggagagcaaggccaccatccacgagaacatcggcgccgccggcttcaagatgagcccctag

SEQ ID NO: 94118 - DNA, 312 bp, synthetic construct
  misc_feature 1..312: note = Description of Artificial Sequence: Synthetic coding sequence
  source 1..312: mol_type = other DNA
atggagaccaccaacggcaccgagacctggtacgagagcctgcacgccgtgctgaaggccctgaacgccaccctgcacagcaacctgctgtgcagacccggccccggcctgggccccgacaaccagaccgaggagagaagagccagcctgcccggcagagacgacaacagctacatgtacatcctgttcgtgatgttcctgttcgccgtgaccgtgggcagcctgatcctgggctacaccagaagcagaaaggtggacaagagaagcgacccctaccacgtgtacatcaagaacagagtgagcatgatctag

SEQ ID NO: 94119 - DNA, 312 bp, synthetic construct; identical to SEQ ID NO: 94118
  misc_feature 1..312: note = Description of Artificial Sequence: Synthetic coding sequence
  source 1..312: mol_type = other DNA

SEQ ID NO: 94120 - DNA, 39 bp, synthetic construct
  misc_feature 1..39: note = Description of Artificial Sequence: Synthetic coding sequence
  source 1..39: mol_type = other DNA
atggagaccaccaacggcaccgagacctggtacgagtag

SEQ ID NO: 94121 - DNA, 153 bp, synthetic construct
  misc_feature 1..153: note = Description of Artificial Sequence: Synthetic coding sequence
  source 1..153: mol_type = other DNA
atggagaccaccaacggcaccgagacctggtacgagagcctgcacgccgtgctgaaggccctgaacgccaccctgcacagcaacctgctgtgcagacccggccccggcctgggccccgacaaccagaccgaggagagaagagccagcctgtag

SEQ ID NO: 94122 - DNA, 162 bp, synthetic construct
  misc_feature 1..162: note = Description of Artificial Sequence: Synthetic coding sequence
  source 1..162: mol_type = other DNA
atggagaccaccaacggcaccgagacctggtacgagagcctgcacgccgtgctgaaggccctgaacgccaccctgcacagcaacctgctgtgcagacccggccccggcctgggccccgacaaccagaccgaggagagaagagccagcctgcccggcagatag

SEQ ID NO: 94123 - DNA, 300 bp, synthetic construct
  misc_feature 1..300: note = Description of Artificial Sequence: Synthetic coding sequence
  source 1..300: mol_type = other DNA
atggagaccaccaacggcaccgagacctggtacgagagcctgcacgccgtgctgaaggccctgaacgccaccctgcacagcaacctgctgtgcagacccggccccggcctgggccccgacaaccagaccgaggagagaagagccagcctgcccggcagagacgacaacagctacatgtacatcctgttcgtgatgttcctgttcgccgtgaccgtgggcagcctgatcctgggctacaccagaagcagaaaggtggacaagagaagcgacccctaccacgtgtacatcaagaacagatag

SEQ ID NO: 94124 - DNA, 513 bp, synthetic construct
  misc_feature 1..513: note = Description of Artificial Sequence: Synthetic coding sequence
  source 1..513: mol_type = other DNA
atgctgaagatggagcccctgaacagcacccaccccggcaccgccgccagcagcagccccctggagagcagagccgccggcggcggcagcggcaacggcaacgagtacttctacatcctggtggtgatgagcttctacggcatcttcctgatcggcatcatgctgggctacatgaagagcaagagaagagagaagaagagcagcctgctgctgctgtacaaggacgaggagagactgtggggcgaggccatgaagcccctgcccgtggtgagcggcctgagaagcgtgcaggtgcccctgatgctgaacatgctgcaggagagcgtggcccccgccctgagctgcaccctgtgcagcatggagggcgacagcgtgagcagcgagagcagcagccccgacgtgcacctgaccatccaggaggagggcgccgacgacgagctggaggagaccagcgagacccccctgaacgagagcagcgagggcagcagcgagaacatccaccagaacagctag

SEQ ID NO: 94125 - DNA, 2031 bp, synthetic construct
  misc_feature 1..2031: note = Description of Artificial Sequence: Synthetic coding sequence
  source 1..2031: mol_type = other DNA
atggccgccgccagcagcccccccagagccgagagaaagagatggggctggggcagactgcccggcgccagaagaggcagcgccggcctggccaagaagtgccccttcagcctggagctggccgagggcggccccgccggcggcgccctgtacgcccccatcgcccccggcgcccccggccccgccccccccgccagccccgccgcccccgccgccccccccgtggccagcgacctgggccccagaccccccgtgagcctggaccccagagtgagcatctacagcaccagaagacccgtgctggccagaacccacgtgcagggcagagtgtacaacttcctggagagacccaccggctggaagtgcttcgtgtaccacttcgccgtgttcctgatcgtgctggtgtgcctgatcttcagcgtgctgagcaccatcgagcagtacgccgccctggccaccggcaccctgttctggatggagatcgtgctggtggtgttcttcggcaccgagtacgtggtgagactgtggagcgccggctgcagaagcaagtacgtgggcctgtggggcagactgagattcgccagaaagcccatcagcatcatcgacctgatcgtggtggtggccagcatggtggtgctgtgcgtgggcagcaagggccaggtgttcgccaccagcgccatcagaggcatcagattcctgcagatcctgagaatgctgcacgtggacagacagggcggcacctggagactgctgggcagcgtggtgttcatccacagacaggagctgatcaccaccctgtacatcggcttcctgggcctgatcttcagcagctacttcgtgtacctggccgagaaggacgccgtgaacgagagcggcagagtggagttcggcagctacgccgacgccctgtggtggggcgtggtgaccgtgaccaccatcggctacggcgacaaggtgccccagacctgggtgggcaagaccatcgccagctgcttcagcgtgttcgccatcagcttcttcgccctgcccgccggcatcctgggcagcggcttcgccctgaaggtgcagcagaagcagagacagaagcacttcaacagacagatccccgccgccgccagcctgatccagaccgcctggagatgctacgccgccgagaaccccgacagcagcacctggaagatctacatcagaaaggcccccagaagccacaccctgctgagccccagccccaagcccaagaagagcgtggtggtgaagaagaagaagttcaagctggacaaggacaacggcgtgacccccggcgagaagatgctgaccgtgccccacatcacctgcgacccccccgaggagagaagactggaccacttcagcgtggacggctacgacagcagcgtgagaaagagccccaccctgctggaggtgagcatgccccacttcatgagaaccaacagcttcgccgaggacctggacctggagggcgagaccctgctgacccccatcacccacatcagccagctgagagagcaccacagagccaccatcaaggtgatcagaagaatgcagtacttcgtggccaagaagaagttccagcaggccagaaagccctacgacgtgagagacgtgatcgagcagtacagccagggccacctgaacctgatggtgagaatcaaggagctgcagagaagactggaccagagcatcggcaagcccagcctgttcatcagcgtgagcgagaagagcaaggacagaggcagcaacaccatcggcgccagactgaacagagtggaggacaaggtgacccagctggaccagagactggccctgatcaccgacatgctgcaccagctgctgagcctgcacggcggcagcacccccggcagcggcggcccccccagagagggcggcgcccacatcacccagccctgcggcagcggcggcagcgtggaccccgagctgttcctgcccagcaacaccctgcccacctacgagcagctgaccgtgcccagaagaggccccgacgagggcagctag

SEQ ID NO: 94126 - DNA, 1650 bp, synthetic construct
  misc_feature 1..1650: note = Description of Artificial Sequence: Synthetic coding sequence
  source 1..1650: mol_type = other DNA
atggacttcctgatcgtgctggtgtgcctgatcttcagcgtgctgagcaccatcgagcagtacgccgccctggccaccggcaccctgttctggatggagatcgtgctggtggtgttcttcggcaccgagtacgtggtgagactgtggagcgccggctgcagaagcaagtacgtgggcctgtggggcagactgagattcgccagaaagcccatcagcatcatcgacctgatcgtggtggtggccagcatggtggtgctgtgcgtgggcagcaagggccaggtgttcgccaccagcgccatcagaggcatcagattcctgcagatcctgagaatgctgcacgtggacagacagggcggcacctggagactgctgggcagcgtggtgttcatccacagacaggagctgatcaccaccctgtacatcggcttcctgggcctgatcttcagcagctacttcgtgtacctggccgagaaggacgccgtgaacgagagcggcagagtggagttcggcagctacgccgacgccctgtggtggggcgtggtgaccgtgaccaccatcggctacggcgacaaggtgccccagacctgggtgggcaagaccatcgccagctgcttcagcgtgttcgccatcagcttcttcgccctgcccgccggcatcctgggcagcggcttcgccctgaaggtgcagcagaagcagagacagaagcacttcaacagacagatccccgccgccgccagcctgatccagaccgcctggagatgctacgccgccgagaaccccgacagcagcacctggaagatctacatcagaaaggcccccagaagccacaccctgctgagccccagccccaagcccaagaagagcgtggtggtgaagaagaagaagttcaagctggacaaggacaacggcgtgacccccggcgagaagatgctgaccgtgccccacatcacctgcgacccccccgaggagagaagactggaccacttcagcgtggacggctacgacagcagcgtgagaaagagccccaccctgctggaggtgagcatgccccacttcatgagaaccaacagcttcgccgaggacctggacctggagggcgagaccctgctgacccccatcacccacatcagccagctgagagagcaccacagagccaccatcaaggtgatcagaagaatgcagtacttcgtggccaagaagaagttccagcaggccagaaagccctacgacgtgagagacgtgatcgagcagtacagccagggccacctgaacctgatggtgagaatcaaggagctgcagagaagactggaccagagcatcggcaagcccagcctgttcatcagcgtgagcgagaagagcaaggacagaggcagcaacaccatcggcgccagactgaacagagtggaggacaaggtgacccagctggaccagagactggccctgatcaccgacatgctgcaccagctgctgagcctgcacggcggcagcacccccggcagcggcggcccccccagagagggcggcgcccacatcacccagccctgcggcagcggcggcagcgtggaccccgagctgttcctgcccagcaacaccctgcccacctacgagcagctgaccgtgcccagaagaggccccgacgagggcagctag

SEQ ID NO: 94127 - DNA, 1182 bp, synthetic construct
  misc_feature 1..1182: note = Description of Artificial Sequence: Synthetic coding sequence
  source 1..1182: mol_type = other DNA
atggtgcagaagagcagaaacggcggcgtgtaccccggccccagcggcgagaagaagctgaaggtgggcttcgtgggcctggaccccggcgcccccgacagcaccagagacggcgccctgctgatcgccggcagcgaggcccccaagagaggcagcatcctgagcaagcccagagccggcggcgccggcgccggcaagccccccaagagaaacgccttctacagaaagctgcagaacttcctgtacaacgtgctggagagacccagaggctgggccttcatctaccacgcctacgtgttcctgctggtgttcagctgcctggtgctgagcgtgttcagcaccatcaaggagtacgagaagagcagcgagggcgccctgtacatcctggagatcgtgaccatcgtggtgttcggcgtggagtacttcgtgagaatctgggccgccggctgctgctgcagatacagaggctggagaggcagactgaagttcgccagaaagcccttctgcgtgatcgacatcatggtgctgatcgccagcatcgccgtgctggccgccggcagccagggcaacgtgttcgccaccagcgccctgagaagcctgagattcctgcagatcctgagaatgatcagaatggacagaagaggcggcacctggaagctgctgggcagcgtggtgtacgcccacagcaaggagctggtgaccgcctggtacatcggcttcctgtgcctgatcctggccagcttcctggtgtacctggccgagaagggcgagaacgaccacttcgacacctacgccgacgccctgtggtggggcctgatcaccctgaccaccatcggctacggcgacaagtacccccagacctggaacggcagactgctggccgccaccttcaccctgatcggcgtgagcttcttcgccctgcccgccggcatcctgggcagcggcttcgccctgaaggtgcaggagcagcacagacagaagcacttcgagaagagaagaaaccccgccgccggcctgatccagagcgcctggagattctacgccaccaacctgagcagaaccgacctgcacagcacctggcagtactacgagagaaccgtgaccgtgcccatgtacagatacagaagaagagcccccgccaccaagcagctgttccacttcctgttcagcatctgcagctag

SEQ ID NO: 94128 - DNA, 2607 bp, synthetic construct
  misc_feature 1..2607: note = Description of Artificial Sequence: Synthetic coding sequence
  source 1..2607: mol_type = other DNA
atggtgcagaagagcagaaacggcggcgtgtaccccggccccagcggcgagaagaagctgaaggtgggcttcgtgggcctggaccccggcgcccccgacagcaccagagacggcgccctgctgatcgccggcagcgaggcccccaagagaggcagcatcctgagcaagcccagagccggcggcgccggcgccggcaagccccccaagagaaacgccttctacagaaagctgcagaacttcctgtacaacgtgctggagagacccagaggctgggccttcatctaccacgcctacgtgttcctgctggtgttcagctgcctggtgctgagcgtgttcagcaccatcaaggagtacgagaagagcagcgagggcgccctgtacatcctggagatcgtgaccatcgtggtgttcggcgtggagtacttcgtgagaatctgggccgccggctgctgctgcagatacagaggctggagaggcagactgaagttcgccagaaagcccttctgcgtgatcgacatcatggtgctgatcgccagcatcgccgtgctggccgccggcagccagggcaacgtgttcgccaccagcgccctgagaagcctgagattcctgcagatcctgagaatgatcagaatggacagaagaggcggcacctggaagctgctgggcagcgtggtgtacgcccacagcaaggagctggtgaccgcctggtacatcggcttcctgtgcctgatcctggccagcttcctggtgtacctggccgagaagggcgagaacgaccacttcgacacctacgccgacgccctgtggtggggcctgatcaccctgaccaccatcggctacggcgacaagtacccccagacctggaacggcagactgctggccgccaccttcaccctgatcggcgtgagcttcttcgccctgcccgccggcatcctgggcagcggcttcgccctgaaggtgcaggagcagcacagacagaagcacttcgagaagagaagaaaccccgccgccggcctgatccagagcgcctggagattctacgccaccaacctgagcagaaccgacctgcacagcacctggcagtactacgagagaaccgtgaccgtgcccatgtacagactgatcccccccctgaaccagctggagctgctgagaaacctgaagagcaagagcggcctggccttcagaaaggaccccccccccgagcccagccccagccccagaggcgtggccgccaagggcaagggcagcccccaggcccagaccgtgagaagaagccccagcgccgaccagagcctggaggacagccccagcaaggtgcccaagagctggagcttcggcgacagaagcagagccagacaggccttcagaatcaagggcgccgccagcagacagaacagcgaggaggccagcctgcccggcgaggacatcgtggacgacaagagctgcccctgcgagttcgtgaccgaggacctgacccccggcctgaaggtgagcatcagagccgtgtgcgtgatgagattcctggtgagcaagagaaagttcaaggagagcctgagaccctacgacgtgatggacgtgatcgagcagtacagcgccggccacctggacatgctgagcagaatcaagagcctgcagagcagaatcgacatgatcgtgggcccccccccccccagcacccccagacacaagaagtaccccaccaagggccccaccgccccccccagagagagcccccagtacagccccagagtggaccagatcgtgggcagaggccccgccatcaccgacaaggacagaaccaagggccccgccgaggccgagctgcccgaggaccccagcatgatgggcagactgggcaaggtggagaagcaggtgctgagcatggagaagaagctggacttcctggtgaacatctacatgcagagaatgggcatcccccccaccgagaccgaggcctacttcggcgccaaggagcccgagcccgcccccccctaccacagccccgaggacagcagagagcacgtggacagacacggctgcatcgtgaagatcgtgagaagcagcagcagcaccggccagaagaacttcagcgccccccccgccgccccccccgtgcagtgcccccccagcaccagctggcagccccagagccaccccagacagggccacggcaccagccccgtgggcgaccacggcagcctggtgagaatcccccccccccccgcccacgagagaagcctgagcgcctacggcggcggcaacagagccagcatggagttcctgagacaggaggacacccccggctgcagaccccccgagggcaacctgagagacagcgacaccagcatcagcatccccagcgtggaccacgaggagctggagagaagcttcagcggcttcagcatcagccagagcaaggagaacctggacgccctgaacagctgctacgccgccgtggccccctgcgccaaggtgagaccctacatcgccgagggcgagagcgacaccgacagcgacctgtgcaccccctgcggccccccccccagaagcgccaccggcgagggccccttcggcgacgtgggctgggccggccccagaaagtag

SEQ ID NO: 94129 - DNA, 2643 bp, synthetic construct
  misc_feature 1..2643: note = Description of Artificial Sequence: Synthetic coding sequence
  source 1..2643: mol_type = other DNA
atggtgcagaagagcagaaacggcggcgtgtaccccggccccagcggcgagaagaagctgaaggtgggcttcgtgggcctggaccccggcgcccccgacagcaccagagacggcgccctgctgatcgccggcagcgaggcccccaagagaggcagcatcctgagcaagcccagagccggcggcgccggcgccggcaagccccccaagagaaacgccttctacagaaagctgcagaacttcctgtacaacgtgctggagagacccagaggctgggccttcatctaccacgcctacgtgttcctgctggtgttcagctgcctggtgctgagcgtgttcagcaccatcaaggagtacgagaagagcagcgagggcgccctgtacatcctggagatcgtgaccatcgtggtgttcggcgtggagtacttcgtgagaatctgggccgccggctgctgctgcagatacagaggctggagaggcagactgaagttcgccagaaagcccttctgcgtgatcgacatcatggtgctgatcgccagcatcgccgtgctggccgccggcagccagggcaacgtgttcgccaccagcgccctgagaagcctgagattcctgcagatcctgagaatgatcagaatggacagaagaggcggcacctggaagctgctgggcagcgtggtgtacgcccacagcaaggagctggtgaccgcctggtacatcggcttcctgtgcctgatcctggccagcttcctggtgtacctggccgagaagggcgagaacgaccacttcgacacctacgccgacgccctgtggtggggcctgatcaccctgaccaccatcggctacggcgacaagtacccccagacctggaacggcagactgctggccgccaccttcaccctgatcggcgtgagcttcttcgccctgcccgccggcatcctgggcagcggcttcgccctgaaggtgcaggagcagcacagacagaagcacttcgagaagagaagaaaccccgccgccggcctgatccagagcgcctggagattctacgccaccaacctgagcagaaccgacctgcacagcacctggcagtactacgagagaaccgtgaccgtgcccatgtacagactgatcccccccctgaaccagctggagctgctgagaaacctgaagagcaagagcggcctggccttcagaaaggaccccccccccgagcccagccccagccagaaggtgagcctgaaggacagagtgttcagcagccccagaggcgtggccgccaagggcaagggcagcccccaggcccagaccgtgagaagaagccccagcgccgaccagagcctggaggacagccccagcaaggtgcccaagagctggagcttcggcgacagaagcagagccagacaggccttcagaatcaagggcgccgccagcagacagaacagcgaggaggccagcctgcccggcgaggacatcgtggacgacaagagctgcccctgcgagttcgtgaccgaggacctgacccccggcctgaaggtgagcatcagagccgtgtgcgtgatgagattcctggtgagcaagagaaagttcaaggagagcctgagaccctacgacgtgatggacgtgatcgagcagtacagcgccggccacctggacatgctgagcagaatcaagagcctgcagaccggcatcgacatgatcgtgggcccccccccccccagcacccccagacacaagaagtaccccaccaagggccccaccgccccccccagagagagcccccagtacagccccagagtggaccagatcgtgggcagaggccccgccatcaccgacaaggacagaaccaagggccccgccgaggccgagctgcccgaggaccccagcatgatgggcagactgggcaaggtggagaagcaggtgctgagcatggagaagaagctggacttcctggtgaacatctacatgcagagaatgggcatcccccccaccgagaccgaggcctacttcggcgccaaggagcccgagcccgcccccccctaccacagccccgaggacagcagagagcacgtggacagacacggctgcatcgtgaagatcgtgagaagcagcagcagcaccggccagaagaacttcagcgccccccccgccgccccccccgtgcagtgcccccccagcaccagctggcagccccagagccaccccagacagggccacggcaccagccccgtgggcgaccacggcagcctggtgagaatcccccccccccccgcccacgagagaagcctgagcgcctacggcggcggcaacagagccagcatggagttcctgagacaggaggacacccccggctgcagaccccccgagggcaacctgagagacagcgacaccagcatcagcatccccagcgtggaccacgaggagctggagagaagcttcagcggcttcagcatcagccagagcaaggagaacctggacgccctgaacagctgctacgccgccgtggccccctgcgccaaggtgagaccctacatcgccgagggcgagagcgacaccgacagcgacctgtgcaccccctgcggccccccccccagaagcgccaccggcgagggccccttcggcgacgtgggctgggccggccccagaaagtag

SEQ ID NO: 94130 - DNA, 2565 bp, synthetic construct
  misc_feature 1..2565: note = Description of Artificial Sequence: Synthetic coding sequence
  source 1..2565: mol_type = other DNA
atggtgcagaagagcagaaacggcggcgtgtaccccggccccagcggcgagaagaagctgaaggtgggcttcgtgggcctggaccccggcgcccccgacagcaccagagacggcgccctgctgatcgccggcagcgaggcccccaagagaggcagcatcctgagcaagcccagagccggcggcgccggcgccggcaagccccccaagagaaacgccttctacagaaagctgcagaacttcctgtacaacgtgctggagagacccagaggctgggccttcatctaccacgcctacgtgttcctgctggtgttcagctgcctggtgctgagcgtgttcagcaccatcaaggagtacgagaagagcagcgagggcgccctgtacatcctggagatcgtgaccatcgtggtgttcggcgtggagtacttcgtgagaatctgggccgccggctgctgctgcagatacagaggctggagaggcagactgaagttcgccagaaagcccttctgcgtgatcgacatcatggtgctgatcgccagcatcgccgtgctggccgccggcagccagggcaacgtgttcgccaccagcgccctgagaagcctgagattcctgcagatcctgagaatgatcagaatggacagaagaggcggcacctggaagctgctgggcagcgtggtgtacgcccacagcaaggagctggtgaccgcctggtacatcggcttcctgtgcctgatcctggccagcttcctggtgtacctggccgagaagggcgagaacgaccacttcgacacctacgccgacgccctgtggtggggcctgatcaccctgaccaccatcggctacggcgacaagtacccccagacctggaacggcagactgctggccgccaccttcaccctgatcggcgtgagcttcttcgccctgcccgccggcatcctgggcagcggcttcgccctgaaggtgcaggagcagcacagacagaagcacttcgagaagagaagaaaccccgccgccggcctgatccagagcgcctggagattctacgccaccaacctgagcagaaccgacctgcacagcacctggcagtactacgagagaaccgtgaccgtgcccatgtacagcagccagacccagacctacggcgccagcagactgatcccccccctgaaccagctggagctgctgagaaacctgaagagcaagagcggcctggccttcagaaaggaccccccccccgagcccagccccagccagaaggtgagcctgaaggacagagtgttcagcagccccagaggcgtggccgccaagggcaagggcagcccccaggcccagaccgtgagaagaagccccagcgccgaccagagcctggaggacagccccagcaaggtgcccaagagctggagcttcggcgacagaagcagagccagacaggccttcagaatcaagggcgccgccagcagacagaacagcgaggaggccagcctgcccggcgaggacatcgtggacgacaagagctgcccctgcgagttcgtgaccgaggacctgacccccggcctgaaggtgagcatcagagccgtgtgcgtgatgagattcctggtgagcaagagaaagttcaaggagagcctgagaccctacgacgtgatggacgtgatcgagcagtacagcgccggccacctggacatgctgagcagaatcaagagcctgcagagcagagtggaccagatcgtgggcagaggccccgccatcaccgacaaggacagaaccaagggccccgccgaggccgagctgcccgaggaccccagcatgatgggcagactgggcaaggtggagaagcaggtgctgagcatggagaagaagctggacttcctggtgaacatctacatgcagagaatgggcatcccccccaccgagaccgaggcctacttcggcgccaaggagcccgagcccgcccccccctaccacagccccgaggacagcagagagcacgtggacagacacggctgcatcgtgaagatcgtgagaagcagcagcagcaccggccagaagaacttcagcgccccccccgccgccccccccgtgcagtgcccccccagcaccagctggcagccccagagccaccccagacagggccacggcaccagccccgtgggcgaccacggcagcctggtgagaatcccccccccccccgcccacgagagaagcctgagcgcctacggcggcggcaacagagccagcatggagttcctgagacaggaggacacccccggctgcagaccccccgagggcaacctgagagacagcgacaccagcatcagcatccccagcgtggaccacgaggagctggagagaagcttcagcggcttcagcatcagccagagcaaggagaacctggacgccctgaacagctgctacgccgccgtggccccctgcgccaaggtgagaccctacatcgccgagggcgagagcgacaccgacagcgacctgtgcaccccctgcggccccccccccagaagcgccaccggcgagggccccttcggcgacgtgggctgggccggccccagaaagtag

SEQ ID NO: 94131 - DNA, 2619 bp, synthetic construct
  misc_feature 1..2619: note = Description of Artificial Sequence: Synthetic coding sequence
  source 1..2619: mol_type = other DNA
atggtgcagaagagcagaaacggcggcgtgtaccccggccccagcggcgagaagaagctgaaggtgggcttcgtgggcctggaccccggcgcccccgacagcaccagagacggcgccctgctgatcgccggcagcgaggcccccaagagaggcagcatcctgagcaagcccagagccggcggcgccggcgccggcaagccccccaagagaaacgccttctacagaaagctgcagaacttcctgtacaacgtgctggagagacccagaggctgggccttcatctaccacgcctacgtgttcctgctggtgttcagctgcctggtgctgagcgtgttcagcaccatcaaggagtacgagaagagcagcgagggcgccctgtacatcctggagatcgtgaccatcgtggtgttcggcgtggagtacttcgtgagaatctgggccgccggctgctgctgcagatacagaggctggagaggcagactgaagttcgccagaaagcccttctgcgtgatcgacatcatggtgctgatcgccagcatcgccgtgctggccgccggcagccagggcaacgtgttcgccaccagcgccctgagaagcctgagattcctgcagatcctgagaatgatcagaatggacagaagaggcggcacctggaagctgctgggcagcgtggtgtacgcccacagcaaggagctggtgaccgcctggtacatcggcttcctgtgcctgatcctggccagcttcctggtgtacctggccgagaagggcgagaacgaccacttcgacacctacgccgacgccctgtggtggggcctgatcaccctgaccaccatcggctacggcgacaagtacccccagacctggaacggcagactgctggccgccaccttcaccctgatcggcgtgagcttcttcgccctgcccgccggcatcctgggcagcggcttcgccctgaaggtgcaggagcagcacagacagaagcacttcgagaagagaagaaaccccgccgccggcctgatccagagcgcctggagattctacgccaccaacctgagcagaaccgacctgcacagcacctggcagtactacgagagaaccgtgaccgtgcccatgtacagcagccagacccagacctacggcgccagcagactgatcccccccctgaaccagctggagctgctgagaaacctgaagagcaagagcggcctggccttcagaaaggaccccccccccgagcccagccccagcaagggcagcccctgcagaggccccctgtgcggctgctgccccggcagaagcagccagaaggtgagcctgaaggacagagtgttcagcagccccagaggcgtggccgccaagggcaagggcagcccccaggcccagaccgtgagaagaagccccagcgccgaccagagcctggaggacagccccagcaaggtgcccaagagctggagcttcggcgacagaagcagagccagacaggccttcagaatcaagggcgccgccagcagacagaacagcgaggaggccagcctgcccggcgaggacatcgtggacgacaagagctgcccctgcgagttcgtgaccgaggacctgacccccggcctgaaggtgagcatcagagccgtgtgcgtgatgagattcctggtgagcaagagaaagttcaaggagagcctgagaccctacgacgtgatggacgtgatcgagcagtacagcgccggccacctggacatgctgagcagaatcaagagcctgcagagcagagtggaccagatcgtgggcagaggccccgccatcaccgacaaggacagaaccaagggccccgccgaggccgagctgcccgaggaccccagcatgatgggcagactgggcaaggtggagaagcaggtgctgagcatggagaagaagctggacttcctggtgaacatctacatgcagagaatgggcatcccccccaccgagaccgaggcctacttcggcgccaaggagcccgagcccgcccccccctaccacagccccgaggacagcagagagcacgtggacagacacggctgcatcgtgaagatcgtgagaagcagcagcagcaccggccagaagaacttcagcgccccccccgccgccccccccgtgcagtgcccccccagcaccagctggcagccccagagccaccccagacagggccacggcaccagccccgtgggcgaccacggcagcctggtgagaatcccccccccccccgcccacgagagaagcctgagcgcctacggcggcggcaacagagccagcatggagttcctgagacaggaggacacccccggctgcagaccccccgagggcaacctgagagacagcgacaccagcatcagcatccccagcgtggaccacgaggagctggagagaagcttcagcggcttcagcatcagccagagcaaggagaacctggacgccctgaacagctgctacgccgccgtggccccctgcgccaaggtgagaccctacatcgccgagggcgagagcgacaccgacagcgacctgtgcaccccctgcggccccccccccagaagcgccaccggcgagggccccttcggcgacgtgggctgggccggccccagaaagtag

SEQ ID NO: 94132 - DNA, 2619 bp, synthetic construct
  misc_feature 1..2619: note = Description of Artificial Sequence: Synthetic coding sequence
  source 1..2619: mol_type = other DNA
atggtgcagaagagcagaaacggcggcgtgtaccccggccccagcggcgagaagaagctgaaggtgggcttcgtgggcctggaccccggcgcccccgacagcaccagagacggcgccctgctgatcgccggcagcgaggcccccaagagaggcagcatcctgagcaagcccagagccggcggcgccggcgccggcaagccccccaagagaaacgccttctacagaaagctgcagaacttcctgtacaacgtgctggagagacccagaggctgggccttcatctaccacgcctacgtgttcctgctggtgttcagctgcctggtgctgagcgtgttcagcaccatcaaggagtacgagaagagcagcgagggcgccctgtacatcctggagatcgtgaccatcgtggtgttcggcgtggagtacttcgtgagaatctgggccgccggctgctgctgcagatacagaggctggagaggcagactgaagttcgccagaaagcccttctgcgtgatcgacatcatggtgctgatcgccagcatcgccgtgctggccgccggcagccagggcaacgtgttcgccaccagcgccctgagaagcctgagattcctgcagatcctgagaatgatcagaatggacagaagaggcggcacctggaagctgctgggcagcgtggtgtacgcccacagcaaggagctggtgaccgcctggtacatcggcttcctgtgcctgatcctggccagcttcctggtgtacctggccgagaagggcgagaacgaccacttcgacacctacgccgacgccctgtggtggggcctgatcaccctgaccaccatcggctacggcgacaagtacccccagacctggaacggcagactgctggccgccaccttcaccctgatcggcgtgagcttcttcgccctgcccgccggcatcctgggcagcggcttcgccctgaaggtgcaggagcagcacagacagaagcacttcgagaagagaagaaaccccgccgccggcctgatccagagcgcctggagattctacgccaccaacctgagcagaaccgacctgcacagcacctggcagtactacgagagaaccgtgaccgtgcccatgtacagcagccagacccagacctacggcgccagcagactgatcccccccctgaaccagctggagctgctgagaaacctgaagagcaagagcggcctggccttcagaaaggaccccccccccgagcccagccccagcaagggcagcccctgcagaggccccctgtgcggctgctgccccggcagaagcagccagaaggtgagcctgaaggacagagtgttcagcagccccagaggcgtggccgccaagggcaagggcagcccccaggcccagaccgtgagaagaagccccagcgccgaccagagcctggaggacagccccagcaaggtgcccaagagctggagcttcggcgacagaagcagagccagacaggccttcagaatcaagggcgccgccagcagacagaacagcgaggaggccagcctgcccggcgaggacatcgtggacgacaagagctgcccctgcgagttcgtgaccgaggacctgacccccggcctgaaggtgagcatcagagccgtgtgcgtgatgagattcctggtgagcaagagaaagttcaaggagagcctgagaccctacgacgtgatggacgtgatcgagcagtacagcgccggccacctggacatgctgagcagaatcaagagcctgcagagccaggtggaccagatcgtgggcagaggccccgccatcaccgacaaggacagaaccaagggccccgccgaggccgagctgcccgaggaccccagcatgatgggcagactgggcaaggtggagaagcaggtgctgagcatggagaagaagctggacttcctggtgaacatctacatgcagagaatgggcatcccccccaccgagaccgaggcctacttcggcgccaaggagcccgagcccgcccccccctaccacagccccgaggacagcagagagcacgtggacagacacggctgcatcgtgaagatcgtgagaagcagcagcagcaccggccagaagaacttcagcgccccccccgccgccccccccgtgcagtgcccccccagcaccagctggcagccccagagccaccccagacagggccacggcaccagccccgtgggcgaccacggcagcctggtgagaatcccccccccccccgcccacgagagaagcctgagcgcctacggcggcggcaacagagccagcatggagttcctgagacaggaggacacccccggctgcagaccccccgagggcaacctgagagacagcgacaccagcatcagcatccccagcgtggaccacgaggagctggagagaagcttcagcggcttcagcatcagccagagcaaggagaacctggacgccctgaacagctgctacgccgccgtggccccctgcgccaaggtgagaccctacatcgccgagggcgagagcgacaccgacagcgacctgtgcaccccctgcggccccccccccagaagcgccaccggcgagggccccttcggcgacgtgggctgggccggccccagaaagtag

SEQ ID NO: 94133 - DNA, 2535 bp, synthetic construct
  misc_feature 1..2535: note = Description of Artificial Sequence: Synthetic coding sequence
  source 1..2535: mol_type = other DNA
atggtgcagaagagcagaaacggcggcgtgtaccccggccccagcggcgagaagaagctgaaggtgggcttcgtgggcctggaccccggcgcccccgacagcaccagagacggcgccctgctgatcgccggcagcgaggcccccaagagaggcagcatcctgagcaagcccagagccggcggcgccggcgccggcaagccccccaagagaaacgccttctacagaaagctgcagaacttcctgtacaacgtgctggagagacccagaggctgggccttcatctaccacgcctacgtgttcctgctggtgttcagctgcctggtgctgagcgtgttcagcaccatcaaggagtacgagaagagcagcgagggcgccctgtacatcctggagatcgtgaccatcgtggtgttcggcgtggagtacttcgtgagaatctgggccgccggctgctgctgcagatacagaggctggagaggcagactgaagttcgccagaaagcccttctgcgtgatcgacatcatggtgctgatcgccagcatcgccgtgctggccgccggcagccagggcaacgtgttcgccaccagcgccctgagaagcctgagattcctgcagatcctgagaatgatcagaatggacagaagaggcggcacctggaagctgctgggcagcgtggtgtacgcccacagcaaggagctggtgaccgcctggtacatcggcttcctgtgcctgatcctggccagcttcctggtgtacctggccgagaagggcgagaacgaccacttcgacacctacgccgacgccctgtggtggggcctgatcaccctgaccaccatcggctacggcgacaagtacccccagacctggaacggcagactgctggccgccaccttcaccctgatcggcgtgagcttcttcgccctgcccgccggcatcctgggcagcggcttcgccctgaaggtgcaggagcagcacagacagaagcacttcgagaagagaagaaaccccgccgccggcctgatccagagcgcctggagattctacgccaccaacctgagcagaaccgacctgcacagcacctggcagtactacgagagaaccgtgaccgtgcccatgtacagactgatcccccccctgaaccagctggagctgctgagaaacctgaagagcaagagcggcctggccttcagaaaggaccccccccccgagcccagccccagccagaaggtgagcctgaaggacagagtgttcagcagccccagaggcgtggccgccaagggcaagggcagcccccaggcccagaccgtgagaagaagccccagcgccgaccagagcctggaggacagccccagcaaggtgcccaagagctggagcttcggcgacagaagcagagccagacaggccttcagaatcaagggcgccgccagcagacagaacagcgaggaggccagcctgcccggcgaggacatcgtggacgacaagagctgcccctgcgagttcgtgaccgaggacctgacccccggcctgaaggtgagcatcagagccgtgtgcgtgatgagattcctggtgagcaagagaaagttcaaggagagcctgagaccctacgacgtgatggacgtgatcgagcagtacagcgccggccacctggacatgctgagcagaatcaagagcctgcagagcagagtggaccagatcgtgggcagaggccccgccatcaccgacaaggacagaaccaagggccccgccgaggccgagctgcccgaggaccccagcatgatgggcagactgggcaaggtggagaagcaggtgctgagcatggagaagaagctggacttcctggtgaacatctacatgcagagaatgggcatcccccccaccgagaccgaggcctacttcggcgccaaggagcccgagcccgcccccccctaccacagccccgaggacagcagagagcacgtggacagacacggctgcatcgtgaagatcgtgagaagcagcagcagcaccggccagaagaacttcagcgccccccccgccgccccccccgtgcagtgcccccccagcaccagctggcagccccagagccaccccagacagggccacggcaccagccccgtgggcgaccacggcagcctggtgagaatcccccccccccccgcccacgagagaagcctgagcgcctacggcggcggcaacagagccagcatggagttcctgagacaggaggacacccccggctgcagaccccccgagggcaacctgagagacagcgacaccagcatcagcatccccagcgtggaccacgaggagctggagagaagcttcagcggcttcagcatcagccagagcaaggagaacctggacgccctgaacagctgctacgccgccgtggccccctgcgccaaggtgagaccctacatcgccgagggcgagagcgacaccgacagcgacctgtgcaccccctgcggccccccccccagaagcgccaccggcgagggccccttcggcgacgtgggctgggccggccccagaaagtag

SEQ ID NO: 94134 - DNA, 1311 bp, synthetic construct
  misc_feature 1..1311: note = Description of Artificial Sequence: Synthetic coding sequence
  source 1..1311: mol_type = other DNA
atggtgcagaagagcagaaacggcggcgtgtaccccggccccagcggcgagaagaagctgaaggtgggcttcgtgggcctggaccccggcgcccccgacagcaccagagacggcgccctgctgatcgccggcagcgaggcccccaagagaggcagcatcctgagcaagcccagagccggcggcgccggcgccggcaagccccccaagagaaacgccttctacagaaagctgcagaacttcctgtacaacgtgctggagagacccagaggctgggccttcatctaccacgcctacgtgttcctgctggtgttcagctgcctggtgctgagcgtgttcagcaccatcaaggagtacgagaagagcagcgagggcgccctgtacatcctggagatcgtgaccatcgtggtgttcggcgtggagtacttcgtgagaatctgggccgccggctgctgctgcagatacagaggctggagaggcagactgaagttcgccagaaagcccttctgcgtgatcgacatcatggtgctgatcgccagcatcgccgtgctggccgccggcagccagggcaacgtgttcgccaccagcgccctgagaagcctgagattcctgcagatcctgagaatgatcagaatggacagaagaggcggcacctggaagctgctgggcagcgtggtgtacgcccacagcaaggagctggtgaccgcctggtacatcggcttcctgtgcctgatcctggccagcttcctggtgtacctggccgagaagggcgagaacgaccacttcgacacctacgccgacgccctgtggtggggcctgatcaccctgaccaccatcggctacggcgacaagtacccccagacctggaacggcagactgctggccgccaccttcaccctgatcggcgtgagcttcttcgccctgcccgccggcatcctgggcagcggcttcgccctgaaggtgcaggagcagcacagacagaagcacttcgagaagagaagaaaccccgccgccggcctgatccagagcgcctggagattctacgccaccaacctgagcagaaccgacctgcacagcacctggcagtactacgagagaaccgtgaccgtgcccatgtacagactgatcccccccctgaaccagctggagctgctgagaaacctgaagagcaagagcggcctggccttcagaaaggaccccccccccgagcccagccccagaagcgtgccccccgccgccaccctggtgagcgccgtgtgcaccgccgtgtggagcctgagccacacctgcgcccagcccgtgatggagatgtag

SEQ ID NO: 94135 - DNA, 1848 bp, synthetic construct
  misc_feature 1..1848: note = Description of Artificial Sequence: Synthetic coding sequence
  source 1..1848: mol_type = other DNA
atggtgcagaagagcagaaacggcggcgtgtaccccggccccagcggcgagaagaagctgaaggtgggcttcgtgggcctggaccccggcgcccccgacagcaccagagacggcgccctgctgatcgccggcagcgaggcccccaagagaggcagcatcctgagcaagcccagagccggcggcgccggcgccggcaagccccccaagagaaacgccttctacagaaagctgcagaacttcctgtacaacgtgctggagagacccagaggctgggccttcatctaccacgcctacgtgttcctgctggtgttcagctgcctggtgctgagcgtgttcagcaccatcaaggagtacgagaagagcagcgagggcgccctgtacatcctggagatcgtgaccatcgtggtgttcggcgtggagtacttcgtgagaatctgggccgccggctgctgctgcagatacagaggctggagaggcagactgaagttcgccagaaagcccttctgcgtgatcgacatcatggtgctgatcgccagcatcgccgtgctggccgccggcagccagggcaacgtgttcgccaccagcgccctgagaagcctgagattcctgcagatcctgagaatgatcagaatggacagaagaggcggcacctggaagctgctgggcagcgtggtgtacgcccacagcaaggagctggtgaccgcctggtacatcggcttcctgtgcctgatcctggccagcttcctggtgtacctggccgagaagggcgagaacgaccacttcgacacctacgccgacgccctgtggtggggcctgatcaccctgaccaccatcggctacggcgacaagtacccccagacctggaacggcagactgctggccgccaccttcaccctgatcggcgtgagcttcttcgccctgcccgccggcatcctgggcagcggcttcgccctgaaggtgcaggagcagcacagacagaagcacttcgagaagagaagaaaccccgccgccggcctgatccagagcgcctggagattctacgccaccaacctgagcagaaccgacctgcacagcacctggcagtactacgagagaaccgtgaccgtgcccatgtacagactgatcccccccctgaaccagctggagctgctgagaaacctgaagagcaagagcggcctggccttcagaaaggaccccccccccgagcccagccccagccagaaggtgagcctgaaggacagagtgttcagcagccccagaggcgtggccgccaagggcaagggcagcccccaggcccagaccgtgagaagaagccccagcgccgaccagagcctggaggacagccccagcaaggtgcccaagagctggagcttcggcgacagaagcagagccagacaggccttcagaatcaagggcgccgccagcagacagaacagcgaggaggccagcctgcccggcgaggacatcgtggacgacaagagctgcccctgcgagttcgtgaccgaggacctgacccccggcctgaaggtgagcatcagagccgtgtgcgtgatgagattcctggtgagcaagagaaagttcaaggagagcctgagaccctacgacgtgatggacgtgatcgagcagtacagcgccggccacctggacatgctgagcagaatcaagagcctgcagagcagacaggagcccagactgcccgtgcagcagggcaccagaaccggctgggccagcggcaccaagcccaccgtggcccacggcggcagcgccggcggcgtgtgggccggcccccccccccaccccagaagacccctgagcgccagcgtggtgagcagccagagcctgttctag

SEQ ID NO: 94136 - DNA, 2643 bp, synthetic construct
  misc_feature 1..2643: note = Description of Artificial Sequence: Synthetic coding sequence
  source 1..2643: mol_type = other DNA
atggtgcagaagagcagaaacggcggcgtgtaccccggccccagcggcgagaagaagctgaaggtgggcttcgtgggcctggaccccggcgcccccgacagcaccagagacggcgccctgctgatcgccggcagcgaggcccccaagagaggcagcatcctgagcaagcccagagccggcggcgccggcgccggcaagccccccaagagaaacgccttctacagaaagctgcagaacttcctgtacaacgtgctggagagacccagaggctgggccttcatctaccacgcctacgtgttcctgctggtgttcagctgcctggtgctgagcgtgttcagcaccatcaaggagtacgagaagagcagcgagggcgccctgtacatcctggagatcgtgaccatcgtggtgttcggcgtggagtacttcgtgagaatctgggccgccggctgctgctgcagatacagaggctggagaggcagactgaagttcgccagaaagcccttctgcgtgatcgacatcatggtgctgatcgccagcatcgccgtgctggccgccggcagccagggcaacgtgttcgccaccagcgccctgagaagcctgagattcctgcagatcctgagaatgatcagaatggacagaagaggcggcacctggaagctgctgggcagcgtggtgtacgcccacagcaaggagctggtgaccgcctggtacatcggcttcctgtgcctgatcctggccagcttcctggtgtacctggccgagaagggcgagaacgaccacttcgacacctacgccgacgccctgtggtggggcctgatcaccctgaccaccatcggctacggcgacaagtacccccagacctggaacggcagactgctggccgccaccttcaccctgatcggcgtgagcttcttcgccctgcccgccggcatcctgggcagcggcttcgccctgaaggtgcaggagcagcacagacagaagcacttcgagaagagaagaaaccccgccgccggcctgatccagagcgcctggagattctacgccaccaacctgagcagaaccgacctgcacagcacctggcagtactacgagagaaccgtgaccgtgcccatgtacagactgatcccccccctgaaccagctggagctgctgagaaacctgaagagcaagagcggcctggccttcagaaaggaccccccccccgagcccagccccagccagaaggtgagcctgaaggacagagtgttcagcagccccagaggcgtggccgccaagggcaagggcagcccccaggcccagaccgtgagaagaagccccagcgccgaccagagcctggaggacagccccagcaaggtgcccaagagctggagcttcggcgacagaagcagagccagacaggccttcagaatcaagggcgccgccagcagacagaacagcgaggaggccagcctgcccggcgaggacatcgtggacgacaagagctgcccctgcgagttcgtgaccgaggacctgacccccggcctgaaggtgagcatcagagccgtgtgcgtgatgagattcctggtgagcaagagaaagttcaaggagagcctgagaccctacgacgtgatggacgtgatcgagcagtacagcgccggccacctggacatgctgagcagaatcaagagcctgcagagcagaatcgacatgatcgtgggcccccccccccccagcacccccagacacaagaagtaccccaccaagggccccaccgccccccccagagagagcccccagtacagccccagagtggaccagatcgtgggcagaggccccgccatcaccgacaaggacagaaccaagggccccgccgaggccgagctgcccgaggaccccagcatgatgggcagactgggcaaggtggagaagcaggtgctgagcatggagaagaagctggacttcctggtgaacatctacatgcagagaatgggcatcccccccaccgagaccgaggcctacttcggcgccaaggagcccgagcccgcccccccctaccacagccccgaggacagcagagagcacgtggacagacacggctgcatcgtgaagatcgtgagaagcagcagcagcaccggccagaagaacttcagcgccccccccgccgccccccccgtgcagtgcccccccagcaccagctggcagccccagagccaccccagacagggccacggcaccagccccgtgggcgaccacggcagcctggtgagaatcccccccccccccgcccacgagagaagcctgagcgcctacggcggcggcaacagagccagcatggagttcctgagacaggaggacacccccggctgcagaccccccgagggcaacctgagagacagcgacaccagcatcagcatccccagcgtggaccacgaggagctggagagaagcttcagcggcttcagcatcagccagagcaaggagaacctggacgccctgaacagctgctacgccgccgtggccccctgcgccaaggtgagaccctacatcgccgagggcgagagcgacaccgacagcgacctgtgcaccccctgcggccccccccccagaagcgccaccggcgagggccccttcggcgacgtgggctgggccggccccagaaagtag

SEQ ID NO: 94137 - DNA, 2529 bp, synthetic construct
  misc_feature 1..2529: note = Description of Artificial Sequence: Synthetic coding sequence
  source 1..2529: mol_type = other DNA
atggtgcagaagagcagaaacggcggcgtgtaccccggccccagcggcgagaagaagctgaaggtgggcttcgtgggcctggaccccggcgcccccgacagcaccagagacggcgccctgctgatcgccggcagcgaggcccccaagagaggcagcatcctgagcaagcccagagccggcggcgccggcgccggcaagccccccaagagaaacgccttctacagaaagctgcagaacttcctgtacaacgtgctggagagacccagaggctgggccttcatctaccacgcctacgtgttcctgctggtgttcagctgcctggtgctgagcgtgttcagcaccatcaaggagtacgagaagagcagcgagggcgccctgtacatcctggagatcgtgaccatcgtggtgttcggcgtggagtacttcgtgagaatctgggccgccggctgctgctgcagatacagaggctggagaggcagactgaagttcgccagaaagcccttctgcgtgatcgacatcatggtgctgatcgccagcatcgccgtgctggccgccggcagccagggcaacgtgttcgccaccagcgccctgagaagcctgagattcctgcagatcctgagaatgatcagaatggacagaagaggcggcacctggaagctgctgggcagcgtggtgtacgcccacagcaaggagctggtgaccgcctggtacatcggcttcctgtgcctgatcctggccagcttcctggtgtacctggccgagaagggcgagaacgaccacttcgacacctacgccgacgccctgtggtggggcctgatcaccctgaccaccatcggctacggcgacaagtacccccagacctggaacggcagactgctggccgccaccttcaccctgatcggcgtgagcttcttcgccctgcccgccggcatcctgggcagcggcttcgccctgaaggtgcaggagcagcacagacagaagcacttcgagaagagaagaaaccccgccgccggcctgatccagagcgcctggagattctacgccaccaacctgagcagaaccgacctgcacagcacctggcagtactacgagagaaccgtgaccgtgcccatgtacagcagccagacccagacctacggcgccagcagactgatcccccccctgaaccagctggagctgctgagaaacctgaagagcaagagcggcctggccttcagaaaggaccccccccccgagcccagccccagccccagaggcgtggccgccaagggcaagggcagcccccaggcccagaccgtgagaagaagccccagcgccgaccagagcctggaggacagccccagcaaggtgcccaagagctggagcttcggcgacagaagcagagccagacaggccttcagaatcaagggcgccgccagcagacagaacagcgaggaggccagcctgcccggcgaggacatcgtggacgacaagagctgcccctgcgagttcgtgaccgaggacctgacccccggcctgaaggtgagcatcagagccgtgtgcgtgatgagattcctggtgagcaagagaaagttcaaggagagcctgagaccctacgacgtgatggacgtgatcgagcagtacagcgccggccacctggacatgctgagcagaatcaagagcctgcagagcagagtggaccagatcgtgggcagaggccccgccatcaccgacaaggacagaaccaagggccccgccgaggccgagctgcccgaggaccccagcatgatgggcagactgggcaaggtggagaagcaggtgctgagcatggagaagaagctggacttcctggtgaacatctacatgcagagaatgggcatcccccccaccgagaccgaggcctacttcggcgccaaggagcccgagcccgcccccccctaccacagccccgaggacagcagagagcacgtggacagacacggctgcatcgtgaagatcgtgagaagcagcagcagcaccggccagaagaacttcagcgccccccccgccgccccccccgtgcagtgcccccccagcaccagctggcagccccagagccaccccagacagggccacggcaccagccccgtgggcgaccacggcagcctggtgagaatcccccccccccccgcccacgagagaagcctgagcgcctacggcggcggcaacagagccagcatggagttcctgagacaggaggacacccccggctgcagaccccccgagggcaacctgagagacagcgacaccagcatcagcatccccagcgtggaccacgaggagctggagagaagcttcagcggcttcagcatcagccagagcaaggagaacctggacgccctgaacagctgctacgccgccgtggccccctgcgccaaggtgagaccctacatcgccgagggcgagagcgacaccgacagcgacctgtgcaccccctgcggccccccccccagaagcgccaccggcgagggccccttcggcgacgtgggctgggccggccccagaaagtag

SEQ ID NO: 94138 - DNA, 2526 bp, synthetic construct
  misc_feature 1..2526: note = Description of Artificial Sequence: Synthetic coding sequence
  source 1..2526: mol_type = other DNA
atggtgcagaagagcagaaacggcggcgtgtaccccggccccagcggcgagaagaagctgaaggtgggcttcgtgggcctggaccccggcgcccccgacagcaccagagacggcgccctgctgatcgccggcagcgaggcccccaagagaggcagcatcctgagcaagcccagagccggcggcgccggcgccggcaagccccccaagagaaacgccttctacagaaagctgcagaacttcctgtacaacgtgctggagagacccagaggctgggccttcatctaccacgcctacgtgttcctgctggtgttcagctgcctggtgctgagcgtgttcagcaccatcaaggagtacgagaagagcagcgagggcgccctgtacatcctggagatcgtgaccatcgtggtgttcggcgtggagtacttcgtgagaatctgggccgccggctgctgctgcagatacagaggctggagaggcagactgaagttcgccagaaagcccttctgcgtgatcgacatcatggtgctgatcgccagcatcgccgtgctggccgccggcagccagggcaacgtgttcgccaccagcgccctgagaagcctgagattcctgcagatcctgagaatgatcagaatggacagaagaggcggcacctggaagctgctgggcagcgtggtgtacgcccacagcaaggagctggtgaccgcctggtacatcggcttcctgtgcctgatcctggccagcttcctggtgtacctggccgagaagggcgagaacgaccacttcgacacctacgccgacgccctgtggtggggcctgatcaccctgaccaccatcggctacggcgacaagtacccccagacctggaacggcagactgctggccgccaccttcaccctgatcggcgtgagcttcttcgccctgcccgccggcatcctgggcagcggcttcgccctgaaggtgcaggagcagcacagacagaagcacttcgagaagagaagaaaccccgccgccggcctgatccagagcgcctggagattctacgccaccaacctgagcagaaccgacctgcacagcacctggcagtactacgagagaaccgtgaccgtgcccatgtacagcagccagacccagacctacggcgccagcagactgatcccccccctgaaccagctggagctgctgagaaacctgaagagcaagagcggcctggccttcagaaaggaccccccccccgagcccagccccagccccagaggcgtggccgccaagggcaagggcagcccccaggcccagaccgtgagaagaagccccagcgccgaccagagcctggaggacagccccagcaaggtgcccaagagctggagcttcggcgacagaagcagagccagacaggccttcagaatcaagggcgccgccagcagacagaacagcgaggccagcctgcccggcgaggacatcgtggacgacaagagctgcccctgcgagttcgtgaccgaggacctgacccccggcctgaaggtgagcatcagagccgtgtgcgtgatgagattcctggtgagcaagagaaagttcaaggagagcctgagaccctacgacgtgatggacgtgatcgagcagtacagcgccggccacctggacatgctgagcagaatcaagagcctgcagagcagagtggaccagatcgtgggcagaggccccgccatcaccgacaaggacagaaccaagggccccgccgaggccgagctgcccgaggaccccagcatgatgggcagactgggcaaggtggagaagcaggtgctgagcatggagaagaagctggacttcctggtgaacatctacatgcagagaatgggcatcccccccaccgagaccgaggcctacttcggcgccaaggagcccgagcccgcccccccctaccacagccccgaggacagcagagagcacgtggacagacacggctgcatcgtgaagatcgtgagaagcagcagcagcaccggccagaagaacttcagcgccccccccgccgccccccccgtgcagtgcccccccagcaccagctggcagccccagagccaccccagacagggccacggcaccagccccgtgggcgaccacggcagcctggtgagaatcccccccccccccgcccacgagagaagcctgagcgcctacggcggcggcaacagagccagcatggagttcctgagacaggaggacacccccggctgcagaccccccgagggcaacctgagagacagcgacaccagcatcagcatccccagcgtggaccacgaggagctggagagaagcttcagcggcttcagcatcagccagagcaaggagaacctggacgccctgaacagctgctacgccgccgtggccccctgcgccaaggtgagaccctacatcgccgagggcgagagcgacaccgacagcgacctgtgcaccccctgcggccccccccccagaagcgccaccggcgagggccccttcggcgacgtgggctgggccggccccagaaagtag

SEQ ID NO: 94139 - DNA, 2619 bp, synthetic construct
  misc_feature 1..2619: note = Description of Artificial Sequence: Synthetic coding sequence
  source 1..2619: mol_type = other DNA
atgggcctgaaggccagaagagccgccggcgccgccggcggcggcggcgacggcggcggcggcggcggcggcgccgccaaccccgccggcggcgacgccgccgccgccggcgacgaggagagaaaggtgggcctggcccccggcgacgtggagcaggtgaccctggccctgggcgccggcgccgacaaggacggcaccctgctgctggagggcggcggcagagacgagggccagagaagaaccccccagggcatcggcctgctggccaagacccccctgagcagacccgtgaagagaaacaacgccaagtacagaagaatccagaccctgatctacgacgccctggagagacccagaggctgggccctgctgtaccacgccctggtgttcctgatcgtgctgggctgcctgatcctggccgtgctgaccaccttcaaggagtacgagaccgtgagcggcgactggctgctgctgctggagaccttcgccatcttcatcttcggcgccgagttcgccctgagaatctgggccgccggctgctgctgcagatacaagggctggagaggcagactgaagttcgccagaaagcccctgtgcatgctggacatcttcgtgctgatcgccagcgtgcccgtggtggccgtgggcaaccagggcaacgtgctggccaccagcctgagaagcctgagattcctgcagatcctgagaatgctgagaatggacagaagaggcggcacctggaagctgctgggcagcgccatctgcgcccacagcaaggagctgatcaccgcctggtacatcggcttcctgaccctgatcctgagcagcttcctggtgtacctggtggagaaggacgtgcccgaggtggacgcccagggcgaggagatgaaggaggagttcgagacctacgccgacgccctgtggtggggcctgatcaccctggccaccatcggctacggcgacaagacccccaagacctgggagggcagactgatcgccgccaccttcagcctgatcggcgtgagcttcttcgccctgcccgccggcatcctgggcagcggcctggccctgaaggtgcaggagcagcacagacagaagcacttcgagaagagaagaaagcccgccgccgagctgatccaggccgcctggagatactacgccaccaaccccaacagaatcgacctggtggccacctggagattctacgagagcgtggtgagcttccccttcttcagaaaggagcagctggaggccgccagcagccagaagctgggcctgctggacagagtgagactgagcaaccccagaggcagcaacaccaagggcaagctgttcacccccctgaacgtggacgccatcgaggagagccccagcaaggagcccaagcccgtgggcctgaacaacaaggagagattcagaaccgccttcagaatgaaggcctacgccttctggcagagcagcgaggacgccggcaccggcgaccccatggccgaggacagaggctacggcaacgacttccccatcgaggacatgatccccaccctgaaggccgccatcagagccgtgagaatcctgcagttcagactgtacaagaagaagttcaaggagaccctgagaccctacgacgtgaaggacgtgatcgagcagtacagcgccggccacctggacatgctgagcagaatcaagtacctgcagaccagaatcgacatgatcttcacccccggcccccccagcacccccaagcacaagaagagccagaagggcagcgccttcaccttccccagccagcagagccccagaaacgagccctacgtggccagacccagcaccagcgagatcgaggaccagagcatgatgggcaagttcgtgaaggtggagagacaggtgcaggacatgggcaagaagctggacttcctggtggacatgcacatgcagcacatggagagactgcaggtgcaggtgaccgagtactaccccaccaagggcaccagcagccccgccgaggccgagaagaaggaggacaacagatacagcgacctgaagaccatcatctgcaactacagcgagaccggcccccccgagcccccctacagcttccaccaggtgaccatcgacaaggtgagcccctacggcttcttcgcccacgaccccgtgaacctgcccagaggcggccccagcagcggcaaggtgcaggccaccccccccagcagcgccaccacctacgtggagagacccaccgtgctgcccatcctgaccctgctggacagcagagtgagctgccacagccaggccgacctgcagggcccctacagcgacagaatcagccccagacagagaagaagcatcaccagagacagcgacacccccctgagcctgatgagcgtgaaccacgaggagctggagagaagccccagcggcttcagcatcagccaggacagagacgactacgtgttcggccccaacggcggcagcagctggatgagagagaagagatacctggccgagggcgagaccgacaccgacaccgaccccttcacccccagcggcagcatgcccctgagcagcaccggcgacggcatcagcgacagcgtgtggacccccagcaacaagcccatctag

SEQ ID NO: 94140 - DNA, 2256 bp, synthetic construct
  misc_feature 1..2256: note = Description of Artificial Sequence: Synthetic coding sequence
  source 1..2256: mol_type = other DNA
aagcccaagaagcacggccccatgttcctgatcgtgctgggctgcctgatcctggccgtgctgaccaccttcaaggagtacgagaccgtgagcggcgactggctgctgctgctggagaccttcgccatcttcatcttcggcgccgagttcgccctgagaatctgggccgccggctgctgctgcagatacaagggctggagaggcagactgaagttcgccagaaagcccctgtgcatgctggacatcttcgtgctgatcgccagcgtgcccgtggtggccgtgggcaaccagggcaacgtgctggccaccagcctgagaagcctgagattcctgcagatcctgagaatgctgagaatggacagaagaggcggcacctggaagctgctgggcagcgccatctgcgcccacagcaaggagctgatcaccgcctggtacatcggcttcctgaccctgatcctgagcagcttcctggtgtacctggtggagaaggacgtgcccgaggtggacgcccagggcgaggagatgaaggaggagttcgagacctacgccgacgccctgtggtggggcctgatcaccctggccaccatcggctacggcgacaagacccccaagacctgggagggcagactgatcgccgccaccttcagcctgatcggcgtgagcttcttcgccctgcccgccggcatcctgggcagcggcctggccctgaaggtgcaggagcagcacagacagaagcacttcgagaagagaagaaagcccgccgccgagctgatccaggccgcctggagatactacgccaccaaccccaacagaatcgacctggtggccacctggagattctacgagagcgtggtgagcttccccttcttcagaaaggagcagctggaggccgccagcagccagaagctgggcctgctggacagagtgagactgagcaaccccagaggcagcaacaccaagggcaagctgttcacccccctgaacgtggacgccatcgaggagagccccagcaaggagcccaagcccgtgggcctgaacaacaaggagagattcagaaccgccttcagaatgaaggcctacgccttctggcagagcagcgaggacgccggcaccggcgaccccatggccgaggacagaggctacggcaacgacttccccatcgaggacatgatccccaccctgaaggccgccatcagagccgtgagaatcctgcagttcagactgtacaagaagaagttcaaggagaccctgagaccctacgacgtgaaggacgtgatcgagcagtacagcgccggccacctggacatgctgagcagaatcaagtacctgcagaccagaatcgacatgatcttcacccccggcccccccagcacccccaagcacaagaagagccagaagggcagcgccttcaccttccccagccagcagagccccagaaacgagccctacgtggccagacccagcaccagcgagatcgaggaccagagcatgatgggcaagttcgtgaaggtggagagacaggtgcaggacatgggcaagaagctggacttcctggtggacatgcacatgcagcacatggagagactgcaggtgcaggtgaccgagtactaccccaccaagggcaccagcagccccgccgaggccgagaagaaggaggacaacagatacagcgacctgaagaccatcatctgcaactacagcgagaccggcccccccgagcccccctacagcttccaccaggtgaccatcgacaaggtgagcccctacggcttcttcgcccacgaccccgtgaacctgcccagaggcggccccagcagcggcaaggtgcaggccaccccccccagcagcgccaccacctacgtggagagacccaccgtgctgcccatcctgaccctgctggacagcagagtgagctgccacagccaggccgacctgcagggcccctacagcgacagaatcagccccagacagagaagaagcatcaccagagacagcgacacccccctgagcctgatgagcgtgaaccacgaggagctggagagaagccccagcggcttcagcatcagccaggacagagacgactacgtgttcggccccaacggcggcagcagctggatgagagagaagagatacctggccgagggcgagaccgacaccgacaccgaccccttcacccccagcggcagcatgcccctgagcagcaccggcgacggcatcagcgacagcgtgtggacccccagcaacaagcccatctag

SEQ ID NO: 94141 - DNA, 2550 bp, synthetic construct
  misc_feature 1..2550: note = Description of Artificial Sequence: Synthetic coding sequence
  source 1..2550: mol_type = other DNA
agagccgccgccgagaaggccaagagacccgccggcgccagacagatgggcctgaaggccagaagagccgccgccggcgacgaggagagaaaggtgggcctggcccccggcgacgtggagcaggtgaccctggccctgggcgccggcgccgacaaggacggcaccctgctgctggagggcggcggcagagacgagggccagagaagaaccccccagggcatcggcctgctggccaagacccccctgagcagacccgtgaagagaaacaacgccaagtacagaagaatccagaccctgatctacgacgccctggagagacccagaggctgggccctgctgtaccacgccctggtgttcctgatcgtgctgggctgcctgatcctggccgtgctgaccaccttcaaggagtacgagaccgtgagcggcgactggctgctgctgctggagaccttcgccatcttcatcttcggcgccgagttcgccctgagaatctgggccgccggctgctgctgcagatacaagggctggagaggcagactgaagttcgccagaaagcccctgtgcatgctggacatcttcgtgctgatcgccagcgtgcccgtggtggccgtgggcaaccagggcaacgtgctggccaccagcctgagaagcctgagattcctgcagatcctgagaatgctgagaatggacagaagaggcggcacctggaagctgctgggcagcgccatctgcgcccacagcaaggagctgatcaccgcctggtacatcggcttcctgaccctgatcctgagcagcttcctggtgtacctggtggagaaggacgtgcccgaggtggacgcccagggcgaggagatgaaggaggagttcgagacctacgccgacgccctgtggtggggcctgatcaccctggccaccatcggctacggcgacaagacccccaagacctgggagggcagactgatcgccgccaccttcagcctgatcggcgtgagcttcttcgccctgcccgccggcatcctgggcagcggcctggccctgaaggtgcaggagcagcacagacagaagcacttcgagaagagaagaaagcccgccgccgagctgatccaggccgcctggagatactacgccaccaaccccaacagaatcgacctggtggccacctggagattctacgagagcgtggtgagcttccccttcttcagaaaggagcagctggaggccgccagcagccagaagctgggcctgctggacagagtgagactgagcaaccccagaggcagcaacaccaagggcaagctgttcacccccctgaacgtggacgccatcgaggagagccccagcaaggagcccaagcccgtgggcctgaacaacaaggagagattcagaaccgccttcagaatgaaggcctacgccttctggcagagcagcgaggacgccggcaccggcgaccccatggccgaggacagaggctacggcaacgacttccccatcgaggacatgatccccaccctgaaggccgccatcagagccgtgagaatcctgcagttcagactgtacaagaagaagttcaaggagaccctgagaccctacgacgtgaaggacgtgatcgagcagtacagcgccggccacctggacatgctgagcagaatcaagtacctgcagaccagaatcgacatgatcttcacccccggcccccccagcacccccaagcacaagaagagccagaagggcaacgagccctacgtggccagacccagcaccagcgagatcgaggaccagagcatgatgggcaagttcgtgaaggtggagagacaggtgcaggacatgggcaagaagctggacttcctggtggacatgcacatgcagcacatggagagactgcaggtgcaggtgaccgagtactaccccaccaagggcaccagcagccccgccgaggccgagaagaaggaggacaacagatacagcgacctgaagaccatcatctgcaactacagcgagaccggcccccccgagcccccctacagcttccaccaggtgaccatcgacaaggtgagcccctacggcttcttcgcccacgaccccgtgaacctgcccagaggcggccccagcagcggcaaggtgcaggccaccccccccagcagcgccaccacctacgtggagagacccaccgtgctgcccatcctgaccctgctggacagcagagtgagctgccacagccaggccgacctgcagggcccctacagcgacagaatcagccccagacagagaagaagcatcaccagagacagcgacacccccctgagcctgatgagcgtgaaccacgaggagctggagagaagccccagcggcttcagcatcagccaggacagagacgactacgtgttcggccccaacggcggcagcagctggatgagagagaagagatacctggccgagggcgagaccgacaccgacaccgaccccttcacccccagcggcagcatgcccctgagcagcaccggcgacggcatcagcgacagcgtgtggacccccagcaacaagcccatctag

SEQ ID NO: 94142 - DNA, 2088 bp, synthetic construct
  misc_feature 1..2088: note = Description of Artificial Sequence: Synthetic coding sequence
  source 1..2088: mol_type = other DNA
atggccgaggccccccccagaagactgggcctgggccccccccccggcgacgcccccagagccgagctggtggccctgaccgccgtgcagagcgagcagggcgaggccggcggcggcggcagccccagaagactgggcctgctgggcagccccctgccccccggcgcccccctgcccggccccggcagcggcagcggcagcgcctgcggccagagaagcagcgccgcccacaagagatacagaagactgcagaactgggtgtacaacgtgctggagagacccagaggctgggccttcgtgtaccacgtgttcatcttcctgctggtgttcagctgcctggtgctgagcgtgctgagcaccatccaggagcaccaggagctggccaacgagtgcctgctgatcctggagttcgtgatgatcgtggtgttcggcctggagtacatcgtgagagtgtggagcgccggctgctgctgcagatacagaggctggcagggcagattcagattcgccagaaagcccttctgcgtgatcgacttcatcgtgttcgtggccagcgtggccgtgatcgccgccggcacccagggcaacatcttcgccaccagcgccctgagaagcatgagattcctgcagatcctgagaatggtgagaatggacagaagaggcggcacctggaagctgctgggcagcgtggtgtacgcccacagcaaggagctgatcaccgcctggtacatcggcttcctggtgctgatcttcgccagcttcctggtgtacctggccgagaaggacgccaacagcgacttcagcagctacgccgacagcctgtggtggggcaccatcaccctgaccaccatcggctacggcgacaagaccccccacacctggctgggcagagtgctggccgccggcttcgccctgctgggcatcagcttcttcgccctgcccgccggcatcctgggcagcggcttcgccctgaaggtgcaggagcagcacagacagaagcacttcgagaagagaagaatgcccgccgccaacctgatccaggccgcctggagactgtacagcaccgacatgagcagagcctacctgaccgccacctggtactactacgacagcatcctgcccagcttcagagagctggccctgctgttcgagcacgtgcagagagccagaaacggcggcctgagacccctggaggtgagaagagcccccgtgcccgacggcgcccccagcagatacccccccgtggccacctgccacagacccggcagcaccagcttctgccccggcgagagcagcagaatgggcatcaaggacagaatcagaatgggcagcagccagagaagaaccggccccagcaagcagcacctggccccccccaccatgcccaccagccccagcagcgagcaggtgggcgaggccaccagccccaccaaggtgcagaagagctggagcttcaacgacagaaccagattcagagccagcctgagactgaagcccagaaccagcgccgaggacgcccccagcgaggaggtggccgaggagaagagctaccagtgcgagctgaccgtggacgacatcatgcccgccgtgaagaccgtgatcagaagcatcagaatcctgaagttcctggtggccaagagaaagttcaaggagaccctgagaccctacgacgtgaaggacgtgatcgagcagtacagcgccggccacctggacatgctgggcagaatcaagagcctgcagaccagagtggaccagatcgtgggcagaggccccggcgacagaaaggccagagagaagggcgacaagggccccagcgacgccgaggtggtggacgagatcagcatgatgggcagagtggtgaaggtggagaagcaggtgcagagcatcgagcacaagctggacctgctgctgggcttctacagcagatgcctgagaagcggcaccagcgccagcctgggcgccgtgcaggtgcccctgttcgaccccgacatcaccagcgactaccacagccccgtggaccacgaggacatcagcgtgagcgcccagaccctgagcatcagcagaagcgtgagcaccaacatggactag

SEQ ID NO: 94143 - DNA, 2856 bp, synthetic construct
  misc_feature 1..2856: note = Description of Artificial Sequence: Synthetic coding sequence
  source 1..2856: mol_type = other DNA
atgcccagacaccacgccggcggcgaggagggcggcgccgccggcctgtgggtgaagagcggcgccgccgccgccgccgccggcggcggcagactgggcagcggcatgaaggacgtggagagcggcagaggcagagtgctgctgaacagcgccgccgccagaggcgacggcctgctgctgctgggcaccagagccgccaccctgggcggcggcggcggcggcctgagagagagcagaagaggcaagcagggcgccagaatgagcctgctgggcaagcccctgagctacaccagcagccagagctgcagaagaaacgtgaagtacagaagagtgcagaactacctgtacaacgtgctggagagacccagaggctgggccttcatctaccacgccttcgtgttcctgctggtgttcggctgcctgatcctgagcgtgttcagcaccatccccgagcacaccaagctggccagcagctgcctgctgatcctggagttcgtgatgatcgtggtgttcggcctggagttcatcatcagaatctggagcgccggctgctgctgcagatacagaggctggcagggcagactgagattcgccagaaagcccttctgcgtgatcgacaccatcgtgctgatcgccagcatcgccgtggtgagcgccaagacccagggcaacatcttcgccaccagcgccctgagaagcctgagattcctgcagatcctgagaatggtgagaatggacagaagaggcggcacctggaagctgctgggcagcgtggtgtacgcccacagcaaggagctgatcaccgcctggtacatcggcttcctggtgctgatcttcagcagcttcctggtgtacctggtggagaaggacgccaacaaggagttcagcacctacgccgacgccctgtggtggggcaccatcaccctgaccaccatcggctacggcgacaagacccccctgacctggctgggcagactgctgagcgccggcttcgccctgctgggcatcagcttcttcgccctgcccgccggcatcctgggcagcggcttcgccctgaaggtgcaggagcagcacagacagaagcacttcgagaagagaagaaaccccgccgccaacctgatccagtgcgtgtggagaagctacgccgccgacgagaagagcgtgagcatcgccacctggaagccccacctgaaggccctgcacacctgcagccccaccaagaaggagcagggcgaggccagcagcagcaagttctgcagcaacaagcagaagctgttcagaatgtacaccagcagaaagcagagccagaagctgagcttcaaggagagagtgagaatggccagccccagaggccagagcatcaagagcagacaggccagcgtgggcgacagaagaagccccagcaccgacatcaccgccgagggcagccccaccaaggtgcagaagagctggagcttcaacgacagaaccagattcagacccagcctgagactgaagagcagccagcccaagcccgtgatcgacgccgacaccgccctgggcaccgacgacgtgtacgacgagaagggctgccagtgcgacgtgagcgtggaggacctgaccccccccctgaagaccgtgatcagagccatcagaatcatgaagttccacgtggccaagagaaagttcaaggagaccctgagaccctacgacgtgaaggacgtgatcgagcagtacagcgccggccacctggacatgctgtgcagaatcaagagcctgcagaccagagtggaccagatcctgggcaagggccagatcaccagcgacaagaagagcagagagaagatcaccgccgagcacgagaccaccgacgacctgagcatgctgggcagagtggtgaaggtggagaagcaggtgcagagcatcgagagcaagctggactgcctgctggacatctaccagcaggtgctgagaaagggcagcgccagcgccctggccctggccagcttccagatcccccccttcgagtgcgagcagaccagcgactaccagagccccgtggacagcaaggacctgagcggcagcgcccagaacagcggctgcctgagcagaagcaccagcgccaacatcagcagaggcctgcagttcatcctgacccccaacgagttcagcgcccagaccttctacgccctgagccccaccatgcacagccaggccacccaggtgcccatcagccagagcgacggcagcgccgtggccgccaccaacaccatcgccaaccagatcaacaccgcccccaagcccgccgcccccaccaccctgcagatccccccccccctgcccgccatcaagcacctgcccagacccgagaccctgcaccccaaccccgccggcctgcaggagagcatcagcgacgtgaccacctgcctggtggccagcaaggagaacgtgcaggtggcccagagcaacctgaccaaggacagaagcatgagaaagagcttcgacatgggcggcgagaccctgctgagcgtgtgccccatggtgcccaaggacctgggcaagagcctgagcgtgcagaacctgatcagaagcaccgaggagctgaacatccagctgagcggcagcgagagcagcggcagcagaggcagccaggacttctaccccaagtggagagagagcaagctgttcatcaccgacgaggaggtgggccccgaggagaccgagaccgacaccttcgacgccgccccccagcccgccagagaggccgccttcgccagcgacagcctgagaaccggcagaagcagaagcagccagagcatctgcaaggccggcgagagcaccgacgccctgagcctgccccacgtgaagctgaagtag

SEQ ID NO: 94144 - DNA, 2799 bp, synthetic construct
  misc_feature 1..2799: note = Description of Artificial Sequence: Synthetic coding sequence
  source 1..2799: mol_type = other DNA
atgcccagacaccacgccggcggcgaggagggcggcgccgccggcctgtgggtgaagagcggcgccgccgccgccgccgccggcggcggcagactgggcagcggcatgaaggacgtggagagcggcagaggcagagtgctgctgaacagcgccgccgccagaggcgacggcctgctgctgctgggcaccagagccgccaccctgggcggcggcggcggcggcctgagagagagcagaagaggcaagcagggcgccagaatgagcctgctgggcaagcccctgagctacaccagcagccagagctgcagaagaaacgtgaagtacagaagagtgcagaactacctgtacaacgtgctggagagacccagaggctgggccttcatctaccacgccttcgtgttcctgcccgtgttcggctgcctgatcctgagcgtgttcagcaccatccccgagcacaccaagctggccagcagctgcctgctgatcctggagttcgtgatgatcgtggtgttcggcctggagttcatcatcagaatctggagcgccggctgctgctgcagatacagaggctggcagggcagactgagattcgccagaaagcccttctgcgtgatcgacaccatcgtgctgatcgccagcatcgccgtggtgagcgccaagacccagggcaacatcttcgccaccagcgccctgagaagcctgagattcctgcagatcctgagaatggtgagaatggacagaagaggcggcacctggaagctgctgggcagcgtggtgtacgcccacagcaaggagctgatcaccgcctggtacatcggcttcctggtgctgatcttcagcagcttcctggtgtacctggtggagaaggacgccaacaaggagttcagcacctacgccgacgccctgtggtggggcaccatcaccctgaccaccatcggctacggcgacaagacccccctgacctggctgggcagactgctgagcgccggcttcgccctgctgggcatcagcttcttcgccctgcccgccggcatcctgggcagcggcttcgccctgaaggtgcaggagcagcacagacagaagcacttcgagaagagaagaaaccccgccgccaacctgatccagtgcgtgtggagaagctacgccgccgacgagaagagcgtgagcatcgccacctggaagccccacctgaaggccctgcacacctgcagccccaccaagaaggagcagggcgaggccagcagcagccagaagctgagcttcaaggagagagtgagaatggccagccccagaggccagagcatcaagagcagacaggccagcgtgggcgacagaagaagccccagcaccgacatcaccgccgagggcagccccaccaaggtgcagaagagctggagcttcaacgacagaaccagattcagacccagcctgagactgaagagcagccagcccaagcccgtgatcgacgccgacaccgccctgggcaccgacgacgtgtacgacgagaagggctgccagtgcgacgtgagcgtggaggacctgaccccccccctgaagaccgtgatcagagccatcagaatcatgaagttccacgtggccaagagaaagttcaaggagaccctgagaccctacgacgtgaaggacgtgatcgagcagtacagcgccggccacctggacatgctgtgcagaatcaagagcctgcagaccagagtggaccagatcctgggcaagggccagatcaccagcgacaagaagagcagagagaagatcaccgccgagcacgagaccaccgacgacctgagcatgctgggcagagtggtgaaggtggagaagcaggtgcagagcatcgagagcaagctggactgcctgctggacatctaccagcaggtgctgagaaagggcagcgccagcgccctggccctggccagcttccagatcccccccttcgagtgcgagcagaccagcgactaccagagccccgtggacagcaaggacctgagcggcagcgcccagaacagcggctgcctgagcagaagcaccagcgccaacatcagcagaggcctgcagttcatcctgacccccaacgagttcagcgcccagaccttctacgccctgagccccaccatgcacagccaggccacccaggtgcccatcagccagagcgacggcagcgccgtggccgccaccaacaccatcgccaaccagatcaacaccgcccccaagcccgccgcccccaccaccctgcagatccccccccccctgcccgccatcaagcacctgcccagacccgagaccctgcaccccaaccccgccggcctgcaggagagcatcagcgacgtgaccacctgcctggtggccagcaaggagaacgtgcaggtggcccagagcaacctgaccaaggacagaagcatgagaaagagcttcgacatgggcggcgagaccctgctgagcgtgtgccccatggtgcccaaggacctgggcaagagcctgagcgtgcagaacctgatcagaagcaccgaggagctgaacatccagctgagcggcagcgagagcagcggcagcagaggcagccaggacttctaccccaagtggagagagagcaagctgttcatcaccgacgaggaggtgggccccgaggagaccgagaccgacaccttcgacgccgccccccagcccgccagagaggccgccttcgccagcgacagcctgagaaccggcagaagcagaagcagccagagcatctgcaaggccggcgagagcaccgacgccctgagcctgccccacgtgaagctgaagtag

SEQ ID NO: 94145 - DNA, 2802 bp, synthetic construct
  misc_feature 1..2802: note = Description of Artificial Sequence: Synthetic coding sequence
  source 1..2802: mol_type = other DNA
atgcccagacaccacgccggcggcgaggagggcggcgccgccggcctgtgggtgaagagcggcgccgccgccgccgccgccggcggcggcagactgggcagcggcatgaaggacgtggagagcggcagaggcagagtgctgctgaacagcgccgccgccagaggcgacggcctgctgctgctgggcaccagagccgccaccctgggcggcggcggcggcggcctgagagagagcagaagaggcaagcagggcgccagaatgagcctgctgggcaagcccctgagctacaccagcagccagagctgcagaagaaacgtgaagtacagaagagtgcagaactacctgtacaacgtgctggagagacccagaggctgggccttcatctaccacgccttcgtgttcctgctggtgttcggctgcctgatcctgagcgtgttcagcaccatccccgagcacaccaagctggccagcagctgcctgctgatcctggagttcgtgatgatcgtggtgttcggcctggagttcatcatcagaatctggagcgccggctgctgctgcagatacagaggctggcagggcagactgagattcgccagaaagcccttctgcgtgatcgacaccatcgtgctgatcgccagcatcgccgtggtgagcgccaagacccagggcaacatcttcgccaccagcgccctgagaagcctgagattcctgcagatcctgagaatggtgagaatggacagaagaggcggcacctggaagctgctgggcagcgtggtgtacgcccacagcaaggagctgatcaccgcctggtacatcggcttcctggtgctgatcttcagcagcttcctggtgtacctggtggagaaggacgccaacaaggagttcagcacctacgccgacgccctgtggtggggcaccatcaccctgaccaccatcggctacggcgacaagacccccctgacctggctgggcagactgctgagcgccggcttcgccctgctgggcatcagcttcttcgccctgcccgccggcatcctgggcagcggcttcgccctgaaggtgcaggagcagcacagacagaagcacttcgagaagagaagaaaccccgccgccaacctgatccagtgcgtgtggagaagctacgccgccgacgagaagagcgtgagcatcgccacctggaagccccacctgaaggccctgcacacctgcagccccaccaagcagaaccagcagggcgagagccagagctgccagaagctgagcttcaaggagagagtgagaatggccagccccagaggccagagcatcaagagcagacaggccagcgtgggcgacagaagaagccccagcaccgacatcaccgccgagggcagccccaccaaggtgcagaagagctggagcttcaacgacagaaccagattcagacccagcctgagactgaagagcagccagcccaagcccgtgatcgacgccgacaccgccctgggcaccgacgacgtgtacgacgagaagggctgccagtgcgacgtgagcgtggaggacctgaccccccccctgaagaccgtgatcagagccatcagaatcatgaagttccacgtggccaagagaaagttcaaggagaccctgagaccctacgacgtgaaggacgtgatcgagcagtacagcgccggccacctggacatgctgtgcagaatcaagagcctgcagaccagagtggaccagatcctgggcaagggccagatcaccagcgacaagaagagcagagagaagatcaccgccgagcacgagaccaccgacgacctgagcatgctgggcagagtggtgaaggtggagaagcaggtgcagagcatcgagagcaagctggactgcctgctggacatctaccagcaggtgctgagaaagggcagcgccagcgccctggccctggccagcttccagatcccccccttcgagtgcgagcagaccagcgactaccagagccccgtggacagcaaggacctgagcggcagcgcccagaacagcggctgcctgagcagaagcaccagcgccaacatcagcagaggcctgcagttcatcctgacccccaacgagttcagcgcccagaccttctacgccctgagccccaccatgcacagccaggccacccaggtgcccatcagccagagcgacggcagcgccgtggccgccaccaacaccatcgccaaccagatcaacaccgcccccaagcccgccgcccccaccaccctgcagatccccccccccctgcccgccatcaagcacctgcccagacccgagaccctgcaccccaaccccgccggcctgcaggagagcatcagcgacgtgaccacctgcctggtggccagcaaggagaacgtgcaggtggcccagagcaacctgaccaaggacagaagcatgagaaagagcttcgacatgggcggcgagaccctgctgagcgtgtgccccatggtgcccaaggacctgggcaagagcctgagcgtgcagaacctgatcagaagcaccgaggagctgaacatccagctgagcggcagcgagagcagcggcagcagaggcagccaggacttctaccccaagtggagagagagcaagctgttcatcaccgacgaggaggtgggccccgaggagaccgagaccgacaccttcgacgccgccccccagcccgccagagaggccgccttcgccagcgacagcctgagaaccggcagaagcagaagcagccagagcatctgcaaggccggcgagagcaccgacgccctgagcctgccccacgtgaagctgaagtag

SEQ ID NO: 94146 - DNA, 1284 bp, synthetic construct
  misc_feature 1..1284: note = Description of Artificial Sequence: Synthetic coding sequence
  source 1..1284: mol_type = other DNA
atgcccagacaccacgccggcggcgaggagggcggcgccgccggcctgtgggtgaagagcggcgccgccgccgccgccgccggcggcggcagactgggcagcggcatgaaggacgtggagagcggcagaggcagagtgctgctgaacagcgccgccgccagaggcgacggcctgctgctgctgggcaccagagccgccaccctgggcggcggcggcggcggcctgagagagagcagaagaggcaagcagggcgccagaatgagcctgctgggcaagcccctgagctacaccagcagccagagctgcagaagaaacgtgaagtacagaagagtgcagaactacctgtacaacgtgctggagagacccagaggctgggccttcatctaccacgccttcgtgttcctgctggtgttcggctgcctgatcctgagcgtgttcagcaccatccccgagcacaccaagctggccagcagctgcctgctgatcctggagttcgtgatgatcgtggtgttcggcctggagttcatcatcagaatctggagcgccggctgctgctgcagatacagaggctggcagggcagactgagattcgccagaaagcccttctgcgtgatcgacaccatcgtgctgatcgccagcatcgccgtggtgagcgccaagacccagggcaacatcttcgccaccagcgccctgagaagcctgagattcctgcagatcctgagaatggtgagaatggacagaagaggcggcacctggaagctgctgggcagcgtggtgtacgcccacagcaaggagctgatcaccgcctggtacatcggcttcctggtgctgatcttcagcagcttcctggtgtacctggtggagaaggacgccaacaaggagttcagcacctacgccgacgccctgtggtggggcaccatcaccctgaccaccatcggctacggcgacaagacccccctgacctggctgggcagactgctgagcgccggcttcgccctgctgggcatcagcttcttcgccctgcccgccggcatcctgggcagcggcttcgccctgaaggtgcaggagcagcacagacagaagcacttcgagaagagaagaaaccccgccgccaacctgatccagtgcgtgtggagaagctacgccgccgacgagaagagcgtgagcatcgccacctggaagccccacctgaaggccctgcacacctgcagccccaccaagaaggagcagggcgaggccagcagcagattcgtgatcagcctgctgctgcacgtgtgcctgtag

SEQ ID NO: 94147 - DNA, 2799 bp, synthetic construct
  misc_feature 1..2799: note = Description of Artificial Sequence: Synthetic coding sequence
  source 1..2799: mol_type = other DNA
atgcccagacaccacgccggcggcgaggagggcggcgccgccggcctgtgggtgaagagcggcgccgccgccgccgccgccggcggcggcagactgggcagcggcatgaaggacgtggagagcggcagaggcagagtgctgctgaacagcgccgccgccagaggcgacggcctgctgctgctgggcaccagagccgccaccctgggcggcggcggcggcggcctgagagagagcagaagaggcaagcagggcgccagaatgagcctgctgggcaagcccctgagctacaccagcagccagagctgcagaagaaacgtgaagtacagaagagtgcagaactacctgtacaacgtgctggagagacccagaggctgggccttcatctaccacgccttcgtgttcctgctggtgttcggctgcctgatcctgagcgtgttcagcaccatccccgagcacaccaagctggccagcagctgcctgctgatcctggagttcgtgatgatcgtggtgttcggcctggagttcatcatcagaatctggagcgccggctgctgctgcagatacagaggctggcagggcagactgagattcgccagaaagcccttctgcgtgatcgacaccatcgtgctgatcgccagcatcgccgtggtgagcgccaagacccagggcaacatcttcgccaccagcgccctgagaagcctgagattcctgcagatcctgagaatggtgagaatggacagaagaggcggcacctggaagctgctgggcagcgtggtgtacgcccacagcaaggagctgatcaccgcctggtacatcggcttcctggtgctgatcttcagcagcttcctggtgtacctggtggagaaggacgccaacaaggagttcagcacctacgccgacgccctgtggtggggcaccatcaccctgaccaccatcggctacggcgacaagacccccctgacctggctgggcagactgctgagcgccggcttcgccctgctgggcatcagcttcttcgccctgcccgccggcatcctgggcagcggcttcgccctgaaggtgcaggagcagcacagacagaagcacttcgagaagagaagaaaccccgccgccaacctgatccagtgcgtgtggagaagctacgccgccgacgagaagagcgtgagcatcgccacctggaagccccacctgaaggccctgcacacctgcagccccaccaagaaggagcagggcgaggccagcagcagccagaagctgagcttcaaggagagagtgagaatggccagccccagaggccagagcatcaagagcagacaggccagcgtgggcgacagaagaagccccagcaccgacatcaccgccgagggcagccccaccaaggtgcagaagagctggagcttcaacgacagaaccagattcagacccagcctgagactgaagagcagccagcccaagcccgtgatcgacgccgacaccgccctgggcaccgacgacgtgtacgacgagaagggctgccagtgcgacgtgagcgtggaggacctgaccccccccctgaagaccgtgatcagagccatcagaatcatgaagttccacgtggccaagagaaagttcaaggagaccctgagaccctacgacgtgaaggacgtgatcgagcagtacagcgccggccacctggacatgctgtgcagaatcaagagcctgcagaccagagtggaccagatcctgggcaagggccagatcaccagcgacaagaagagcagagagaagatcaccgccgagcacgagaccaccgacgacctgagcatgctgggcagagtggtgaaggtggagaagcaggtgcagagcatcgagagcaagctggactgcctgctggacatctaccagcaggtgctgagaaagggcagcgccagcgccctggccctggccagcttccagatcccccccttcgagtgcgagcagaccagcgactaccagagccccgtggacagcaaggacctgagcggcagcgcccagaacagcggctgcctgagcagaagcaccagcgccaacatcagcagaggcctgcagttcatcctgacccccaacgagttcagcgcccagaccttctacgccctgagccccaccatgcacagccaggccacccaggtgcccatcagccagagcgacggcagcgccgtggccgccaccaacaccatcgccaaccagatcaacaccgcccccaagcccgccgcccccaccaccctgcagatccccccccccctgcccgccatcaagcacctgcccagacccgagaccctgcaccccaaccccgccggcctgcaggagagcatcagcgacgtgaccacctgcctggtggccagcaaggagaacgtgcaggtggcccagagcaacctgaccaaggacagaagcatgagaaagagcttcgacatgggcggcgagaccctgctgagcgtgtgccccatggtgcccaaggacctgggcaagagcctgagcgtgcagaacctgatcagaagcaccgaggagctgaacatccagctgagcggcagcgagagcagcggcagcagaggcagccaggacttctaccccaagtggagagagagcaagctgttcatcaccgacgaggaggtgggccccgaggagaccgagaccgacaccttcgacgccgccccccagcccgccagagaggccgccttcgccagcgacagcctgagaaccggcagaagcagaagcagccagagcatctgcaaggccggcgagagcaccgacgccctgagcctgccccacgtgaagctgaagtag

SEQ ID NO: 94148 - DNA, 2829 bp, synthetic construct
  misc_feature 1..2829: note = Description of Artificial Sequence: Synthetic coding sequence
  source 1..2829: mol_type = other DNA
atgcccagacaccacgccggcggcgaggagggcggcgccgccggcctgtgggtgaagagcggcgccgccgccgccgccgccggcggcggcagactgggcagcggcatgaaggacgtggagagcggcagaggcagagtgctgctgaacagcgccgccgccagaggcgacggcctgctgctgctgggcaccagagccgccaccctgggcggcggcggcggcggcctgagagagagcagaagaggcaagcagggcgccagaatgagcctgctgggcaagcccctgagctacaccagcagccagagctgcagaagaaacgtgaagtacagaagagtgcagaactacctgtacaacgtgctggagagacccagaggctgggccttcatctaccacgccttcgtgttcctgctggtgttcggctgcctgatcctgagcgtgttcagcaccatccccgagcacaccaagctggccagcagctgcctgctgatcctggagttcgtgatgatcgtggtgttcggcctggagttcatcatcagaatctggagcgccggctgctgctgcagatacagaggctggcagggcagactgagattcgccagaaagcccttctgcgtgatcgacaccatcgtgctgatcgccagcatcgccgtggtgagcgccaagacccagggcaacatcttcgccaccagcgccctgagaagcctgagattcctgcagatcctgagaatggtgagaatggacagaagaggcggcacctggaagctgctgggcagcgtggtgtacgcccacagcaaggagctgatcaccgcctggtacatcggcttcctggtgctgatcttcagcagcttcctggtgtacctggtggagaaggacgccaacaaggagttcagcacctacgccgacgccctgtggtggggcaccatcaccctgaccaccatcggctacggcgacaagacccccctgacctggctgggcagactgctgagcgccggcttcgccctgctgggcatcagcttcttcgccctgcccgccggcatcctgggcagcggcttcgccctgaaggtgcaggagcagcacagacagaagcacttcgagaagagaagaaaccccgccgccaacctgatccagtgcgtgtggagaagctacgccgccgacgagaagagcgtgagcatcgccacctggaagccccacctgaaggccctgcacacctgcagccccaccaacaagttctgcagcaacaagcagaagctgttcagaatgtacaccagcagaaagcagagccagaagctgagcttcaaggagagagtgagaatggccagccccagaggccagagcatcaagagcagacaggccagcgtgggcgacagaagaagccccagcaccgacatcaccgccgagggcagccccaccaaggtgcagaagagctggagcttcaacgacagaaccagattcagacccagcctgagactgaagagcagccagcccaagcccgtgatcgacgccgacaccgccctgggcaccgacgacgtgtacgacgagaagggctgccagtgcgacgtgagcgtggaggacctgaccccccccctgaagaccgtgatcagagccatcagaatcatgaagttccacgtggccaagagaaagttcaaggagaccctgagaccctacgacgtgaaggacgtgatcgagcagtacagcgccggccacctggacatgctgtgcagaatcaagagcctgcagaccagagtggaccagatcctgggcaagggccagatcaccagcgacaagaagagcagagagaagatcaccgccgagcacgagaccaccgacgacctgagcatgctgggcagagtggtgaaggtggagaagcaggtgcagagcatcgagagcaagctggactgcctgctggacatctaccagcaggtgctgagaaagggcagcgccagcgccctggccctggccagcttccagatcccccccttcgagtgcgagcagaccagcgactaccagagccccgtggacagcaaggacctgagcggcagcgcccagaacagcggctgcctgagcagaagcaccagcgccaacatcagcagaggcctgcagttcatcctgacccccaacgagttcagcgcccagaccttctacgccctgagccccaccatgcacagccaggccacccaggtgcccatcagccagagcgacggcagcgccgtggccgccaccaacaccatcgccaaccagatcaacaccgcccccaagcccgccgcccccaccaccctgcagatccccccccccctgcccgccatcaagcacctgcccagacccgagaccctgcaccccaaccccgccggcctgcaggagagcatcagcgacgtgaccacctgcctggtggccagcaaggagaacgtgcaggtggcccagagcaacctgaccaaggacagaagcatgagaaagagcttcgacatgggcggcgagaccctgctgagcgtgtgccccatggtgcccaaggacctgggcaagagcctgagcgtgcagaacctgatcagaagcaccgaggagctgaacatccagctgagcggcagcgagagcagcggcagcagaggcagccaggacttctaccccaagtggagagagagcaagctgttcatcaccgacgaggaggtgggccccgaggagaccgagaccgacaccttcgacgccgccccccagcccgccagagaggccgccttcgccagcgacagcctgagaaccggcagaagcagaagcagccagagcatctgcaaggccggcgagagcaccgacgccctgagcctgccccacgtgaagctgaagtag

SEQ ID NO: 94149 - DNA, 2772 bp, synthetic construct
  misc_feature 1..2772: note = Description of Artificial Sequence: Synthetic coding sequence
  source 1..2772: mol_type = other DNA
atgcccagacaccacgccggcggcgaggagggcggcgccgccggcctgtgggtgaagagcggcgccgccgccgccgccgccggcggcggcagactgggcagcggcatgaaggacgtggagagcggcagaggcagagtgctgctgaacagcgccgccgccagaggcgacggcctgctgctgctgggcaccagagccgccaccctgggcggcggcggcggcggcctgagagagagcagaagaggcaagcagggcgccagaatgagcctgctgggcaagcccctgagctacaccagcagccagagctgcagaagaaacgtgaagtacagaagagtgcagaactacctgtacaacgtgctggagagacccagaggctgggccttcatctaccacgccttcgtgttcctgctggtgttcggctgcctgatcctgagcgtgttcagcaccatccccgagcacaccaagctggccagcagctgcctgctgatcctggagttcgtgatgatcgtggtgttcggcctggagttcatcatcagaatctggagcgccggctgctgctgcagatacagaggctggcagggcagactgagattcgccagaaagcccttctgcgtgatcgacaccatcgtgctgatcgccagcatcgccgtggtgagcgccaagacccagggcaacatcttcgccaccagcgccctgagaagcctgagattcctgcagatcctgagaatggtgagaatggacagaagaggcggcacctggaagctgctgggcagcgtggtgtacgcccacagcaaggagctgatcaccgcctggtacatcggcttcctggtgctgatcttcagcagcttcctggtgtacctggtggagaaggacgccaacaaggagttcagcacctacgccgacgccctgtggtggggcaccatcaccctgaccaccatcggctacggcgacaagacccccctgacctggctgggcagactgctgagcgccggcttcgccctgctgggcatcagcttcttcgccctgcccgccggcatcctgggcagcggcttcgccctgaaggtgcaggagcagcacagacagaagcacttcgagaagagaagaaaccccgccgccaacctgatccagtgcgtgtggagaagctacgccgccgacgagaagagcgtgagcatcgccacctggaagccccacctgaaggccctgcacacctgcagccccaccaaccagaagctgagcttcaaggagagagtgagaatggccagccccagaggccagagcatcaagagcagacaggccagcgtgggcgacagaagaagccccagcaccgacatcaccgccgagggcagccccaccaaggtgcagaagagctggagcttcaacgacagaaccagattcagacccagcctgagactgaagagcagccagcccaagcccgtgatcgacgccgacaccgccctgggcaccgacgacgtgtacgacgagaagggctgccagtgcgacgtgagcgtggaggacctgaccccccccctgaagaccgtgatcagagccatcagaatcatgaagttccacgtggccaagagaaagttcaaggagaccctgagaccctacgacgtgaaggacgtgatcgagcagtacagcgccggccacctggacatgctgtgcagaatcaagagcctgcagaccagagtggaccagatcctgggcaagggccagatcaccagcgacaagaagagcagagagaagatcaccgccgagcacgagaccaccgacgacctgagcatgctgggcagagtggtgaaggtggagaagcaggtgcagagcatcgagagcaagctggactgcctgctggacatctaccagcaggtgctgagaaagggcagcgccagcgccctggccctggccagcttccagatcccccccttcgagtgcgagcagaccagcgactaccagagccccgtggacagcaaggacctgagcggcagcgcccagaacagcggctgcctgagcagaagcaccagcgccaacatcagcagaggcctgcagttcatcctgacccccaacgagttcagcgcccagaccttctacgccctgagccccaccatgcacagccaggccacccaggtgcccatcagccagagcgacggcagcgccgtggccgccaccaacaccatcgccaaccagatcaacaccgcccccaagcccgccgcccccaccaccctgcagatccccccccccctgcccgccatcaagcacctgcccagacccgagaccctgcaccccaaccccgccggcctgcaggagagcatcagcgacgtgaccacctgcctggtggccagcaaggagaacgtgcaggtggcccagagcaacctgaccaaggacagaagcatgagaaagagcttcgacatgggcggcgagaccctgctgagcgtgtgccccatggtgcccaaggacctgggcaagagcctgagcgtgcagaacctgatcagaagcaccgaggagctgaacatccagctgagcggcagcgagagcagcggcagcagaggcagccaggacttctaccccaagtggagagagagcaagctgttcatcaccgacgaggaggtgggccccgaggagaccgagaccgacaccttcgacgccgccccccagcccgccagagaggccgccttcgccagcgacagcctgagaaccggcagaagcagaagcagccagagcatctgcaaggccggcgagagcaccgacgccctgagcctgccccacgtgaagctgaagtag

SEQ ID NO: 94150 - DNA, 2469 bp, synthetic construct
  misc_feature 1..2469: note = Description of Artificial Sequence: Synthetic coding sequence
  source 1..2469: mol_type = other DNA
atgcccagacaccacgccggcggcgaggagggcggcgccgccggcctgtgggtgaagagcggcgccgccgccgccgccgccggcggcggcagactgggcagcggcatgaaggacgtggagagcggcagaggcagagtgctgctgaacagcgccgccgccagaggcgacggcctgctgctgctgggcaccagagccgccaccctgggcggcggcggcggcggcctgagagagagcagaagaggcaagcagggcgccagaatgagcctgctgggcaagcccctgagctacaccagcagccagagctgcagaagaaacgtgaagtacagaagagtgcagaactacctgtacaacgtgctggagagacccagaggctgggccttcatctaccacgccttcgtgttcctgctggtgttcggctgcctgatcctgagcgtgttcagcaccatccccgagcacaccaagctggccagcagctgcctgctgatcctggagttcgtgatgatcgtggtgttcggcctggagttcatcatcagaatctggagcgccggctgctgctgcagatacagaggctggcagggcagactgagattcgccagaaagcccttctgcgtgatcgacaccatcgtgctgatcgccagcatcgccgtggtgagcgccaagacccagggcaacatcttcgccaccagcgccctgagaagcctgagattcctgcagatcctgagaatggtgagaatggacagaagaggcggcacctggaagctgctgggcagcgtggtgtacgcccacagcaaggagctgatcaccgcctggtacatcggcttcctggtgctgatcttcagcagcttcctggtgtacctggtggagaaggacgccaacaaggagttcagcacctacgccgacgccctgtggtggggcaccatcaccctgaccaccatcggctacggcgacaagacccccctgacctggctgggcagactgctgagcgccggcttcgccctgctgggcatcagcttcttcgccctgcccgccggcatcctgggcagcggcttcgccctgaaggtgcaggagcagcacagacagaagcacttcgagaagagaagaaaccccgccgccaacctgatccagtgcgtgtggagaagctacgccgccgacgagaagagcgtgagcatcgccacctggaagccccacctgaaggccctgcacacctgcagccccaccaagaaggagcagggcgaggccagcagcagaatcatgaagttccacgtggccaagagaaagttcaaggagaccctgagaccctacgacgtgaaggacgtgatcgagcagtacagcgccggccacctggacatgctgtgcagaatcaagagcctgcagaccagagtggaccagatcctgggcaagggccagatcaccagcgacaagaagagcagagagaagatcaccgccgagcacgagaccaccgacgacctgagcatgctgggcagagtggtgaaggtggagaagcaggtgcagagcatcgagagcaagctggactgcctgctggacatctaccagcaggtgctgagaaagggcagcgccagcgccctggccctggccagcttccagatcccccccttcgagtgcgagcagaccagcgactaccagagccccgtggacagcaaggacctgagcggcagcgcccagaacagcggctgcctgagcagaagcaccagcgccaacatcagcagaggcctgcagttcatcctgacccccaacgagttcagcgcccagaccttctacgccctgagccccaccatgcacagccaggccacccaggtgcccatcagccagagcgacggcagcgccgtggccgccaccaacaccatcgccaaccagatcaacaccgcccccaagcccgccgcccccaccaccctgcagatccccccccccctgcccgccatcaagcacctgcccagacccgagaccctgcaccccaaccccgccggcctgcaggagagcatcagcgacgtgaccacctgcctggtggccagcaaggagaacgtgcaggtggcccagagcaacctgaccaaggacagaagcatgagaaagagcttcgacatgggcggcgagaccctgctgagcgtgtgccccatggtgcccaaggacctgggcaagagcctgagcgtgcagaacctgatcagaagcaccgaggagctgaacatccagctgagcggcagcgagagcagcggcagcagaggcagccaggacttctaccccaagtggagagagagcaagctgttcatcaccgacgaggaggtgggccccgaggagaccgagaccgacaccttcgacgccgccccccagcccgccagagaggccgccttcgccagcgacagcctgagaaccggcagaagcagaagcagccagagcatctgcaaggccggcgagagcaccgacgccctgagcctgccccacgtgaagctgaagtag

SEQ ID NO: 94151 - DNA, 2856 bp, synthetic construct
  misc_feature 1..2856: note = Description of Artificial Sequence: Synthetic coding sequence
  source 1..2856: mol_type = other DNA
atgcccagacaccacgccggcggcgaggagggcggcgccgccggcctgtgggtgaagagcggcgccgccgccgccgccgccggcggcggcagactgggcagcggcatgaaggacgtggagagcggcagaggcagagtgctgctgaacagcgccgccgccagaggcgacggcctgctgctgctgggcaccagagccgccaccctgggcggcggcggcggcggcctgagagagagcagaagaggcaagcagggcgccagaatgagcctgctgggcaagcccctgagctacaccagcagccagagctgcagaagaaacgtgaagtacagaagagtgcagaactacctgtacaacgtgctggagagacccagaggctgggccttcatctaccacgccttcgtgttcctgcccgtgttcggctgcctgatcctgagcgtgttcagcaccatccccgagcacaccaagctggccagcagctgcctgctgatcctggagttcgtgatgatcgtggtgttcggcctggagttcatcatcagaatctggagcgccggctgctgctgcagatacagaggctggcagggcagactgagattcgccagaaagcccttctgcgtgatcgacaccatcgtgctgatcgccagcatcgccgtggtgagcgccaagacccagggcaacatcttcgccaccagcgccctgagaagcctgagattcctgcagatcctgagaatggtgagaatggacagaagaggcggcacctggaagctgctgggcagcgtggtgtacgcccacagcaaggagctgatcaccgcctggtacatcggcttcctggtgctgatcttcagcagcttcctggtgtacctggtggagaaggacgccaacaaggagttcagcacctacgccgacgccctgtggtggggcaccatcaccctgaccaccatcggctacggcgacaagacccccctgacctggctgggcagactgctgagcgccggcttcgccctgctgggcatcagcttcttcgccctgcccgccggcatcctgggcagcggcttcgccctgaaggtgcaggagcagcacagacagaagcacttcgagaagagaagaaaccccgccgccaacctgatccagtgcgtgtggagaagctacgccgccgacgagaagagcgtgagcatcgccacctggaagccccacctgaaggccctgcacacctgcagccccaccaagaaggagcagggcgaggccagcagcagcaagttctgcagcaacaagcagaagctgttcagaatgtacaccagcagaaagcagagccagaagctgagcttcaaggagagagtgagaatggccagccccagaggccagagcatcaagagcagacaggccagcgtgggcgacagaagaagccccagcaccgacatcaccgccgagggcagccccaccaaggtgcagaagagctggagcttcaacgacagaaccagattcagacccagcctgagactgaagagcagccagcccaagcccgtgatcgacgccgacaccgccctgggcaccgacgacgtgtacgacgagaagggctgccagtgcgacgtgagcgtggaggacctgaccccccccctgaagaccgtgatcagagccatcagaatcatgaagttccacgtggccaagagaaagttcaaggagaccctgagaccctacgacgtgaaggacgtgatcgagcagtacagcgccggccacctggacatgctgtgcagaatcaagagcctgcagaccagagtggaccagatcctgggcaagggccagatcaccagcgacaagaagagcagagagaagatcaccgccgagcacgagaccaccgacgacctgagcatgctgggcagagtggtgaaggtggagaagcaggtgcagagcatcgagagcaagctggactgcctgctggacatctaccagcaggtgctgagaaagggcagcgccagcgccctggccctggccagcttccagatcccccccttcgagtgcgagcagaccagcgactaccagagccccgtggacagcaaggacctgagcggcagcgcccagaacagcggctgcctgagcagaagcaccagcgccaacatcagcagaggcctgcagttcatcctgacccccaacgagttcagcgcccagaccttctacgccctgagccccaccatgcacagccaggccacccaggtgcccatcagccagagcgacggcagcgccgtggccgccaccaacaccatcgccaaccagatcaacaccgcccccaagcccgccgcccccaccaccctgcagatccccccccccctgcccgccatcaagcacctgcccagacccgagaccctgcaccccaaccccgccggcctgcaggagagcatcagcgacgtgaccacctgcctggtggccagcaaggagaacgtgcaggtggcccagagcaacctgaccaaggacagaagcatgagaaagagcttcgacatgggcggcgagaccctgctgagcgtgtgccccatggtgcccaaggacctgggcaagagcctgagcgtgcagaacctgatcagaagcaccgaggagctgaacatccagctgagcggcagcgagagcagcggcagcagaggcagccaggacttctaccccaagtggagagagagcaagctgttcatcaccgacgaggaggtgggccccgaggagaccgagaccgacaccttcgacgccgccccccagcccgccagagaggccgccttcgccagcgacagcctgagaaccggcagaagcagaagcagccagagcatctgcaaggccggcgagagcaccgacgccctgagcctgccccacgtgaagctgaagtag

SEQ ID NO: 94152 - DNA, 2577 bp, synthetic construct
  misc_feature 1..2577: note = Description of Artificial Sequence: Synthetic coding sequence
  source 1..2577: mol_type = other DNA
atgcccgccggcatgaccaagcacggcagcagaagcaccagcagcctgccccccgagcccatggagatcgtgagaagcaaggcctgcagcagaagagtgagactgaacgtgggcggcctggcccacgaggtgctgtggagaaccctggacagactgcccagaaccagactgggcaagctgagagactgcaacacccacgacagcctgctggaggtgtgcgacgactacagcctggacgacaacgagtacttcttcgacagacaccccggcgccttcaccagcatcctgaacttctacagaaccggcagactgcacatgatggaggagatgtgcgccctgagcttcagccaggagctggactactggggcatcgacgagatctacctggagagctgctgccaggccagataccaccagaagaaggagcagatgaacgaggagctgaagagagaggccgagaccctgagagagagagagggcgaggagttcgacaacacctgctgcgccgagaagagaaagaagctgtgggacctgctggagaagcccaacagcagcgtggccgccaagatcctggccatcatcagcatcatgttcatcgtgctgagcaccatcgccctgagcctgaacaccctgcccgagctgcagagcctggacgagttcggccagagcaccgacaacccccagctggcccacgtggaggccgtgtgcatcgcctggttcaccatggagtacctgctgagattcctgagcagccccaagaagtggaagttcttcaagggccccctgaacgccatcgacctgctggccatcctgccctactacgtgaccatcttcctgaccgagagcaacaagagcgtgctgcagttccagaacgtgagaagagtggtgcagatcttcagaatcatgagaatcctgagaatcctgaagctggccagacacagcaccggcctgcagagcctgggcttcaccctgagaagaagctacaacgagctgggcctgctgatcctgttcctggccatgggcatcatgatcttcagcagcctggtgttcttcgccgagaaggacgaggacgacaccaagttcaagagcatccccgccagcttctggtgggccaccatcaccatgaccaccgtgggctacggcgacatctaccccaagaccctgctgggcaagatcgtgggcggcctgtgctgcatcgccggcgtgctggtgatcgccctgcccatccccatcatcgtgaacaacttcagcgagttctacaaggagcagaagagacaggagaaggccatcaagagaagagaggccctggagagagccaagagaaacggcagcatcgtgagcatgaacatgaaggacgccttcgccagaagcatcgagatgatggacatcgtggtggagaagaacggcgagaacatgggcaagaaggacaaggtgcaggacaaccacctgagccccaacaagtggaagtggaccaagagaaccctgagcgagaccagcagcagcaagagcttcgagaccaaggagcagggcagccccgagaaggccagaagcagcagcagcccccagcacctgaacgtgcagcagctggaggacatgtacaacaagatggccaagacccagagccagcccatcctgaacaccaaggagagcgccgcccagagcaagcccaaggaggagctggagatggagagcatccccagccccgtggcccccctgcccaccagaaccgagggcgtgatcgacatgagaagcatgagcagcatcgacagcttcatcagctgcgccaccgacttccccgaggccaccagattcagccacagccccctgaccagcctgcccagcaagaccggcggcagcaccgcccccgaggtgggctggagaggcgccctgggcgccagcggcggcagattcgtggaggccaaccccagccccgacgccagccagcacagcagcttcttcatcgagagccccaagagcagcatgaagaccaacaaccccctgaagctgagagccctgaaggtgaacttcatggagggcgaccccagccccctgctgcccgtgctgggcatgtaccacgaccccctgagaaacagaggcagcgccgccgccgccgtggccggcctggagtgcgccaccctgctggacaaggccgtgctgagccccgagagcagcatctacaccaccgccagcgccaagaccccccccagaagccccgagaagcacaccgccatcgccttcaacttcgaggccggcgtgcaccagtacatcgacgccgacaccgacgacgagggccagctgctgtacagcgtggacagcagcccccccaagagcctgcccggcagcaccagccccaagttcagcaccggcaccagaagcgagaagaaccacttcgagagcagccccctgcccaccagccccaagttcctgagacagaactgcatctacagcaccgaggccctgaccggcaagggccccagcggccaggagaagtgcaagctggagaaccacatcagccccgacgtgagagtgctgcccggcggcggcgcccacggcagcaccagagaccagagcatctag

SEQ ID NO: 94153 - DNA, 2442 bp, synthetic construct
  misc_feature 1..2442: note = Description of Artificial Sequence: Synthetic coding sequence
  source 1..2442: mol_type = other DNA
agagacggcggcgagaagaccgccgtgaccagactgggcaagctgagagactgcaacacccacgacagcctgctggaggtgtgcgacgactacagcctggacgacaacgagtacttcttcgacagacaccccggcgccttcaccagcatcctgaacttctacagaaccggcagactgcacatgatggaggagatgtgcgccctgagcttcagccaggagctggactactggggcatcgacgagatctacctggagagctgctgccaggccagataccaccagaagaaggagcagatgaacgaggagctgaagagagaggccgagaccctgagagagagagagggcgaggagttcgacaacacctgctgcgccgagaagagaaagaagctgtgggacctgctggagaagcccaacagcagcgtggccgccaagatcctggccatcatcagcatcatgttcatcgtgctgagcaccatcgccctgagcctgaacaccctgcccgagctgcagagcctggacgagttcggccagagcaccgacaacccccagctggcccacgtggaggccgtgtgcatcgcctggttcaccatggagtacctgctgagattcctgagcagccccaagaagtggaagttcttcaagggccccctgaacgccatcgacctgctggccatcctgccctactacgtgaccatcttcctgaccgagagcaacaagagcgtgctgcagttccagaacgtgagaagagtggtgcagatcttcagaatcatgagaatcctgagaatcctgaagctggccagacacagcaccggcctgcagagcctgggcttcaccctgagaagaagctacaacgagctgggcctgctgatcctgttcctggccatgggcatcatgatcttcagcagcctggtgttcttcgccgagaaggacgaggacgacaccaagttcaagagcatccccgccagcttctggtgggccaccatcaccatgaccaccgtgggctacggcgacatctaccccaagaccctgctgggcaagatcgtgggcggcctgtgctgcatcgccggcgtgctggtgatcgccctgcccatccccatcatcgtgaacaacttcagcgagttctacaaggagcagaagagacaggagaaggccatcaagagaagagaggccctggagagagccaagagaaacggcagcatcgtgagcatgaacatgaaggacgccttcgccagaagcatcgagatgatggacatcgtggtggagaagaacggcgagaacatgggcaagaaggacaaggtgcaggacaaccacctgagccccaacaagtggaagtggaccaagagaaccctgagcgagaccagcagcagcaagagcttcgagaccaaggagcagggcagccccgagaaggccagaagcagcagcagcccccagcacctgaacgtgcagcagctggaggacatgtacaacaagatggccaagacccagagccagcccatcctgaacaccaaggagagcgccgcccagagcaagcccaaggaggagctggagatggagagcatccccagccccgtggcccccctgcccaccagaaccgagggcgtgatcgacatgagaagcatgagcagcatcgacagcttcatcagctgcgccaccgacttccccgaggccaccagattcagccacagccccctgaccagcctgcccagcaagaccggcggcagcaccgcccccgaggtgggctggagaggcgccctgggcgccagcggcggcagattcgtggaggccaaccccagccccgacgccagccagcacagcagcttcttcatcgagagccccaagagcagcatgaagaccaacaaccccctgaagctgagagccctgaaggtgaacttcatggagggcgaccccagccccctgctgcccgtgctgggcatgtaccacgaccccctgagaaacagaggcagcgccgccgccgccgtggccggcctggagtgcgccaccctgctggacaaggccgtgctgagccccgagagcagcatctacaccaccgccagcgccaagaccccccccagaagccccgagaagcacaccgccatcgccttcaacttcgaggccggcgtgcaccagtacatcgacgccgacaccgacgacgagggccagctgctgtacagcgtggacagcagcccccccaagagcctgcccggcagcaccagccccaagttcagcaccggcaccagaagcgagaagaaccacttcgagagcagccccctgcccaccagccccaagttcctgagacagaactgcatctacagcaccgaggccctgaccggcaagggccccagcggccaggagaagtgcaagctggagaaccacatcagccccgacgtgagagtgctgcccggcggcggcgcccacggcagcaccagagaccagagcatctag

SEQ ID NO: 94154 - DNA, 2736 bp, synthetic construct
  misc_feature 1..2736: note = Description of Artificial Sequence: Synthetic coding sequence
  source 1..2736: mol_type = other DNA
atggccgagaaggccccccccggcctgaacagaaagaccagcagaagcaccctgagcctgccccccgagcccgtggacatcatcagaagcaagacctgcagcagaagagtgaagatcaacgtgggcggcctgaaccacgaggtgctgtggagaaccctggacagactgcccagaaccagactgggcaagctgagagactgcaacacccacgagagcctgctggaggtgtgcgacgactacaacctgaacgagaacgagtacttcttcgacagacaccccggcgccttcaccagcatcctgaacttctacagaaccggcaagctgcacatgatggaggagatgtgcgccctgagcttcggccaggagctggactactggggcatcgacgagatctacctggagagctgctgccaggccagataccaccagaagaaggagcagatgaacgaggagctgagaagagaggccgagaccatgagagagagagagggcgaggagttcgacaacacctgctgccccgacaagagaaagaagctgtgggacctgctggagaagcccaacagcagcgtggccgccaagatcctggccatcgtgagcatcctgttcatcgtgctgagcaccatcgccctgagcctgaacaccctgcccgagctgcaggagaccgacgagttcggccagctgaacgacaacagacagctggcccacgtggaggccgtgtgcatcgcctggttcaccatggagtacctgctgagattcctgagcagccccaacaagtggaagttcttcaagggccccctgaacgtgatcgacctgctggccatcctgccctactacgtgaccatcttcctgaccgagagcaacaagagcgtgctgcagttccagaacgtgagaagagtggtgcagatcttcagaatcatgagaatcctgagaatcctgaagctggccagacacagcaccggcctgcagagcctgggcttcaccctgagaagaagctacaacgagctgggcctgctgatcctgttcctggccatgggcatcatgatcttcagcagcctggtgttcttcgccgagaaggacgaggacgccaccaagttcaccagcatccccgccagcttctggtgggccaccatcaccatgaccaccgtgggctacggcgacatctaccccaagaccctgctgggcaagatcgtgggcggcctgtgctgcatcgccggcgtgctggtgatcgccctgcccatccccatcatcgtgaacaacttcagcgagttctacaaggagcagaagagacaggagaaggccatcaagagaagagaggccctggagagagccaagagaaacggcagcatcgtgagcatgaacctgaaggacgccttcgccagaagcatggagctgatcgacgtggccgtggagaaggccggcgagagcgccaacaccaaggacagcgccgacgacaaccacctgagccccagcagatggaagtgggccagaaaggccctgagcgagaccagcagcaacaagagcttcgagaacaagtaccaggaggtgagccagaaggacagccacgagcagctgaacaacaccagcagcagcagcccccagcacctgagcgcccagaagctggagatgctgtacaacgagatcaccaagacccagccccacagccaccccaaccccgactgccaggagaagcccgagagacccagcgcctacgaggaggagatcgagatggaggaggtggtgtgcccccaggagcagctggccgtggcccagaccgaggtgatcgtggacatgaagagcaccagcagcatcgacagcttcaccagctgcgccaccgacttcaccgagaccgagagaagccccctgcccccccccagcgccagccacctgcagatgaagttccccaccgacctgcccggcaccgaggagcaccagagagccagaggcccccccttcctgaccctgagcagagagaagggccccgccgccagagacggcaccctggagtacgcccccgtggacatcaccgtgaacctggacgccagcggcagccagtgcggcctgcacagccccctgcagagcgacaacgccaccgacagccccaagagcagcctgaagggcagcaaccccctgaagagcagaagcctgaaggtgaacttcaaggagaacagaggcagcgccccccagaccccccccagcaccgccagacccctgcccgtgaccaccgccgacttcagcctgaccaccccccagcacatcagcaccatcctgctggaggagacccccagccagggcgacagacccctgctgggcaccgaggtgagcgccccctgccagggccccagcaagggcctgagccccagattccccaagcagaagctgttccccttcagcagcagagagagaagaagcttcaccgagatcgacaccggcgacgacgaggacttcctggagctgcccggcgccagagaggagaagcaggtggacagcagccccaactgcttcgccgacaagcccagcgacggcagagaccccctgagagaggagggcagcgtgggcagcagcagcccccaggacaccggccacaactgcagacaggacatctaccacgccgtgagcgaggtgaagaaggacagcagccaggagggctgcaagatggagaaccacctgttcgcccccgagatccacagcaaccccggcgacaccggctactgccccaccagagagaccagcatgtag

SEQ ID NO: 94155 - DNA, 1206 bp, synthetic construct
  misc_feature 1..1206: note = Description of Artificial Sequence: Synthetic coding sequence
  source 1..1206: mol_type = other DNA
atgcaggtgagcatcgcctgcaccgagcacaacctgaagagcagaaacggcgaggacagactgctgagcaagcagagcagcaccgcccccaacgtggtgaacgccgccagagccaagttcagaaccgtggccatcatcgccagaagcctgggcaccttcaccccccagcaccacatcagcctgaaggagagcaccgccaagcagaccggcatgaagtacagaaacctgggcaagagcggcctgagagtgagctgcctgggcctgggcacctgggtgaccttcggcggccagatcagcgacgaggtggccgagagactgatgaccatcgcctacgagagcggcgtgaacctgttcgacaccgccgaggtgtacgccgccggcaaggccgaggtgatcctgggcagcatcatcaagaagaagggctggagaagaagcagcctggtgatcaccaccaagctgtactggggcggcaaggccgagaccgagagaggcctgagcagaaagcacatcatcgagggcctgaagggcagcctgcagagactgcagctggagtacgtggacgtggtgttcgccaacagacccgacagcaacacccccatggaggagatcgtgagagccatgacccacgtgatcaaccagggcatggccatgtactggggcaccagcagatggagcgccatggagatcatggaggcctacagcgtggccagacagttcaacatgatcccccccgtgtgcgagcaggccgagtaccacctgttccagagagagaaggtggaggtgcagctgcccgagctgtaccacaagatcggcgtgggcgccatgacctggagccccctggcctgcggcatcatcagcggcaagtacggcaacggcgtgcccgagagcagcagagccagcctgaagtgctaccagtggctgaaggagagaatcgtgagcgaggagggcagaaagcagcagaacaagctgaaggacctgagccccatcgccgagagactgggctgcaccctgccccagctggccgtggcctggtgcctgagaaacgagggcgtgagcagcgtgctgctgggcagcagcacccccgagcagctgatcgagaacctgggcgccatccaggtgctgcccaagatgaccagccacgtggtgaacgagatcgacaacatcctgagaaacaagccctacagcaagaaggactacagaagctag

SEQ ID NO: 94156 - DNA, 1173 bp, synthetic construct
  misc_feature 1..1173: note = Description of Artificial Sequence: Synthetic coding sequence
  source 1..1173: mol_type = other DNA
atgctggccgccagaaccggcgccgccggcagccagatcagcgaggagaacaccaagctgagaagacagagcggcttcagcgtggccggcaaggacaagagccccaagaaggccagcgagaacgccaaggacagcagcctgagccccagcggcgagagccagctgagagccagacagctggccctgctgagagaggtggagatgaactggtacctgaagctgtgcgacctgagcagcgagcacaccaccgtgtgcaccaccggcatgccccacagaaacctgggcaagagcggcctgagagtgagctgcctgggcctgggcacctgggtgaccttcggcggccagatcagcgacgaggtggccgagagactgatgaccatcgcctacgagagcggcgtgaacctgttcgacaccgccgaggtgtacgccgccggcaaggccgaggtgatcctgggcagcatcatcaagaagaagggctggagaagaagcagcctggtgatcaccaccaagctgtactggggcggcaaggccgagaccgagagaggcctgagcagaaagcacatcatcgaggagatcgtgagagccatgacccacgtgatcaaccagggcatggccatgtactggggcaccagcagatggagcgccatggagatcatggaggcctacagcgtggccagacagttcaacatgatcccccccgtgtgcgagcaggccgagtaccacctgttccagagagagaaggtggaggtgcagctgcccgagctgtaccacaagatcggcgtgggcgccatgacctggagccccctggcctgcggcatcatcagcggcaagtacggcaacggcgtgcccgagagcagcagagccagcctgaagtgctaccagtggctgaaggagagaatcgtgagcgaggagggcagaaagcagcagaacaagctgaaggacctgagccccatcgccgagagactgggctgcaccctgccccagctggccgtggcctggtgcctgagaaacgagggcgtgagcagcgtgctgctgggcagcagcacccccgagcagctgatcgagaacctgggcgccatccaggtgctgcccaagatgaccagccacgtggtgaacgagatcgacaacatcctgagaaacaagccctacagcaagaaggactacagaagctag

SEQ ID NO: 94157 - DNA, 1227 bp, synthetic construct
  misc_feature 1..1227: note = Description of Artificial Sequence: Synthetic coding sequence
  source 1..1227: mol_type = other DNA
atgcacctgtacaagcccgcctgcgccgacatccccagccccaagctgggcctgcccaagagcagcgagagcgccctgaagtgcagatggcacctggccgtgaccaagacccagccccaggccgcctgcaagcccgtgagacccagcggcgccgccgagcagaagtacgtggagaagttcctgagagtgcacggcatcagcctgcaggagaccaccagagccgagaccggcatggcctacagaaacctgggcaagagcggcctgagagtgagctgcctgggcctgggcacctgggtgaccttcggcggccagatcagcgacgaggtggccgagagactgatgaccatcgcctacgagagcggcgtgaacctgttcgacaccgccgaggtgtacgccgccggcaaggccgaggtgatcctgggcagcatcatcaagaagaagggctggagaagaagcagcctggtgatcaccaccaagctgtactggggcggcaaggccgagaccgagagaggcctgagcagaaagcacatcatcgagggcctgaagggcagcctgcagagactgcagctggagtacgtggacgtggtgttcgccaacagacccgacagcaacacccccatggaggagatcgtgagagccatgacccacgtgatcaaccagggcatggccatgtactggggcaccagcagatggagcgccatggagatcatggaggcctacagcgtggccagacagttcaacatgatcccccccgtgtgcgagcaggccgagtaccacctgttccagagagagaaggtggaggtgcagctgcccgagctgtaccacaagatcggcgtgggcgccatgacctggagccccctggcctgcggcatcatcagcggcaagtacggcaacggcgtgcccgagagcagcagagccagcctgaagtgctaccagtggctgaaggagagaatcgtgagcgaggagggcagaaagcagcagaacaagctgaaggacctgagccccatcgccgagagactgggctgcaccctgccccagctggccgtggcctggtgcctgagaaacgagggcgtgagcagcgtgctgctgggcagcagcacccccgagcagctgatcgagaacctgggcgccatccaggtgctgcccaagatgaccagccacgtggtgaacgagatcgacaacatcctgagaaacaagccctacagcaagaaggactacagaagctag

SEQ ID NO: 94158 - DNA, 1260 bp, synthetic construct
  misc_feature 1..1260: note = Description of Artificial Sequence: Synthetic coding sequence
  source 1..1260: mol_type = other DNA
atgctggccgccagaaccggcgccgccggcagccagatcagcgaggagaacaccaagctgagaagacagagcggcttcagcgtggccggcaaggacaagagccccaagaaggccagcgagaacgccaaggacagcagcctgagccccagcggcgagagccagctgagagccagacagctggccctgctgagagaggtggagatgaactggtacctgaagctgtgcgacctgagcagcgagcacaccaccgtgtgcaccaccggcatgccccacagaaacctgggcaagagcggcctgagagtgagctgcctgggcctgggcacctgggtgaccttcggcggccagatcagcgacgaggtggccgagagactgatgaccatcgcctacgagagcggcgtgaacctgttcgacaccgccgaggtgtacgccgccggcaaggccgaggtgatcctgggcagcatcatcaagaagaagggctggagaagaagcagcctggtgatcaccaccaagctgtactggggcggcaaggccgagaccgagagaggcctgagcagaaagcacatcatcgagggcctgaagggcagcctgcagagactgcagctggagtacgtggacgtggtgttcgccaacagacccgacagcaacacccccatggaggagatcgtgagagccatgacccacgtgatcaaccagggcatggccatgtactggggcaccagcagatggagcgccatggagatcatggaggcctacagcgtggccagacagttcaacatgatcccccccgtgtgcgagcaggccgagtaccacctgttccagagagagaaggtggaggtgcagctgcccgagctgtaccacaagatcggcgtgggcgccatgacctggagccccctggcctgcggcatcatcagcggcaagtacggcaacggcgtgcccgagagcagcagagccagcctgaagtgctaccagtggctgaaggagagaatcgtgagcgaggagggcagaaagcagcagaacaagctgaaggacctgagccccatcgccgagagactgggctgcaccctgccccagctggccgtggcctggtgcctgagaaacgagggcgtgagcagcgtgctgctgggcagcagcacccccgagcagctgatcgagaacctgggcgccatccaggtgctgcccaagatgaccagccacgtggtgaacgagatcgacaacatcctgagaaacaagccctacagcaagaaggactacagaagctag

SEQ ID NO: 94159 - DNA, 1104 bp, synthetic construct
  misc_feature 1..1104: note = Description of Artificial Sequence: Synthetic coding sequence
  source 1..1104: mol_type = other DNA
atgtaccccgagagcaccaccggcagccccgccagactgagcctgagacagaccggcagccccggcatgatctacagcaccagatacggcagccccaagagacagctgcagttctacagaaacctgggcaagagcggcctgagagtgagctgcctgggcctgggcacctgggtgaccttcggcggccagatcaccgacgagatggccgagcagctgatgaccctggcctacgacaacggcatcaacctgttcgacaccgccgaggtgtacgccgccggcaaggccgaggtggtgctgggcaacatcatcaagaagaagggctggagaagaagcagcctggtgatcaccaccaagatcttctggggcggcaaggccgagaccgagagaggcctgagcagaaagcacatcatcgagggcctgaaggccagcctggagagactgcagctggagtacgtggacgtggtgttcgccaacagacccgaccccaacacccccatggaggagaccgtgagagccatgacccacgtgatcaaccagggcatggccatgtactggggcaccagcagatggagcagcatggagatcatggaggcctacagcgtggccagacagttcaacctgaccccccccatctgcgagcaggccgagtaccacatgttccagagagagaaggtggaggtgcagctgcccgagctgttccacaagatcggcgtgggcgccatgacctggagccccctggcctgcggcatcgtgagcggcaagtacgacagcggcatccccccctacagcagagccagcctgaagggctaccagtggctgaaggacaagatcctgagcgaggagggcagaagacagcaggccaagctgaaggagctgcaggccatcgccgagagactgggctgcaccctgccccagctggccatcgcctggtgcctgagaaacgagggcgtgagcagcgtgctgctgggcgccagcaacgccgaccagctgatggagaacatcggcgccatccaggtgctgcccaagctgagcagcagcatcatccacgagatcgacagcatcctgggcaacaagccctacagcaagaaggactacagaagctag

SEQ ID NO: 94160 - DNA, 1104 bp, synthetic construct; identical to SEQ ID NO: 94159
  misc_feature 1..1104: note = Description of Artificial Sequence: Synthetic coding sequence
  source 1..1104: mol_type = other DNA

SEQ ID NO: 94161 - DNA, 1062 bp, synthetic construct
  misc_feature 1..1062: note = Description of Artificial Sequence: Synthetic coding sequence
  source 1..1062: mol_type = other DNA
atgtaccccgagagcaccaccggcagccccgccagactgagcctgagacagaccggcagccccggcatgatctacagaaacctgggcaagagcggcctgagagtgagctgcctgggcctgggcacctgggtgaccttcggcggccagatcaccgacgagatggccgagcagctgatgaccctggcctacgacaacggcatcaacctgttcgacaccgccgaggtgtacgccgccggcaaggccgaggtggtgctgggcaacatcatcaagaagaagggctggagaagaagcagcctggtgatcaccaccaagatcttctggggcggcaaggccgagaccgagagaggcctgagcagaaagcacatcatcgagggcctgaaggccagcctggagagactgcagctggagtacgtggacgtggtgttcgccaacagacccgaccccaacacccccatggaggagaccgtgagagccatgacccacgtgatcaaccagggcatggccatgtactggggcaccagcagatggagcagcatggagatcatggaggcctacagcgtggccagacagttcaacctgaccccccccatctgcgagcaggccgagtaccacatgttccagagagagaaggtggaggtgcagctgcccgagctgttccacaagatcggcgtgggcgccatgacctggagccccctggcctgcggcatcgtgagcggcaagtacgacagcggcatccccccctacagcagagccagcctgaagggctaccagtggctgaaggacaagatcctgagcgaggagggcagaagacagcaggccaagctgaaggagctgcaggccatcgccgagagactgggctgcaccctgccccagctggccatcgcctggtgcctgagaaacgagggcgtgagcagcgtgctgctgggcgccagcaacgccgaccagctgatggagaacatcggcgccatccaggtgctgcccaagctgagcagcagcatcatccacgagatcgacagcatcctgggcaacaagccctacagcaagaaggactacagaagctag

SEQ ID NO: 94162 - DNA, 1248 bp, synthetic construct
  misc_feature 1..1248: note = Description of Artificial Sequence: Synthetic coding sequence
  source 1..1248: mol_type = other DNA
atgctgagcatgacctacagcgagagcctgagaagcgtgagcagcagatgccacagcgagtgggccctgcaccccgtgagacagaccgacaccctggagctgcagagactgagagaggtgagagccgccgcccaggccagaaacatggagagcttcctgagaatgcacggcctgagcctggacggctgcaccgcccagagaaccggcatgaagtacagaaacctgggcaagagcggcctgagagtgagctgcctgggcctgggcacctgggtgaccttcggcggccagatcaccgacgagatggccgagcagctgatgaccctggcctacgacaacggcatcaacctgttcgacaccgccgaggtgtacgccgccggcaaggccgaggtggtgctgggcaacatcatcaagaagaagggctggagaagaagcagcctggtgatcaccaccaagatcttctggggcggcaaggccgagaccgagagaggcctgagcagaaagcacatcatcgagggcctgaaggccagcctggagagactgcagctggagtacgtggacgtggtgttcgccaacagacccgaccccaacacccccatggagggcgaccccttcagcagcagcaagagcagaaccttcatcatcgaggagaccgtgagagccatgacccacgtgatcaaccagggcatggccatgtactggggcaccagcagatggagcagcatggagatcatggaggcctacagcgtggccagacagttcaacctgaccccccccatctgcgagcaggccgagtaccacatgttccagagagagaaggtggaggtgcagctgcccgagctgttccacaagatcggcgtgggcgccatgacctggagccccctggcctgcggcatcgtgagcggcaagtacgacagcggcatccccccctacagcagagccagcctgaagggctaccagtggctgaaggacaagatcctgagcgaggagggcagaagacagcaggccaagctgaaggagctgcaggccatcgccgagagactgggctgcaccctgccccagctggccatcgcctggtgcctgagaaacgagggcgtgagcagcgtgctgctgggcgccagcaacgccgaccagctgatggagaacatcggcgccatccaggtgctgcccaagctgagcagcagcatcatccacgagatcgacagcatcctgggcaacaagccctacagcaagaaggactacagaagctag

SEQ ID NO: 94163 - DNA, 522 bp, synthetic construct
  misc_feature 1..522: note = Description of Artificial Sequence: Synthetic coding sequence
  source 1..522: mol_type = other DNA
atgtaccccgagagcaccaccggcagccccgccagactgagcctgagacagaccggcagccccggcatgatctacagcaccagatacggcagccccaagagacagctgcagttctacagaaacctgggcaagagcggcctgagagtgagctgcctgggcctgggcacctgggtgaccttcggcggccagatcaccgacgagatggccgagcagctgatgaccctggcctacgacaacggcatcaacctgttcgacaccgccgaggtgtacgccgccggcaaggccgaggtggtgctgggcaacatcatcaagaagaagggctggagccagcagggcgagagagccggccaggccagagtgacccccccctgcagcctgggcagaagagccagagacgccagcaagagcgccggcgccggctgccacctgcaggcccaggcctgcgtgcccagcagcacccaggccctgcagaccaccagaggcagagcccccctgaagccccccccccccctggccagctag

SEQ ID NO: 94164 - DNA, 1062 bp, synthetic construct; identical to SEQ ID NO: 94161
  misc_feature 1..1062: note = Description of Artificial Sequence: Synthetic coding sequence
  source 1..1062: mol_type = other DNA

SEQ ID NO: 94165 - DNA, 1104 bp, synthetic construct; identical to SEQ ID NO: 94159
  misc_feature 1..1104: note = Description of Artificial Sequence: Synthetic coding sequence
  source 1..1104: mol_type = other DNA

SEQ ID NO: 94166 - DNA, 522 bp, synthetic construct
  misc_feature 1..522: note = Description of Artificial Sequence: Synthetic coding sequence
  source 1..522: mol_type = other DNA
atgtaccccgagagcaccaccggcagccccgccagactgagcctgagacagaccggcagccccggcatgatctacagcaccagatacggcagccccaagagacagctgcagttctacagaaacctgggcaagagcggcctgagagtgagctgcctgggcctgggcacctgggtgaccttcggcggccagatcaccgacgagatggccgagcagctgatgaccctggcctacgacaacggcatcaacctgttcgacaccgccgaggtgtacgccgccggcaaggccgaggtggtgctgggcaacatcatcaagaagaagggctggagacagagaggcgagagagccggccaggccagagtgacccccccctgcagcctgggcagaagagccagagacgccagcaagagcgccggcgccggctgccacctgcaggcccaggcctgcgtgcccagcagcacccaggccctgcagaccaccagaggcagagcccccctgaagccccccccccccctggccagctag

SEQ ID NO: 94167 - DNA, 762 bp, synthetic construct
  misc_feature 1..762: note = Description of Artificial Sequence: Synthetic coding sequence
  source 1..762: mol_type = other DNA
atgtaccccgagagcaccaccggcagccccgccagactgagcctgagacagaccggcagccccggcatgatctacagcaccagatacggcagccccaagagacagctgcagttctacagaaacctgggcaagagcggcctgagagtgagctgcctgggcctgggcacctgggtgaccttcggcggccagatcaccgacgagatggccgagcagctgatgaccctggcctacgacaacggcatcaacctgttcgacaccgccgaggtgtacgccgccggcaaggccgaggtggtgctgggcaacatcatcaagaagaagggctggagaagaagcagcctggtgatcaccaccaagatcttctggggcggcaaggccgagaccgagagaggcctgagcagaaagcacatcatcgagggcctgaaggccagcctggagagactgcagctggagtacgtggacgtggtgttcgccaacagacccgaccccaacacccccatggaggagaccgtgagagccatgacccacgtgatcaaccagggcatggccatgtactggggcaccagcagatggagcagcatggagatcatggaggcctacagcgtggccagacagttcaacctgaccccccccatctgcgagcaggccgagtaccacatgttccagagagagaaggtggaggtgcagctgcccgagctgttccacaagatcggcgtgggcgccatgacctggagccccctggcctgcggcatcgtgagcggctag

SEQ ID NO: 94168 - DNA, 765 bp, synthetic construct
  misc_feature 1..765: note = Description of Artificial Sequence: Synthetic coding sequence
  source 1..765: mol_type = other DNA
atgtaccccgagagcaccaccggcagccccgccagactgagcctgagacagaccggcagccccggcatgatctacagaaacctgggcaagagcggcctgagagtgagctgcctgggcctgggcacctgggtgaccttcggcggccagatcaccgacgagatggccgagcagctgatgaccctggcctacgacaacggcatcaacctgttcgacaccgccgaggtgtacgccgccggcaaggccgaggtggtgctgggcaacatcatcaagaagaagggctggagaagaagcagcctggtgatcaccaccaagatcttctggggcggcaaggccgagaccgagagaggcctgagcagaaagcacatcatcgagggcctgaaggccagcctggagagactgcagctggagtacgtggacgtggtgttcgccaacagacccgaccccaacacccccatggaggagaccgtgagagccatgacccacgtgatcaaccagggcatggccatgtactggggcaccagcagatggagcagcatggagatcatggaggcctacagcgtggccagacagttcaacctgaccccccccatctgcgagcaggccgagtaccacatgttccagagagagaaggtggaggtgcagctgcccgagctgttccacaagatcggcgtgggcgccatgacctggagccccctggcctgcggcatcgtgagcggcaagtacgacagcggcatccccccctacagcagagccagcctgaagtag

SEQ ID NO: 94169 - DNA, 288 bp, synthetic construct
  misc_feature 1..288: note = Description of Artificial Sequence: Synthetic coding sequence
  source 1..288: mol_type = other DNA
atgtaccccgagagcaccaccggcagccccgccagactgagcctgagacagaccggcagccccggcatgatctacagaaacctgggcaagagcggcctgagagtgagctgcctgggcctgggcacctgggtgaccttcggcggccagatcaccgacgagatggccgagcagctgatgaccctggcctacgacaacggcatcaacctgttcgacaccgccgaggtgtacgccgccggcaaggccgaggtggtgctgggcaacatcatcaagaagaagggctggagatag

SEQ ID NO: 94170 - DNA, 159 bp, synthetic construct
  misc_feature 1..159: note = Description of Artificial Sequence: Synthetic coding sequence
  source 1..159: mol_type = other DNA
atgtaccccgagagcaccaccggcagccccgccagactgagcctgagacagaccggcagccccggcatgatctacagcaccagatacggcagccccaagagacagctgcagttctacagaaacctgggcaagagcggcctgagagtgagctgcctgtag

SEQ ID NO: 94171 - DNA, 903 bp, synthetic construct
  misc_feature 1..903: note = Description of Artificial Sequence: Synthetic coding sequence
  source 1..903: mol_type = other DNA
atggccgagcagctgatgaccctggcctacgacaacggcatcaacctgttcgacaccgccgaggtgtacgccgccggcaaggccgaggtggtgctgggcaacatcatcaagaagaagggctggagaagaagcagcctggtgatcaccaccaagatcttctggggcggcaaggccgagaccgagagaggcctgagcagaaagcacatcatcgagggcctgaaggccagcctggagagactgcagctggagtacgtggacgtggtgttcgccaacagacccgaccccaacacccccatggaggagaccgtgagagccatgacccacgtgatcaaccagggcatggccatgtactggggcaccagcagatggagcagcatggagatcatggaggcctacagcgtggccagacagttcaacctgaccccccccatctgcgagcaggccgagtaccacatgttccagagagagaaggtggaggtgcagctgcccgagctgttccacaagatcggcgtgggcgccatgacctggagccccctggcctgcggcatcgtgagcggcaagtacgacagcggcatccccccctacagcagagccagcctgaagggctaccagtggctgaaggacaagatcctgagcgaggagggcagaagacagcaggccaagctgaaggagctgcaggccatcgccgagagactgggctgcaccctgccccagctggccatcgcctggtgcctgagaaacgagggcgtgagcagcgtgctgctgggcgccagcaacgccgaccagctgatggagaacatcggcgccatccaggtgctgcccaagctgagcagcagcatcatccacgagatcgacagcatcctgggcaacaagccctacagcaagaaggactacagaagctag

SEQ ID NO: 94172 - DNA, 1215 bp, synthetic construct
  misc_feature 1..1215: note = Description of Artificial Sequence: Synthetic coding sequence
  source 1..1215: mol_type = other DNA
atgcaggtgagcatcgcctgcaccgagcagaacctgagaagcagaagcagcgaggacagactgtgcggccccagacccggccccggcggcggcaacggcggccccgccggcggcggccacggcaacccccccggcggcggcggcagcggccccaaggccagagccgccctggtgcccagaccccccgcccccgccggcgccctgagagagagcaccggcagaggcaccggcatgaagtacagaaacctgggcaagagcggcctgagagtgagctgcctgggcctgggcacctgggtgaccttcggcagccagatcagcgacgagaccgccgaggacgtgctgaccgtggcctacgagcacggcgtgaacctgttcgacaccgccgaggtgtacgccgccggcaaggccgagagaaccctgggcaacatcctgaagagcaagggctggagaagaagcagctacgtgatcaccaccaagatcttctggggcggccaggccgagaccgagagaggcctgagcagaaagcacatcatcgagggcctgagaggcagcctggagagactgcagctgggctacgtggacatcgtgttcgccaacagaagcgaccccaactgccccatggaggagatcgtgagagccatgacctacgtgatcaaccagggcctggccctgtactggggcaccagcagatggggcgccgccgagatcatggaggcctacagcatggccagacagttcaacctgatcccccccgtgtgcgagcaggccgagcaccacctgttccagagagagaaggtggagatgcagctgcccgagctgtaccacaagatcggcgtgggcagcgtgacctggtaccccctggcctgcggcctgatcaccagcaagtacgacggcagagtgcccgacacctgcagagccagcatcaagggctaccagtggctgaaggacaaggtgcagagcgaggacggcaagaagcagcaggccaaggtgatggacctgctgcccgtggcccaccagctgggctgcaccgtggcccagctggccatcgcctggtgcctgagaagcgagggcgtgagcagcgtgctgctgggcgtgagcagcgccgagcagctgatcgagcacctgggcgccctgcaggtgctgagccagctgaccccccagaccgtgatggagatcgacggcctgctgggcaacaagccccacagcaagaagtag

SEQ ID NO: 94173 - DNA, 2562 bp, synthetic construct
  misc_feature 1..2562: note = Description of Artificial Sequence: Synthetic coding sequence
  source 1..2562: mol_type = other DNA
atgagcgagaaggtggactggctgcagagccagaacggcgtgtgcaaggtggacgtgtacagccccggcgacaaccaggcccaggactggaagatggacaccagcaccgaccccgtgagagtgctgagctggctgagaagagacctggagaagagcaccgccgagttccaggacgtgagattcaagcccggcgagagcttcggcggcgagaccagcaacagcggcgacccccacaagggcttcagcgtggactactacaacaccaccaccaagggcacccccgagagactgcacttcgagatgacccacaaggagatcccctgccagggccccagagcccagctgggcaacggcagcagcgtggacgaggtgagcttctacgccaacagactgaccaacctggtgatcgccatggccagaaaggagatcaacgagaagatcgacggcagcgagaacaagtgcgtgtaccagagcctgtacatgggcaacgagcccacccccaccaagagcctgagcaagatcgccagcgagctggtgaacgagaccgtgagcgcctgcagcagaaacgccgcccccgacaaggcccccggcagcggcgacagagtgagcggcagcagccagagcccccccaacctgaagtacaagagcaccctgaagatcaaggagagcaccaaggagagacagggccccgacgacaagccccccagcaagaagagcttcttctacaaggaggtgttcgagagcagaaacggcgactacgccagagagggcggcagattcttccccagagagagaaagagattcagaggccaggagagacccgacgacttcaccgccagcgtgagcgagggcatcatgacctacgccaacagcgtggtgagcgacatgatggtgagcatcatgaagaccctgaagatccaggtgaaggacaccaccatcgccaccatcctgctgaagaaggtgctgctgaagcacgccaaggaggtggtgagcgacctgatcgacagcttcctgagaaacctgcacagcgtgaccggcaccctgatgaccgacacccagttcgtgagcgccgtgaagagaaccgtgttcagccacggcagccagaaggccaccgacatcatggacgccatgctgagaaagctgtacaacgtgatgttcgccaagaaggtgcccgagcacgtgagaaaggcccaggacaaggccgagagctacagcctgatcagcatgaagggcatgggcgaccccaagaacagaaacgtgaacttcgccatgaagagcgagaccaagctgagagagaagatgtacagcgagcccaagagcgaggaggagacctgcgccaagaccctgggcgagcacatcatcaaggagggcctgaccctgtggcacaagacccagcagaaggagtgcaagagcctgggcttccagcacgccgccttcgaggcccccaacacccagagaaagcccgccagcgacatcagcttcgagtaccccgaggacatcggcaacctgagcctgcccccctacccccccgagaagcccgagaacttcatgtacgacagcgacagctgggccgaggacctgatcgtgagcgccctgctgctgatccagtaccacctggcccagggcggcagaagagacgccagaagcttcgtggaggccgccggcaccaccaacttccccgccaacgagccccccgtggcccccgacgagagctgcctgaagagcgcccccatcgtgggcgaccaggagcaggccgagaagaaggacctgagaagcgtgttcttcaacttcatcagaaacctgctgagcgagaccatcttcaagagagaccagagccccgagcccaaggtgcccgagcagcccgtgaaggaggacagaaagctgtgcgagagacccctggccagcagcccccccagactgtacgaggacgacgagacccccggcgccctgagcggcctgaccaagatggccgtgagccagatcgacggccacatgagcggccagatggtggagcacctgatgaacagcgtgatgaagctgtgcgtgatcatcgccaagagctgcgacgccagcctggccgagctgggcgacgacaagagcggcgacgccagcagactgaccagcgccttccccgacagcctgtacgagtgcctgcccgccaagggcaccggcagcgccgaggccgtgctgcagaacgcctaccaggccatccacaacgagatgagaggcaccagcggccagccccccgagggctgcgccgcccccaccgtgatcgtgagcaaccacaacctgaccgacaccgtgcagaacaagcagctgcaggccgtgctgcagtgggtggccgccagcgagctgaacgtgcccatcctgtacttcgccggcgacgacgagggcatccaggagaagctgctgcagctgagcgccgccgccgtggacaagggctgcagcgtgggcgaggtgctgcagagcgtgctgagatacgagaaggagagacagctgaacgaggccgtgggcaacgtgacccccctgcagctgctggactggctgatggtgaacctgtag

SEQ ID NO: 94174 - DNA, 1488 bp, synthetic construct
  misc_feature 1..1488: note = Description of Artificial Sequence: Synthetic coding sequence
  source 1..1488: mol_type = other DNA
atgaccgtgatgagcggcgagaacgtggacgaggccagcgccgcccccggccacccccaggacggcagctaccccagacaggccgaccacgacgaccacgagtgctgcgagagagtggtgatcaacatcagcggcctgagattcgagacccagctgaagaccctggcccagttccccaacaccctgctgggcaaccccaagaagagaatgagatacttcgaccccctgagaaacgagtacttcttcgacagaaacagacccagcttcgacgccatcctgtactactaccagagcggcggcagactgagaagacccgtgaacgtgcccctggacatgttcagcgaggagatcaagttctacgagctgggcgaggaggccatggagaagttcagagaggacgagggcttcatcaaggaggaggagagacccctgcccgagaaggagtaccagagacaggtgtggctgctgttcgagtaccccgagagcagcggccccgccagagtgatcgccatcgtgagcgtgatggtgatcctgatcagcatcgtgatcttctgcctggagaccctgcccgagctgaaggacgacaaggacttcaccggcaccgtgcacagaatcgacaacaccaccgtgatctacaacagcaacatcttcaccgaccccttcttcatcgtggagaccctgtgcatcatctggttcagcttcgagctggtggtgagattcttcgcctgccccagcaagaccgacttcttcaagaacatcatgaacttcatcgacatcgtggccatcatcccctacttcatcaccctgggcaccgagatcgccgagcaggagggcaaccagaagggcgagcaggccaccagcctggccatcctgagagtgatcagactggtgagagtgttcagaatcttcaagctgagcagacacagcaagggcctgcagatcctgggccagaccctgaaggccagcatgagagagctgggcctgctgatcttcttcctgttcatcggcgtgatcctgttcagcagcgccgtgtacttcgccgaggccgaggaggccgagagccacttcagcagcatccccgacgccttctggtgggccgtggtgagcatgaccaccgtgggctacggcgacatgtaccccgtgaccatcggcggcaagatcgtgggcagcctgtgcgccatcgccggcgtgctgaccatcgccctgcccgtgcccgtgatcgtgagcaacttcaactacttctaccacagagagaccgagggcgaggagcaggcccagctgctgcacgtgagcagccccaacctggccagcgacagcgacctgagcagaagaagcagcagcaccatgagcaagagcgagtacatggagatcgaggaggacatgaacaacagcatcgcccactacagacaggtgaacatcagaaccgccaactgcaccaccgccaaccagaactgcgtgaacaagagcaagctgctgaccgacgtgtag

SEQ ID NO: 94175 - DNA, 1536 bp, synthetic construct
  misc_feature 1..1536: note = Description of Artificial Sequence: Synthetic coding sequence
  source 1..1536: mol_type = other DNA
atggacgtgtgcggctggaaggagatggaggtggccctggtgaacttcgacaacagcgacgagatccaggaggagcccggctacgccaccgacttcgacagcaccagccccaagggcagacccggcggcagcagcttcagcaacggcaagatcctgatcagcgagagcaccaaccacgagaccgccttcagcaagctgcccggcgactacgccgacccccccggccccgagcccgtggtgctgaacgagggcaaccagagagtgatcatcaacatcgccggcctgagattcgagacccagctgagaaccctgagccagttccccgagaccctgctgggcgacagagagaagagaatgcagttcttcgacagcatgagaaacgagtacttcttcgacagaaacagacccagcttcgacggcatcctgtactactaccagagcggcggcaagatcagaagacccgccaacgtgcccatcgacatcttcgccgacgagatcagcttctacgagctgggcagcgaggccatggaccagttcagagaggacgagggcttcatcaaggaccccgagaccctgctgcccaccaacgacatccacagacagttctggctgctgttcgagtaccccgagagcagcagcgccgccagagccgtggccgtggtgagcgtgctggtggtggtgatcagcatcaccatcttctgcctggagaccctgcccgagttcagagaggacagagagctgaaggtggtgagagaccccaacctgaacatgagcaagaccgtgctgagccagaccatgttcaccgaccccttcttcatggtggagagcacctgcatcgtgtggttcaccttcgagctggtgctgagattcgtggtgtgccccagcaagaccgacttcttcagaaacatcatgaacatcatcgacatcatcagcatcatcccctacttcgccaccctgatcaccgagctggtgcaggagaccgagcccagcgcccagcagaacatgagcctggccatcctgagaatcatcagactggtgagagtgttcagaatcttcaagctgagcagacacagcaagggcctgcagatcctgggccagaccctgaaggccagcatgagagagctgggcctgctgatcttcttcctgttcatcggcgtgatcctgttcagcagcgccgtgtacttcgccgaggtggacgagcccgagagccacttcagcagcatccccgacggcttctggtgggccgtggtgaccatgaccaccgtgggctacggcgacatgtgccccaccacccccggcggcaagatcgtgggcaccctgtgcgccatcgccggcgtgctgaccatcgccctgcccgtgcccgtgatcgtgagcaacttcaactacttctaccacagagagaccgagaacgaggagaagcagaacatccccggcgagatcgagagaatcctgaacagcgtgggcagcagaatgggcagcaccgacagcctgaacaagaccaacggcggctgcagcaccgagaagagcagaaagtag

SEQ ID NO: 94176 - DNA, 1728 bp, synthetic construct
  misc_feature 1..1728: note = Description of Artificial Sequence: Synthetic coding sequence
  source 1..1728: mol_type = other DNA
atggacgagagactgagcctgctgagaagcccccccccccccagcgccagacacagagcccaccccccccagagacccgccagcagcggcggcgcccacaccctggtgaaccacggctacgccgagcccgccgccggcagagagctgccccccgacatgaccgtggtgcccggcgaccacctgctggagcccgaggtggccgacggcggcggcgcccccccccagggcggctgcggcggcggcggctgcgacagatacgagcccctgccccccagcctgcccgccgccggcgagcaggactgctgcggcgagagagtggtgatcaacatcagcggcctgagattcgagacccagctgaagaccctgtgccagttccccgagaccctgctgggcgaccccaagagaagaatgagatacttcgaccccctgagaaacgagtacttcttcgacagaaacagacccagcttcgacgccatcctgtactactaccagagcggcggcagaatcagaagacccgtgaacgtgcccatcgacatcttcagcgaggagatcagattctaccagctgggcgaggaggccatggagaagttcagagaggacgagggcttcctgagagaggaggagagacccctgcccagaagagacttccagagacaggtgtggctgctgttcgagtaccccgagagcagcggccccgccagaggcatcgccatcgtgagcgtgctggtgatcctgatcagcatcgtgatcttctgcctggagaccctgcccgagttcagagacgagaaggactaccccgccagcaccagccaggacagcttcgaggccgccggcaacagcaccagcggcagcagagccggcgccagcagcttcagcgaccccttcttcgtggtggagaccctgtgcatcatctggttcagcttcgagctgctggtgagattcttcgcctgccccagcaaggccaccttcagcagaaacatcatgaacctgatcgacatcgtggccatcatcccctacttcatcaccctgggcaccgagctggccgagagacagggcaacggccagcaggccatgagcctggccatcctgagagtgatcagactggtgagagtgttcagaatcttcaagctgagcagacacagcaagggcctgcagatcctgggccagaccctgaaggccagcatgagagagctgggcctgctgatcttcttcctgttcatcggcgtgatcctgttcagcagcgccgtgtacttcgccgaggccgacgaccccaccagcggcttcagcagcatccccgacgccttctggtgggccgtggtgaccatgaccaccgtgggctacggcgacatgcaccccgtgaccatcggcggcaagatcgtgggcagcctgtgcgccatcgccggcgtgctgaccatcgccctgcccgtgcccgtgatcgtgagcaacttcaactacttctaccacagagagaccgagggcgaggagcagagccagtacatgcacgtgggcagctgccagcacctgagcagcagcgccgaggagctgagaaaggccagaagcaacagcaccctgagcaagagcgagtacatggtgatcgaggagggcggcatgaaccacagcgccttcccccagacccccttcaagaccggcaacagcaccgccacctgcaccaccaacaacaaccccaacagctgcgtgaacatcaagaagatcttcaccgacgtgtag

SEQ ID NO: 94177 - DNA, 1962 bp, synthetic construct
  misc_feature 1..1962: note = Description of Artificial Sequence: Synthetic coding sequence
  source 1..1962: mol_type = other DNA
atggaggtggccatggtgagcgccgagagcagcggctgcaacagccacatgccctacggctacgccgcccaggccagagccagagagagagagagactggcccacagcagagccgccgccgccgccgccgtggccgccgccaccgccgccgtggagggcagcggcggcagcggcggcggcagccaccaccaccaccagagcagaggcgcctgcaccagccacgacccccagagcagcagaggcagcagaagaagaagaagacagagaagcgagaagaagaaggcccactacagacagagcagcttcccccactgcagcgacctgatgcccagcggcagcgaggagaagatcctgagagagctgagcgaggaggaggaggacgaggaggaggaggaggaggaggaggaggagggcagattctactacagcgaggacgaccacggcgacgagtgcagctacaccgacctgctgccccaggacgagggcggcggcggctacagcagcgtgagatacagcgactgctgcgagagagtggtgatcaacgtgagcggcctgagattcgagacccagatgaagaccctggcccagttccccgagaccctgctgggcgaccccgagaagagaacccagtacttcgaccccctgagaaacgagtacttcttcgacagaaacagacccagcttcgacgccatcctgtactactaccagagcggcggcagactgaagagacccgtgaacgtgcccttcgacatcttcaccgaggaggtgaagttctaccagctgggcgaggaggccctgctgaagttcagagaggacgagggcttcgtgagagaggaggaggacagagccctgcccgagaacgagttcaagaagcagatctggctgctgttcgagtaccccgagagcagcagccccgccagaggcatcgccatcgtgagcgtgctggtgatcctgatcagcatcgtgatcttctgcctggagaccctgcccgagttcagagacgacagagacctggtgatggccctgagcgccggcggccacggcggcctgctgaacgacaccagcgccccccacctggagaacagcggccacaccatcttcaacgaccccttcttcatcgtggagaccgtgtgcatcgtgtggttcagcttcgagttcgtggtgagatgcttcgcctgccccagccaggccctgttcttcaagaacatcatgaacatcatcgacatcgtgagcatcctgccctacttcatcaccctgggcaccgacctggcccagcagcagggcggcggcaacggccagcagcagcaggccatgagcttcgccatcctgagaatcatcagactggtgagagtgttcagaatcttcaagctgagcagacacagcaagggcctgcagatcctgggccacaccctgagagccagcatgagagagctgggcctgctgatcttcttcctgttcatcggcgtgatcctgttcagcagcgccgtgtacttcgccgaggccgacgagcccaccacccacttccagagcatccccgacgccttctggtgggccgtggtgaccatgaccaccgtgggctacggcgacatgaagcccatcaccgtgggcggcaagatcgtgggcagcctgtgcgccatcgccggcgtgctgaccatcgccctgcccgtgcccgtgatcgtgagcaacttcaactacttctaccacagagagaccgagaacgaggagcagacccagctgacccagaacgccgtgagctgcccctacctgcccagcaacctgctgaagaagttcagaagcagcaccagcagcagcctgggcgacaagagcgagtacctggagatggaggagggcgtgaaggagagcctgtgcgccaaggaggagaagtgccagggcaagggcgacgacagcgagaccgacaagaacaactgcagcaacgccaaggccgtggagaccgacgtgtag

SEQ ID NO: 94178 - DNA, 1842 bp, synthetic construct
  misc_feature 1..1842: note = Description of Artificial Sequence: Synthetic coding sequence
  source 1..1842: mol_type = other DNA
atggagatcgccctggtgcccctggagaacggcggcgccatgaccgtgagaggcggcgacgaggccagagccggctgcggccaggccaccggcggcgagctgcagtgcccccccaccgccggcctgagcgacggccccaaggagcccgcccccaagggcagaggcgcccagagagacgccgacagcggcgtgagacccctgccccccctgcccgaccccggcgtgagacccctgccccccctgcccgaggagctgcccagacccagaagacccccccccgaggacgaggaggaggagggcgaccccggcctgggcaccgtggaggaccaggccctgggcaccgccagcctgcaccaccagagagtgcacatcaacatcagcggcctgagattcgagacccagctgggcaccctggcccagttccccaacaccctgctgggcgaccccgccaagagactgagatacttcgaccccctgagaaacgagtacttcttcgacagaaacagacccagcttcgacggcatcctgtactactaccagagcggcggcagactgagaagacccgtgaacgtgagcctggacgtgttcgccgacgagatcagattctaccagctgggcgacgaggccatggagagattcagagaggacgagggcttcatcaaggaggaggagaagcccctgcccagaaacgagttccagagacaggtgtggctgatcttcgagtaccccgagagcagcggcagcgccagagccatcgccatcgtgagcgtgctggtgatcctgatcagcatcatcaccttctgcctggagaccctgcccgagttcagagacgagagagagctgctgagacacccccccgccccccaccagccccccgcccccgcccccggcgccaacggcagcggcgtgatggccccccccagcggccccaccgtggcccccctgctgcccagaaccctggccgaccccttcttcatcgtggagaccacctgcgtgatctggttcaccttcgagctgctggtgagattcttcgcctgccccagcaaggccggcttcagcagaaacatcatgaacatcatcgacgtggtggccatcttcccctacttcatcaccctgggcaccgagctggccgagcagcagcccggcggcggcggcggcggccagaacggccagcaggccatgagcctggccatcctgagagtgatcagactggtgagagtgttcagaatcttcaagctgagcagacacagcaagggcctgcagatcctgggcaagaccctgcaggccagcatgagagagctgggcctgctgatcttcttcctgttcatcggcgtgatcctgttcagcagcgccgtgtacttcgccgaggccgacaaccagggcacccacttcagcagcatccccgacgccttctggtgggccgtggtgaccatgaccaccgtgggctacggcgacatgagacccatcaccgtgggcggcaagatcgtgggcagcctgtgcgccatcgccggcgtgctgaccatcgccctgcccgtgcccgtgatcgtgagcaacttcaactacttctaccacagagagaccgaccacgaggagcccgccgtgctgaaggaggagcagggcacccagagccagggccccggcctggacagaggcgtgcagagaaaggtgagcggcagcagaggcagcttctgcaaggccggcggcaccctggagaacgccgacagcgccagaagaggcagctgccccctggagaagtgcaacgtgaaggccaagagcaacgtggacctgagaagaagcctgtacgccctgtgcctggacaccagcagagagaccgacctgtag

SEQ ID NO: 94179 - DNA, 1557 bp, synthetic construct
  misc_feature 1..1557: note = Description of Artificial Sequence: Synthetic coding sequence
  source 1..1557: mol_type = other DNA
atggccgccagcatggccagaagactgtggcccctgctgaccagaagaggcttcagacccagaggcggctgcatcagcaacgacagccccagaagaagcttcaccaccgagaagagaaacagaaacctgctgtacgagtacgccagagagggctacagcgccctgccccagctggacatcgagagattctgcgcctgccccgaggaggccgcccacgccctggagctgagaaagggcgagctgagaagcgccgacctgcccgccatcatcagcacctggcaggagctgagacagctgcaggagcagatcagaagcctggaggaggagaaggccgccgtgaccgaggccgtgagagccctgctggccaaccaggacagcggcgaggtgcagcaggaccccaagtaccagggcctgagagccagaggcagagagatcagaaaggagctggtgcacctgtaccccagagaggcccagctggaggagcagttctacctgcaggccctgaagctgcccaaccagacccaccccgacgtgcccgtgggcgacgagagccaggccagagtgctgcacatggtgggcgacaagcccgtgttcagcttccagcccagaggccacctggagatcggcgagaagctggacatcatcagacagaagagactgagccacgtgagcggccacagaagctactacctgagaggcgccggcgccctgctgcagcacggcctggtgaacttcaccttcaacaagctgctgagaagaggcttcacccccatgaccgtgcccgacctgctgagaggcgccgtgttcgagggctgcggcatgacccccaacgccaaccccagccagatctacaacatcgaccccgccagattcaaggacctgaacctggccggcaccgccgaggtgggcctggccggctacttcatggaccacaccgtggccttcagagacctgcccgtgagaatggtgtgcagcagcacctgctacagagccgagaccaacaccggccaggagcccagaggcctgtacagagtgcaccacttcaccaaggtggagatgttcggcgtgaccggccccggcctggagcagagcagccagctgctggaggagttcctgagcctgcagatggagatcctgaccgagctgggcctgcacttcagagtgctggacatgcccacccaggagctgggcctgcccgcctacagaaagttcgacatcgaggcctggatgcccggcagaggcagattcggcgaggtgaccagcgccagcaactgcaccgacttccagagcagaagactgcacatcatgttccagaccgaggccggcgagctgcagttcgcccacaccgtgaacgccaccgcctgcgccgtgcccagactgctgatcgccctgctggagagcaaccagcagaaggacggcagcgtgctggtgccccccgccctgcagagctacctgggcaccgacagaatcaccgcccccacccacgtgcccctgcagtacatcggccccaaccagcccagaaagcccggcctgcccggccagcccgccgtgagctag

SEQ ID NO: 94180 - DNA, 1893 bp, synthetic construct
  misc_feature 1..1893: note = Description of Artificial Sequence: Synthetic coding sequence
  source 1..1893: mol_type = other DNA
atggccgccggcgtggccgcctggctgcccttcgccagagccgccgccatcggctggatgcccgtggccagcggccccatgcccgccccccccagacaggagagaaagagaacccaggacgccctgatcgtgctgaacgtgagcggcaccagattccagacctggcaggacaccctggagagataccccgacaccctgctgggcagcagcgagagagacttcttctaccaccccgagacccagcagtacttcttcgacagagaccccgacatcttcagacacatcctgaacttctacagaaccggcaagctgcactaccccagacacgagtgcatcagcgcctacgacgaggagctggccttcttcggcctgatccccgagatcatcggcgactgctgctacgaggagtacaaggacagaagaagagagaacgccgagagactgcaggacgacgccgacaccgacaccgccggcgagagcgccctgcccaccatgaccgccagacagagagtgtggagagccttcgagaacccccacaccagcaccatggccctggtgttctactacgtgaccggcttcttcatcgccgtgagcgtgatcgccaacgtggtggagaccgtgccctgcggcagcagccccggccacatcaaggagctgccctgcggcgagagatacgccgtggccttcttctgcctggacaccgcctgcgtgatgatcttcaccgtggagtacctgctgagactggccgccgcccccagcagatacagattcgtgagaagcgtgatgagcatcatcgacgtggtggccatcctgccctactacatcggcctggtgatgaccgacaacgaggacgtgagcggcgccttcgtgaccctgagagtgttcagagtgttcagaatcttcaagttcagcagacacagccagggcctgagaatcctgggctacaccctgaagagctgcgccagcgagctgggcttcctgctgttcagcctgaccatggccatcatcatcttcgccaccgtgatgttctacgccgagaagggcagcagcgccagcaagttcaccagcatccccgccgccttctggtacaccatcgtgaccatgaccaccctgggctacggcgacatggtgcccaagaccatcgccggcaagatcttcggcagcatctgcagcctgagcggcgtgctggtgatcgccctgcccgtgcccgtgatcgtgagcaacttcagcagaatctaccaccagaaccagagagccgacaagagaagagcccagaagaaggccagactggccagaatcagagccgccaagagcggcagcgccaacgcctacatgcagagcaagagaaacggcctgctgagcaaccagctgcagagcagcgaggacgagcaggccttcgtgagcaagagcggcagcagcttcgagacccagcaccaccacctgctgcactgcctggagaagaccaccaaccacgagttcgtggacgagcaggtgttcgaggagagctgcatggaggtggccaccgtgaacagacccagcagccacagccccagcctgagcagccagcagggcgtgaccagcacctgctgcagcagaagacacaagaagaccttcagaatccccaacgccaacgtgagcggcagccaccagggcagcatccaggagctgagcaccatccagatcagatgcgtggagagaacccccctgagcaacagcagaagcagcctgaacgccaagatggaggagtgcgtgaagctgaactgcgagcagccctacgtgaccaccgccatcatcagcatccccaccccccccgtgaccacccccgagggcgacgacagacccgagagccccgagtacagcggcggcaacatcgtgagagtgagcgccctgtag

SEQ ID NO: 94181 - DNA, 1911 bp, synthetic construct
  misc_feature 1..1911: note = Description of Artificial Sequence: Synthetic coding sequence
  source 1..1911: mol_type = other DNA
atggccgccggcgtggccgcctggctgcccttcgccagagccgccgccatcggctggatgcccgtggccaactgccccatgcccctggcccccgccgacaagaacaagagacaggacgagctgatcgtgctgaacgtgagcggcagaagattccagacctggagaaccaccctggagagataccccgacaccctgctgggcagcaccgagaaggagttcttcttcaacgaggacaccaaggagtacttcttcgacagagaccccgaggtgttcagatgcgtgctgaacttctacagaaccggcaagctgcactaccccagatacgagtgcatcagcgcctacgacgacgagctggccttctacggcatcctgcccgagatcatcggcgactgctgctacgaggagtacaaggacagaaagagagagaacgccgagagactgatggacgacaacgacagcgagaacaaccaggagagcatgcccagcctgagcttcagacagaccatgtggagagccttcgagaacccccacaccagcaccctggccctggtgttctactacgtgaccggcttcttcatcgccgtgagcgtgatcaccaacgtggtggagaccgtgccctgcggcaccgtgcccggcagcaaggagctgccctgcggcgagagatacagcgtggccttcttctgcctggacaccgcctgcgtgatgatcttcaccgtggagtacctgctgagactgttcgccgcccccagcagatacagattcatcagaagcgtgatgagcatcatcgacgtggtggccatcatgccctactacatcggcctggtgatgaccaacaacgaggacgtgagcggcgccttcgtgaccctgagagtgttcagagtgttcagaatcttcaagttcagcagacacagccagggcctgagaatcctgggctacaccctgaagagctgcgccagcgagctgggcttcctgctgttcagcctgaccatggccatcatcatcttcgccaccgtgatgttctacgccgagaagggcagcagcgccagcaagttcaccagcatccccgccagcttctggtacaccatcgtgaccatgaccaccctgggctacggcgacatggtgcccaagaccatcgccggcaagatcttcggcagcatctgcagcctgagcggcgtgctggtgatcgccctgcccgtgcccgtgatcgtgagcaacttcagcagaatctaccaccagaaccagagagccgacaagagaagagcccagaagaaggccagactggccagaatcagagtggccaagaccggcagcagcaacgcctacctgcacagcaagagaaacggcctgctgaacgaggccctggagctgaccggcacccccgaggaggagcacatgggcaagaccaccagcctgatcgagagccagcaccaccacctgctgcactgcctggagaagaccaccaaccacgagttcatcgacgagcagatgttcgagcagaactgcatggagagcagcatgcagaactaccccagcaccagaagccccagcctgagcagccaccccggcctgaccaccacctgctgcagcagaagaagcaagaagaccacccacctgcccaacagcaacctgcccgccaccagactgagaagcatgcaggagctgagcaccatccacatccagggcagcgagcagcccagcctgaccaccagcagaagcagcctgaacctgaaggccgacgacggcctgagacccaactgcaagaccagccagatcaccaccgccatcatcagcatccccaccccccccgccctgacccccgagggcgagagcagacccccccccgccagccccggccccaacaccaacatccccagcatcgccagcaacgtggtgaaggtgagcgccctgtag

SEQ ID NO: 94182 - DNA, 1968 bp, synthetic construct
  misc_feature 1..1968: note = Description of Artificial Sequence: Synthetic coding sequence
  source 1..1968: mol_type = other DNA
atggccgccggcgtggccgcctggctgcccttcgccagagccgccgccatcggctggatgcccgtggccaactgccccatgcccctggcccccgccgacaagaacaagagacaggacgagctgatcgtgctgaacgtgagcggcagaagattccagacctggagaaccaccctggagagataccccgacaccctgctgggcagcaccgagaaggagttcttcttcaacgaggacaccaaggagtacttcttcgacagagaccccgaggtgttcagatgcgtgctgaacttctacagaaccggcaagctgcactaccccagatacgagtgcatcagcgcctacgacgacgagctggccttctacggcatcctgcccgagatcatcggcgactgctgctacgaggagtacaaggacagaaagagagagaacgccgagagactgatggacgacaacgacagcgagaacaaccaggagagcatgcccagcctgagcttcagacagaccatgtggagagccttcgagaacccccacaccagcaccctggccctggtgttctactacgtgaccggcttcttcatcgccgtgagcgtgatcaccaacgtggtggagaccgtgccctgcggcaccgtgcccggcagcaaggagctgccctgcggcgagagatacagcgtggccttcttctgcctggacaccgcctgcgtgatgatcttcaccgtggagtacctgctgagactgttcgccgcccccagcagatacagattcatcagaagcgtgatgagcatcatcgacgtggtggccatcatgccctactacatcggcctggtgatgaccaacaacgaggacgtgagcggcgccttcgtgaccctgagagtgttcagagtgttcagaatcttcaagttcagcagacacagccagggcctgagaatcctgggctacaccctgaagagctgcgccagcgagctgggcttcctgctgttcagcctgaccatggccatcatcatcttcgccaccgtgatgttctacgccgagaagggcagcagcgccagcaagttcaccagcatccccgccagcttctggtacaccatcgtgaccatgaccaccctgggctacggcgacatggtgcccaagaccatcgccggcaagatcttcggcagcatctgcagcctgagcggcgtgctggtgatcgccctgcccgtgcccgtgatcgtgagcaacttcagcagaatctaccaccagaaccagagagccgacaagagaagagcccagaagaaggccagactggccagaatcagagtggccaagaccggcagcagcaacgcctacctgcacagcaagagaaacggcctgctgaacgaggccctggagctgaccggcacccccgaggaggagcacatgggcaagaccaccagcctgatcgagagccagcaccaccacctgctgcactgcctggagaagaccaccggcctgagctacctggtggacgaccccctgctgagcgtgagaaccagcaccatcaagaaccacgagttcatcgacgagcagatgttcgagcagaactgcatggagagcagcatgcagaactaccccagcaccagaagccccagcctgagcagccaccccggcctgaccaccacctgctgcagcagaagaagcaagaagaccacccacctgcccaacagcaacctgcccgccaccagactgagaagcatgcaggagctgagcaccatccacatccagggcagcgagcagcccagcctgaccaccagcagaagcagcctgaacctgaaggccgacgacggcctgagacccaactgcaagaccagccagatcaccaccgccatcatcagcatccccaccccccccgccctgacccccgagggcgagagcagacccccccccgccagccccggccccaacaccaacatccccagcatcgccagcaacgtggtgaaggtgagcgccctgtag

SEQ ID NO: 94183 - DNA, 1911 bp, synthetic construct; identical to SEQ ID NO: 94181
  misc_feature 1..1911: note = Description of Artificial Sequence: Synthetic coding sequence
  source 1..1911: mol_type = other DNA

SEQ ID NO: 94184 - DNA, 1758 bp, synthetic construct
  misc_feature 1..1758: note = Description of Artificial Sequence: Synthetic coding sequence
  source 1..1758: mol_type = other DNA
atgggccagggcgacgagagcgagagaatcgtgatcaacgtgggcggcaccagacaccagacctacagaagcaccctgagaaccctgcccggcaccagactggcctggctggccgagcccgacgcccacagccacttcgactacgaccccagagccgacgagttcttcttcgacagacaccccggcgtgttcgcccacatcctgaactactacagaaccggcaagctgcactgccccgccgacgtgtgcggccccctgtacgaggaggagctggccttctggggcatcgacgagaccgacgtggagccctgctgctggatgacctacagacagcacagagacgccgaggaggccctggacagcttcggcggcgcccccctggacaacagcgccgacgacgccgacgccgacggccccggcgacagcggcgacggcgaggacgagctggagatgaccaagagactggccctgagcgacagccccgacggcagacccggcggcttctggagaagatggcagcccagaatctgggccctgttcgaggacccctacagcagcagatacgccagatacgtggccttcgccagcctgttcttcatcctggtgagcatcaccaccttctgcctggagacccacgagagattcaaccccatcgtgaacaagaccgagatcgagaacgtgagaaacggcacccaggtgagatactacagagaggccgagaccgaggccttcctgacctacatcgagggcgtgtgcgtggtgtggttcaccttcgagttcctgatgagagtgatcttctgccccaacaaggtggagttcatcaagaacagcctgaacatcatcgacttcgtggccatcctgcccttctacctggaggtgggcctgagcggcctgagcagcaaggccgccaaggacgtgctgggcttcctgagagtggtgagattcgtgagaatcctgagaatcttcaagctgaccagacacttcgtgggcctgagagtgctgggccacaccctgagagccagcaccaacgagttcctgctgctgatcatcttcctggccctgggcgtgctgatcttcgccaccatgatctactacgccgagagaatcggcgcccagcccaacgaccccagcgccagcgagcacacccacttcaagaacatccccatcggcttctggtgggccgtggtgaccatgaccaccctgggctacggcgacatgtacccccagacctggagcggcatgctggtgggcgccctgtgcgccctggccggcgtgctgaccatcgccatgcccgtgcccgtgatcgtgaacaacttcggcatgtactacagcctggccatggccaagcagaagctgcccaagaagaagaagaagcacatccccagacccccccagctgggcagccccaactactgcaagagcgtggtgaacagcccccaccacagcacccagagcgacacctgccccctggcccaggaggagatcctggagatcaacagagccgacagcaagctgaacggcgaggtggccaaggccgccctggccaacgaggactgcccccacatcgaccaggccctgacccccgacgagggcctgcccttcaccagaagcggcaccagagagagatacggcccctgcttcctgctgagcaccggcgagtacgcctgcccccccggcggcggcatgagaaaggacctgtgcaaggagagccccgtgatcgccaagtacatgcccaccgaggccgtgagagtgacctag

SEQ ID NO: 94185 - DNA, 1536 bp, synthetic construct
  misc_feature 1..1536: note = Description of Artificial Sequence: Synthetic coding sequence
  source 1..1536: mol_type = other DNA
atgggccagggcgacgagagcgagagaatcgtgatcaacgtgggcggcaccagacaccagacctacagaagcaccctgagaaccctgcccggcaccagactggcctggctggccgagcccgacgcccacagccacttcgactacgaccccagagccgacgagttcttcttcgacagacaccccggcgtgttcgcccacatcctgaactactacagaaccggcaagctgcactgccccgccgacgtgtgcggccccctgtacgaggaggagctggccttctggggcatcgacgagaccgacgtggagccctgctgctggatgacctacagacagcacagagacgccgaggaggccctggacagcttcggcggcgcccccctggacaacagcgccgacgacgccgacgccgacggccccggcgacagcggcgacggcgaggacgagctggagatgaccaagagactggccctgagcgacagccccgacggcagacccggcggcttctggagaagatggcagcccagaatctgggccctgttcgaggacccctacagcagcagatacgccagatacgtggccttcgccagcctgttcttcatcctggtgagcatcaccaccttctgcctggagacccacgagagattcaaccccatcgtgaacaagaccgagatcgagaacgtgagaaacggcacccaggtgagatactacagagaggccgagaccgaggccttcctgacctacatcgagggcgtgtgcgtggtgtggttcaccttcgagttcctgatgagagtgatcttctgccccaacaaggtggagttcatcaagaacagcctgaacatcatcgacttcgtggccatcctgcccttctacctggaggtgggcctgagcggcctgagcagcaaggccgccaaggacgtgctgggcttcctgagagtggtgagattcgtgagaatcctgagaatcttcaagctgaccagacacttcgtgggcctgagagtgctgggccacaccctgagagccagcaccaacgagttcctgctgctgatcatcttcctggccctgggcgtgctgatcttcgccaccatgatctactacgccgagagaatcggcgcccagcccaacgaccccagcgccagcgagcacacccacttcaagaacatccccatcggcttctggtgggccgtggtgaccatgaccaccctgggctacggcgacatgtacccccagacctggagcggcatgctggtgggcgccctgtgcgccctggccggcgtgctgaccatcgccatgcccgtgcccgtgatcgtgaacaacttcggcatgtactacagcctggccatggccaagcagaagctgcccaagaagaagaagaagcacatccccagacccccccagctgggcagccccaactactgcaagagcgtggtgaacagcccccaccacagcacccagagcgacacctgccccctggcccaggaggagatcctggagatcaacagagccggcagaaagcccctgagaggcatgagcatctag

SEQ ID NO: 94186 - DNA, 1842 bp, synthetic construct
  misc_feature 1..1842: note = Description of Artificial Sequence: Synthetic coding sequence
  source 1..1842: mol_type = other DNA
atgggcaagatcgagaacaacgagagagtgatcctgaacgtgggcggcaccagacacgagacctacagaagcaccctgaagaccctgcccggcaccagactggccctgctggccagcagcgagccccccggcgactgcctgaccaccgccggcgacaagctgcagcccagccccccccccctgagccccccccccagagccccccccctgagccccggccccggcggctgcttcgagggcggcgccggcaactgcagcagcagaggcggcagagccagcgaccaccccggcggcggcagagagttcttcttcgacagacaccccggcgtgttcgcctacgtgctgaactactacagaaccggcaagctgcactgccccgccgacgtgtgcggccccctgttcgaggaggagctggccttctggggcatcgacgagaccgacgtggagccctgctgctggatgacctacagacagcacagagacgccgaggaggccctggacatcttcgagacccccgacctgatcggcggcgaccccggcgacgacgaggacctggccgccaagagactgggcatcgaggacgccgccggcctgggcggccccgacggcaagagcggcagatggagaagactgcagcccagaatgtgggccctgttcgaggacccctacagcagcagagccgccagattcatcgccttcgccagcctgttcttcatcctggtgagcatcaccaccttctgcctggagacccacgaggccttcaacatcgtgaagaacaagaccgagcccgtgatcaacggcaccagcgtggtgctgcagtacgagatcgagaccgaccccgccctgacctacgtggagggcgtgtgcgtggtgtggttcaccttcgagttcctggtgagaatcgtgttcagccccaacaagctggagttcatcaagaacctgctgaacatcatcgacttcgtggccatcctgcccttctacctggaggtgggcctgagcggcctgagcagcaaggccgccaaggacgtgctgggcttcctgagagtggtgagattcgtgagaatcctgagaatcttcaagctgaccagacacttcgtgggcctgagagtgctgggccacaccctgagagccagcaccaacgagttcctgctgctgatcatcttcctggccctgggcgtgctgatcttcgccaccatgatctactacgccgagagagtgggcgcccagcccaacgaccccagcgccagcgagcacacccagttcaagaacatccccatcggcttctggtgggccgtggtgaccatgaccaccctgggctacggcgacatgtacccccagacctggagcggcatgctggtgggcgccctgtgcgccctggccggcgtgctgaccatcgccatgcccgtgcccgtgatcgtgaacaacttcggcatgtactacagcctggccatggccaagcagaagctgcccagaaagagaaagaagcacatcccccccgccccccaggccagcagccccaccttctgcaagaccgagctgaacatggcctgcaacagcacccagagcgacacctgcctgggcaaggacaacagactgctggagcacaacagaagcgtgctgagcggcgacgacagcaccggcagcgagccccccctgagcccccccgagagactgcccatcagaagaagcagcaccagagacaagaacagaagaggcgagacctgcttcctgctgaccaccggcgactacacctgcgccagcgacggcggcatcagaaaggacaactgcaaggaggtggtgatcaccggctacacccaggccgaggccagaagcctgacctag

SEQ ID NO: 94187 - DNA, 1890 bp, synthetic construct
  misc_feature 1..1890: note = Description of Artificial Sequence: Synthetic coding sequence
  source 1..1890: mol_type = other DNA
atgggcaagatcgagaacaacgagagagtgatcctgaacgtgggcggcaccagacacgagacctacagaagcaccctgaagaccctgcccggcaccagactggccctgctggccagcagcgagccccccggcgactgcctgaccaccgccggcgacaagctgcagcccagccccccccccctgagccccccccccagagccccccccctgagccccggccccggcggctgcttcgagggcggcgccggcaactgcagcagcagaggcggcagagccagcgaccaccccggcggcggcagagagttcttcttcgacagacaccccggcgtgttcgcctacgtgctgaactactacagaaccggcaagctgcactgccccgccgacgtgtgcggccccctgttcgaggaggagctggccttctggggcatcgacgagaccgacgtggagccctgctgctggatgacctacagacagcacagagacgccgaggaggccctggacatcttcgagacccccgacctgatcggcggcgaccccggcgacgacgaggacctggccgccaagagactgggcatcgaggacgccgccggcctgggcggccccgacggcaagagcggcagatggagaagactgcagcccagaatgtgggccctgttcgaggacccctacagcagcagagccgccagattcatcgccttcgccagcctgttcttcatcctggtgagcatcaccaccttctgcctggagacccacgaggccttcaacatcgtgaagaacaagaccgagcccgtgatcaacggcaccagcgtggtgctgcagtacgagatcgagaccgaccccgccctgacctacgtggagggcgtgtgcgtggtgtggttcaccttcgagttcctggtgagaatcgtgttcagccccaacaagctggagttcatcaagaacctgctgaacatcatcgacttcgtggccatcctgcccttctacctggaggtgggcctgagcggcctgagcagcaaggccgccaaggacgtgctgggcttcctgagagtggtgagattcgtgagaatcctgagaatcttcaagctgaccagacacttcgtgggcctgagagtgctgggccacaccctgagagccagcaccaacgagttcctgctgctgatcatcttcctggccctgggcgtgctgatcttcgccaccatgatctactacgccgagagagtgggcgcccagcccaacgaccccagcgccagcgagcacacccagttcaagaacatccccatcggcttctggtgggccgtggtgaccatgaccaccctgggctacggcgacatgtacccccagacctggagcggcatgctggtgggcgccctgtgcgccctggccggcgtgctgaccatcgccatgcccgtgcccgtgatcgtgaacaacttcggcatgtactacagcctggccatggccaagcagaagctgcccagaaagagaaagaagcacatcccccccgccccccaggccagcagccccaccttctgcaagaccgagctgaacatggcctgcaacagcacccagagcgacacctgcctgggcaaggacaacagactgctggagcacaacagaagcgtgctgagcggcgacgacagcaccggcagcgagccccccctgagcccccccgagagactgcccatcagaagaagcagcaccagagacaagaacagaagaggcgagacctgcttcctgctgaccaccggcgactacacctgcgccagcgacggcggcatcagaaaggtgctgtacagaatctaccacggcctgctgaccgccgagaagggcaccgtggagttcagccacaccaaggactacaccggcaacagactgctgctgctgaacgtgccctag

SEQ ID NO: 94188 - DNA, 1677 bp, synthetic construct
  misc_feature 1..1677: note = Description of Artificial Sequence: Synthetic coding sequence
  source 1..1677: mol_type = other DNA
atgggcaagatcgagaacaacgagagagtgatcctgaacgtgggcggcaccagacacgagacctacagaagcaccctgaagaccctgcccggcaccagactggccctgctggccagcagcgagccccccggcgactgcctgaccaccgccggcgacaagctgcagcccagccccccccccctgagccccccccccagagccccccccctgagccccggccccggcggctgcttcgagggcggcgccggcaactgcagcagcagaggcggcagagccagcgaccaccccggcggcggcagagagttcttcttcgacagacaccccggcgtgttcgcctacgtgctgaactactacagaaccggcaagctgcactgccccgccgacgtgtgcggccccctgttcgaggaggagctggccttctggggcatcgacgagaccgacgtggagccctgctgctggatgacctacagacagcacagagacgccgaggaggccctggacatcttcgagacccccgacctgatcggcggcgaccccggcgacgacgaggacctggccgccaagagactgggcatcgaggacgccgccggcctgggcggccccgacggcaagagcggcagatggagaagactgcagcccagaatgtgggccctgttcgaggacccctacagcagcagagccgccagattcatcgccttcgccagcctgttcttcatcctggtgagcatcaccaccttctgcctggagacccacgaggccttcaacatcgtgaagaacaagaccgagcccgtgatcaacggcaccagcgtggtgctgcagtacgagatcgagaccgaccccgccctgacctacgtggagggcgtgtgcgtggtgtggttcaccttcgagttcctggtgagaatcgtgttcagccccaacaagctggagttcatcaagaacctgctgaacatcatcgacttcgtggccatcctgcccttctacctggaggtgggcctgagcggcctgagcagcaaggccgccaaggacgtgctgggcttcctgagagtggtgagattcgtgagaatcctgagaatcttcaagctgaccagacacttcgtgggcctgagagtgctgggccacaccctgagagccagcaccaacgagttcctgctgctgatcatcttcctggccctgggcgtgctgatcttcgccaccatgatctactacgccgagagagtgggcgcccagcccaacgaccccagcgccagcgagcacacccagttcaagaacatccccatcggcttctggtgggccgtggtgaccatgaccaccctgggctacggcgacatgtacccccagacctggagcggcatgctggtgggcgccctgtgcgccctggccggcgtgctgaccatcgccatgcccgtgcccgtgatcgtgaacaacttcggcatgtactacagcctggccatggccaagcagaagctgcccagaaagagaaagaagcacatcccccccgccccccaggccagcagccccaccttctgcaagaccgagctgaacatggcctgcaacagcacccagagcgacacctgcctgggcaaggacaacagactgctggagcacaacagaagcgacaactgcaaggaggtggtgatcaccggctacacccaggccgaggccagaagcctgacctag

SEQ ID NO: 94189 - DNA, 1842 bp, synthetic construct; identical to SEQ ID NO: 94186
  misc_feature 1..1842: note = Description of Artificial Sequence: Synthetic coding sequence
  source 1..1842: mol_type = other DNA

SEQ ID NO: 94190 - DNA, 1917 bp, synthetic construct
  misc_feature 1..1917: note = Description of Artificial Sequence: Synthetic coding sequence
  source 1..1917: mol_type = other DNA
atgggcaagatcgagaacaacgagagagtgatcctgaacgtgggcggcaccagacacgagacctacagaagcaccctgaagaccctgcccggcaccagactggccctgctggccagcagcgagccccccggcgactgcctgaccaccgccggcgacaagctgcagcccagccccccccccctgagccccccccccagagccccccccctgagccccggccccggcggctgcttcgagggcggcgccggcaactgcagcagcagaggcggcagagccagcgaccaccccggcggcggcagagagttcttcttcgacagacaccccggcgtgttcgcctacgtgctgaactactacagaaccggcaagctgcactgccccgccgacgtgtgcggccccctgttcgaggaggagctggccttctggggcatcgacgagaccgacgtggagccctgctgctggatgacctacagacagcacagagacgccgaggaggccctggacatcttcgagacccccgacctgatcggcggcgaccccggcgacgacgaggacctggccgccaagagactgggcatcgaggacgccgccggcctgggcggccccgacggcaagagcggcagatggagaagactgcagcccagaatgtgggccctgttcgaggacccctacagcagcagagccgccagattcatcgccttcgccagcctgttcttcatcctggtgagcatcaccaccttctgcctggagacccacgaggccttcaacatcgtgaagaacaagaccgagcccgtgatcaacggcaccagcgtggtgctgcagtacgagatcgagaccgaccccgccctgacctacgtggagggcgtgtgcgtggtgtggttcaccttcgagttcctggtgagaatcgtgttcagccccaacaagctggagttcatcaagaacctgctgaacatcatcgacttcgtggccatcctgcccttctacctggaggtgggcctgagcggcctgagcagcaaggccgccaaggacgtgctgggcttcctgagagtggtgagattcgtgagaatcctgagaatcttcaagctgaccagacacttcgtgggcctgagagtgctgggccacaccctgagagccagcaccaacgagttcctgctgctgatcatcttcctggccctgggcgtgctgatcttcgccaccatgatctactacgccgagagagtgggcgcccagcccaacgaccccagcgccagcgagcacacccagttcaagaacatccccatcggcttctggtgggccgtggtgaccatgaccaccctgggctacggcgacatgtacccccagacctggagcggcatgctggtgggcgccctgtgcgccctggccggcgtgctgaccatcgccatgcccgtgcccgtgatcgtgaacaacttcggcatgtactacagcctggccatggccaagcagaagctgcccagaaagagaaagaagcacatcccccccgccccccaggccagcagccccaccttctgcaagaccgagctgaacatggcctgcaacagcacccagagcgacacctgcctgggcaaggacaacagactgctggagcacaacagaagcgtgctgagcggcgacgacagcaccggcagcgagccccccctgagcccccccgagagactgcccatcagaagaagcagcaccagagacaagaacagaagaggcgagacctgcttcctgctgaccaccggcgactacacctgcgccagcgacggcggcatcagaaagggctacgagaagagcagaagcctgaacaacatcgccggcctggccggcaacgccctgagactgagccccgtgaccagcccctacaacagcccctgccccctgagaagaagcagaagccccatccccagcatcctgtag

SEQ ID NO: 94191 - DNA, 1890 bp, synthetic construct; identical to SEQ ID NO: 94187
  misc_feature 1..1890: note = Description of Artificial Sequence: Synthetic coding sequence
  source 1..1890: mol_type = other DNA

SEQ ID NO: 94192 - DNA, 2187 bp, synthetic construct
  misc_feature 1..2187: note = Description of Artificial Sequence: Synthetic coding sequence
  source 1..2187: mol_type = other DNA
atgctgagcagcgtgtgcgtgagcagcttcagaggcagacagggcgccagcaagcagcagcccgccccccccccccagccccccgagagccccccccccccccccctgcccccccagcagcagcagcccgcccagcccggccccgccgccagccccgccggcccccccgcccccagaggccccggcgacagaagagccgagccctgccccggcctgcccgccgccgccatgggcagacacggcggcggcggcggcgacagcggcaagatcgtgatcaacgtgggcggcgtgagacacgagacctacagaagcaccctgagaaccctgcccggcaccagactggccggcctgaccgagcccgaggccgccgccagattcgactacgaccccggcgccgacgagttcttcttcgacagacaccccggcgtgttcgcctacgtgctgaactactacagaaccggcaagctgcactgccccgccgacgtgtgcggccccctgttcgaggaggagctgggcttctggggcatcgacgagaccgacgtggaggcctgctgctggatgacctacagacagcacagagacgccgaggaggccctggacagcttcgaggcccccgaccccgccggcgccgccaacgccgccaacgccgccggcgcccacgacggcggcctggacgacgaggccggcgccggcggcggcggcctggacggcgccggcggcgagctgaagagactgtgcttccaggacgccggcggcggcgccggcggcccccccggcggcgccggcggcgccggcggcacctggtggagaagatggcagcccagagtgtgggccctgttcgaggacccctacagcagcagagccgccagatacgtggccttcgccagcctgttcttcatcctgatcagcatcaccaccttctgcctggagacccacgagggcttcatccacatcagcaacaagaccgtgacccaggccagccccatccccggcgccccccccgagaacatcaccaacgtggaggtggagaccgagcccttcctgacctacgtggagggcgtgtgcgtggtgtggttcaccttcgagttcctgatgagaatcaccttctgccccgacaaggtggagttcctgaagagcagcctgaacatcatcgactgcgtggccatcctgcccttctacctggaggtgggcctgagcggcctgagcagcaaggccgccaaggacgtgctgggcttcctgagagtggtgagattcgtgagaatcctgagaatcttcaagctgaccagacacttcgtgggcctgagagtgctgggccacaccctgagagccagcaccaacgagttcctgctgctgatcatcttcctggccctgggcgtgctgatcttcgccaccatgatctactacgccgagagaatcggcgccgaccccgacgacatcctgggcagcaaccacacctacttcaagaacatccccatcggcttctggtgggccgtggtgaccatgaccaccctgggctacggcgacatgtaccccaagacctggagcggcatgctggtgggcgccctgtgcgccctggccggcgtgctgaccatcgccatgcccgtgcccgtgatcgtgaacaacttcggcatgtactacagcctggccatggccaagcagaagctgcccaagaagaagaacaagcacatccccagacccccccagcccggcagccccaactactgcaagcccgacccccccccccccccccccccccacccccaccacggcagcggcggcatcagcccccccccccccatcaccccccccagcatgggcgtgaccgtggccggcgcctaccccgccggcccccacacccaccccggcctgctgagaggcggcgccggcggcctgggcatcatgggcctgccccccctgcccgcccccggcgagccctgccccctggcccaggaggaggtgatcgagatcaacagagccgaccccagacccaacggcgaccccgccgccgccgccctggcccacgaggactgccccgccatcgaccagcccgccatgagccccgaggacaagagccccatcacccccggcagcagaggcagatacagcagagacagagcctgcttcctgctgaccgactacgcccccagccccgacggcagcatcagaaaggccctggtgaccgcctag

SEQ ID NO: 94193 - DNA, 468 bp, synthetic construct
  misc_feature 1..468: note = Description of Artificial Sequence: Synthetic coding sequence
  source 1..468: mol_type = other DNA
atgggcatcagacagcagctgagactgcccaccagaaccgcccagcccctgaccagcctgccctgccccagaaagaccagagcccccagcagactggaggccgtggccgccatcgccggcaccgagcccgccagcagcagccccaccatgcccctgcccctgatggcccccagcgagaagctgctgagcccccccgagaccagcagagacttcagaagccccccccccctgccccccagactgagagagatcccccagccccagcagcacagaggccccgagagaggcgtgcccgcccccagagccccctgccaccccccctggctgagccccggcagaccccccagaagccccgaccccgccctgcaccccctggccctgcccagccccctgtggggcgacagcggcgtgaccggcaagaaggtgaagggcgccggcggcggcggctggggcaagggcttcttctag

SEQ ID NO: 94194 - DNA, 1629 bp, synthetic construct
  misc_feature 1..1629: note = Description of Artificial Sequence: Synthetic coding sequence
  source 1..1629: mol_type = other DNA
atgacctacagacagcacagagacgccgaggaggccctggacagcttcgaggcccccgaccccgccggcgccgccaacgccgccaacgccgccggcgcccacgacggcggcctggacgacgaggccggcgccggcggcggcggcctggacggcgccggcggcgagctgaagagactgtgcttccaggacgccggcggcggcgccggcggcccccccggcggcgccggcggcgccggcggcacctggtggagaagatggcagcccagagtgtgggccctgttcgaggacccctacagcagcagagccgccagatacgtggccttcgccagcctgttcttcatcctgatcagcatcaccaccttctgcctggagacccacgagggcttcatccacatcagcaacaagaccgtgacccaggccagccccatccccggcgccccccccgagaacatcaccaacgtggaggtggagaccgagcccttcctgacctacgtggagggcgtgtgcgtggtgtggttcaccttcgagttcctgatgagaatcaccttctgccccgacaaggtggagttcctgaagagcagcctgaacatcatcgactgcgtggccatcctgcccttctacctggaggtgggcctgagcggcctgagcagcaaggccgccaaggacgtgctgggcttcctgagagtggtgagattcgtgagaatcctgagaatcttcaagctgaccagacacttcgtgggcctgagagtgctgggccacaccctgagagccagcaccaacgagttcctgctgctgatcatcttcctggccctgggcgtgctgatcttcgccaccatgatctactacgccgagagaatcggcgccgaccccgacgacatcctgggcagcaaccacacctacttcaagaacatccccatcggcttctggtgggccgtggtgaccatgaccaccctgggctacggcgacatgtaccccaagacctggagcggcatgctggtgggcgccctgtgcgccctggccggcgtgctgaccatcgccatgcccgtgcccgtgatcgtgaacaacttcggcatgtactacagcctggccatggccaagcagaagctgcccaagaagaagaacaagcacatccccagacccccccagcccggcagccccaactactgcaagcccgacccccccccccccccccccccccacccccaccacggcagcggcggcatcagcccccccccccccatcaccccccccagcatgggcgtgaccgtggccggcgcctaccccgccggcccccacacccaccccggcctgctgagaggcggcgccggcggcctgggcatcatgggcctgccccccctgcccgcccccggcgagccctgccccctggcccaggaggaggtgatcgagatcaacagagccgaccccagacccaacggcgaccccgccgccgccgccctggcccacgaggactgccccgccatcgaccagcccgccatgagccccgaggacaagagccccatcacccccggcagcagaggcagatacagcagagacagagcctgcttcctgctgaccgactacgcccccagccccgacggcagcatcagaaaggccctggtgaccgcctag

SEQ ID NO: 94195 - DNA, 2274 bp, synthetic construct
  misc_feature 1..2274: note = Description of Artificial Sequence: Synthetic coding sequence
  source 1..2274: mol_type = other DNA
atgctgagcagcgtgtgcgtgagcagcttcagaggcagacagggcgccagcaagcagcagcccgccccccccccccagccccccgagagccccccccccccccccctgcccccccagcagcagcagcccgcccagcccggccccgccgccagccccgccggcccccccgcccccagaggccccggcgacagaagagccgagccctgccccggcctgcccgccgccgccatgggcagacacggcggcggcggcggcgacagcggcaagatcgtgatcaacgtgggcggcgtgagacacgagacctacagaagcaccctgagaaccctgcccggcaccagactggccggcctgaccgagcccgaggccgccgccagattcgactacgaccccggcgccgacgagttcttcttcgacagacaccccggcgtgttcgcctacgtgctgaactactacagaaccggcaagctgcactgccccgccgacgtgtgcggccccctgttcgaggaggagctgggcttctggggcatcgacgagaccgacgtggaggcctgctgctggatgacctacagacagcacagagacgccgaggaggccctggacagcttcgaggcccccgaccccgccggcgccgccaacgccgccaacgccgccggcgcccacgacggcggcctggacgacgaggccggcgccggcggcggcggcctggacggcgccggcggcgagctgaagagactgtgcttccaggacgccggcggcggcgccggcggcccccccggcggcgccggcggcgccggcggcacctggtggagaagatggcagcccagagtgtgggccctgttcgaggacccctacagcagcagagccgccagatacgtggccttcgccagcctgttcttcatcctgatcagcatcaccaccttctgcctggagacccacgagggcttcatccacatcagcaacaagaccgtgacccaggccagccccatccccggcgccccccccgagaacatcaccaacgtggaggtggagaccgagcccttcctgacctacgtggagggcgtgtgcgtggtgtggttcaccttcgagttcctgatgagaatcaccttctgccccgacaaggtggagttcctgaagagcagcctgaacatcatcgactgcgtggccatcctgcccttctacctggaggtgggcctgagcggcctgagcagcaaggccgccaaggacgtgctgggcttcctgagagtggtgagattcgtgagaatcctgagaatcttcaagctgaccagacacttcgtgggcctgagagtgctgggccacaccctgagagccagcaccaacgagttcctgctgctgatcatcttcctggccctgggcgtgctgatcttcgccaccatgatctactacgccgagagaatcggcgccgaccccgacgacatcctgggcagcaaccacacctacttcaagaacatccccatcggcttctggtgggccgtggtgaccatgaccaccctgggctacggcgacatgtaccccaagacctggagcggcatgctggtgggcgccctgtgcgccctggccggcgtgctgaccatcgccatgcccgtgcccgtgatcgtgaacaacttcggcatgtactacagcctggccatggccaagcagaagctgcccaagaagaagaacaagcacatccccagacccccccagcccggcagccccaactactgcaagcccgacccccccccccccccccccccccacccccaccacggcagcggcggcatcagcccccccccccccatcaccccccccagcatgggcgtgaccgtggccggcgcctaccccgccggcccccacacccaccccggcctgctgagaggcggcgccggcggcctgggcatcatgggcctgccccccctgcccgcccccggcgagccctgccccctggcccaggaggaggtgatcgagatcaacagagccgaccccagacccaacggcgaccccgccgccgccgccctggcccacgaggactgccccgccatcgaccagcccgccatgagccccgaggacaagagccccatcacccccggcagcagaggcagatacagcagagacagagcctgcttcctgctgaccgactacgcccccagccccgacggcagcatcagaaaggccaccggcgccccccccctgcccccccaggactggagaaagcccggcccccccagcttcctgcccgacctgaacgccaacgccgccgcctggatcagcccctag

SEQ ID NO: 94196 - DNA, 1908 bp, synthetic construct
  misc_feature 1..1908: note = Description of Artificial Sequence: Synthetic coding sequence
  source 1..1908: mol_type = other DNA
atgatcagcagcgtgtgcgtgagcagctacagaggcagaaagagcggcaacaagccccccagcaagacctgcctgaaggaggagatggccaagggcgaggccagcgagaagatcatcatcaacgtgggcggcaccagacacgagacctacagaagcaccctgagaaccctgcccggcaccagactggcctggctggccgaccccgacggcggcggcagacccgagaccgacggcggcggcgtgggcagcagcggcagcagcggcggcggcggctgcgagttcttcttcgacagacaccccggcgtgttcgcctacgtgctgaactactacagaaccggcaagctgcactgccccgccgacgtgtgcggccccctgttcgaggaggagctgaccttctggggcatcgacgagaccgacgtggagccctgctgctggatgacctacagacagcacagagacgccgaggaggccctggacatcttcgagagccccgacggcggcggcagcggcgccggccccagcgacgaggccggcgacgacgagagagagctggccctgcagagactgggcccccacgagggcggcgccggccacggcgccggcagcggcggctgcagaggctggcagcccagaatgtgggccctgttcgaggacccctacagcagcagagccgccagagtggtggccttcgccagcctgttcttcatcctggtgagcatcaccaccttctgcctggagacccacgaggccttcaacatcgacagaaacgtgaccgagatcctgagagtgggcaacatcaccagcgtgcacttcagaagagaggtggagaccgagcccatcctgacctacatcgagggcgtgtgcgtgctgtggttcaccctggagttcctggtgagaatcgtgtgctgccccgacaccctggacttcgtgaagaacctgctgaacatcatcgacttcgtggccatcctgcccttctacctggaggtgggcctgagcggcctgagcagcaaggccgccagagacgtgctgggcttcctgagagtggtgagattcgtgagaatcctgagaatcttcaagctgaccagacacttcgtgggcctgagagtgctgggccacaccctgagagccagcaccaacgagttcctgctgctgatcatcttcctggccctgggcgtgctgatcttcgccaccatgatctactacgccgagagaatcggcgccagacccagcgaccccagaggcaacgaccacaccgacttcaagaacatccccatcggcttctggtgggccgtggtgaccatgaccaccctgggctacggcgacatgtaccccaagacctggagcggcatgctggtgggcgccctgtgcgccctggccggcgtgctgaccatcgccatgcccgtgcccgtgatcgtgaacaacttcggcatgtactacagcctggccatggccaagcagaagctgcccaagaagagaaagaagcacgtgcccagacccgcccagctggagagccccatgtactgcaagagcgaggagaccagccccagagacagcacctgcagcgacaccagcccccccgccagagaggagggcatgatcgagagaaagagagccgacagcaagcagaacggcgacgccaacgccgtgctgagcgacgaggagggcgccggcctgacccagcccctggccagcagccccacccccgaggagagaagagccctgagaagaagcaccaccagagacagaaacaagaaggccgccgcctgcttcctgctgagcaccggcgactacgcctgcgccgacggcagcgtgagaaagggcaccttcgtgctgagagacctgcccctgcagcacagccccgaggccgcctgcccccccaccgccggcaccctgttcctgccccactag

SEQ ID NO: 94197 - DNA, 1881 bp, synthetic construct
  misc_feature 1..1881: note = Description of Artificial Sequence: Synthetic coding sequence
  source 1..1881: mol_type = other DNA
atgatcagcagcgtgtgcgtgagcagctacagaggcagaaagagcggcaacaagccccccagcaagacctgcctgaaggaggagatggccaagggcgaggccagcgagaagatcatcatcaacgtgggcggcaccagacacgagacctacagaagcaccctgagaaccctgcccggcaccagactggcctggctggccgaccccgacggcggcggcagacccgagaccgacggcggcggcgtgggcagcagcggcagcagcggcggcggcggctgcgagttcttcttcgacagacaccccggcgtgttcgcctacgtgctgaactactacagaaccggcaagctgcactgccccgccgacgtgtgcggccccctgttcgaggaggagctgaccttctggggcatcgacgagaccgacgtggagccctgctgctggatgacctacagacagcacagagacgccgaggaggccctggacatcttcgagagccccgacggcggcggcagcggcgccggccccagcgacgaggccggcgacgacgagagagagctggccctgcagagactgggcccccacgagggcggcgccggccacggcgccggcagcggcggctgcagaggctggcagcccagaatgtgggccctgttcgaggacccctacagcagcagagccgccagagtggtggccttcgccagcctgttcttcatcctggtgagcatcaccaccttctgcctggagacccacgaggccttcaacatcgacagaaacgtgaccgagatcctgagagtgggcaacatcaccagcgtgcacttcagaagagaggtggagaccgagcccatcctgacctacatcgagggcgtgtgcgtgctgtggttcaccctggagttcctggtgagaatcgtgtgctgccccgacaccctggacttcgtgaagaacctgctgaacatcatcgacttcgtggccatcctgcccttctacctggaggtgggcctgagcggcctgagcagcaaggccgccagagacgtgctgggcttcctgagagtggtgagattcgtgagaatcctgagaatcttcaagctgaccagacacttcgtgggcctgagagtgctgggccacaccctgagagccagcaccaacgagttcctgctgctgatcatcttcctggccctgggcgtgctgatcttcgccaccatgatctactacgccgagagaatcggcgccagacccagcgaccccagaggcaacgaccacaccgacttcaagaacatccccatcggcttctggtgggccgtggtgaccatgaccaccctgggctacggcgacatgtaccccaagacctggagcggcatgctggtgggcgccctgtgcgccctggccggcgtgctgaccatcgccatgcccgtgcccgtgatcgtgaacaacttcggcatgtactacagcctggccatggccaagcagaagctgcccaagaagagaaagaagcacgtgcccagacccgcccagctggagagccccatgtactgcaagagcgaggagaccagccccagagacagcacctgcagcgacaccagcccccccgccagagaggagggcatgatcgagagaaagagagccgacagcaagcagaacggcgacgccaacgccgtgctgagcgacgaggagggcgccggcctgacccagcccctggccagcagccccacccccgaggagagaagagccctgagaagaagcaccaccagagacagaaacaagaaggccgccgcctgcttcctgctgagcaccggcgactacgcctgcgccgacggcagcgtgagaaaggagacctgccaggacgccctgagcagcaactacgcccaggccgaggtgctgaccctgagctag

SEQ ID NO: 94198 - DNA, 1908 bp, synthetic construct; identical to SEQ ID NO: 94196
  misc_feature 1..1908: note = Description of Artificial Sequence: Synthetic coding sequence
  source 1..1908: mol_type = other DNA

SEQ ID NO: 94199 - DNA, 1485 bp, synthetic construct
  misc_feature 1..1485: note = Description of Artificial Sequence: Synthetic coding sequence
  source 1..1485: mol_type = other DNA
atggacggcagcggcgagagaagcctgcccgagcccggcagccagagcagcgccgccagcgacgacatcgagatcgtggtgaacgtgggcggcgtgagacaggtgctgtacggcgacctgctgagccagtaccccgagaccagactggccgagctgatcaactgcctggccggcggctacgacaccatcttcagcctgtgcgacgactacgaccccggcaagagagagttctacttcgacagagaccccgacgccttcaagtgcgtgatcgaggtgtactacttcggcgaggtgcacatgaagaagggcatctgccccatctgcttcaagaacgagatggacttctggaaggtggacctgaagttcctggacgactgctgcaagagccacctgagcgagaagagagaggagctggaggagatcgccagaagagtgcagctgatcctggacgacctgggcgtggacgccgccgagggcagatggagaagatgccagaagtgcgtgtggaagttcctggagaagcccgagagcagctgccccgccagagtggtggccgtgctgagcttcctgctgatcctggtgagcagcgtggtgatgtgcatgggcaccatccccgagctgcaggtgctggacgccgagggcaacagagtggagcaccccaccctggagaacgtggagaccgcctgcatcggctggttcaccctggagtacctgctgagactgttcagcagccccaacaagctgcacttcgccctgagcttcatgaacatcgtggacgtgctggccatcctgcccttctacgtgagcctgaccctgacccacctgggcgccagaatgatggagctgaccaacgtgcagcaggccgtgcaggccctgagaatcatgagaatcgccagaatcttcaagctggccagacacagcagcggcctgcagaccctgacctacgccctgaagagaagcttcaaggagctgggcctgctgctgatgtacctggccgtgggcatcttcgtgttcagcgccctgggctacaccatggagcagagccaccccgagaccctgttcaagagcatcccccagagcttctggtgggccatcatcaccatgaccaccgtgggctacggcgacatctaccccaagaccaccctgggcaagctgaacgccgccatcagcttcctgtgcggcgtgatcgccatcgccctgcccatccaccccatcatcaacaacttcgtgagatactacaacaagcagagagtgctggagaccgccgccaagcacgagctggagctgatggagctgaacagcagcagcggcggcgagggcaagaccggcggcagcagaagcgacctggacaacctgccccccgagcccgccggcaaggaggcccccagctgcagcagcagactgaagctgagccacagcgacaccttcatccccctgctgaccgaggagaagcaccacagaaccagactgcagagctgcaagtag

SEQ ID NO: 94200 - DNA, 1542 bp, synthetic construct
  misc_feature 1..1542: note = Description of Artificial Sequence: Synthetic coding sequence
  source 1..1542: mol_type = other DNA
atgaccctgctgcccggcgacaacagcgactacgactacagcgccctgagctgcaccagcgacgccagcttccaccccgccttcctgccccagagacaggccatcaagggcgccttctacagaagagcccagagactgagaccccaggacgagcccagacagggctgccagcccgaggacagaagaagaagaatcatcatcaacgtgggcggcatcaagtacagcctgccctggaccaccctggacgagttccccctgaccagactgggccagctgaaggcctgcaccaacttcgacgacatcctgaacgtgtgcgacgactacgacgtgacctgcaacgagttcttcttcgacagaaaccccggcgccttcggcaccatcctgaccttcctgagagccggcaagctgagactgctgagagagatgtgcgccctgagcttccaggaggagctgctgtactggggcatcgccgaggaccacctggacggctgctgcaagagaagatacctgcagaagatcgaggagttcgccgagatggtggagagagaggaggaggacgacgccctggacagcgagggcagagacagcgagggccccgccgagggcgagggcagactgggcagatgcatgagaagactgagagacatggtggagagaccccacagcggcctgcccggcaaggtgttcgcctgcctgagcgtgctgttcgtgaccgtgaccgccgtgaacctgagcgtgagcaccctgcccagcctgagagaggaggaggagcagggccactgcagccagatgtgccacaacgtgttcatcgtggagagcgtgtgcgtgggctggttcagcctggagttcctgctgagactgatccaggcccccagcaagttcgccttcctgagaagccccctgaccctgatcgacctggtggccatcctgccctactacatcaccctgctggtggacggcgccgccgccggcagaagaaagcccggcgccggcaacagctacctggacaaggtgggcctggtgctgagagtgctgagagccctgagaatcctgtacgtgatgagactggccagacacagcctgggcctgcagaccctgggcctgaccgccagaagatgcaccagagagttcggcctgctgctgctgttcctgtgcgtggccatcgccctgttcgcccccctgctgtacgtgatcgagaacgagatggccgacagccccgagttcaccagcatccccgcctgctactggtgggccgtgatcaccatgaccaccgtgggctacggcgacatggtgcccagaagcacccccggccaggtggtggccctgagcagcatcctgagcggcatcctgctgatggccttccccgtgaccagcatcttccacaccttcagcagaagctacctggagctgaagcaggagcaggagagagtgatgttcagaagagcccagttcctgatcaagaccaagagccagctgagcgtgagccaggacagcgacatcctgttcggcagcgccagcagcgacaccagagacaacaactag

SEQ ID NO: 94201 - DNA, 828 bp, synthetic construct
  misc_feature 1..828: note = Description of Artificial Sequence: Synthetic coding sequence
  source 1..828: mol_type = other DNA
atgaccctgctgcccggcgacaacagcgactacgactacagcgccctgagctgcaccagcgacgccagcttccaccccgccttcctgccccagagacaggccatcaagggcgccttctacagaagagcccagagactgagaccccaggacgagcccagacagggctgccagcccgaggacagaagaagaagaatcatcatcaacgtgggcggcatcaagtacagcctgccctggaccaccctggacgagttccccctgaccagactgggccagctgaaggcctgcaccaacttcgacgacatcctgaacgtgtgcgacgactacgacgtgacctgcaacgagttcttcttcgacagaaaccccggcgccttcggcaccatcctgaccttcctgagagccggcaagctgagactgctgagagagatgtgcgccctgagcttccaggaggagctgctgtactggggcatcgccgaggaccacctggacggctgctgcaagagaagatacctgcagaagatcgaggagttcgccgagatggtggagagagaggaggaggacgacgccctggacagcgagggcagagacagcgagggccccgccgagggcgagggcagactgggcagatgcatgagaagactgagagacatggtggagagaccccacagcggcctgcccggcaaggtgttcgcctgcctgagcgtgctgttcgtgaccgtgaccgccgtgaacctgagcgtgagcaccctgcccagcctgagagaggaggaggagcaggtgagagcccacgcccccagaggcaacgccccccccagaggcaagggcctgtag

SEQ ID NO: 94202 - DNA, 543 bp, synthetic construct
  misc_feature 1..543: note = Description of Artificial Sequence: Synthetic coding sequence
  source 1..543: mol_type = other DNA
atgaccctgctgcccggcgacaacagcgactacgactacagcgccctgagctgcaccagcgacgccagcttccaccccgccttcctgccccagagacaggccatcaagggcgccttctacagaagagcccagagactgagaccccaggacgagcccagacagggctgccagcccgaggacagaagaagaagaatcatcatcaacgtgggcggcatcaagtacagcctgccctggaccaccctggacgagttccccctgaccagactgggccagctgaaggcctgcaccaacttcgacgacatcctgaacgtgtgcgacgactacgacgtgacctgcaacgagttcttcttcgacagaaaccccggcgccttcggcaccatcctgaccttcctgagagccggcaagctgagactgctgagagagatgtgcgccctgagcttccaggaggagctgctgtactggggcatcgccgaggaccacctggacggctgctgcaagagaagatacctgcagaagatcgaggagttcgccgagatggtgtag

SEQ ID NO: 94203 - DNA, 291 bp, synthetic construct
  misc_feature 1..291: note = Description of Artificial Sequence: Synthetic coding sequence
  source 1..291: mol_type = other DNA
atgaccctgctgcccggcgacaacagcgactacgactacagcgccctgagctgcaccagcgacgccagcttccaccccgccttcctgccccagagacaggccatcaagggcgccttctacagaagagcccagagactgagaccccaggacgagcccagacagggctgccagcccgaggacagaagaagaagaatcatcatcaacgtgggcggcatcaagtacagcctgccctggaccaccctggacgagttccccctgaccagactgggccagctgaaggcctgcacctag

SEQ ID NO: 94204 - DNA, 777 bp, synthetic construct
  misc_feature 1..777: note = Description of Artificial Sequence: Synthetic coding sequence
  source 1..777: mol_type = other DNA
atgaccctgctgcccggcgacaacagcgactacgactacagcgccctgagctgcaccagcgacgccagcttccaccccgccttcctgccccagagacaggccatcaagggcgccttctacagaagagcccagagactgagaccccaggacgagcccagacagggctgccagcccgaggacagaagaagaagaatcatcatcaacgtgggcggcatcaagtacagcctgccctggaccaccctggacgagttccccctgaccagactgggccagctgaaggcctgcaccaacttcgacgacatcctgaacgtgtgcgacgactacgacgtgacctgcaacgagttcttcttcgacagaaaccccggcgccttcggcaccatcctgaccttcctgagagccggcaagctgagactgctgagagagatgtgcgccctgagcttccaggaggagctgctgtactggggcatcgccgaggaccacctggacggctgctgcaagagaagatacctgcagaagatcgaggagttcgccgagatggtggagagagaggaggaggacgacgccctggacagcgagggcagagacagcgagggccccgccgagggcgagggcagactgggcagatgcatgagaagactgagagacatggtggagagaccccacagcggcctgcccggcaaggtgttcgcctgcctgagcgtgctgttcgtgaccgtgaccgccgtgaacctgagcgtgagcaccctgcccagcctgagagaggaggaggagcagtag

SEQ ID NO: 94205 - DNA, 147 bp, synthetic construct
  misc_feature 1..147: note = Description of Artificial Sequence: Synthetic coding sequence
  source 1..147: mol_type = other DNA
atgaccctgctgcccggcgacaacagcgactacgactacagcgccctgagctgcaccagcgacgccagcttccaccccgccttcctgccccagagacaggccatcaagggcgccttctacagaagagcccagagactgagaccctag

SEQ ID NO: 94206 - DNA, 1311 bp, synthetic construct
  misc_feature 1..1311: note = Description of Artificial Sequence: Synthetic coding sequence
  source 1..1311: mol_type = other DNA
atgaccttcggcagaagcggcgccgccagcgtggtgctgaacgtgggcggcgccagatacagcctgagcagagagctgctgaaggacttccccctgagaagagtgagcagactgcacggctgcagaagcgagagagacgtgctggaggtgtgcgacgactacgacagagagagaaacgagtacttcttcgacagacacagcgaggccttcggcttcatcctgctgtacgtgagaggccacggcaagctgagattcgcccccagaatgtgcgagctgagcttctacaacgagatgatctactggggcctggagggcgcccacctggagtactgctgccagagaagactggacgacagaatgagcgacacctacaccttctacagcgccgacgagcccggcgtgctgggcagagacgaggccagacccggcggcgccgaggccgcccccagcagaagatggctggagagaatgagaagaaccttcgaggagcccaccagcagcctggccgcccagatcctggccagcgtgagcgtggtgttcgtgatcgtgagcatggtggtgctgtgcgccagcaccctgcccgactggagaaacgccgccgccgacaacagaagcctggacgacagaagcagatacagcgccggccccggcagagagcccagcggcatcatcgaggccatctgcatcggctggttcaccgccgagtgcatcgtgagattcatcgtgagcaagaacaagtgcgagttcgtgaagagacccctgaacatcatcgacctgctggccatcaccccctactacatcagcgtgctgatgaccgtgttcaccggcgagaacagccagctgcagagagccggcgtgaccctgagagtgctgagaatgatgagaatcttctgggtgatcaagctggccagacacttcatcggcctgcagaccctgggcctgaccctgaagagatgctacagagagatggtgatgctgctggtgttcatctgcgtggccatggccatcttcagcgccctgagccagctgctggagcacggcctggacctggagaccagcaacaaggacttcaccagcatccccgccgcctgctggtgggtgatcatcagcatgaccaccgtgggctacggcgacatgtaccccatcaccgtgcccggcagaatcctgggcggcgtgtgcgtggtgagcggcatcgtgctgctggccctgcccatcaccttcatctaccacagcttcgtgcagtgctaccacgagctgaagttcagaagcgccagatacagcagaagcctgagcaccgagttcctgaactag

SEQ ID NO: 94207 - DNA, 1278 bp, synthetic construct
  misc_feature 1..1278: note = Description of Artificial Sequence: Synthetic coding sequence
  source 1..1278: mol_type = other DNA
atgaccttcggcagaagcggcgccgccagcgtggtgctgaacgtgggcggcgccagatacagcctgagcagagagctgctgaaggacttccccctgagaagagtgagcagactgcacggctgcagaagcgagagagacgtgctggaggtgtgcgacgactacgacagagagagaaacgagtacttcttcgacagacacagcgaggccttcggcttcatcctgctgtacgtgagaggccacggcaagctgagattcgcccccagaatgtgcgagctgagcttctacaacgagatgatctactggggcctggagggcgcccacctggagtactgctgccagagaagactggacgacagaatgagcgacacctacaccttctacagcgccgacgagcccggcgtgctgggcagagacgaggccagacccggcggcgccgaggccgcccccagcagaagatggctggagagaatgagaagaaccttcgaggagcccaccagcagcctggccgcccagatcctggccagcgtgagcgtggtgttcgtgatcgtgagcatggtggtgctgtgcgccagcaccctgcccgactggagaaacgccgccgccgacaacagaagcctggacgacagaagcagaatcatcgaggccatctgcatcggctggttcaccgccgagtgcatcgtgagattcatcgtgagcaagaacaagtgcgagttcgtgaagagacccctgaacatcatcgacctgctggccatcaccccctactacatcagcgtgctgatgaccgtgttcaccggcgagaacagccagctgcagagagccggcgtgaccctgagagtgctgagaatgatgagaatcttctgggtgatcaagctggccagacacttcatcggcctgcagaccctgggcctgaccctgaagagatgctacagagagatggtgatgctgctggtgttcatctgcgtggccatggccatcttcagcgccctgagccagctgctggagcacggcctggacctggagaccagcaacaaggacttcaccagcatccccgccgcctgctggtgggtgatcatcagcatgaccaccgtgggctacggcgacatgtaccccatcaccgtgcccggcagaatcctgggcggcgtgtgcgtggtgagcggcatcgtgctgctggccctgcccatcaccttcatctaccacagcttcgtgcagtgctaccacgagctgaagttcagaagcgccagatacagcagaagcctgagcaccgagttcctgaactag

SEQ ID NO: 94208 - DNA, 1560 bp, synthetic construct
  misc_feature 1..1560: note = Description of Artificial Sequence: Synthetic coding sequence
  source 1..1560: mol_type = other DNA
atgcccatgcccagcagagacggcggcctgcaccccagacaccaccactacggcagccacagcccctggagccagctgctgagcagccccatggagacccccagcatcaagggcctgtactacagaagagtgagaaaggtgggcgccctggacgccagccccgtggacctgaagaaggagatcctgatcaacgtgggcggcagaagatacctgctgccctggagcaccctggacagattccccctgagcagactgagcaagctgagactgtgcagaagctacgaggagatcgtgcagctgtgcgacgactacgacgaggacagccaggagttcttcttcgacagaagccccagcgccttcggcgtgatcgtgagcttcctggccgccggcaagctggtgctgctgcaggagatgtgcgccctgagcttccaggaggagctggcctactggggcatcgaggaggcccacctggagagatgctgcctgagaaagctgctgagaaagctggaggagctggaggagctggccaagctgcacagagaggacgtgctgagacagcagagagagaccagaagacccgccagccacagcagcagatggggcctgtgcatgaacagactgagagagatggtggagaacccccagagcggcctgcccggcaaggtgttcgcctgcctgagcatcctgttcgtggccaccaccgccgtgagcctgtgcgtgagcaccatgcccgacctgagagccgaggaggaccagggcgagtgcagcagaaagtgctactacatcttcatcgtggagaccatctgcgtggcctggttcagcctggagttctgcctgagattcgtgcaggcccaggacaagtgccagttcttccagggccccctgaacatcatcgacatcctggccatcagcccctactacgtgagcctggccgtgagcgaggagccccccgaggacggcgagagacccagcggcagcagctacctggagaaggtgggcctggtgctgagagtgctgagagccctgagaatcctgtacgtgatgagactggccagacacagcctgggcctgcagaccctgggcctgaccgtgagaagatgcaccagagagttcggcctgctgctgctgttcctggccgtggccatcaccctgttcagccccctggtgtacgtggccgagaaggagagcggcagagtgctggagttcaccagcatccccgccagctactggtgggccatcatcagcatgaccaccgtgggctacggcgacatggtgcccagaagcgtgcccggccagatggtggccctgagcagcatcctgagcggcatcctgatcatggccttccccgccaccagcatcttccacaccttcagccacagctacctggagctgaagaaggagcaggagcagctgcaggccagactgagacacctgcagaacaccggccccgccagcgagtgcgagctgctggacccccacgtggccagcgagcacgagctgatgaacgacgtgaacgacctgatcctggagggccccgccctgcccatcatgcacatgtag

SEQ ID NO: 94209 - DNA, 2970 bp, synthetic construct
  misc_feature 1..2970: note = Description of Artificial Sequence: Synthetic coding sequence
  source 1..2970: mol_type = other DNA
atgaccatggccggcggcagaagaggcctggtggccccccagaacaccttcctggagaacatcgtgagaagaagcaacgacaccaacttcgtgctgggcaacgcccagatcgtggactggcccatcgtgtacagcaacgacggcttctgcaagctgagcggctaccacagagccgaggtgatgcagaagagcagcacctgcagcttcatgtacggcgagctgaccgacaaggacaccatcgagaaggtgagacagaccttcgagaactacgagatgaacagcttcgagatcctgatgtacaagaagaacagaacccccgtgtggttcttcgtgaagatcgcccccatcagaaacgagcaggacaaggtggtgctgttcctgtgcaccttcagcgacatcaccgccttcaagcagcccatcgaggacgacagctgcaagggctggggcaagttcgccagactgaccagagccctgaccagcagcagaggcgtgctgcagcagctggcccccagcgtgcagaagggcgagaacgtgcacaagcacagcagactggccgaggtgctgcagctgggcagcgacatcctgccccagtacaagcaggaggcccccaagacccccccccacatcatcctgcactactgcgtgttcaagaccacctgggactggatcatcctgatcctgaccttctacaccgccatcctggtgccctacaacgtgagcttcaagaccagacagaacaacgtggcctggctggtggtggacagcatcgtggacgtgatcttcctggtggacatcgtgctgaacttccacaccaccttcgtgggccccgccggcgaggtgatcagcgaccccaagctgatcagaatgaactacctgaagacctggttcgtgatcgacctgctgagctgcctgccctacgacgtgatcaacgccttcgagaacgtggacgaggtgagcgccttcatgggcgaccccggcaagatcggcttcgccgaccagatccccccccccctggagggcagagagagccagggcatcagcagcctgttcagcagcctgaaggtggtgagactgctgagactgggcagagtggccagaaagctggaccactacatcgagtacggcgccgccgtgctggtgctgctggtgtgcgtgttcggcctggccgcccactggatggcctgcatctggtacagcatcggcgactacgagatcttcgacgaggacaccaagaccatcagaaacaacagctggctgtaccagctggccatggacatcggcaccccctaccagttcaacggcagcggcagcggcaagtgggagggcggccccagcaagaacagcgtgtacatcagcagcctgtacttcaccatgaccagcctgaccagcgtgggcttcggcaacatcgcccccagcaccgacatcgagaagatcttcgccgtggccatcatgatgatcggcagcctgctgtacgccaccatcttcggcaacgtgaccaccatcttccagcagatgtacgccaacaccaacagataccacgagatgctgaacagcgtgagagacttcctgaagctgtaccaggtgcccaagggcctgagcgagagagtgatggactacatcgtgagcacctggagcatgagcagaggcatcgacaccgagaaggtgctgcagatctgccccaaggacatgagagccgacatctgcgtgcacctgaacagaaaggtgttcaaggagcaccccgccttcagactggccagcgacggctgcctgagagccctggccatggagttccagaccgtgcactgcgcccccggcgacctgatctaccacgccggcgagagcgtggacagcctgtgcttcgtggtgagcggcagcctggaggtgatccaggacgacgaggtggtggccatcctgggcaagggcgacgtgttcggcgacgtgttctggaaggaggccaccctggcccagagctgcgccaacgtgagagccctgacctactgcgacctgcacgtgatcaagagagacgccctgcagaaggtgctggagttctacaccgccttcagccacagcttcagcagaaacctgatcctgacctacaacctgagaaagagaatcgtgttcagaaagatcagcgacgtgaagagagaggaggaggagagaatgaagagaaagaacgaggcccccctgatcctgccccccgaccaccccgtgagaagactgttccagagattcagacagcagaaggaggccagactggccgccgagagaggcggcagagacctggacgacctggacgtggagaagggcaacgtgctgaccgagcacgccagcgccaaccacagcctggtgaaggccagcgtggtgaccgtgagagagagccccgccacccccgtgagcttccaggccgccagcaccagcggcgtgcccgaccacgccaagctgcaggcccccggcagcgagtgcctgggccccaagggcggcggcggcgactgcgccaagagaaagagctgggccagattcaaggacgcctgcggcaagagcgaggactggaacaaggtgagcaaggccgagagcatggagaccctgcccgagagaaccaaggccagcggcgaggccaccctgaagaagaccgacagctgcgacagcggcatcaccaagagcgacctgagactggacaacgtgggcgaggccagaagcccccaggacagaagccccatcctggccgaggtgaagcacagcttctaccccatccccgagcagaccctgcaggccaccgtgctggaggtgagacacgagctgaaggaggacatcaaggccctgaacgccaagatgaccaacatcgagaagcagctgagcgagatcctgagaatcctgaccagcagaagaagcagccagagcccccaggagctgttcgagatcagcagaccccagagccccgagagcgagagagacatcttcggcgccagctag

SEQ ID NO: 94210 - DNA, 2889 bp, synthetic construct
  misc_feature 1..2889: note = Description of Artificial Sequence: Synthetic coding sequence
  source 1..2889: mol_type = other DNA
atgaccatggccggcggcagaagaggcctggtggccccccagaacaccttcctggagaacatcgtgagaagaagcaacgacaccaacttcgtgctgggcaacgcccagatcgtggactggcccatcgtgtacagcaacgacggcttctgcaagctgagcggctaccacagagccgaggtgatgcagaagagcagcacctgcagcttcatgtacggcgagctgaccgacaaggacaccatcgagaaggtgagacagaccttcgagaactacgagatgaacagcttcgagatcctgatgtacaagaagaacagaacccccgtgtggttcttcgtgaagatcgcccccatcagaaacgagcaggacaaggtggtgctgttcctgtgcaccttcagcgacatcaccgccttcaagcagcccatcgaggacgacagctgcaagggctggggcaagttcgccagactgaccagagccctgaccagcagcagaggcgtgctgcagcagctggcccccagcgtgcagaagggcgagaacgtgcacaagcacagcagactggccgaggtgctgcagctgggcagcgacatcctgccccagtacaagcaggaggcccccaagacccccccccacatcatcctgcactactgcgtgttcaagaccacctgggactggatcatcctgatcctgaccttctacaccgccatcctggtgccctacaacgtgagcttcaagaccagacagaacaacgtggcctggctggtggtggacagcatcgtggacgtgatcttcctggtggacatcgtgctgaacttccacaccaccttcgtgggccccgccggcgaggtgatcagcgaccccaagctgatcagaatgaactacctgaagacctggttcgtgatcgacctgctgagctgcctgccctacgacgtgatcaacgccttcgagaacgtggacgagggcatcagcagcctgttcagcagcctgaaggtggtgagactgctgagactgggcagagtggccagaaagctggaccactacatcgagtacggcgccgccgtgctggtgctgctggtgtgcgtgttcggcctggccgcccactggatggcctgcatctggtacagcatcggcgactacgagatcttcgacgaggacaccaagaccatcagaaacaacagctggctgtaccagctggccatggacatcggcaccccctaccagttcaacggcagcggcagcggcaagtgggagggcggccccagcaagaacagcgtgtacatcagcagcctgtacttcaccatgaccagcctgaccagcgtgggcttcggcaacatcgcccccagcaccgacatcgagaagatcttcgccgtggccatcatgatgatcggcagcctgctgtacgccaccatcttcggcaacgtgaccaccatcttccagcagatgtacgccaacaccaacagataccacgagatgctgaacagcgtgagagacttcctgaagctgtaccaggtgcccaagggcctgagcgagagagtgatggactacatcgtgagcacctggagcatgagcagaggcatcgacaccgagaaggtgctgcagatctgccccaaggacatgagagccgacatctgcgtgcacctgaacagaaaggtgttcaaggagcaccccgccttcagactggccagcgacggctgcctgagagccctggccatggagttccagaccgtgcactgcgcccccggcgacctgatctaccacgccggcgagagcgtggacagcctgtgcttcgtggtgagcggcagcctggaggtgatccaggacgacgaggtggtggccatcctgggcaagggcgacgtgttcggcgacgtgttctggaaggaggccaccctggcccagagctgcgccaacgtgagagccctgacctactgcgacctgcacgtgatcaagagagacgccctgcagaaggtgctggagttctacaccgccttcagccacagcttcagcagaaacctgatcctgacctacaacctgagaaagagaatcgtgttcagaaagatcagcgacgtgaagagagaggaggaggagagaatgaagagaaagaacgaggcccccctgatcctgccccccgaccaccccgtgagaagactgttccagagattcagacagcagaaggaggccagactggccgccgagagaggcggcagagacctggacgacctggacgtggagaagggcaacgtgctgaccgagcacgccagcgccaaccacagcctggtgaaggccagcgtggtgaccgtgagagagagccccgccacccccgtgagcttccaggccgccagcaccagcggcgtgcccgaccacgccaagctgcaggcccccggcagcgagtgcctgggccccaagggcggcggcggcgactgcgccaagagaaagagctgggccagattcaaggacgcctgcggcaagagcgaggactggaacaaggtgagcaaggccgagagcatggagaccctgcccgagagaaccaaggccagcggcgaggccaccctgaagaagaccgacagctgcgacagcggcatcaccaagagcgacctgagactggacaacgtgggcgaggccagaagcccccaggacagaagccccatcctggccgaggtgaagcacagcttctaccccatccccgagcagaccctgcaggccaccgtgctggaggtgagacacgagctgaaggaggacatcaaggccctgaacgccaagatgaccaacatcgagaagcagctgagcgagatcctgagaatcctgaccagcagaagaagcagccagagcccccaggagctgttcgagatcagcagaccccagagccccgagagcgagagagacatcttcggcgccagctag

SEQ ID NO: 94211 - DNA, 3480 bp, synthetic construct
  misc_feature 1..3480: note = Description of Artificial Sequence: Synthetic coding sequence
  source 1..3480: mol_type = other DNA
atgcccgtgagaagaggccacgtggccccccagaacaccttcctggacaccatcatcagaaagttcgagggccagagcagaaagttcatcatcgccaacgccagagtggagaactgcgccgtgatctactgcaacgacggcttctgcgagctgtgcggctacagcagagccgaggtgatgcagagaccctgcacctgcgacttcctgcacggccccagaacccagagaagagccgccgcccagatcgcccaggccctgctgggcgccgaggagagaaaggtggagatcgccttctacagaaaggacggcagctgcttcctgtgcctggtggacgtggtgcccgtgaagaacgaggacggcgccgtgatcatgttcatcctgaacttcgaggtggtgatggagaaggacatggtgggcagccccgcccacgacaccaaccacagaggcccccccaccagctggctggcccccggcagagccaagaccttcagactgaagctgcccgccctgctggccctgaccgccagagagagcagcgtgagaagcggcggcgccggcggcgccggcgcccccggcgccgtggtggtggacgtggacctgacccccgccgcccccagcagcgagagcctggccctggacgaggtgaccgccatggacaaccacgtggccggcctgggccccgccgaggagagaagagccctggtgggccccggcagcccccccagaagcgcccccggccagctgcccagccccagagcccacagcctgaaccccgacgccagcggcagcagctgcagcctggccagaaccagaagcagagagagctgcgccagcgtgagaagagccagcagcgccgacgacatcgaggccatgagagccggcgtgctgccccccccccccagacacgccagcaccggcgccatgcaccccctgagaagcggcctgctgaacagcaccagcgacagcgacctggtgagatacagaaccatcagcaagatcccccagatcaccctgaacttcgtggacctgaagggcgaccccttcctggccagccccaccagcgacagagagatcatcgcccccaagatcaaggagagaacccacaacgtgaccgagaaggtgacccaggtgctgagcctgggcgccgacgtgctgcccgagtacaagctgcaggcccccagaatccacagatggaccatcctgcactacagccccttcaaggccgtgtgggactggctgatcctgctgctggtgatctacaccgccgtgttcaccccctacagcgccgccttcctgctgaaggagaccgaggagggcccccccgccaccgagtgcggctacgcctgccagcccctggccgtggtggacctgatcgtggacatcatgttcatcgtggacatcctgatcaacttcagaaccacctacgtgaacgccaacgaggaggtggtgagccaccccggcagaatcgccgtgcactacttcaagggctggttcctgatcgacatggtggccgccatccccttcgacctgctgatcttcggcagcggcagcgaggagctgatcggcctgctgaagaccgccagactgctgagactggtgagagtggccagaaagctggacagatacagcgagtacggcgccgccgtgctgttcctgctgatgtgcaccttcgccctgatcgcccactggctggcctgcatctggtacgccatcggcaacatggagcagccccacatggacagcagaatcggctggctgcacaacctgggcgaccagatcggcaagccctacaacagcagcggcctgggcggccccagcatcaaggacaagtacgtgaccgccctgtacttcaccttcagcagcctgaccagcgtgggcttcggcaacgtgagccccaacaccaacagcgagaagatcttcagcatctgcgtgatgctgatcggcagcctgatgtacgccagcatcttcggcaacgtgagcgccatcatccagagactgtacagcggcaccgccagataccacacccagatgctgagagtgagagagttcatcagattccaccagatccccaaccccctgagacagagactggaggagtacttccagcacgcctggagctacaccaacggcatcgacatgaacgccgtgctgaagggcttccccgagtgcctgcaggccgacatctgcctgcacctgaacagaagcctgctgcagcactgcaagcccttcagaggcgccaccaagggctgcctgagagccctggccatgaagttcaagaccacccacgccccccccggcgacaccctggtgcacgccggcgacctgctgaccgccctgtacttcatcagcagaggcagcatcgagatcctgagaggcgacgtggtggtggccatcctgggcaagaacgacatcttcggcgagcccctgaacctgtacgccagacccggcaagagcaacggcgacgtgagagccctgacctactgcgacctgcacaagatccacagagacgacctgctggaggtgctggacatgtaccccgagttcagcgaccacttctggagcagcctggagatcaccttcaacctgagagacaccaacatgatccccggcagccccggcagcaccgagctggagggcggcttcagcagacagagaaagagaaagctgagcttcagaagaagaaccgacaaggacaccgagcagcccggcgaggtgagcgccctgggccccggcagagccggcgccggccccagcagcagaggcagacccggcggcccctggggcgagagccccagcagcggccccagcagccccgagagcagcgaggacgagggccccggcagaagcagcagccccctgagactggtgcccttcagcagccccagaccccccggcgagccccccggcggcgagcccctgatggaggactgcgagaagagcagcgacacctgcaaccccctgagcggcgccttcagcggcgtgagcaacatcttcagcttctggggcgacagcagaggcagacagtaccaggagctgcccagatgccccgcccccacccccagcctgctgaacatccccctgagcagccccggcagaagacccagaggcgacgtggagagcagactggacgccctgcagagacagctgaacagactggagaccagactgagcgccgacatggccaccgtgctgcagctgctgcagagacagatgaccctggtgccccccgcctacagcgccgtgaccacccccggccccggccccaccagcaccagccccctgctgcccgtgagccccctgcccaccctgaccctggacagcctgagccaggtgagccagttcatggcctgcgaggagctgccccccggcgcccccgagctgccccaggagggccccaccagaagactgagcctgcccggccagctgggcgccctgaccagccagcccctgcacagacacggcagcgaccccggcagctag

SEQ ID NO: 94212 - DNA, 2460 bp, synthetic construct
  misc_feature 1..2460: note = Description of Artificial Sequence: Synthetic coding sequence
  source 1..2460: mol_type = other DNA
atggccgcccccgccggcaaggccagcagaaccggcgccctgagacccagagcccagaagggcagagtgagaagagccgtgagaatcagcagcctggtggcccaggaggtgctgagcctgggcgccgacgtgctgcccgagtacaagctgcaggcccccagaatccacagatggaccatcctgcactacagccccttcaaggccgtgtgggactggctgatcctgctgctggtgatctacaccgccgtgttcaccccctacagcgccgccttcctgctgaaggagaccgaggagggcccccccgccaccgagtgcggctacgcctgccagcccctggccgtggtggacctgatcgtggacatcatgttcatcgtggacatcctgatcaacttcagaaccacctacgtgaacgccaacgaggaggtggtgagccaccccggcagaatcgccgtgcactacttcaagggctggttcctgatcgacatggtggccgccatccccttcgacctgctgatcttcggcagcggcagcgaggagctgatcggcctgctgaagaccgccagactgctgagactggtgagagtggccagaaagctggacagatacagcgagtacggcgccgccgtgctgttcctgctgatgtgcaccttcgccctgatcgcccactggctggcctgcatctggtacgccatcggcaacatggagcagccccacatggacagcagaatcggctggctgcacaacctgggcgaccagatcggcaagccctacaacagcagcggcctgggcggccccagcatcaaggacaagtacgtgaccgccctgtacttcaccttcagcagcctgaccagcgtgggcttcggcaacgtgagccccaacaccaacagcgagaagatcttcagcatctgcgtgatgctgatcggcagcctgatgtacgccagcatcttcggcaacgtgagcgccatcatccagagactgtacagcggcaccgccagataccacacccagatgctgagagtgagagagttcatcagattccaccagatccccaaccccctgagacagagactggaggagtacttccagcacgcctggagctacaccaacggcatcgacatgaacgccgtgctgaagggcttccccgagtgcctgcaggccgacatctgcctgcacctgaacagaagcctgctgcagcactgcaagcccttcagaggcgccaccaagggctgcctgagagccctggccatgaagttcaagaccacccacgccccccccggcgacaccctggtgcacgccggcgacctgctgaccgccctgtacttcatcagcagaggcagcatcgagatcctgagaggcgacgtggtggtggccatcctgggcaagaacgacatcttcggcgagcccctgaacctgtacgccagacccggcaagagcaacggcgacgtgagagccctgacctactgcgacctgcacaagatccacagagacgacctgctggaggtgctggacatgtaccccgagttcagcgaccacttctggagcagcctggagatcaccttcaacctgagagacaccaacatgatccccggcagccccggcagcaccgagctggagggcggcttcagcagacagagaaagagaaagctgagcttcagaagaagaaccgacaaggacaccgagcagcccggcgaggtgagcgccctgggccccggcagagccggcgccggccccagcagcagaggcagacccggcggcccctggggcgagagccccagcagcggccccagcagccccgagagcagcgaggacgagggccccggcagaagcagcagccccctgagactggtgcccttcagcagccccagaccccccggcgagccccccggcggcgagcccctgatggaggactgcgagaagagcagcgacacctgcaaccccctgagcggcgccttcagcggcgtgagcaacatcttcagcttctggggcgacagcagaggcagacagtaccaggagctgcccagatgccccgcccccacccccagcctgctgaacatccccctgagcagccccggcagaagacccagaggcgacgtggagagcagactggacgccctgcagagacagctgaacagactggagaccagactgagcgccgacatggccaccgtgctgcagctgctgcagagacagatgaccctggtgccccccgcctacagcgccgtgaccacccccggccccggccccaccagcaccagccccctgctgcccgtgagccccctgcccaccctgaccctggacagcctgagccaggtgagccagttcatggcctgcgaggagctgccccccggcgcccccgagctgccccaggagggccccaccagaagactgagcctgcccggccagctgggcgccctgaccagccagcccctgcacagacacggcagcgaccccggcagctag

SEQ ID NO: 94213 - DNA, 1182 bp, synthetic construct
  misc_feature 1..1182: note = Description of Artificial Sequence: Synthetic coding sequence
  source 1..1182: mol_type = other DNA
atggccgcccccgccggcaaggccagcagaaccggcgccctgagacccagagcccagaagggcagagtgagaagagccgtgagaatcagcagcctggtggcccaggaggtgctgagcctgggcgccgacgtgctgcccgagtacaagctgcaggcccccagaatccacagatggaccatcctgcactacagccccttcaaggccgtgtgggactggctgatcctgctgctggtgatctacaccgccgtgttcaccccctacagcgccgccttcctgctgaaggagaccgaggagggcccccccgccaccgagtgcggctacgcctgccagcccctggccgtggtggacctgatcgtggacatcatgttcatcgtggacatcctgatcaacttcagaaccacctacgtgaacgccaacgaggaggtggtgagccaccccggcagaatcgccgtgcactacttcaagggctggttcctgatcgacatggtggccgccatccccttcgacctgctgatcttcggcagcggcagcgaggagctgatcggcctgctgaagaccgccagactgctgagactggtgagagtggccagaaagctggacagatacagcgagtacggcgccgccgtgctgttcctgctgatgtgcaccttcgccctgatcgcccactggctggcctgcatctggtacgccatcggcaacatggagcagccccacatggacagcagaatcggctggctgcacaacctgggcgaccagatcggcaagccctacaacagcagcggcctgggcggccccagcatcaaggacaagtacgtgaccgccctgtacttcaccttcagcagcctgaccagcgtgggcttcggcaacgtgagccccaacaccaacagcgagaagatcttcagcatctgcgtgatgctgatcggcagcctgatgtacgccagcatcttcggcaacgtgagcgccatcatccagagactgtacagcggcaccgccagataccacacccagatgctgagagtgagagagttcatcagattccaccagatccccaaccccctgagacagtgctgcgaccaccccggcgcctggccccacttccacatccccgccgtggccagacagccccccccccacccccacctgggcctggccttcagcggcttccccgtgcacggcgtgtag

SEQ ID NO: 94214 - DNA, 3192 bp, synthetic construct
  misc_feature 1..3192: note = Description of Artificial Sequence: Synthetic coding sequence
  source 1..3192: mol_type = other DNA
atgagcagccacagcgccggcagctgcttcctgtgcctggtggacgtggtgcccgtgaagaacgaggacggcgccgtgatcatgttcatcctgaacttcgaggtggtgatggagaaggacatggtgggcagccccgcccacgacaccaaccacagaggcccccccaccagctggctggcccccggcagagccaagaccttcagactgaagctgcccgccctgctggccctgaccgccagagagagcagcgtgagaagcggcggcgccggcggcgccggcgcccccggcgccgtggtggtggacgtggacctgacccccgccgcccccagcagcgagagcctggccctggacgaggtgaccgccatggacaaccacgtggccggcctgggccccgccgaggagagaagagccctggtgggccccggcagcccccccagaagcgcccccggccagctgcccagccccagagcccacagcctgaaccccgacgccagcggcagcagctgcagcctggccagaaccagaagcagagagagctgcgccagcgtgagaagagccagcagcgccgacgacatcgaggccatgagagccggcgtgctgccccccccccccagacacgccagcaccggcgccatgcaccccctgagaagcggcctgctgaacagcaccagcgacagcgacctggtgagatacagaaccatcagcaagatcccccagatcaccctgaacttcgtggacctgaagggcgaccccttcctggccagccccaccagcgacagagagatcatcgcccccaagatcaaggagagaacccacaacgtgaccgagaaggtgacccaggtgctgagcctgggcgccgacgtgctgcccgagtacaagctgcaggcccccagaatccacagatggaccatcctgcactacagccccttcaaggccgtgtgggactggctgatcctgctgctggtgatctacaccgccgtgttcaccccctacagcgccgccttcctgctgaaggagaccgaggagggcccccccgccaccgagtgcggctacgcctgccagcccctggccgtggtggacctgatcgtggacatcatgttcatcgtggacatcctgatcaacttcagaaccacctacgtgaacgccaacgaggaggtggtgagccaccccggcagaatcgccgtgcactacttcaagggctggttcctgatcgacatggtggccgccatccccttcgacctgctgatcttcggcagcggcagcgaggagctgatcggcctgctgaagaccgccagactgctgagactggtgagagtggccagaaagctggacagatacagcgagtacggcgccgccgtgctgttcctgctgatgtgcaccttcgccctgatcgcccactggctggcctgcatctggtacgccatcggcaacatggagcagccccacatggacagcagaatcggctggctgcacaacctgggcgaccagatcggcaagccctacaacagcagcggcctgggcggccccagcatcaaggacaagtacgtgaccgccctgtacttcaccttcagcagcctgaccagcgtgggcttcggcaacgtgagccccaacaccaacagcgagaagatcttcagcatctgcgtgatgctgatcggcagcctgatgtacgccagcatcttcggcaacgtgagcgccatcatccagagactgtacagcggcaccgccagataccacacccagatgctgagagtgagagagttcatcagattccaccagatccccaaccccctgagacagagactggaggagtacttccagcacgcctggagctacaccaacggcatcgacatgaacgccgtgctgaagggcttccccgagtgcctgcaggccgacatctgcctgcacctgaacagaagcctgctgcagcactgcaagcccttcagaggcgccaccaagggctgcctgagagccctggccatgaagttcaagaccacccacgccccccccggcgacaccctggtgcacgccggcgacctgctgaccgccctgtacttcatcagcagaggcagcatcgagatcctgagaggcgacgtggtggtggccatcctgggcaagaacgacatcttcggcgagcccctgaacctgtacgccagacccggcaagagcaacggcgacgtgagagccctgacctactgcgacctgcacaagatccacagagacgacctgctggaggtgctggacatgtaccccgagttcagcgaccacttctggagcagcctggagatcaccttcaacctgagagacaccaacatgatccccggcagccccggcagcaccgagctggagggcggcttcagcagacagagaaagagaaagctgagcttcagaagaagaaccgacaaggacaccgagcagcccggcgaggtgagcgccctgggccccggcagagccggcgccggccccagcagcagaggcagacccggcggcccctggggcgagagccccagcagcggccccagcagccccgagagcagcgaggacgagggccccggcagaagcagcagccccctgagactggtgcccttcagcagccccagaccccccggcgagccccccggcggcgagcccctgatggaggactgcgagaagagcagcgacacctgcaaccccctgagcggcgccttcagcggcgtgagcaacatcttcagcttctggggcgacagcagaggcagacagtaccaggagctgcccagatgccccgcccccacccccagcctgctgaacatccccctgagcagccccggcagaagacccagaggcgacgtggagagcagactggacgccctgcagagacagctgaacagactggagaccagactgagcgccgacatggccaccgtgctgcagctgctgcagagacagatgaccctggtgccccccgcctacagcgccgtgaccacccccggccccggccccaccagcaccagccccctgctgcccgtgagccccctgcccaccctgaccctggacagcctgagccaggtgagccagttcatggcctgcgaggagctgccccccggcgcccccgagctgccccaggagggccccaccagaagactgagcctgcccggccagctgggcgccctgaccagccagcccctgcacagacacggcagcgaccccggcagctag

SEQ ID NO: 94215 - DNA, 2667 bp, synthetic construct
  misc_feature 1..2667: note = Description of Artificial Sequence: Synthetic coding sequence
  source 1..2667: mol_type = other DNA
atgcccgtgagaagaggccacgtggccccccagaacaccttcctggacaccatcatcagaaagttcgagggccagagcagaaagttcatcatcgccaacgccagagtggagaactgcgccgtgatctactgcaacgacggcttctgcgagctgtgcggctacagcagagccgaggtgatgcagagaccctgcacctgcgacttcctgcacggccccagaacccagagaagagccgccgcccagatcgcccaggccctgctgggcgccgaggagagaaaggtggagatcgccttctacagaaaggacggcagctgcttcctgtgcctggtggacgtggtgcccgtgaagaacgaggacggcgccgtgatcatgttcatcctgaacttcgaggtggtgatggagaaggacatggtgggcagccccgcccacgacaccaaccacagaggcccccccaccagctggctggcccccggcagagccaagaccttcagactgaagctgcccgccctgctggccctgaccgccagagagagcagcgtgagaagcggcggcgccggcggcgccggcgcccccggcgccgtggtggtggacgtggacctgacccccgccgcccccagcagcgagagcctggccctggacgaggtgaccgccatggacaaccacgtggccggcctgggccccgccgaggagagaagagccctggtgggccccggcagcccccccagaagcgcccccggccagctgcccagccccagagcccacagcctgaaccccgacgccagcggcagcagctgcagcctggccagaaccagaagcagagagagctgcgccagcgtgagaagagccagcagcgccgacgacatcgaggccatgagagccggcgtgctgccccccccccccagacacgccagcaccggcgccatgcaccccctgagaagcggcctgctgaacagcaccagcgacagcgacctggtgagatacagaaccatcagcaagatcccccagatcaccctgaacttcgtggacctgaagggcgaccccttcctggccagccccaccagcgacagagagatcatcgcccccaagatcaaggagagaacccacaacgtgaccgagaaggtgacccaggtgctgagcctgggcgccgacgtgctgcccgagtacaagctgcaggcccccagaatccacagatggaccatcctgcactacagccccttcaaggccgtgtgggactggctgatcctgctgctggtgatctacaccgccgtgttcaccccctacagcgccgccttcctgctgaaggagaccgaggagggcccccccgccaccgagtgcggctacgcctgccagcccctggccgtggtggacctgatcgtggacatcatgttcatcgtggacatcctgatcaacttcagaaccacctacgtgaacgccaacgaggaggtggtgagccaccccggcagaatcgccgtgcactacttcaagggctggttcctgatcgacatggtggccgccatccccttcgacctgctgatcttcggcagcggcagcgaggagctgatcggcctgctgaagaccgccagactgctgagactggtgagagtggccagaaagctggacagatacagcgagtacggcgccgccgtgctgttcctgctgatgtgcaccttcgccctgatcgcccactggctggcctgcatctggtacgccatcggcaacatggagcagccccacatggacagcagaatcggctggctgcacaacctgggcgaccagatcggcaagccctacaacagcagcggcctgggcggccccagcatcaaggacaagtacgtgaccgccctgtacttcaccttcagcagcctgaccagcgtgggcttcggcaacgtgagccccaacaccaacagcgagaagatcttcagcatctgcgtgatgctgatcggcagcctgatgtacgccagcatcttcggcaacgtgagcgccatcatccagagactgtacagcggcaccgccagataccacacccagatgctgagagtgagagagttcatcagattccaccagatccccaaccccctgagacagagactggaggagtacttccagcacgcctggagctacaccaacggcatcgacatgaacgccgtgctgaagggcttccccgagtgcctgcaggccgacatctgcctgcacctgaacagaagcctgctgcagcactgcaagcccttcagaggcgccaccaagggctgcctgagagccctggccatgaagttcaagaccacccacgccccccccggcgacaccctggtgcacgccggcgacctgctgaccgccctgtacttcatcagcagaggcagcatcgagatcctgagaggcgacgtggtggtggccatcctgggcatgggctggggcgccggcaccggcctggagatgcccagcgccgccagcagaggcgccagcctgctgaacatgcagagcctgggcctgtggacctgggactgcctgcagggccactgggcccccctgatccacctgaacagcggcccccccagcggcgccatggagagaagccccacctggggcgaggccgccgagctgtggggcagccacatcctgctgcccttcagaatcagacacaagcagaccctgttcgccagcctgaagtag

SEQ ID NO: 94216 - DNA, 3252 bp, synthetic construct
  misc_feature 1..3252: note = Description of Artificial Sequence: Synthetic coding sequence
  source 1..3252: mol_type = other DNA
atgcccgccatgagaggcctgctggccccccagaacaccttcctggacaccatcgccaccagattcgacggcacccacagcaacttcgtgctgggcaacgcccaggtggccggcctgttccccgtggtgtactgcagcgacggcttctgcgacctgaccggcttcagcagagccgaggtgatgcagagaggctgcgcctgcagcttcctgtacggccccgacaccagcgagctggtgagacagcagatcagaaaggccctggacgagcacaaggagttcaaggccgagctgatcctgtacagaaagagcggcctgcccttctggtgcctgctggacgtgatccccatcaagaacgagaagggcgaggtggccctgttcctggtgagccacaaggacatcagcgagaccaagaacagaggcggccccgacagatggaaggagaccggcggcggcagaagaagatacggcagagccagaagcaagggcttcaacgccaacagaagaagaagcagagccgtgctgtaccacctgagcggccacctgcagaagcagcccaagggcaagcacaagctgaacaagggcgtgttcggcgagaagcccaacctgcccgagtacaaggtggccgccatcagaaagagccccttcatcctgctgcactgcggcgccctgagagccacctgggacggcttcatcctgctggccaccctgtacgtggccgtgaccgtgccctacagcgtgtgcgtgagcaccgccagagagcccagcgccgccagaggcccccccagcgtgtgcgacctggccgtggaggtgctgttcatcctggacatcgtgctgaacttcagaaccaccttcgtgagcaagagcggccaggtggtgttcgcccccaagagcatctgcctgcactacgtgaccacctggttcctgctggacgtgatcgccgccctgcccttcgacctgctgcacgccttcaaggtgaacgtgtacttcggcgcccacctgctgaagaccgtgagactgctgagactgctgagactgctgcccagactggacagatacagccagtacagcgccgtggtgctgaccctgctgatggccgtgttcgccctgctggcccactgggtggcctgcgtgtggttctacatcggccagagagagatcgagagcagcgagagcgagctgcccgagatcggctggctgcaggagctggccagaagactggagaccccctactacctggtgggcagaagacccgccggcggcaacagcagcggccagagcgacaactgcagcagcagcagcgaggccaacggcaccggcctggagctgctgggcggccccagcctgagaagcgcctacatcaccagcctgtacttcgccctgagcagcctgaccagcgtgggcttcggcaacgtgagcgccaacaccgacaccgagaagatcttcagcatctgcaccatgctgatcggcgccctgatgcacgccgtggtgttcggcaacgtgaccgccatcatccagagaatgtacgccagaagattcctgtaccacagcagaaccagagacctgagagactacatcagaatccacagaatccccaagcccctgaagcagagaatgctggagtacttccaggccacctgggccgtgaacaacggcatcgacaccaccgagctgctgcagagcctgcccgacgagctgagagccgacatcgccatgcacctgcacaaggaggtgctgcagctgcccctgttcgaggccgccagcagaggctgcctgagagccctgagcctggccctgagacccgccttctgcacccccggcgagtacctgatccaccagggcgacgccctgcaggccctgtacttcgtgtgcagcggcagcatggaggtgctgaagggcggcaccgtgctggccatcctgggcaagggcgacctgatcggctgcgagctgcccagaagagagcaggtggtgaaggccaacgccgacgtgaagggcctgacctactgcgtgctgcagtgcctgcagctggccggcctgcacgacagcctggccctgtaccccgagttcgcccccagattcagcagaggcctgagaggcgagctgagctacaacctgggcgccggcggcggcagcgccgaggtggacaccagcagcctgagcggcgacaacaccctgatgagcaccctggaggagaaggagaccgacggcgagcagggccccaccgtgagccccgcccccgccgacgagcccagcagccccctgctgagccccggctgcaccagcagcagcagcgccgccaagctgctgagccccagaagaaccgcccccagacccagactgggcggcagaggcagacccggcagagccggcgccctgaaggccgaggccggccccagcgccccccccagagccctggagggcctgagactgccccccatgccctggaacgtgccccccgacctgagccccagagtggtggacggcatcgaggacggctgcggcagcgaccagcccaagttcagcttcagagtgggccagagcggccccgagtgcagcagcagccccagccccggccccgagagcggcctgctgaccgtgccccacggccccagcgaggccagaaacaccgacaccctggacaagctgagacaggccgtgaccgagctgagcgagcaggtgctgcagatgagagagggcctgcagagcctgagacaggccgtgcagctggtgctggccccccacagagagggcccctgccccagagccagcggcgagggcccctgccccgccagcaccagcggcctgctgcagcccctgtgcgtggacaccggcgccagcagctactgcctgcagccccccgccggcagcgtgctgagcggcacctggccccaccccagacccggccccccccccctgatggccccctggccctggggcccccccgccagccagagcagcccctggcccagagccaccgccttctggaccagcaccagcgacagcgagccccccgccagcggcgacctgtgcagcgagcccagcacccccgccagccccccccccagcgaggagggcgccagaaccggccccgccgagcccgtgagccaggccgaggccaccagcaccggcgagcccccccccggcagcggcggcctggccctgccctgggacccccacagcctggagatggtgctgatcggctgccacggcagcggcaccgtgcagtggacccaggaggagggcaccggcgtgtag

SEQ ID NO: 94217 - DNA, 2967 bp, synthetic construct
  misc_feature 1..2967: note = Description of Artificial Sequence: Synthetic coding sequence
  source 1..2967: mol_type = other DNA
atgcccggcggcaagagaggcctggtggccccccagaacaccttcctggagaacatcgtgagaagaagcagcgagagcagcttcctgctgggcaacgcccagatcgtggactggcccgtggtgtacagcaacgacggcttctgcaagctgagcggctaccacagagccgacgtgatgcagaagagcagcacctgcagcttcatgtacggcgagctgaccgacaagaagaccatcgagaaggtgagacagaccttcgacaactacgagagcaactgcttcgaggtgctgctgtacaagaagaacagaacccccgtgtggttctacatgcagatcgcccccatcagaaacgagcacgagaaggtggtgctgttcctgtgcaccttcaaggacatcaccctgttcaagcagcccatcgaggacgacagcaccaagggctggaccaagttcgccagactgaccagagccctgaccaacagcagaagcgtgctgcagcagctgacccccatgaacaagaccgaggtggtgcacaagcacagcagactggccgaggtgctgcagctgggcagcgacatcctgccccagtacaagcaggaggcccccaagacccccccccacatcatcctgcactactgcgccttcaagaccacctgggactgggtgatcctgatcctgaccttctacaccgccatcatggtgccctacaacgtgagcttcaagaccaagcagaacaacatcgcctggctggtgctggacagcgtggtggacgtgatcttcctggtggacatcgtgctgaacttccacaccaccttcgtgggccccggcggcgaggtgatcagcgaccccaagctgatcagaatgaactacctgaagacctggttcgtgatcgacctgctgagctgcctgccctacgacatcatcaacgccttcgagaacgtggacgagggcatcagcagcctgttcagcagcctgaaggtggtgagactgctgagactgggcagagtggccagaaagctggaccactacctggagtacggcgccgccgtgctggtgctgctggtgtgcgtgttcggcctggtggcccactggctggcctgcatctggtacagcatcggcgactacgaggtgatcgacgaggtgaccaacaccatccagatcgacagctggctgtaccagctggccctgagcatcggcaccccctacagatacaacaccagcgccggcatctgggagggcggccccagcaaggacagcctgtacgtgagcagcctgtacttcaccatgaccagcctgaccaccatcggcttcggcaacatcgcccccaccaccgacgtggagaagatgttcagcgtggccatgatgatggtgggcagcctgctgtacgccaccatcttcggcaacgtgaccaccatcttccagcagatgtacgccaacaccaacagataccacgagatgctgaacaacgtgagagacttcctgaagctgtaccaggtgcccaagggcctgagcgagagagtgatggactacatcgtgagcacctggagcatgagcaagggcatcgacaccgagaaggtgctgagcatctgccccaaggacatgagagccgacatctgcgtgcacctgaacagaaaggtgttcaacgagcaccccgccttcagactggccagcgacggctgcctgagagccctggccgtggagttccagaccatccactgcgcccccggcgacctgatctaccacgccggcgagagcgtggacgccctgtgcttcgtggtgagcggcagcctggaggtgatccaggacgacgaggtggtggccatcctgggcaagggcgacgtgttcggcgacatcttctggaaggagaccaccctggcccacgcctgcgccaacgtgagagccctgacctactgcgacctgcacatcatcaagagagaggccctgctgaaggtgctggacttctacaccgccttcgccaacagcttcagcagaaacctgaccctgacctgcaacctgagaaagagaatcatcttcagaaagatcagcgacgtgaagaaggaggaggaggagagactgagacagaagaacgaggtgaccctgagcatccccgtggaccaccccgtgagaaagctgttccagaagttcaagcagcagaaggagctgagaaaccagggcagcacccagggcgaccccgagagaaaccagctgcaggtggagagcagaagcctgcagaacggcgccagcatcaccggcaccagcgtggtgaccgtgagccagatcacccccatccagaccagcctggcctacgtgaagaccagcgagagcctgaagcagaacaacagagacgccatggagctgaagcccaacggcggcgccgaccagaagtgcctgaaggtgaacagccccatcagaatgaagaacggcaacggcaagggctggctgagactgaagaacaacatgggcgcccacgaggagaagaaggaggactggaacaacgtgaccaaggccgagagcatgggcctgctgagcgaggaccccaagagcagcgacagcgagaacagcgtgaccaagaaccccctgagaaagaccgacagctgcgacagcggcatcaccaagagcgacctgagactggacaaggccggcgaggccagaagccccctggagcacagccccatccaggccgacgccaagcaccccttctaccccatccccgagcaggccctgcagaccaccctgcaggaggtgaagcacgagctgaaggaggacatccagctgctgagctgcagaatgaccgccctggagaagcaggtggccgagatcctgaagatcctgagcgagaagagcgtgccccaggccagcagccccaagagccagatgcccctgcaggtgcccccccagatcccctgccaggacatcttcagcgtgagcagacccgagagccccgagagcgacaaggacgagatccacttctag

SEQ ID NO: 94218 - DNA, 1269 bp, synthetic construct
  misc_feature 1..1269: note = Description of Artificial Sequence: Synthetic coding sequence
  source 1..1269: mol_type = other DNA
atgcagaagagcagcacctgcagcttcatgtacggcgagctgaccgacaagaagaccatcgagaaggtgagacagaccttcgacaactacgagagcaactgcttcgaggtgctgctgtacaagaagaacagaacccccgtgtggttctacatgcagatcgcccccatcagaaacgagcacgagaaggtggtgctgttcctgtgcaccttcaaggacatcaccctgttcaagcagcccatcgaggacgacagcaccaagggctggaccaagttcgccagactgaccagagccctgaccaacagcagaagcgtgctgcagcagctgacccccatgaacaagaccgaggtggtgcacaagcacagcagactggccgaggtgctgcagctgggcagcgacatcctgccccagtacaagcaggaggcccccaagacccccccccacatcatcctgcactactgcgccttcaagaccacctgggactgggtgatcctgatcctgaccttctacaccgccatcatggtgccctacaacgtgagcttcaagaccaagcagaacaacatcgcctggctggtgctggacagcgtggtggacgtgatcttcctggtggacatcgtgctgaacttccacaccaccttcgtgggccccggcggcgaggtgatcagcgaccccaagctgatcagaatgaactacctgaagacctggttcgtgatcgacctgctgagctgcctgccctacgacatcatcaacgccttcgagaacgtggacgagggcatcagcagcctgttcagcagcctgaaggtggtgagactgctgagactgggcagagtggccagaaagctggaccactacctggagtacggcgccgccgtgctggtgctgctggtgtgcgtgttcggcctggtggcccactggctggcctgcatctggtacagcatcggcgactacgaggtgatcgacgaggtgaccaacaccatccagatcgacagctggctgtaccagctggccctgagcatcggcaccccctacagatacaacaccagcgccggcatctgggagggcggccccagcaaggacagcctgtacgtgagcagcctgtacttcaccatgaccagcctgaccaccatcggcttcggcaacatcgcccccaccaccgacgtggagaagatgttcagcgtggccatgatgatggtgggctgcaagtacttcaacttcttcatcgagaactactgctactggcagttcagctggctgcagagccagatcggctag

SEQ ID NO: 94219 - DNA, 2199 bp, synthetic construct
  misc_feature 1..2199: note = Description of Artificial Sequence: Synthetic coding sequence
  source 1..2199: mol_type = other DNA
atgcccgtgagaagaggccacgtggccccccagaacaccttcctgggcaccatcatcagaaagttcgagggccagaacaagaagttcatcatcgccaacgccagagtgcagaactgcgccatcatctactgcaacgacggcttctgcgagatgaccggcttcagcagacccgacgtgatgcagaagccctgcacctgcgacttcctgcacggccccgagaccaagagacacgacatcgcccagatcgcccaggccctgctgggcagcgaggagagaaaggtggaggtgacctactaccacaagaacggcagcaccttcatctgcaacacccacatcatccccgtgaagaaccaggagggcgtggccatgatgttcatcatcaacttcgagtacgtgaccgacaacgagaacgccgccacccccgagagagtgaaccccatcctgcccatcaagaccgtgaacagaaagttcttcggcttcaagttccccggcctgagagtgctgacctacagaaagcagagcctgccccaggaggaccccgacgtggtggtgatcgacagcagcaagcacagcgacgacagcgtggccatgaagcacttcaagagccccaccaaggagagctgcagccccagcgaggccgacgacaccaaggccctgatccagcccagcaagtgcagccccctggtgaacatcagcggccccctggaccacagcagccccaagagacagtgggacagactgtaccccgacatgctgcagagcagcagccagctgagccacagcagaagcagagagagcctgtgcagcatcagaagagccagcagcgtgcacgacatcgagggcttcggcgtgcaccccaagaacatcttcagagacagacacgccagcgagggccccttcaaccacatcaagagcagcctgctgggcagcaccagcgacagcaacctgaacaagtacagcaccatcaacaagatcccccagctgaccctgaacttcagcgaggtgaagaccgagaagaagaacagcagcccccccagcagcgacaagaccatcatcgcccccaaggtgaaggacagaacccacaacgtgaccgagaaggtgacccaggtgctgagcctgggcgccgacgtgctgcccgagtacaagctgcagacccccagaatcaacaagttcaccatcctgcactacagccccttcaaggccgtgtgggactggctgatcctgctgctggtgatctacaccgccatcttcaccccctacagcgccgccttcctgctgaacgacagagaggagcagaagagaagagagtgcggctacagctgcagccccctgaacgtggtggacctgatcgtggacatcatgttcatcatcgacatcctgatcaacttcagaaccacctacgtgaaccagaacgaggaggtggtgagcgaccccgccaagatcgccatccactacttcaagggctggttcctgatcgacatggtggccgccatccccttcgacctgctgatcttcggcagcggcagcgacgagaccaccaccctgatcggcctgctgaagaccgccagactgctgagactggtgagagtggccagaaagctggacagatacagcgagtacggcgccgccgtgctgatgctgctgatgtgcatcttcgccctgatcgcccactggctggcctgcatctggtacgccatcggcaacgtggagagaccctacctgaccgacaagatcggctggctggacagcctgggccagcagatcggcaagagatacaacgacagcgacagcagcagcggccccagcatcaaggacaagtacgtgaccgccctgtacttcaccttcagcagcctgaccagcgtgggcttcggcaacgtgagccccaacaccaacagcgagaagatcttcagcatctgcgtgatgctgatcggcagcctgatgtacgccagcatcttcggcaacgtgagcgccatcatccagagactgtacagcggcaccgccagataccacatgcagatgctgagagtgaaggagttcatcagattccaccagatccccaaccccctgagacagagactggaggagtacttccagcacgcctggacctacaccaacggcatcgacatgaacatggtgtgcatgagcgtgttccagaacgagagcgccgccggcatcatcgtgatcgccaagatggagtag

SEQ ID NO: 94220 - DNA, 3591 bp, synthetic construct
  misc_feature 1..3591: note = Description of Artificial Sequence: Synthetic coding sequence
  source 1..3591: mol_type = other DNA
atgcccgtgagaagaggccacgtggccccccagaacaccttcctgggcaccatcatcagaaagttcgagggccagaacaagaagttcatcatcgccaacgccagagtgcagaactgcgccatcatctactgcaacgacggcttctgcgagatgaccggcttcagcagacccgacgtgatgcagaagccctgcacctgcgacttcctgcacggccccgagaccaagagacacgacatcgcccagatcgcccaggccctgctgggcagcgaggagagaaaggtggaggtgacctactaccacaagaacggcagcaccttcatctgcaacacccacatcatccccgtgaagaaccaggagggcgtggccatgatgttcatcatcaacttcgagtacgtgaccgacaacgagaacgccgccacccccgagagagtgaaccccatcctgcccatcaagaccgtgaacagaaagttcttcggcttcaagttccccggcctgagagtgctgacctacagaaagcagagcctgccccaggaggaccccgacgtggtggtgatcgacagcagcaagcacagcgacgacagcgtggccatgaagcacttcaagagccccaccaaggagagctgcagccccagcgaggccgacgacaccaaggccctgatccagcccagcaagtgcagccccctggtgaacatcagcggccccctggaccacagcagccccaagagacagtgggacagactgtaccccgacatgctgcagagcagcagccagctgagccacagcagaagcagagagagcctgtgcagcatcagaagagccagcagcgtgcacgacatcgagggcttcggcgtgcaccccaagaacatcttcagagacagacacgccagcgaggacaacggcagaaacgtgaagggccccttcaaccacatcaagagcagcctgctgggcagcaccagcgacagcaacctgaacaagtacagcaccatcaacaagatcccccagctgaccctgaacttcagcgaggtgaagaccgagaagaagaacagcagcccccccagcagcgacaagaccatcatcgcccccaaggtgaaggacagaacccacaacgtgaccgagaaggtgacccaggtgctgagcctgggcgccgacgtgctgcccgagtacaagctgcagacccccagaatcaacaagttcaccatcctgcactacagccccttcaaggccgtgtgggactggctgatcctgctgctggtgatctacaccgccatcttcaccccctacagcgccgccttcctgctgaacgacagagaggagcagaagagaagagagtgcggctacagctgcagccccctgaacgtggtggacctgatcgtggacatcatgttcatcatcgacatcctgatcaacttcagaaccacctacgtgaaccagaacgaggaggtggtgagcgaccccgccaagatcgccatccactacttcaagggctggttcctgatcgacatggtggccgccatccccttcgacctgctgatcttcggcagcggcagcgacgagaccaccaccctgatcggcctgctgaagaccgccagactgctgagactggtgagagtggccagaaagctggacagatacagcgagtacggcgccgccgtgctgatgctgctgatgtgcatcttcgccctgatcgcccactggctggcctgcatctggtacgccatcggcaacgtggagagaccctacctgaccgacaagatcggctggctggacagcctgggccagcagatcggcaagagatacaacgacagcgacagcagcagcggccccagcatcaaggacaagtacgtgaccgccctgtacttcaccttcagcagcctgaccagcgtgggcttcggcaacgtgagccccaacaccaacagcgagaagatcttcagcatctgcgtgatgctgatcggcagcctgatgtacgccagcatcttcggcaacgtgagcgccatcatccagagactgtacagcggcaccgccagataccacatgcagatgctgagagtgaaggagttcatcagattccaccagatccccaaccccctgagacagagactggaggagtacttccagcacgcctggacctacaccaacggcatcgacatgaacatggtgctgaagggcttccccgagtgcctgcaggccgacatctgcctgcacctgaaccagaccctgctgcagaactgcaaggccttcagaggcgccagcaagggctgcctgagagccctggccatgaagttcaagaccacccacgccccccccggcgacaccctggtgcactgcggcgacgtgctgaccgccctgtacttcctgagcagaggcagcatcgagatcctgaaggacgacatcgtggtggccatcctgggcaagaacgacatcttcggcgagatggtgcacctgtacgccaagcccggcaagagcaacgccgacgtgagagccctgacctactgcgacctgcacaagatccagagagaggacctgctggaggtgctggacatgtaccccgagttcagcgaccacttcctgaccaacctggagctgaccttcaacctgagacacgagagcgccaaggccgacctgctgagaagccagagcatgaacgacagcgagggcgacaactgcaagctgagaagaagaaagctgagcttcgagagcgagggcgagaaggagaacagcaccaacgaccccgaggacagcgccgacaccatcagacactaccagagcagcaagagacacttcgaggagaagaagagcagaagcagcagcttcatcagcagcatcgacgacgagcagaagcccctgttcagcggcatcgtggacagcagccccggcatcggcaaggccagcggcctggacttcgaggagaccgtgcccaccagcggcagaatgcacatcgacaagagaagccacagctgcaaggacatcaccgacatgagaagctgggagagagagaacgcccacccccagcccgaggacagcagccccagcgccctgcagagagccgcctggggcatcagcgagaccgagagcgacctgacctacggcgaggtggagcagagactggacctgctgcaggagcagctgaacagactggagagccagatgaccaccgacatccagaccatcctgcagctgctgcagaagcagaccaccgtggtgccccccgcctacagcatggtgaccgccggcagcgagtaccagagacccatcatccagctgatgagaaccagccagcccgaggccagcatcaagaccgacagaagcttcagccccagcagccagtgccccgagttcctggacctggagaagagcaagctgaagagcaaggagagcctgagcagcggcgtgcacctgaacaccgccagcgaggacaacctgaccagcctgctgaagcaggacagcgacctgagcctggagctgcacctgagacagagaaagacctacgtgcaccccatcagacaccccagcctgcccgacagcagcctgagcaccgtgggcatcgtgggcctgcacagacacgtgagcgaccccggcctgcccggcaagtag

SEQ ID NO: 94221 - DNA, 1755 bp, synthetic construct
  misc_feature 1..1755: note = Description of Artificial Sequence: Synthetic coding sequence
  source 1..1755: mol_type = other DNA
atggtggccgaggtgtgcagcatgcccaccgccagcaccgtgaagaagcccttcgacctgagaagcaagatgggcaagtggtgccaccacagattcccctgctgcagaggcagcggcaagagcaacatgggcaccagcggcgaccacgacgacagcttcatgaagatgctgagaagcaagatgggcaagtgctgcagacactgcttcccctgctgcagaggcagcggcaccagcaacgtgggcaccagcggcgaccacgagaacagcttcatgaagatgctgagaagcaagatgggcaagtggtgctgccactgcttcccctgctgcagaggcagcggcaagagcaacgtgggcgcctggggcgactacgaccacagcgccttcatggagcccagataccacatcagaagagaggacctggacaagctgcacagagccgcctggtggggcaaggtgcccagaaaggacctgatcgtgatgctgagagacaccgacatgaacaagagagacaaggagaagagaaccgccctgcacctggccagcgccaacggcaacagcgaggtggtgcagctgctgctggacagaagatgccagctgaacgtgctggacaacaagaagagaaccgccctgatcaaggccatccagtgccaggaggacgagtgcgtgctgatgctgctggagcacggcgccgacagaaacatccccgacgagtacggcaacaccgccctgcactacgccatctacaacgaggacaagctgatggccaaggccctgctgctgtacggcgccgacatcgagagcaagaacaagtgcggcctgacccccctgctgctgggcgtgcacgagcagaagcagcaggtggtgaagttcctgatcaagaagaaggccaacctgaacgtgctggacagatacggcagaaccgccctgatcctggccgtgtgctgcggcagcgccagcatcgtgaacctgctgctggagcagaacgtggacgtgagcagccaggacctgagcggccagaccgccagagagtacgccgtgagcagccaccaccacgtgatctgcgagctgctgagcgactacaaggagaagcagatgctgaagatcagcagcgagaacagcaaccccgagcaggacctgaagctgaccagcgaggaggagagccagagactgaaggtgagcgagaacagccagcccgagaagatgagccaggagcccgagatcaacaaggactgcgacagagaggtggaggaggagatcaagaagcacggcagcaaccccgtgggcctgcccgagaacctgaccaacggcgccagcgccggcaacggcgacgacggcctgatcccccagagaagaagcagaaagcccgagaaccagcagttccccgacaccgagaacgaggagtaccacagcgacgagcagaacgacaccagaaagcagctgagcgaggagcagaacaccggcatcagccaggacgagatcctgaccaacaagcagaagcagatcgaggtggccgagcagaagatgaacagcgagctgagcctgagccacaagaaggaggaggacctgctgagagagaacagcgtgctgcaggaggagatcgccatgctgagactggagctggacgagaccaagcaccagaaccagctgagagagaacaagatcctggaggagatcgagagcgtgaaggagaagaccgacaagctgctgagagccatgcagctgaacgaggaggccctgaccaagaccaacatctag

SEQ ID NO: 94222 - DNA, 1638 bp, synthetic construct
  misc_feature 1..1638: note = Description of Artificial Sequence: Synthetic coding sequence
  source 1..1638: mol_type = other DNA
atggtggccgaggccggcagcatgcccgccgccagcagcgtgaagaagcccttcggcctgagaagcaagatgggcaagtggtgcagacactgcttcgcctggtgcagaggcagcggcaagagcaacgtgggcaccagcggcgaccacgacgacagcgccatgaagaccctgagaagcaagatgggcaagtggtgctgccactgcttcccctggtgcagaggcagcggcaagagcaacgtgggcaccagcggcgaccacgacgacagcgccatgaagaccctgagaagcaagatgggcaagtggtgctgccactgcttcccctgctgcagaggcagcggcaagagcaacgtgggcaccagcggcgaccacgacgacagcgccatgaagaccctgagaagcaagatgggcaagtggtgctgccactgcttcccctgctgcagaggcagcggcaagaacaaggtgggcccctggggcgactacgacgacagcgccttcatggagcccagataccacgtgagaagagaggacctggacaagctgcacagagccgcctggtggggcaaggtgcccagaaaggacctgatcgtgatgctgaaggacaccgacatgaacaagaaggacaagcagaagagaaccgccctgcacctggccagcgccaacggcaacagcgaggtggtgaagctgctgctggacagaagatgccagctgaacatcctggacaacaagaagagaaccgccctgaccaaggccgtgcagtgccaggaggacgagtgcgccctgatgctgctggagcacggcaccgaccccaacatccccgacgagtacggcaacaccgccctgcactacgccatctacaacgaggacaagctgatggccaaggccctgctgctgtacggcgccgacatcgagagcaagaacaagcacggcctgacccccctgctgctgggcgtgcacgagcagaagcagcaggtggtgaagttcctgatcaagaagaaggccaacctgaacgccctggacagatacggcagaaccgccctgatcctggccgtgtgctgcggcagcgccagcatcgtgagcctgctgctggagcagaacatcgacgtgagcagccaggacctgagcggccagaccgccagagagtacgccgtgagcagcagacacaacgtgatctgccagctgctgagcgactacaaggagaagcagatcctgaaggtgagcagcgagaacagcaaccccgagcaggacctgaagctgaccagcgaggaggagagccagagactgaagggcagcgagaacagccagcccgaggagatgagccaggagcccgagatcaacaagggcggcgacagaaaggtggaggaggagatgaagaagcacggcagcacccacatgggcttccccgagaacctgaccaacggcgccaccgccgacaacggcgacgacggcctgatcccccccagaaagagcagaacccccgagagccagcagttccccgacaccgagaacgagcagtaccacagcgacgagcagaacgacacccagaagcagctgagcgaggagcagaacaccggcatcctgcaggacgagatcctgatccacgaggagaagcagatcgaggtggccgagaacgagttctag

SEQ ID NO: 94223 - DNA, 867 bp, synthetic construct
  misc_feature 1..867: note = Description of Artificial Sequence: Synthetic coding sequence
  source 1..867: mol_type = other DNA
atggtggccgaggccggcagcatgcccgccgccagcagcgtgaagaagcccttcggcctgagaagcaagatgggcaagtggtgcagacactgcttcgcctggtgcagaggcagcggcaagagcaacgtgggcaccagcggcgaccacgacgacagcgccatgaagaccctgagaagcaagatgggcaagtggtgctgccactgcttcccctggtgcagaggcagcggcaagagcaacgtgggcaccagcggcgaccacgacgacagcgccatgaagaccctgagaagcaagatgggcaagtggtgctgccactgcttcccctgctgcagaggcagcggcaagagcaacgtgggcaccagcggcgaccacgacgacagcgccatgaagaccctgagaagcaagatgggcaagtggtgctgccactgcttcccctgctgcagaggcagcggcaagaacaaggtgggcccctggggcgactacgacgacagcgccttcatggagcccagataccacgtgagaagagaggacctggacaagctgcacagagccgcctggtggggcaaggtgcccagaaaggacctgatcgtgatgctgaaggacaccgacatgaacaagaaggacaagcagaagagaaccgccctgcacctggccagcgccaacggcaacagcgaggtggtgaagctgctgctggacagaagatgccagctgaacatcctggacaacaagaagagaaccgccctgaccaaggccgtgcagtgccaggaggacgagtgcgccctgatgctgctggagcacggcaccgaccccaacatccccgacgagtacggcaacaccgccctgcactacgccatctacaacgaggactag

SEQ ID NO: 94224 - DNA, 1527 bp, synthetic construct
  misc_feature 1..1527: note = Description of Artificial Sequence: Synthetic coding sequence
  source 1..1527: mol_type = other DNA
atggtggccgaggccggcagcatgcccgccgccagcagcgtgaagaagcccttcggcctgagaagcaagatgggcaagtggtgcagacactgcttcgcctggtgcagaggcagcggcaagagcaacgtgggcaccagcggcgaccacgacgacagcgccatgaagaccctgagaagcaagatgggcaagtggtgctgccactgcttcccctggtgcagaggcagcggcaagagcaacgtgggcaccagcggcgaccacgacgacagcgccatgaagaccctgagaagcaagatgggcaagtggtgctgccactgcttcccctgctgcagaggcagcggcaagaacaaggtgggcccctggggcgactacgacgacagcgccttcatggagcccagataccacgtgagaagagaggacctggacaagctgcacagagccgcctggtggggcaaggtgcccagaaaggacctgatcgtgatgctgaaggacaccgacatgaacaagaaggacaagcagaagagaaccgccctgcacctggccagcgccaacggcaacagcgaggtggtgaagctgctgctggacagaagatgccagctgaacatcctggacaacaagaagagaaccgccctgaccaaggccgtgcagtgccaggaggacgagtgcgccctgatgctgctggagcacggcaccgaccccaacatccccgacgagtacggcaacaccgccctgcactacgccatctacaacgaggacaagctgatggccaaggccctgctgctgtacggcgccgacatcgagagcaagaacaagcacggcctgacccccctgctgctgggcgtgcacgagcagaagcagcaggtggtgaagttcctgatcaagaagaaggccaacctgaacgccctggacagatacggcagaaccgccctgatcctggccgtgtgctgcggcagcgccagcatcgtgagcctgctgctggagcagaacatcgacgtgagcagccaggacctgagcggccagaccgccagagagtacgccgtgagcagcagacacaacgtgatctgccagctgctgagcgactacaaggagaagcagatcctgaaggtgagcagcgagaacagcaaccccgagcaggacctgaagctgaccagcgaggaggagagccagagactgaagggcagcgagaacagccagcccgaggagatgagccaggagcccgagatcaacaagggcggcgacagaaaggtggaggaggagatgaagaagcacggcagcacccacatgggcttccccgagaacctgaccaacggcgccaccgccgacaacggcgacgacggcctgatcccccccagaaagagcagaacccccgagagccagcagttccccgacaccgagaacgagcagtaccacagcgacgagcagaacgacacccagaagcagctgagcgaggagcagaacaccggcatcctgcaggacgagatcctgatccacgaggagaagcagatcgaggtggccgagaacgagttctag

SEQ ID NO: 94225 - DNA, 954 bp, synthetic construct
  misc_feature 1..954: note = Description of Artificial Sequence: Synthetic coding sequence
  source 1..954: mol_type = other DNA
atgagctgccaggccttcaccagcgccgacaccttcatccccctgaacagcgacgccagcgccaccctgcccctgatcatgcaccacagcgccgccgagtgcctgcccgtgagcaaccacgccaccaacgtgatgagcaccgtgcccagcatcctgagcctgatccagacccccaagtgcctgtgcacccacttcagcgtgaccaccctgggcaacaccgccaccggcctgcactacagcgtgcccagctgccactacggcaaccagcccagcacctacggcgtgatggccggcagcctgaccccctgcctgtacaagttccccgaccacaccctgagccacggcttcccccccatccaccagcccctgctggccgaggaccccaccgccgccgacttcaagcaggagctgagaagaaagagcaagctggtggaggagcccatcgacatggacagccccgagatcagagagctggagaagttcgccaacgagttcaaggtgagaagaatcaagctgggctacacccagaccaacgtgggcgaggccctggccgccgtgcacggcagcgagttcagccagaccaccatctgcagattcgagaacctgcagctgagcttcaagaacgcctgcaagctgaaggccatcctgagcaagtggctggaggaggccgagcaggtgggcgccctgtacaacgagaaggtgggcgccaacgagagaaagagaaagagaagaaccaccatcagcatcgccgccaaggacgccctggagagacacttcggcgagcagaacaagcccagcagccaggagatcatgagaatggccgaggagctgaacctggagaaggaggtggtgagagtgtggttctgcaacagaagacagagagagaagagagtgaagaccagcctgaaccagagcctgttcagcatcagcaaggagcacctggagtgcagatag

SEQ ID NO: 94226 - DNA, 876 bp, synthetic construct
  misc_feature 1..876: note = Description of Artificial Sequence: Synthetic coding sequence
  source 1..876: mol_type = other DNA
atgagctgccaggccttcaccagcgccgacaccttcatccccctgaacagcgacgccagcgccaccctgcccctgatcatgcaccacagcgccgccgagtgcctgcccgtgagcaaccacgccaccaacgtgatgagcaccgccaccggcctgcactacagcgtgcccagctgccactacggcaaccagcccagcacctacggcgtgatggccggcagcctgaccccctgcctgtacaagttccccgaccacaccctgagccacggcttcccccccatccaccagcccctgctggccgaggaccccaccgccgccgacttcaagcaggagctgagaagaaagagcaagctggtggaggagcccatcgacatggacagccccgagatcagagagctggagaagttcgccaacgagttcaaggtgagaagaatcaagctgggctacacccagaccaacgtgggcgaggccctggccgccgtgcacggcagcgagttcagccagaccaccatctgcagattcgagaacctgcagctgagcttcaagaacgcctgcaagctgaaggccatcctgagcaagtggctggaggaggccgagcaggtgggcgccctgtacaacgagaaggtgggcgccaacgagagaaagagaaagagaagaaccaccatcagcatcgccgccaaggacgccctggagagacacttcggcgagcagaacaagcccagcagccaggagatcatgagaatggccgaggagctgaacctggagaaggaggtggtgagagtgtggttctgcaacagaagacagagagagaagagagtgaagaccagcctgaaccagagcctgttcagcatcagcaaggagcacctggagtgcagatag

SEQ ID NO: 94227 - DNA, 771 bp, synthetic construct
  misc_feature 1..771: note = Description of Artificial Sequence: Synthetic coding sequence
  source 1..771: mol_type = other DNA
atgctgtggcagaagcccaccgcccccgagcaggcccccgcccccgccagaccctaccagggcgtgagagtgaaggagcccgtgaaggagctgctgagaagaaagagaggccacgccagcagcggcgccgcccccgcccccaccgccgtggtgctgccccaccagcccctggccacctacaccaccgtgggccccagctgcctggacatggagggcagcgtgagcgccgtgaccgaggaggccgccctgtgcgccggctggctgagccagcccacccccgccaccctgcagcccctggccccctggaccccctacaccgagtacgtgccccacgaggccgtgagctgcccctacagcgccgacatgtacgtgcagcccgtgtgccccagctacaccgtggtgggccccagcagcgtgctgacctacgccagcccccccctgatcaccaacgtgaccaccagaagcagcgccacccccgccgtgggcccccccctggagggccccgagcaccaggcccccctgacctacttcccctggccccagcccctgagcaccctgcccaccagcaccctgcagtaccagccccccgcccccgccctgcccggcccccagttcgtgcagctgcccatcagcatccccgagcccgtgctgcaggacatggaggaccccagaagagccgccagcagcctgaccatcgacaagctgctgctggaggaggaggacagcgacgcctacgccctgaaccacaccctgagcgtggagggcttctag

SEQ ID NO: 94228 - DNA, 1440 bp, synthetic construct
  misc_feature 1..1440: note = Description of Artificial Sequence: Synthetic coding sequence
  source 1..1440: mol_type = other DNA
atggtgcacagcagcatgggcgcccccgagatcagaatgagcaagcccctggaggccgagaagcagggcctggacagccccagcgagcacaccgacaccgagagaaacggccccgacaccaaccaccagaacccccagaacaagaccagccccttcagcgtgagccccaccggccccagcaccaagatcaaggccgaggaccccagcggcgacagcgcccccgccgcccccctgcccccccagcccgcccagccccacctgccccaggcccagctgatgctgaccggcagccagctggccggcgacatccagcagctgctgcagctgcagcagctggtgctggtgcccggccaccacctgcagccccccgcccagttcctgctgccccaggcccagcagagccagcccggcctgctgcccacccccaacctgttccagctgccccagcagacccagggcgccctgctgaccagccagcccagagccggcctgcccacccaggccgtgaccagacccaccctgcccgacccccacctgagccacccccagccccccaagtgcctggagccccccagccaccccgaggagcccagcgacctggaggagctggagcagttcgccagaaccttcaagcagagaagaatcaagctgggcttcacccagggcgacgtgggcctggccatgggcaagctgtacggcaacgacttcagccagaccaccatcagcagattcgaggccctgaacctgagcttcaagaacatgtgcaagctgaagcccctgctggagaagtggctgaacgacgccgagaccatgagcgtggacagcagcctgcccagccccaaccagctgagcagccccagcctgggcttcgacggcctgcccggcagaagaagaaagaagagaaccagcatcgagaccaacgtgagattcgccctggagaagagcttcctggccaaccagaagcccaccagcgaggagatcctgctgatcgccgagcagctgcacatggagaaggaggtgatcagagtgtggttctgcaacagaagacagaaggagaagagaatcaacccctgcagcgccgcccccatgctgcccagccccggcaagcccgccagctacagcccccacatggtgaccccccagggcggcgccggcaccctgcccctgagccaggccagcagcagcctgagcaccaccgtgaccaccctgagcagcgccgtgggcaccctgcaccccagcagaaccgccggcggcggcggcggcggcggcggcgccgccccccccctgaacagcatccccagcgtgaccccccccccccccgccaccaccaacagcaccaaccccagcccccagggcagccacagcgccatcggcctgagcggcctgaaccccagcaccggccccggcctgtggtggaaccccgccccctaccagccctag

SEQ ID NO: 94229 - DNA, 1809 bp, synthetic construct
  misc_feature 1..1809: note = Description of Artificial Sequence: Synthetic coding sequence
  source 1..1809: mol_type = other DNA
atggtgcacagcagcatgggcgcccccgagatcagaatgagcaagcccctggaggccgagaagcagggcctggacagccccagcgagcacaccgacaccgagagaaacggccccgacaccaaccaccagaacccccagaacaagaccagccccttcagcgtgagccccaccggccccagcaccaagatcaaggccgaggaccccagcggcgacagcgcccccgccgcccccctgcccccccagcccgcccagccccacctgccccaggcccagctgatgctgaccggcagccagctggccggcgacatccagcagctgctgcagctgcagcagctggtgctggtgcccggccaccacctgcagccccccgcccagttcctgctgccccaggcccagcagagccagcccggcctgctgcccacccccaacctgttccagctgccccagcagacccagggcgccctgctgaccagccagcccagagccggcctgcccacccaggccgtgaccagacccaccctgcccgacccccacctgagccacccccagccccccaagtgcctggagccccccagccaccccgaggagcccagcgacctggaggagctggagcagttcgccagaaccttcaagcagagaagaatcaagctgggcttcacccagggcgacgtgggcctggccatgggcaagctgtacggcaacgacttcagccagaccaccatcagcagattcgaggccctgaacctgagcttcaagaacatgtgcaagctgaagcccctgctggagaagtggctgaacgacgccgagaccatgagcgtggacagcagcctgcccagccccaaccagctgagcagccccagcctgggcttcgacggcctgcccggcagaagaagaaagaagagaaccagcatcgagaccaacgtgagattcgccctggagaagagcttcctggccaaccagaagcccaccagcgaggagatcctgctgatcgccgagcagctgcacatggagaaggaggtgatcagagtgtggttctgcaacagaagacagaaggagaagagaatcaacccctgcagcgccgcccccatgctgcccagccccggcaagcccgccagctacagcccccacatggtgaccccccagggcggcgccggcaccctgcccctgagccaggccagcagcagcctgagcaccaccgtgaccaccctgagcagcgccgtgggcaccctgcaccccagcagaaccgccggcggcggcggcggcggcggcggcgccgccccccccctgaacagcatccccagcgtgaccccccccccccccgccaccaccaacagcaccaaccccagcccccagggcagccacagcgccatcggcctgagcggcctgaaccccagcaccggcagcaccatggtgggcctgagcagcggcctgagccccgccctgatgagcaacaaccccctggccaccatccaggccctggccagcggcggcaccctgcccctgaccagcctggacggcagcggcaacctggtgctgggcgccgccggcgccgcccccggcagccccggcctggtgaccagccccctgttcctgaaccacgccggcctgcccctgctgagcaccccccccggcgtgggcctggtgagcgccgccgccgccgccgtggccgccagcatcagcagcaagagccccggcctgagcagcagcagcagcagcagcagcagcagcagcagcagcacctgcagcgagaccgccgcccagacccccggcggccccggcggccccgaggccggcagcaagcccgagtag

SEQ ID NO: 94230 - DNA, 1392 bp, synthetic construct
  misc_feature 1..1392: note = Description of Artificial Sequence: Synthetic coding sequence
  source 1..1392: mol_type = other DNA
atggtgcacagcagcatgggcgcccccgagatcagaatgagcaagcccctggaggccgagaagcagggcctggacagccccagcgagcacaccgacaccgagagaaacggccccgacaccaaccaccagaacccccagaacaagaccagccccttcagcgtgagccccaccggccccagcaccaagatcaaggccgaggaccccagcggcgacagcgcccccgccgcccccctgcccccccagcccgcccagccccacctgccccaggcccagctgatgctgaccggcagccagctggccggcgacatccagcagctgctgcagctgcagcagctggtgctggtgcccggccaccacctgcagccccccgcccagttcctgctgccccaggcccagcagagccagcccggcctgctgcccacccccaacctgttccagctgccccagcagacccagggcgccctgctgaccagccagcccagagccggcctgcccacccagccccccaagtgcctggagccccccagccaccccgaggagcccagcgacctggaggagctggagcagttcgccagaaccttcaagcagagaagaatcaagctgggcttcacccagggcgacgtgggcctggccatgggcaagctgtacggcaacgacttcagccagaccaccatcagcagattcgaggccctgaacctgagcttcaagaacatgtgcaagctgaagcccctgctggagaagtggctgaacgacgccgagaccatgagcgtggacagcagcctgcccagccccaaccagctgagcagccccagcctgggcttcgacggcctgcccggcagaagaagaaagaagagaaccagcatcgagaccaacgtgagattcgccctggagaagagcttcctggccaaccagaagcccaccagcgaggagatcctgctgatcgccgagcagctgcacatggagaaggaggtgatcagagtgtggttctgcaacagaagacagaaggagaagagaatcaacccctgcagcgccgcccccatgctgcccagccccggcaagcccgccagctacagcccccacatggtgaccccccagggcggcgccggcaccctgcccctgagccaggccagcagcagcctgagcaccaccgtgaccaccctgagcagcgccgtgggcaccctgcaccccagcagaaccgccggcggcggcggcggcggcggcggcgccgccccccccctgaacagcatccccagcgtgaccccccccccccccgccaccaccaacagcaccaaccccagcccccagggcagccacagcgccatcggcctgagcggcctgaaccccagcaccggccccggcctgtggtggaaccccgccccctaccagccctag

SEQ ID NO: 94231 - DNA, 1425 bp, synthetic construct
  misc_feature 1..1425: note = Description of Artificial Sequence: Synthetic coding sequence
  source 1..1425: mol_type = other DNA
atgggcgcccccgagatcagaatgagcaagcccctggaggccgagaagcagggcctggacagccccagcgagcacaccgacaccgagagaaacggccccgacaccaaccaccagaacccccagaacaagaccagccccttcagcgtgagccccaccggccccagcaccaagatcaaggccgaggaccccagcggcgacagcgcccccgccgcccccctgcccccccagcccgcccagccccacctgccccaggcccagctgatgctgaccggcagccagctggccggcgacatccagcagctgctgcagctgcagcagctggtgctggtgcccggccaccacctgcagccccccgcccagttcctgctgccccaggcccagcagagccagcccggcctgctgcccacccccaacctgttccagctgccccagcagacccagggcgccctgctgaccagccagcccagagccggcctgcccacccaggccgtgaccagacccaccctgcccgacccccacctgagccacccccagccccccaagtgcctggagccccccagccaccccgaggagcccagcgacctggaggagctggagcagttcgccagaaccttcaagcagagaagaatcaagctgggcttcacccagggcgacgtgggcctggccatgggcaagctgtacggcaacgacttcagccagaccaccatcagcagattcgaggccctgaacctgagcttcaagaacatgtgcaagctgaagcccctgctggagaagtggctgaacgacgccgagaccatgagcgtggacagcagcctgcccagccccaaccagctgagcagccccagcctgggcttcgacggcctgcccggcagaagaagaaagaagagaaccagcatcgagaccaacgtgagattcgccctggagaagagcttcctggccaaccagaagcccaccagcgaggagatcctgctgatcgccgagcagctgcacatggagaaggaggtgatcagagtgtggttctgcaacagaagacagaaggagaagagaatcaacccctgcagcgccgcccccatgctgcccagccccggcaagcccgccagctacagcccccacatggtgaccccccagggcggcgccggcaccctgcccctgagccaggccagcagcagcctgagcaccaccgtgaccaccctgagcagcgccgtgggcaccctgcaccccagcagaaccgccggcggcggcggcggcggcggcggcgccgccccccccctgaacagcatccccagcgtgaccccccccccccccgccaccaccaacagcaccaaccccagcccccagggcagccacagcgccatcggcctgagcggcctgaaccccagcaccggccccggcctgtggtggaaccccgccccctaccagccctag

SEQ ID NO: 94232 - DNA, 1203 bp, synthetic construct
  misc_feature 1..1203: note = Description of Artificial Sequence: Synthetic coding sequence
  source 1..1203: mol_type = other DNA
atggtgcacagcagcatgggcgcccccgagatcagaatgagcaagcccctggaggccgagaagcagggcctggacagccccagcgagcacaccgacaccgagagaaacggccccgacaccaaccaccagaacccccagaacaagaccagccccttcagcgtgagccccaccggccccagcaccaagatcaaggccgaggaccccagcggcgacagcgcccccgccgcccccctgcccccccagcccgcccagccccacctgccccaggcccagctgatgctgaccggcagccagctggccggcgacatccagcagctgctgcagctgcagcagctggtgctggtgcccggccaccacctgcagccccccgcccagttcctgctgccccaggcccagcagagccagcccggcctgctgcccacccccaacctgttccagctgccccagcagacccagggcgccctgctgaccagccagcccagagccggcctgcccacccagccccccaagtgcctggagccccccagccaccccgaggagcccagcgacctggaggagctggagcagttcgccagaaccttcaagcagagaagaatcaagctgggcttcacccagggcgacgtgggcctggccatgggcaagctgtacggcaacgacttcagccagaccaccatcagcagattcgaggccctgaacctgagcttcaagaacatgtgcaagctgaagcccctgctggagaagtggctgaacgacgccgagaccatgagcgtggacagcagcctgcccagccccaaccagctgagcagccccagcctgggcttcgacggcctgcccggcagaagaagaaagaagagaaccagcatcgagaccaacgtgagattcgccctggagaagagcttcctggccaaccagaagcccaccagcgaggagatcctgctgatcgccgagcagctgcacatggagaaggaggtgatcagagtgtggttctgcaacagaagacagaaggagaagagaatcaacccctgcagcgccgcccccatgctgcccagccccggcaagcccgccagctacagcccccacatggtgaccccccagggcggcgccggcaccctgcccctgagccaggccagcagcagcctgagcaccaccgcccagacccccgccctgaaggccgccaccagactgagcgcctgccaggcctag

SEQ ID NO: 94233 - DNA, 1404 bp, synthetic construct
  misc_feature 1..1404: note = Description of Artificial Sequence: Synthetic coding sequence
  source 1..1404: mol_type = other DNA
atggtgcacagcagcatgggcgcccccgagatcagaatgagcaagcccctggaggccgagaagcagggcctggacagccccagcgagcacaccgacaccgagagaaacggccccgacaccaaccaccagaacccccagaacaagaccagccccttcagcgtgagccccaccggccccagcaccaagatcaaggccgaggaccccagcggcgacagcgcccccgccgcccccctgcccccccagcccgcccagccccacctgccccaggcccagctgatgctgaccggcagccagctggccggcgacatccagcagctgctgcagctgcagcagctggtgctggtgcccggccaccacctgcagccccccgcccagttcctgctgccccaggcccagcagagccagcccggcctgctgcccacccccaacctgttccagctgccccagcagacccagggcgccctgctgaccagccagcccagagccggcctgcccacccaggccgtgaccagacccaccctgcccgacccccacctgagccacccccagccccccaagtgcctggagccccccagccaccccgaggagcccagcgacctggaggagctggagcagttcgccagaaccttcaagcagagaagaatcaagctgggcttcacccagggcgacgtgggcctggccatgggcaagctgtacggcaacgacttcagccagaccaccatcagcagattcgaggccctgaacctgagcttcaagaacatgtgcaagctgaagcccctgctggagaagtggctgaacgacgccgagaccatgagcgtggacagcagcctgcccagccccaaccagctgagcagccccagcctgggcttcgacggcctgcccggcagaagaagaaagaagagaaccagcatcgagaccaacgtgagattcgccctggagaagagcttcctggccaaccagaagcccaccagcgaggagatcctgctgatcgccgagcagctgcacatggagaaggaggtgatcagagtgtggttctgcaacagaagacagaaggagaagagaatcaacccctgcagcgccgcccccatgctgcccagccccggcaagcccgccagctacagcccccacatggtgaccccccagggcggcgccggcaccctgcccctgagccaggccagcagcagcctgagcaccaccgtgaccaccctgagcagcgccgtgggcaccctgcaccccagcagaaccgccggcggcggcggcggcggcggcggcgccgccccccccctgaacagcatccccagcgtgaccccccccccccccgccaccaccaacagcaccaaccccagcccccagggcagccacagcgccatcggcctgagcggcctgaaccccagcaccggctag

SEQ ID NO: 94234 - DNA, 1761 bp, synthetic construct
  misc_feature 1..1761: note = Description of Artificial Sequence: Synthetic coding sequence
  source 1..1761: mol_type = other DNA
atggtgcacagcagcatgggcgcccccgagatcagaatgagcaagcccctggaggccgagaagcagggcctggacagccccagcgagcacaccgacaccgagagaaacggccccgacaccaaccaccagaacccccagaacaagaccagccccttcagcgtgagccccaccggccccagcaccaagatcaaggccgaggaccccagcggcgacagcgcccccgccgcccccctgcccccccagcccgcccagccccacctgccccaggcccagctgatgctgaccggcagccagctggccggcgacatccagcagctgctgcagctgcagcagctggtgctggtgcccggccaccacctgcagccccccgcccagttcctgctgccccaggcccagcagagccagcccggcctgctgcccacccccaacctgttccagctgccccagcagacccagggcgccctgctgaccagccagcccagagccggcctgcccacccagccccccaagtgcctggagccccccagccaccccgaggagcccagcgacctggaggagctggagcagttcgccagaaccttcaagcagagaagaatcaagctgggcttcacccagggcgacgtgggcctggccatgggcaagctgtacggcaacgacttcagccagaccaccatcagcagattcgaggccctgaacctgagcttcaagaacatgtgcaagctgaagcccctgctggagaagtggctgaacgacgccgagaccatgagcgtggacagcagcctgcccagccccaaccagctgagcagccccagcctgggcttcgacggcctgcccggcagaagaagaaagaagagaaccagcatcgagaccaacgtgagattcgccctggagaagagcttcctggccaaccagaagcccaccagcgaggagatcctgctgatcgccgagcagctgcacatggagaaggaggtgatcagagtgtggttctgcaacagaagacagaaggagaagagaatcaacccctgcagcgccgcccccatgctgcccagccccggcaagcccgccagctacagcccccacatggtgaccccccagggcggcgccggcaccctgcccctgagccaggccagcagcagcctgagcaccaccgtgaccaccctgagcagcgccgtgggcaccctgcaccccagcagaaccgccggcggcggcggcggcggcggcggcgccgccccccccctgaacagcatccccagcgtgaccccccccccccccgccaccaccaacagcaccaaccccagcccccagggcagccacagcgccatcggcctgagcggcctgaaccccagcaccggcagcaccatggtgggcctgagcagcggcctgagccccgccctgatgagcaacaaccccctggccaccatccaggccctggccagcggcggcaccctgcccctgaccagcctggacggcagcggcaacctggtgctgggcgccgccggcgccgcccccggcagccccggcctggtgaccagccccctgttcctgaaccacgccggcctgcccctgctgagcaccccccccggcgtgggcctggtgagcgccgccgccgccgccgtggccgccagcatcagcagcaagagccccggcctgagcagcagcagcagcagcagcagcagcagcagcagcagcacctgcagcgagaccgccgcccagacccccggcggccccggcggccccgaggccggcagcaagcccgagtag

SEQ ID NO: 94235 - DNA, 1311 bp, synthetic construct
  misc_feature 1..1311: note = Description of Artificial Sequence: Synthetic coding sequence
  source 1..1311: mol_type = other DNA
atggtgaacctggagagcatgcacaccgacatcaagatgagcggcgacgtggccgacagcaccgacgccagaagcaccctgagccaggtggagcccggcaacgacagaaacggcctggacttcaacagacagatcaagaccgaggacctgagcgacagcctgcagcagaccctgagccacagaccctgccacctgagccagggccccgccatgatgagcggcaaccagatgagcggcctgaacgccagcccctgccaggacatggccagcctgcaccccctgcagcagctggtgctggtgcccggccacctgcagagcgtgagccagttcctgctgagccagacccagcccggccagcagggcctgcagcccaacctgctgcccttcccccagcagcagagcggcctgctgctgccccagaccggccccggcctggccagccaggccttcggccaccccggcctgcccggcagcagcctggagccccacctggaggccagccagcacctgcccgtgcccaagcacctgcccagcagcggcggcgccgacgagcccagcgacctggaggagctggagaagttcgccaagaccttcaagcagagaagaatcaagctgggcttcacccagggcgacgtgggcctggccatgggcaagctgtacggcaacgacttcagccagaccaccatcagcagattcgaggccctgaacctgagcttcaagaacatgtgcaagctgaagcccctgctggagaagtggctgaacgacgccgagagcagccccagcgaccccagcgtgagcacccccagcagctaccccagcctgagcgaggtgttcggcagaaagagaaagaagagaaccagcatcgagaccaacatcagactgaccctggagaagagattccaggacaaccccaagcccagcagcgaggagatcagcatgatcgccgagcagctgagcatggagaaggaggtggtgagagtgtggttctgcaacagaagacagaaggagaagagaatcaactgccccgtggccacccccatcaagccccccgtgtacaacagcagactggtgagccccagcggcagcctgggccccctgagcgtgccccccgtgcacagcaccatgcccggcaccgtgaccagcagctgcagccccggcaacaacagcagacccagcagccccggcagcggcctgcacgccagcagccccaccgccagccagaacaacagcaaggccgccgtgaacagcgccagcagcttcaacagcagcggcagctggtacagatggaaccacagcacctacctgcactag

SEQ ID NO: 94236 - DNA, 1317 bp, synthetic construct
  misc_feature 1..1317: note = Description of Artificial Sequence: Synthetic coding sequence
  source 1..1317: mol_type = other DNA
atggagagccccagaaccgccaagggcggcagagacatcaagatgagcggcgacgtggccgacagcaccgacgccagaagcaccctgagccaggtggagcccggcaacgacagaaacggcctggacttcaacagacagatcaagaccgaggacctgagcgacagcctgcagcagaccctgagccacagaccctgccacctgagccagggccccgccatgatgagcggcaaccagatgagcggcctgaacgccagcccctgccaggacatggccagcctgcaccccctgcagcagctggtgctggtgcccggccacctgcagagcgtgagccagttcctgctgagccagacccagcccggccagcagggcctgcagcccaacctgctgcccttcccccagcagcagagcggcctgctgctgccccagaccggccccggcctggccagccaggccttcggccaccccggcctgcccggcagcagcctggagccccacctggaggccagccagcacctgcccgtgcccaagcacctgcccagcagcggcggcgccgacgagcccagcgacctggaggagctggagaagttcgccaagaccttcaagcagagaagaatcaagctgggcttcacccagggcgacgtgggcctggccatgggcaagctgtacggcaacgacttcagccagaccaccatcagcagattcgaggccctgaacctgagcttcaagaacatgtgcaagctgaagcccctgctggagaagtggctgaacgacgccgagagcagccccagcgaccccagcgtgagcacccccagcagctaccccagcctgagcgaggtgttcggcagaaagagaaagaagagaaccagcatcgagaccaacatcagactgaccctggagaagagattccaggacaaccccaagcccagcagcgaggagatcagcatgatcgccgagcagctgagcatggagaaggaggtggtgagagtgtggttctgcaacagaagacagaaggagaagagaatcaactgccccgtggccacccccatcaagccccccgtgtacaacagcagactggtgagccccagcggcagcctgggccccctgagcgtgccccccgtgcacagcaccatgcccggcaccgtgaccagcagctgcagccccggcaacaacagcagacccagcagccccggcagcggcctgcacgccagcagccccaccgccagccagaacaacagcaaggccgccgtgaacagcgccagcagcttcaacagcagcggcagctggtacagatggaaccacagcacctacctgcactag

SEQ ID NO: 94237 - DNA, 1356 bp, synthetic construct
  misc_feature 1..1356: note = Description of Artificial Sequence: Synthetic coding sequence
  source 1..1356: mol_type = other DNA
atggccaccaccgcccagtacctgcccagaggccccggcggcggcgccggcggcaccggccccctgatgcaccccgacgccgccgccgccgccgccgccgccgccgccgccgagagactgcacgccggcgccgcctacagagaggtgcagaagctgatgcaccacgagtggctgggcgccggcgccggccaccccgtgggcctggcccacccccagtggctgcccaccggcggcggcggcggcggcgactgggccggcggcccccacctggagcacggcaaggccggcggcggcggcaccggcagagccgacgacggcggcggcggcggcggcttccacgccagactggtgcaccagggcgccgcccacgccggcgccgcctgggcccagggcagcaccgcccaccacctgggccccgccatgagccccagccccggcgccagcggcggccaccagccccagcccctgggcctgtacgcccaggccgcctaccccggcggcggcggcggcggcctggccggcatgctggccgccggcggcggcggcgccggccccggcctgcaccacgccctgcacgaggacggccacgaggcccagctggagcccagcccccccccccacctgggcgcccacggccacgcccacggccacgcccacgccggcggcctgcacgccgccgccgcccacctgcaccccggcgccggcggcggcggcagcagcgtgggcgagcacagcgacgaggacgcccccagcagcgacgacctggagcagttcgccaagcagttcaagcagagaagaatcaagctgggcttcacccaggccgacgtgggcctggccctgggcaccctgtacggcaacgtgttcagccagaccaccatctgcagattcgaggccctgcagctgagcttcaagaacatgtgcaagctgaagcccctgctgaacaagtggctggaggagaccgacagcagcagcggcagccccaccaacctggacaagatcgccgcccagggcagaaagagaaagaagagaaccagcatcgaggtgggcgtgaagggcgccctggagagccacttcctgaagtgccccaagcccagcgcccacgagatcaccggcctggccgacagcctgcagctggagaaggaggtggtgagagtgtggttctgcaacagaagacagaaggagaagagaatgacccccgccgccggcgccggccacccccccatggacgacgtgtacgcccccggcgagctgggccccggcggcggcggcgccagcccccccagcgccccccccccccccccccccgccgccctgcaccaccaccaccaccacaccctgcccggcagcgtgcagtag

SEQ ID NO: 94238 - DNA, 1332 bp, synthetic construct
  misc_feature 1..1332: note = Description of Artificial Sequence: Synthetic coding sequence
  source 1..1332: mol_type = other DNA
atggccaccgccgccagcaaccactacagcctgctgaccagcagcgccagcatcgtgcacgccgagccccccggcggcatgcagcagggcgccggcggctacagagaggcccagagcctggtgcagggcgactacggcgccctgcagagcaacggccaccccctgagccacgcccaccagtggatcaccgccctgagccacggcggcggcggcggcggcggcggcggcggcggcggcggcggcggcggcggcggcggcggcggcgacggcagcccctggagcaccagccccctgggccagcccgacatcaagcccagcgtggtggtgcagcagggcggcagaggcgacgagctgcacggccccggcgccctgcagcagcagcaccagcagcagcagcagcagcagcagcagcagcagcagcagcagcagcagcagcagcagcagcagagacccccccacctggtgcaccacgccgccaaccaccaccccggccccggcgcctggagaagcgccgccgccgccgcccacctgccccccagcatgggcgccagcaacggcggcctgctgtacagccagcccagcttcaccgtgaacggcatgctgggcgccggcggccagcccgccggcctgcaccaccacggcctgagagacgcccacgacgagccccaccacgccgaccaccacccccacccccacagccacccccaccagcagccccccccccccccccccccccagggcccccccggccaccccggcgcccaccacgacccccacagcgacgaggacacccccaccagcgacgacctggagcagttcgccaagcagttcaagcagagaagaatcaagctgggcttcacccaggccgacgtgggcctggccctgggcaccctgtacggcaacgtgttcagccagaccaccatctgcagattcgaggccctgcagctgagcttcaagaacatgtgcaagctgaagcccctgctgaacaagtggctggaggaggccgacagcagcagcggcagccccaccagcatcgacaagatcgccgcccagggcagaaagagaaagaagagaaccagcatcgaggtgagcgtgaagggcgccctggagagccacttcctgaagtgccccaagcccagcgcccaggagatcaccagcctggccgacagcctgcagctggagaaggaggtggtgagagtgtggttctgcaacagaagacagaaggagaagagaatgaccccccccggcggcaccctgcccggcgccgaggacgtgtacggcggcagcagagacacccccccccaccacggcgtgcagacccccgtgcagtag

SEQ ID NO: 94239 - DNA, 1131 bp, synthetic construct
  misc_feature 1..1131: note = Description of Artificial Sequence: Synthetic coding sequence
  source 1..1131: mol_type = other DNA
atggccaccgccgccagcaaccactacagcctgctgaccagcagcgccagcatcgtgcacgccgagccccccggcggcatgcagcagggcgccggcggctacagagaggcccagagcctggtgcagggcgactacggcgccctgcagagcaacggccaccccctgagccacgcccaccagtggatcaccgccctgagccacggcggcgacggcagcccctggagcaccagccccctgggccagcccgacatcaagcccagcgtggtggtgcagcagggcggcagaggcgacgagctgcacggccccggcgccctgcagcagcagcaccagcagcagcagcagcagcagcagcagcagcagcagcagcagcagcagcagcagcagcagcagagacccccccacctggtgcaccacgccgccaaccaccaccccggccccggcgcctggagaagcgccgccgccgccgcccacctgccccccagcatgggcgccagcaacggcggcctgctgtacagccagccccccccccccccccagggcccccccggccaccccggcgcccaccacgacccccacagcgacgaggacacccccaccagcgacgacctggagcagttcgccaagcagttcaagcagagaagaatcaagctgggcttcacccaggccgacgtgggcctggccctgggcaccctgtacggcaacgtgttcagccagaccaccatctgcagattcgaggccctgcagctgagcttcaagaacatgtgcaagctgaagcccctgctgaacaagtggctggaggaggccgacagcagcagcggcagccccaccagcatcgacaagatcgccgcccagggcagaaagagaaagaagagaaccagcatcgaggtgagcgtgaagggcgccctggagagccacttcctgaagtgccccaagcccagcgcccaggagatcaccagcctggccgacagcctgcagctggagaaggaggtggtgagagtgtggttctgcaacagaagacagaaggagaagagaatgaccccccccggcggcaccctgcccggcgccgaggacgtgtacggcggcagcagagacacccccccccaccacggcgtgcagacccccgtgcagtag

SEQ ID NO: 94240 - DNA, 1503 bp, synthetic construct
  misc_feature 1..1503: note = Description of Artificial Sequence: Synthetic coding sequence
  source 1..1503: mol_type = other DNA
atggccaccgccgccagcaacccctacctgcccggcaacagcctgctggccgccggcagcatcgtgcacagcgacgccgccggcgccggcggcggcggcggcggcggcggcggcggcggcggcggcggcgccggcggcggcggcggcggcatgcagcccggcagcgccgccgtgaccagcggcgcctacagaggcgaccccagcagcgtgaagatggtgcagagcgacttcatgcagggcgccatggccgccagcaacggcggccacatgctgagccacgcccaccagtgggtgaccgccctgccccacgccgccgccgccgccgccgccgccgccgccgccgccgtggaggccagcagcccctggagcggcagcgccgtgggcatggccggcagcccccagcagcccccccagcccccccccccccccccccagggccccgacgtgaagggcggcgccggcagagacgacctgcacgccggcaccgccctgcaccacagaggccccccccacctgggccccccccccccccccccccaccagggccaccccggcggctggggcgccgccgccgccgccgccgccgccgccgccgccgccgccgccgccgcccacctgcccagcatggccggcggccagcagccccccccccagagcctgctgtacagccagcccggcggcttcaccgtgaacggcatgctgagcgccccccccggccccggcggcggcggcggcggcgccggcggcggcgcccagagcctggtgcaccccggcctggtgagaggcgacacccccgagctggccgagcaccaccaccaccaccaccaccacgcccacccccaccccccccacccccaccacgcccagggccccccccaccacggcggcggcggcggcggcgccggccccggcctgaacagccacgacccccacagcgacgaggacacccccaccagcgacgacctggagcagttcgccaagcagttcaagcagagaagaatcaagctgggcttcacccaggccgacgtgggcctggccctgggcaccctgtacggcaacgtgttcagccagaccaccatctgcagattcgaggccctgcagctgagcttcaagaacatgtgcaagctgaagcccctgctgaacaagtggctggaggaggccgacagcagcaccggcagccccaccagcatcgacaagatcgccgcccagggcagaaagagaaagaagagaaccagcatcgaggtgagcgtgaagggcgccctggagagccacttcctgaagtgccccaagcccagcgcccaggagatcaccaacctggccgacagcctgcagctggagaaggaggtggtgagagtgtggttctgcaacagaagacagaaggagaagagaatgaccccccccggcatccagcagcagacccccgacgacgtgtacagccaggtgggcaccgtgagcgccgacaccccccccccccaccacggcctgcagaccagcgtgcagtag

SEQ ID NO: 94241 - DNA, 1086 bp, synthetic construct
  misc_feature 1..1086: note = Description of Artificial Sequence: Synthetic coding sequence
  source 1..1086: mol_type = other DNA
atggccaccgccgccagcaacccctacagcatcctgagcagcaccagcctggtgcacgccgacagcgccggcatgcagcagggcagccccttcagaaacccccagaagctgctgcagagcgactacctgcagggcgtgcccagcaacggccaccccctgggccaccactgggtgaccagcctgagcgacggcggcccctggagcagcaccctggccaccagccccctggaccagcaggacgtgaagcccggcagagaggacctgcagctgggcgccatcatccaccacagaagcccccacgtggcccaccacagcccccacaccaaccaccccaacgcctggggcgccagccccgcccccaaccccagcatcaccagcagcggccagcccctgaacgtgtacagccagcccggcttcaccgtgagcggcatgctggagcacggcggcctgacccccccccccgccgccgccagcgcccagagcctgcaccccgtgctgagagagccccccgaccacggcgagctgggcagccaccactgccaggaccacagcgacgaggagacccccaccagcgacgagctggagcagttcgccaagcagttcaagcagagaagaatcaagctgggcttcacccaggccgacgtgggcctggccctgggcaccctgtacggcaacgtgttcagccagaccaccatctgcagattcgagggcctgcagctgagcttcaagaacatgtgcaagctgaagcccctgctgaacaagtggctggaggaggccgacagcagcaccggcagccccaccagcatcgacaagatcgccgcccagggcagaaagagaaagaagagaaccagcatcgaggtgagcgtgaagggcgtgctggagacccacttcctgaagtgccccaagcccgccgcccaggagatcagcagcctggccgacagcctgcagctggagaaggaggtggtgagagtgtggttctgcaacagaagacagaaggagaagagaatgaccccccccggcgaccagcagccccacgaggtgtacagccacaccgtgaagaccgacaccagctgccacgacctgtag

SEQ ID NO: 94242 - DNA, 1260 bp, synthetic construct
  misc_feature 1..1260: note = Description of Artificial Sequence: Synthetic coding sequence
  source 1..1260: mol_type = other DNA
atgatgagcatgaacagcaagcagccccacttcgccatgcaccccaccctgcccgagcacaagtaccccagcctgcacagcagcagcgaggccatcagaagagcctgcctgcccaccccccccctgcagagcaacctgttcgccagcctggacgagaccctgctggccagagccgaggccctggccgccgtggacatcgccgtgagccagggcaagagccaccccttcaagcccgacgccacctaccacaccatgaacagcgtgccctgcaccagcaccagcaccgtgcccctggcccaccaccaccaccaccaccaccaccaccaggccctggagcccggcgacctgctggaccacatcagcagccccagcctggccctgatggccggcgccggcggcgccggcgccgccgccggcggcggcggcgcccacgacggccccggcggcggcggcggccccggcggcggcggcggccccggcggcggccccggcggcggcggcggcggcggccccggcggcggcggcggcggccccggcggcggcctgctgggcggcagcgcccacccccacccccacatgcacagcctgggccacctgagccaccccgccgccgccgccgccatgaacatgcccagcggcctgccccaccccggcctggtggccgccgccgcccaccacggcgccgccgccgccgccgccgccgccgccgccggccaggtggccgccgccagcgccgccgccgccgtggtgggcgccgccggcctggccagcatctgcgacagcgacaccgaccccagagagctggaggccttcgccgagagattcaagcagagaagaatcaagctgggcgtgacccaggccgacgtgggcagcgccctggccaacctgaagatccccggcgtgggcagcctgagccagagcaccatctgcagattcgagagcctgaccctgagccacaacaacatgatcgccctgaagcccatcctgcaggcctggctggaggaggccgagggcgcccagagagagaagatgaacaagcccgagctgttcaacggcggcgagaagaagagaaagagaaccagcatcgccgcccccgagaagagaagcctggaggcctacttcgccgtgcagcccagacccagcagcgagaagatcgccgccatcgccgagaagctggacctgaagaagaacgtggtgagagtgtggttctgcaaccagagacagaagcagaagagaatgaagttcagcgccacctactag

SEQ ID NO: 94243 - DNA, 1911 bp, synthetic construct
  misc_feature 1..1911: note = Description of Artificial Sequence: Synthetic coding sequence
  source 1..1911: mol_type = other DNA
atgaagaagctgcagggcgcccacctgagaaagcccgtgacccccgacctgctgatgacccccagcgaccagggcgacgtggacctggacgtggacttcgccgcccacagaggcaactggaccggcaagctggacttcctgctgagctgcatcggctactgcgtgggcctgggcaacgtgtggagattcccctacagagcctacaccaacggcggcggcgccttcctggtgccctacttcctgatgctggccatctgcggcatccccctgttcttcctggagctgagcctgggccagttcagcagcctgggccccctggccgtgtggaagatcagccccctgttcaagggcgccggcgccgccatgctgctgatcgtgggcctggtggccatctactacaacatgatcatcgcctacgtgctgttctacctgttcgccagcctgaccagcgacctgccctgggagcactgcggcaactggtggaacaccgagctgtgcctggagcacagagtgagcaaggacggcaacggcgccctgcccctgaacctgacctgcaccgtgagccccagcgaggagtactggagcagatacgtgctgcacatccagggcagccagggcatcggcagccccggcgagatcagatggaacctgtgcctgtgcctgctgctggcctgggtgatcgtgttcctgtgcatcctgaagggcgtgaagagcagcggcaaggtggtgtacttcaccgccaccttcccctacctgatcctgctgatgctgctggtgagaggcgtgaccctgcccggcgcctggaagggcatccagttctacctgaccccccagttccaccacctgctgagcagcaaggtgtggatcgaggccgccctgcagatcttctacagcctgggcgtgggcttcggcggcctgctgaccttcgccagctacaacaccttccaccagaacatctacagagacaccttcatcgtgaccctgggcaacgccatcaccagcatcctggccggcttcgccatcttcagcgtgctgggctacatgagccaggagctgggcgtgcccgtggaccaggtggccaaggccggccccggcctggccttcgtggtgtacccccaggccatgaccatgctgcccctgagccccttctggagcttcctgttcttcttcatgctgctgaccctgggcctggacagccagttcgccttcctggagaccatcgtgaccgccgtgaccgacgagttcccctactacctgagacccaagaaggccgtgttcagcggcctgatctgcgtggccatgtacctgatgggcctgatcctgaccaccgacggcggcatgtactggctggtgctgctggacgactacagcgccagcttcggcctgatggtggtggtgatcaccacctgcctggccgtgaccagagtgtacggcatccagagattctgcagagacatccacatgatgctgggcttcaagcccggcctgtacttcagagcctgctggctgttcctgagccccgccaccctgctggccctgatggtgtacagcatcgtgaagtaccagcccagcgagtacggcagctacagattccccccctgggccgagctgctgggcatcctgatgggcctgctgagctgcctgatgatccccgccggcatgctggtggccgtgctgagagaggagggcagcctgtgggagagactgcagcaggccagcagacccgccatggactggggccccagcctggaggagaacagaaccggcatgtacgtggccaccctggccggcagccagagccccaagcccctgatggtgcacatgagaaagtacggcggcatcaccagcttcgagaacaccgccatcgaggtggacagagagatcgccgaggaggaggagagcatgatgtag

SEQ ID NO: 94244 - DNA, 798 bp, synthetic construct
  misc_feature 1..798: note = Description of Artificial Sequence: Synthetic coding sequence
  source 1..798: mol_type = other DNA
atgcacttctacagactgttcctgggcgccaccagaagattcctgaaccccgagtggaagggcgagatcgacaactggtgcgtgtacgtgctgaccagcctgctgcccttcaagatccagagccaggacatcaaggccctgcagaaggagctggagcagttcgccaagctgctgaagcagaagagaatcaccctgggctacacccaggccgacgtgggcctgaccctgggcgtgctgttcggcaaggtgttcagccagaccaccatctgcagattcgaggccctgcagctgagcttcaagaacatgtgcaagctgagacccctgctgcagaagtgggtggaggaggccgacaacaacgagaacctgcaggagatctgcaaggccgagaccctggtgcaggccagaaagagaaagagaaccagcatcgagaacagagtgagaggcaacctggagaacctgttcctgcagtgccccaagcccaccctgcagcagatcagccacatcgcccagcagctgggcctggagaaggacgtggtgagagtgtggttctgcaacagaagacagaagggcaagagaagcagcagcgactacgcccagagagaggacttcgaggccgccggcagccccttcagcggcggccccgtgagcttccccctggcccccggcccccacttcggcacccccggctacggcagcccccacttcaccgccctgtacagcagcgtgcccttccccgagggcgaggccttcccccccgtgagcgtgaccaccctgggcagccccatgcacagcaactag

SEQ ID NO: 94245 - DNA, 1083 bp, synthetic construct
  misc_feature 1..1083: note = Description of Artificial Sequence: Synthetic coding sequence
  source 1..1083: mol_type = other DNA
atggccggccacctggccagcgacttcgccttcagccccccccccggcggcggcggcgacggccccggcggccccgagcccggctgggtggaccccagaacctggctgagcttccagggcccccccggcggccccggcatcggccccggcgtgggccccggcagcgaggtgtggggcatccccccctgcccccccccctacgagttctgcggcggcatggcctactgcggcccccaggtgggcgtgggcctggtgccccagggcggcctggagaccagccagcccgagggcgaggccggcgtgggcgtggagagcaacagcgacggcgccagccccgagccctgcaccgtgacccccggcgccgtgaagctggagaaggagaagctggagcagaaccccgaggagagccaggacatcaaggccctgcagaaggagctggagcagttcgccaagctgctgaagcagaagagaatcaccctgggctacacccaggccgacgtgggcctgaccctgggcgtgctgttcggcaaggtgttcagccagaccaccatctgcagattcgaggccctgcagctgagcttcaagaacatgtgcaagctgagacccctgctgcagaagtgggtggaggaggccgacaacaacgagaacctgcaggagatctgcaaggccgagaccctggtgcaggccagaaagagaaagagaaccagcatcgagaacagagtgagaggcaacctggagaacctgttcctgcagtgccccaagcccaccctgcagcagatcagccacatcgcccagcagctgggcctggagaaggacgtggtgagagtgtggttctgcaacagaagacagaagggcaagagaagcagcagcgactacgcccagagagaggacttcgaggccgccggcagccccttcagcggcggccccgtgagcttccccctggcccccggcccccacttcggcacccccggctacggcagcccccacttcaccgccctgtacagcagcgtgcccttccccgagggcgaggccttcccccccgtgagcgtgaccaccctgggcagccccatgcacagcaactag

SEQ ID NO: 94246 - DNA, 372 bp, synthetic construct
  misc_feature 1..372: note = Description of Artificial Sequence: Synthetic coding sequence
  source 1..372: mol_type = other DNA
atggccggccacctggccagcgacttcgccttcagccccccccccggcggcggcggcgacggccccggcggccccgagcccggctgggtggaccccagaacctggctgagcttccagggcccccccggcggccccggcatcggccccggcgtgggccccggcagcgaggtgtggggcatccccccctgcccccccccctacgagttctgcggcggcatggcctactgcggcccccaggtgggcgtgggcctggtgccccagggcggcctggagaccagccagcccgagggcgaggccggcgtgggcgtggagacccccatgggcccccccagaagccccgccccccaccccttccccttccccctgctgtag

SEQ ID NO: 94247 - DNA, 558 bp, synthetic construct
  misc_feature 1..558: note = Description of Artificial Sequence: Synthetic coding sequence
  source 1..558: mol_type = other DNA
atggccggccacctggccagcgacttcgccttcagccccccccccggcggcggcggcgacggccccggcggccccgagcccggctgggtggaccccagaacctggctgagcttccagggcccccccggcggccccggcatcggccccggcgtgggccccggcagcgaggtgtggggcatccccccctgcccccccccctacgagttctgcggcggcatggcctactgcggcccccaggtgggcgtgggcctggtgccccagggcggcctggagaccagccagcccgagggcgaggccggcgtgggcgtggagagcaacagcgacggcgccagccccgagccctgcaccgtgacccccggcgccgtgaagctggagaaggagaagctggagcagaaccccgaggagagccaggacatcaaggccctgcagaaggagctggagcagttcgccaagctgctgaagcagaagagaatcaccctgggctacacccaggccgacgtgcaccccggcggcagcatctgggagggcatccagcccaacgaccacctgcccctgtag

SEQ ID NO: 94248 - DNA, 558 bp, synthetic construct; identical to SEQ ID NO: 94247
  misc_feature 1..558: note = Description of Artificial Sequence: Synthetic coding sequence
  source 1..558: mol_type = other DNA

SEQ ID NO: 94249 - DNA, 495 bp, synthetic construct
  misc_feature 1..495: note = Description of Artificial Sequence: Synthetic coding sequence
  source 1..495: mol_type = other DNA
atgtgcaagctgagacccctgctgcagaagtgggtggaggaggccgacaacaacgagaacctgcaggagatctgcaaggccgagaccctggtgcaggccagaaagagaaagagaaccagcatcgagaacagagtgagaggcaacctggagaacctgttcctgcagtgccccaagcccaccctgcagcagatcagccacatcgcccagcagctgggcctggagaaggacgtggtgagagtgtggttctgcaacagaagacagaagggcaagagaagcagcagcgactacgcccagagagaggacttcgaggccgccggcagccccttcagcggcggccccgtgagcttccccctggcccccggcccccacttcggcacccccggctacggcagcccccacttcaccgccctgtacagcagcgtgcccttccccgagggcgaggccttcccccccgtgagcgtgaccaccctgggcagccccatgcacagcaactag

SEQ ID NO: 94250 - DNA, 495 bp, synthetic construct; identical to SEQ ID NO: 94249
  misc_feature 1..495: note = Description of Artificial Sequence: Synthetic coding sequence
  source 1..495: mol_type = other DNA

SEQ ID NO: 94251 - DNA, 2076 bp, synthetic construct
  misc_feature 1..2076: note = Description of Artificial Sequence: Synthetic coding sequence
  source 1..2076: mol_type = other DNA
atgagcgccctgctgcaggaccccatgatcgccggccaggtgagcaagcccctgctgagcgtgagaagcgagatgaacgccgagctgagaggcgaggacaaggccgccaccagcgacagcgagctgaacgagcccctgctggcccccgtggagagcaacgacagcgaggacacccccagcaagctgttcggcgccagaggcaaccccgccctgagcgaccccggcacccccgaccagcaccaggccagccagacccacccccccttccccgtgggcccccagcccctgctgaccgcccagcagctggccagcgccgtggccggcgtgatgcccggcggcccccccgccctgaaccagcccatcctgatccccttcaacatggccggccagctgggcggccagcagggcctggtgctgaccctgcccaccgccaacctgaccaacatccagggcctggtggccgccgccgccgccggcggcatcatgaccctgcccctgcagaacctgcaggccaccagcagcctgaacagccagctgcagcagctgcagctgcagctgcagcagcagcagcagcagcagcagcagcagcccccccccagcaccaaccagcacccccagcccgccccccaggcccccagccagagccagcagcagcccctgcagcccacccccccccagcagcccccccccgccagccagcagccccccgcccccaccagccagctgcagcaggccccccagccccagcagcaccagccccacagccacagccagaaccagaaccagcccagccccacccagcagagcagcagccccccccagaagcccagccagagccccggccacggcctgcccagccccctgaccccccccaaccccctgcagctggtgaacaaccccctggccagccaggccgccgccgccgccgccgccatgagcagcatcgccagcagccaggccttcggcaacgccctgagcagcctgcagggcgtgaccggccagctggtgaccaacgcccagggccagatcatcggcaccatccccctgatgcccaaccccggccccagcagccaggccgccagcggcacccagggcctgcaggtgcagcccatcaccccccagctgctgaccaacgcccagggccagatcatcgccaccgtgatcggcaaccagatcctgcccgtgatcaacacccagggcatcaccctgagccccatcaagcccggccagcagctgcaccagcccagccagaccagcgtgggccaggccgccagccagggcaacctgctgcacctggcccacagccaggccagcatgagccagagccccgtgagacaggccagcagcagcagcagcagcagcagcagcagcagcgccctgagcgtgggccagctggtgagcaacccccagaccgccgccggcgaggtggacggcgtgaacctggaggagatcagagagttcgccaaggccttcaagatcagaagactgagcctgggcctgacccagacccaggtgggccaggccctgagcgccaccgagggccccgcctacagccagagcgccatctgcagacacaccatcctgagaagccacttcttcctgccccaggaggcccaggagaacaccatcgccagcagcctgaccgccaagctgaaccccggcctgctgtaccccgccagattcgagaagctggacatcacccccaagagcgcccagaagatcaagcccgtgctggagagatggatggccgaggccgaggccagacacagagccggcatgcagaacctgaccgagttcatcggcagcgagcccagcaagaagagaaagagaagaaccagcttcaccccccaggccctggagatcctgaacgcccacttcgagaagaacacccaccccagcggccaggagatgaccgagatcgccgagaagctgaactacgacagagaggtggtgagagtgtggttctgcaacaagagacaggccctgaagaacaccatcaagagactgaagcagcacgagcccgccaccgccgtgcccctggagcccctgaccgacagcctggaggagaacagctag

SEQ ID NO: 94252 - DNA, 1968 bp, synthetic construct
  misc_feature 1..1968: note = Description of Artificial Sequence: Synthetic coding sequence
  source 1..1968: mol_type = other DNA
atgagcgccctgctgcaggaccccatgatcgccggccaggtgagcaagcccctgctgagcgtgagaagcgagatgaacgccgagctgagaggcgaggacaaggccgccaccagcgacagcgagctgaacgagcccctgctggcccccgtggagagcaacgacagcgaggacacccccagcaagctgttcggcgccagaggcaaccccgccctgagcgaccccggcacccccgaccagcaccaggccagccagacccacccccccttccccgtgggcccccagcccctgctgaccgcccagcagctggccagcgccgtggccggcgtgatgcccggcggcccccccgccctgaaccagcccatcctgatccccttcaacatggccggccagctgggcggccagcagggcctggtgctgaccctgcccaccgccaacctgaccaacatccagggcctggtggccgccgccgccgccggcggcatcatgaccctgcccctgcagaacctgcaggccaccagcagcctgaacagccagctgcagcagctgcagctgcagctgcagcagcagcagcagcagcagcagcagcagcccccccccagcaccaaccagcacccccagcccgccccccaggcccccagccagagccagcagcagcccctgcagcccacccccccccagcagcccccccccgccagccagcagccccccgcccccaccagccagctgcagcaggccccccagccccagcagcaccagccccacagccacagccagaaccagaaccagcccagccccacccagcagagcagcagccccccccagaagcccagccagagccccggccacggcctgcccagccccctgaccccccccaaccccctgcagctggtgaacaaccccctggccagccaggccgccgccgccgccgccgccatgagcagcatcgccagcagccaggccttcggcaacgccctgagcagcctgcagggcgtgaccggccagctggtgaccaacgcccagggccagatcatcggcaccatccccctgatgcccaaccccggccccagcagccaggccgccagcggcacccagggcctgcaggtgcagcccatcaccccccagctgctgaccaacgcccagggccagatcatcgccaccgtgatcggcaaccagatcctgcccgtgatcaacacccagggcatcaccctgagccccatcaagcccggccagcagctgcaccagcccagccagaccagcgtgggccaggccgccagccagggcaacctgctgcacctggcccacagccaggccagcatgagccagagccccgtgagacaggccagcagcagcagcagcagcagcagcagcagcagcgccctgagcgtgggccagctggtgagcaacccccagaccgccgccggcgaggtggacggcgtgaacctggaggagatcagagagttcgccaaggccttcaagatcagaagactgagcctgggcctgacccagacccaggtgggccaggccctgagcgccaccgagggccccgcctacagccagagcgccatctgcagattcgagaagctggacatcacccccaagagcgcccagaagatcaagcccgtgctggagagatggatggccgaggccgaggccagacacagagccggcatgcagaacctgaccgagttcatcggcagcgagcccagcaagaagagaaagagaagaaccagcttcaccccccaggccctggagatcctgaacgcccacttcgagaagaacacccaccccagcggccaggagatgaccgagatcgccgagaagctgaactacgacagagaggtggtgagagtgtggttctgcaacaagagacaggccctgaagaacaccatcaagagactgaagcagcacgagcccgccaccgccgtgcccctggagcccctgaccgacagcctggaggagaacagctag

SEQ ID NO: 94253 - DNA, 2076 bp, synthetic construct
  misc_feature 1..2076: note = Description of Artificial Sequence: Synthetic coding sequence
  source 1..2076: mol_type = other DNA
atggagaagatctacagcagaggcgagctgcaccacttcatcgacggcttcaacgaggagaagagcaactggatgagatacgtgaaccccgcccacagccccagagagcagaacctggccgcctgccagaacggcatgaacatctacttctacaccatcaagcccatccccgccaaccaggagctgctggtgtggtactgcagagacttcgccgagagactgcactacccctaccccggcgagctgaccatgatgaacctgacccagacccagagcagcctgaagcagcccagcaccgagaagaacgagctgtgccccaagaacgtgcccaagagagagtacagcgtgaaggagatcctgaagctggacagcaaccccagcaagggcaaggacctgtacagaagcaacatcagccccctgaccagcgagaaggacctggacgacttcagaagaagaggcagccccgagatgcccttctaccccagagtggtgtaccccatcagagcccccctgcccgaggacttcctgaaggccagcctggcctacggcatcgagagacccacctacatcaccagaagccccatccccagcagcaccacccccagccccagcgccagaagcagccccgaccagagcctgaagagcagcagcccccacagcagccccggcaacaccgtgagccccgtgggccccggcagccaggagcacagagacagctacgcctacctgaacgccagctacggcaccgagggcctgggcagctaccccggctacgcccccctgccccacctgccccccgccttcatccccagctacaacgcccactaccccaagttcctgctgcccccctacggcatgaactgcaacggcctgagcgccgtgagcagcatgaacggcatcaacaacttcggcctgttccccagactgtgccccgtgtacagcaacctgctgggcggcggcagcctgccccaccccatgctgaaccccaccagcctgcccagcagcctgcccagcgacggcgccagaagactgctgcagcccgagcaccccagagaggtgctggtgcccgccccccacagcgccttcagcttcaccggcgccgccgccagcatgaaggacaaggcctgcagccccaccagcggcagccccaccgccggcaccgccgccaccgccgagcacgtggtgcagcccaaggccaccagcgccgccatggccgcccccagcagcgacgaggccatgaacctgatcaagaacaagagaaacatgaccggctacaagaccctgccctaccccctgaagaagcagaacggcaagatcaagtacgagtgcaacgtgtgcgccaagaccttcggccagctgagcaacctgaaggtgcacctgagagtgcacagcggcgagagacccttcaagtgccagacctgcaacaagggcttcacccagctggcccacctgcagaagcactacctggtgcacaccggcgagaagccccacgagtgccaggtgtgccacaagagattcagcagcaccagcaacctgaagacccacctgagactgcacagcggcgagaagccctaccagtgcaaggtgtgccccgccaagttcacccagttcgtgcacctgaagctgcacaagagactgcacaccagagagagaccccacaagtgcagccagtgccacaagaactacatccacctgtgcagcctgaaggtgcacctgaagggcaactgcgccgccgcccccgcccccggcctgcccctggaggacctgaccagaatcaacgaggagatcgagaagttcgacatcagcgacaacgccgacagactggaggacgtggaggacgacatcagcgtgatcagcgtggtggagaaggagatcctggccgtggtgagaaaggagaaggaggagaccggcctgaaggtgagcctgcagagaaacatgggcaacggcctgctgagcagcggctgcagcctgtacgagagcagcgacctgcccctgatgaagctgccccccagcaaccccctgcccctggtgcccgtgaaggtgaagcaggagaccgtggagcccatggacccctag

SEQ ID NO: 94254 - DNA, 2370 bp, synthetic construct
  misc_feature 1..2370: note = Description of Artificial Sequence: Synthetic coding sequence
  source 1..2370: mol_type = other DNA
atgaagatggacatggaggacgccgacatgaccctgtggaccgaggccgagttcgaggagaagtgcacctacatcgtgaacgaccacccctgggacagcggcgccgacggcggcaccagcgtgcaggccgaggccagcctgcccagaaacctgctgttcaagtacgccaccaacagcgaggaggtgatcggcgtgatgagcaaggagtacatccccaagggcaccagattcggccccctgatcggcgagatctacaccaacgacaccgtgcccaagaacgccaacagaaagtacttctggagaatctacagcagaggcgagctgcaccacttcatcgacggcttcaacgaggagaagagcaactggatgagatacgtgaaccccgcccacagccccagagagcagaacctggccgcctgccagaacggcatgaacatctacttctacaccatcaagcccatccccgccaaccaggagctgctggtgtggtactgcagagacttcgccgagagactgcactacccctaccccggcgagctgaccatgatgaacctgacccagacccagagcagcctgaagcagcccagcaccgagaagaacgagctgtgccccaagaacgtgcccaagagagagtacagcgtgaaggagatcctgaagctggacagcaaccccagcaagggcaaggacctgtacagaagcaacatcagccccctgaccagcgagaaggacctggacgacttcagaagaagaggcagccccgagatgcccttctaccccagagtggtgtaccccatcagagcccccctgcccgaggacttcctgaaggccagcctggcctacggcatcgagagacccacctacatcaccagaagccccatccccagcagcaccacccccagccccagcgccagaagcagccccgaccagagcctgaagagcagcagcccccacagcagccccggcaacaccgtgagccccgtgggccccggcagccaggagcacagagacagctacgcctacctgaacgccagctacggcaccgagggcctgggcagctaccccggctacgcccccctgccccacctgccccccgccttcatccccagctacaacgcccactaccccaagttcctgctgcccccctacggcatgaactgcaacggcctgagcgccgtgagcagcatgaacggcatcaacaacttcggcctgttccccagactgtgccccgtgtacagcaacctgctgggcggcggcagcctgccccaccccatgctgaaccccaccagcctgcccagcagcctgcccagcgacggcgccagaagactgctgcagcccgagcaccccagagaggtgctggtgcccgccccccacagcgccttcagcttcaccggcgccgccgccagcatgaaggacaaggcctgcagccccaccagcggcagccccaccgccggcaccgccgccaccgccgagcacgtggtgcagcccaaggccaccagcgccgccatggccgcccccagcagcgacgaggccatgaacctgatcaagaacaagagaaacatgaccggctacaagaccctgccctaccccctgaagaagcagaacggcaagatcaagtacgagtgcaacgtgtgcgccaagaccttcggccagctgagcaacctgaaggtgcacctgagagtgcacagcggcgagagacccttcaagtgccagacctgcaacaagggcttcacccagctggcccacctgcagaagcactacctggtgcacaccggcgagaagccccacgagtgccaggtgtgccacaagagattcagcagcaccagcaacctgaagacccacctgagactgcacagcggcgagaagccctaccagtgcaaggtgtgccccgccaagttcacccagttcgtgcacctgaagctgcacaagagactgcacaccagagagagaccccacaagtgcagccagtgccacaagaactacatccacctgtgcagcctgaaggtgcacctgaagggcaactgcgccgccgcccccgcccccggcctgcccctggaggacctgaccagaatcaacgaggagatcgagaagttcgacatcagcgacaacgccgacagactggaggacgtggaggacgacatcagcgtgatcagcgtggtggagaaggagatcctggccgtggtgagaaaggagaaggaggagaccggcctgaaggtgagcctgcagagaaacatgggcaacggcctgctgagcagcggctgcagcctgtacgagagcagcgacctgcccctgatgaagctgccccccagcaaccccctgcccctggtgcccgtgaaggtgaagcaggagaccgtggagcccatggacccctag

SEQ ID NO: 94255 - DNA, 2478 bp, synthetic construct
  misc_feature 1..2478: note = Description of Artificial Sequence: Synthetic coding sequence
  source 1..2478: mol_type = other DNA
atgctggacatctgcctggagaagagagtgggcaccaccctggccgcccccaagtgcaacagcagcaccgtgagattccagggcctggccgagggcaccaagggcaccatgaagatggacatggaggacgccgacatgaccctgtggaccgaggccgagttcgaggagaagtgcacctacatcgtgaacgaccacccctgggacagcggcgccgacggcggcaccagcgtgcaggccgaggccagcctgcccagaaacctgctgttcaagtacgccaccaacagcgaggaggtgatcggcgtgatgagcaaggagtacatccccaagggcaccagattcggccccctgatcggcgagatctacaccaacgacaccgtgcccaagaacgccaacagaaagtacttctggagaatctacagcagaggcgagctgcaccacttcatcgacggcttcaacgaggagaagagcaactggatgagatacgtgaaccccgcccacagccccagagagcagaacctggccgcctgccagaacggcatgaacatctacttctacaccatcaagcccatccccgccaaccaggagctgctggtgtggtactgcagagacttcgccgagagactgcactacccctaccccggcgagctgaccatgatgaacctgacccagacccagagcagcctgaagcagcccagcaccgagaagaacgagctgtgccccaagaacgtgcccaagagagagtacagcgtgaaggagatcctgaagctggacagcaaccccagcaagggcaaggacctgtacagaagcaacatcagccccctgaccagcgagaaggacctggacgacttcagaagaagaggcagccccgagatgcccttctaccccagagtggtgtaccccatcagagcccccctgcccgaggacttcctgaaggccagcctggcctacggcatcgagagacccacctacatcaccagaagccccatccccagcagcaccacccccagccccagcgccagaagcagccccgaccagagcctgaagagcagcagcccccacagcagccccggcaacaccgtgagccccgtgggccccggcagccaggagcacagagacagctacgcctacctgaacgccagctacggcaccgagggcctgggcagctaccccggctacgcccccctgccccacctgccccccgccttcatccccagctacaacgcccactaccccaagttcctgctgcccccctacggcatgaactgcaacggcctgagcgccgtgagcagcatgaacggcatcaacaacttcggcctgttccccagactgtgccccgtgtacagcaacctgctgggcggcggcagcctgccccaccccatgctgaaccccaccagcctgcccagcagcctgcccagcgacggcgccagaagactgctgcagcccgagcaccccagagaggtgctggtgcccgccccccacagcgccttcagcttcaccggcgccgccgccagcatgaaggacaaggcctgcagccccaccagcggcagccccaccgccggcaccgccgccaccgccgagcacgtggtgcagcccaaggccaccagcgccgccatggccgcccccagcagcgacgaggccatgaacctgatcaagaacaagagaaacatgaccggctacaagaccctgccctaccccctgaagaagcagaacggcaagatcaagtacgagtgcaacgtgtgcgccaagaccttcggccagctgagcaacctgaaggtgcacctgagagtgcacagcggcgagagacccttcaagtgccagacctgcaacaagggcttcacccagctggcccacctgcagaagcactacctggtgcacaccggcgagaagccccacgagtgccaggtgtgccacaagagattcagcagcaccagcaacctgaagacccacctgagactgcacagcggcgagaagccctaccagtgcaaggtgtgccccgccaagttcacccagttcgtgcacctgaagctgcacaagagactgcacaccagagagagaccccacaagtgcagccagtgccacaagaactacatccacctgtgcagcctgaaggtgcacctgaagggcaactgcgccgccgcccccgcccccggcctgcccctggaggacctgaccagaatcaacgaggagatcgagaagttcgacatcagcgacaacgccgacagactggaggacgtggaggacgacatcagcgtgatcagcgtggtggagaaggagatcctggccgtggtgagaaaggagaaggaggagaccggcctgaaggtgagcctgcagagaaacatgggcaacggcctgctgagcagcggctgcagcctgtacgagagcagcgacctgcccctgatgaagctgccccccagcaaccccctgcccctggtgcccgtgaaggtgaagcaggagaccgtggagcccatggacccctag

SEQ ID NO: 94256 - DNA, 192 bp, synthetic construct
  misc_feature 1..192: note = Description of Artificial Sequence: Synthetic coding sequence
  source 1..192: mol_type = other DNA
atgaagatggacatggaggacgccgacatgaccctgtggaccgaggccgagttcgaggagaagtgcacctacatcgtgaacgaccacccctgggacagcggcgccgacggcggcaccagcgtgcaggccgaggccagcctgcccagaaacctgctgttcaagtacgccaccaacagcgaggaggtgatctag

SEQ ID NO: 94257 - DNA, 2367 bp, synthetic construct
  misc_feature 1..2367: note = Description of Artificial Sequence: Synthetic coding sequence
  source 1..2367: mol_type = other DNA
atgaagatggacatggaggacgccgacatgaccctgtggaccgaggccgagttcgaggagaagtgcacctacatcgtgaacgaccacccctgggacagcggcgccgacggcggcaccagcgtgcaggccgaggccagcctgcccagaaacctgctgttcaagtacgccaccaacagcgaggaggtgatcggcgtgatgagcaaggagtacatccccaagggcaccagattcggccccctgatcggcgagatctacaccaacgacaccgtgcccaagaacgccaacagaaagtacttctggagaatctacagcagaggcgagctgcaccacttcatcgacggcttcaacgaggagaagagcaactggatgagatacgtgaaccccgcccacagccccagagagcagaacctggccgcctgccagaacggcatgaacatctacttctacaccatcaagcccatccccgccaaccaggagctgctggtgtggtactgcagagacttcgccgagagactgcactacccctaccccggcgagctgaccatgatgaacctgacccagacccagagcagcctgaagcagcccagcaccgagaagaacgagctgtgccccaagaacgtgcccaagagagagtacagcgtgaaggagatcctgaagctggacagcaaccccagcaagggcaaggacctgtacagaagcaacatcagccccctgaccagcgagaaggacctggacgacttcagaagaagaggcagccccgagatgcccttctaccccagagtggtgtaccccatcagagcccccctgcccgaggacttcctgaaggccagcctggcctacggcatcgagagacccacctacatcaccagaagccccatccccagcagcaccacccccagccccagcgccagaagcagccccgaccagagcctgaagagcagcagcccccacagcagccccggcaacaccgtgagccccgtgggccccggcagccaggagcacagagacagctacgcctacctgaacgccagctacggcaccgagggcctgggcagctaccccggctacgcccccctgccccacctgccccccgccttcatccccagctacaacgcccactaccccaagttcctgctgcccccctacggcatgaactgcaacggcctgagcgccgtgagcagcatgaacggcatcaacaacttcggcctgttccccagactgtgccccgtgtacagcaacctgctgggcggcggcagcctgcccaccccctgcagcacccccctgctgcccagcagcctgcccagcgacggcgccagaagactgctgcagcccgagcaccccagagaggtgctggtgcccgccccccacagcgccttcagcttcaccggcgccgccgccagcatgaaggacaaggcctgcagccccaccagcggcagccccaccgccggcaccgccgccaccgccgagcacgtggtgcagcccaaggccaccagcgccgccatggccgcccccagcagcgacgaggccatgaacctgatcaagaacaagagaaacatgaccggctacaagaccctgccctaccccctgaagaagcagaacggcaagatcaagtacgagtgcaacgtgtgcgccaagaccttcggccagctgagcaacctgaaggtgcacctgagagtgcacagcggcgagagacccttcaagtgccagacctgcaacaagggcttcacccagctggcccacctgcagaagcactacctggtgcacaccggcgagaagccccacgagtgccaggtgtgccacaagagattcagcagcaccagcaacctgaagacccacctgagactgcacagcggcgagaagccctaccagtgcaaggtgtgccccgccaagttcacccagttcgtgcacctgaagctgcacaagagactgcacaccagagagagaccccacaagtgcagccagtgccacaagaactacatccacctgtgcagcctgaaggtgcacctgaagggcaactgcgccgccgcccccgcccccggcctgcccctggaggacctgaccagaatcaacgaggagatcgagaagttcgacatcagcgacaacgccgacagactggaggacgtggaggacgacatcagcgtgatcagcgtggtggagaaggagatcctggccgtggtgagaaaggagaaggaggagaccggcctgaaggtgagcctgcagagaaacatgggcaacggcctgctgagcagcggctgcagcctgtacgagagcagcgacctgcccctgatgaagctgccccccagcaaccccctgcccctggtgcccgtgaaggtgaagcaggagaccgtggagcccatggacccctag

SEQ ID NO: 94258 - DNA, 1716 bp, synthetic construct
  misc_feature 1..1716: note = Description of Artificial Sequence: Synthetic coding sequence
  source 1..1716: mol_type = other DNA
atggccctgcccagacccagcgaggccgtgccccaggacaaggtgtgctacccccccgagagcagcccccagaacctggccgcctactacacccccttccccagctacggccactacagaaacagcctggccaccgtggaggaggacttccagcccttcagacagctggaggccgccgccagcgccgcccccgccatgccccccttccccttcagaatggccccccccctgctgagccccggcctgggcctgcagagagagcccctgtacgacctgccctggtacagcaagctgcccccctggtaccccatcccccacgtgcccagagaggtgccccccttcctgagcagcagccacgagtacgccggcgccagcagcgaggacctgggccaccagatcatcggcggcgacaacgagagcggcccctgctgcggccccgacaccctgatcccccccccccccgccgacgccagcctgctgcccgagggcctgagaaccagccagctgctgccctgcagccccagcaagcagagcgaggacggccccaagcccagcaaccaggagggcaagagccccgccagattccagttcaccgaggaggacctgcacttcgtgctgtacggcgtgacccccagcctggagcaccccgccagcctgcaccacgccatcagcggcctgctggtgccccccgacagcagcggcagcgacagcctgccccagaccctggacaaggacagcctgcagctgcccgagggcctgtgcctgatgcagaccgtgttcggcgaggtgccccacttcggcgtgttctgcagcagcttcatcgccaagggcgtgagattcggccccttccagggcaaggtggtgaacgccagcgaggtgaagacctacggcgacaacagcgtgatgtgggagatcttcgaggacggccacctgagccacttcatcgacggcaagggcggcaccggcaactggatgagctacgtgaactgcgccagattccccaaggagcagaacctggtggccgtgcagtgccagggccacatcttctacgagagctgcaaggagatccaccagaaccaggagctgctggtgtggtacggcgactgctacgagaagttcctggacatccccgtgagcctgcaggtgaccgagcccggcaagcagcccagcggccccagcgaggagagcgccgagggctacagatgcgagagatgcggcaaggtgttcacctacaagtactacagagacaagcacctgaagtacaccccctgcgtggacaagggcgacagaaagttcccctgcagcctgtgcaagagaagcttcgagaagagagacagactgagaatccacatcctgcacgtgcacgagaagcacagaccccacaagtgcagcacctgcggcaagtgcttcagccagagcagcagcctgaacaagcacatgagagtgcacagcggcgacagaccctaccagtgcgtgtactgcaccaagagattcaccgccagcagcatcctgagaacccacatcagacagcacagcggcgagaagcccttcaagtgcaagtactgcggcaagagcttcgccagccacgccgcccacgacagccacgtgagaagaagccacaaggaggacgacggctgcagctgcagcatctgcggcaagatcttcagcgaccaggagaccttctacagccacatgaagttccacgaggactactag

SEQ ID NO: 94259 - DNA, 303 bp, synthetic construct
  misc_feature 1..303: note = Description of Artificial Sequence: Synthetic coding sequence
  source 1..303: mol_type = other DNA
atggccctgcccagacccagcgaggccgtgccccaggacaaggtgtgctacccccccgagagcagcccccagaacctggccgcctactacacccccttccccagctacggccactacagaaacagcctggccaccgtggaggaggacttccagcccttcagacagctggaggccgccgccagcgccgcccccgccatgccccccttccccttcagaatggccccccccctgctgagccccggcctgggcctgcagagagagcccctgtacgacctgccctggtacagcaagctgcccccctag

SEQ ID NO: 94260 - DNA, 3831 bp, synthetic construct
  misc_feature 1..3831: note = Description of Artificial Sequence: Synthetic coding sequence
  source 1..3831: mol_type = other DNA
atgagaagcaaggccagagccagaaagctggccaagagcgacggcgacgtggtgaacaacatgtacgagcccaacagagacctgctggccagccacagcgccgaggacgaggccgaggacagcgccatgagccccatccccgtgggcccccccagccccttccccaccagcgaggacttcacccccaaggagggcagcccctacgaggcccccgtgtacatccccgaggacatccccatccccgccgacttcgagctgagagagagcagcatccccggcgccggcctgggcgtgtgggccaagagaaagatggaggccggcgagagactgggcccctgcgtggtggtgcccagagccgccgccaaggagaccgacttcggctgggagcagatcctgaccgacgtggaggtgagcccccaggagggctgcatcaccaagatcagcgaggacctgggcagcgagaagttctgcgtggacgccaaccaggccggcgccggcagctggctgaagtacatcagagtggcctgcagctgcgacgaccagaacctgaccatgtgccagatcagcgagcagatctactacaaggtgatcaaggacatcgagcccggcgaggagctgctggtgcacgtgaaggagggcgtgtaccccctgggcaccgtgccccccggcctggacgaggagcccaccttcagatgcgacgagtgcgacgagctgttccagagcaagctggacctgagaagacacaagaagtacacctgcggcagcgtgggcgccgccctgtacgagggcctggccgaggagctgaagcccgagggcctgggcggcggcagcggccaggcccacgagtgcaaggactgcgagagaatgttccccaacaagtacagcctggagcagcacatggtgatccacaccgaggagagagagtacaagtgcgaccagtgccccaaggccttcaactggaagagcaacctgatcagacaccagatgagccacgacagcggcaagagattcgagtgcgagaactgcgtgaaggtgttcaccgaccccagcaacctgcagagacacatcagaagccagcacgtgggcgccagagcccacgcctgccccgactgcggcaagaccttcgccaccagcagcggcctgaagcagcacaagcacatccacagcaccgtgaagcccttcatctgcgaggtgtgccacaagagctacacccagttcagcaacctgtgcagacacaagagaatgcacgccgactgcagaacccagatcaagtgcaaggactgcggccagatgttcagcaccaccagcagcctgaacaagcacagaagattctgcgagggcaagaaccactacacccccggcggcatcttcgcccccggcctgcccctgacccccagccccatgatggacaaggccaagcccagccccagcctgaaccacgccagcctgggcttcaacgagtacttccccagcagaccccaccccggcagcctgcccttcagcaccgccccccccaccttccccgccctgacccccggcttccccggcatcttcccccccagcctgtaccccagaccccccctgctgccccccaccagcctgctgaagagccccctgaaccacacccaggacgccaagctgcccagccccctgggcaaccccgccctgcccctggtgagcgccgtgagcaacagcagccagggcaccaccgccgccgccggccccgaggagaagttcgagagcagactggaggacagctgcgtggagaagctgaagaccagaagcagcgacatgagcgacggcagcgacttcgaggacgtgaacaccaccaccggcaccgacctggacaccaccaccggcaccggcagcgacctggacagcgacgtggacagcgaccccgacaaggacaagggcaagggcaagagcgccgagggccagcccaagttcggcggcggcctggccccccccggcgcccccaacagcgtggccgaggtgcccgtgttctacagccagcacagcttcttccccccccccgacgagcagctgctgaccgccaccggcgccgccggcgacagcatcaaggccatcgccagcatcgccgagaagtacttcggccccggcttcatgggcatgcaggagaagaagctgggcagcctgccctaccacagcgccttccccttccagttcctgcccaacttcccccacagcctgtaccccttcaccgacagagccctggcccacaacctgctggtgaaggccgagcccaagagccccagagacgccctgaaggtgggcggccccagcgccgagtgccccttcgacctgaccaccaagcccaaggacgtgaagcccatcctgcccatgcccaagggccccagcgcccccgccagcggcgaggagcagcccctggacctgagcatcggcagcagagccagagccagccagaacggcggcggcagagagcccagaaagaaccacgtgtacggcgagagaaagctgggcgccggcgagggcctgccccaggtgtgccccgccagaatgccccagcagccccccctgcactacgccaagcccagccccttcttcatggaccccatctacagcagagtggagaagagaaaggtgaccgaccccgtgggcgccctgaaggagaagtacctgagacccagccccctgctgttccacccccagatgagcgccatcgagaccatgaccgagaagctggagagcttcgccgccatgaaggccgacagcggcagcagcctgcagcccctgccccaccaccccttcaacttcagaagccccccccccaccctgagcgaccccatcctgagaaagggcaaggagagatacacctgcagatactgcggcaagatcttccccagaagcgccaacctgaccagacacctgagaacccacaccggcgagcagccctacagatgcaagtactgcgacagaagcttcagcatcagcagcaacctgcagagacacgtgagaaacatccacaacaaggagaagcccttcaagtgccacctgtgcaacagatgcttcggccagcagaccaacctggacagacacctgaagaagcacgagcacgagaacgcccccgtgagccagcaccccggcgtgctgaccaaccacctgggcaccagcgccagcagccccaccagcgagagcgacaaccacgccctgctggacgagaaggaggacagctacttcagcgagatcagaaacttcatcgccaacagcgagatgaaccaggccagcaccagaaccgagaagagagccgacatgcagatcgtggacggcagcgcccagtgccccggcctggccagcgagaagcaggaggacgtggaggaggaggacgacgacgacctggaggaggacgacgaggacagcctggccggcaagagccaggacgacaccgtgagccccgcccccgagccccaggccgcctacgaggacgaggaggacgaggagcccgccgccagcctggccgtgggcttcgaccacaccagaagatgcgccgaggaccacgagggcggcctgctggccctggagcccatgcccaccttcggcaagggcctggacctgagaagagccgccgaggaggccttcgaggtgaaggacgtgctgaacagcaccctggacagcgaggccctgaagcacaccctgtgcagacaggccaagaaccaggcctacgccatgatgctgagcctgagcgaggacacccccctgcacacccccagccagggcagcctggacgcctggctgaaggtgaccggcgccaccagcgagagcggcgccttccaccccatcaaccacctgtag

SEQ ID NO: 94261 - DNA, 3831 bp, synthetic construct
  misc_feature 1..3831: note = Description of Artificial Sequence: Synthetic coding sequence
  source 1..3831: mol_type = other DNA
atgagaagcaaggccagagccagaaagctggccaagagcgacggcgacgtggtgaacaacatgtacgagcccaacagagacctgctggccagccacagcgccgaggacgaggccgaggacagcgccatgagccccatccccgtgggcccccccagccccttccccaccagcgaggacttcacccccaaggagggcagcccctacgaggcccccgtgtacatccccgaggacatccccatccccgccgacttcgagctgagagagagcagcatccccggcgccggcctgggcgtgtgggccaagagaaagatggaggccggcgagagactgggcccctgcgtggtggtgcccagagccgccgccaaggagaccgacttcggctgggagcagatcctgaccgacgtggaggtgagcccccaggagggctgcatcaccaagatcagcgaggacctgggcagcgagaagttctgcgtggacgccaaccaggccggcgccggcagctggctgaagtacatcagagtggcctgcagctgcgacgaccagaacctgaccatgtgccagatcagcgagcaggtgatctactacaaggtgatcaaggacatcgagcccggcgaggagctgctggtgcacgtgaaggagggcgtgtaccccctgggcaccgtgccccccggcctggacgaggagcccaccttcagatgcgacgagtgcgacgagctgttccagagcaagctggacctgagaagacacaagaagtacacctgcggcagcgtgggcgccgccctgtacgagggcctggccgaggagctgaagcccgagggcctgggcggcggcagcggccaggcccacgagtgcaaggactgcgagagaatgttccccaacaagtacagcctggagcagcacatggtgatccacaccgaggagagagagtacaagtgcgaccagtgccccaaggccttcaactggaagagcaacctgatcagacaccagatgagccacgacagcggcaagagattcgagtgcgagaactgcgtgaaggtgttcaccgaccccagcaacctgcagagacacatcagaagccagcacgtgggcgccagagcccacgcctgccccgactgcggcaagaccttcgccaccagcagcggcctgaagcagcacaagcacatccacagcaccgtgaagcccttcatctgcgaggtgtgccacaagagctacacccagttcagcaacctgtgcagacacaagagaatgcacgccgactgcagaacccagatcaagtgcaaggactgcggccagatgttcagcaccaccagcagcctgaacaagcacagaagattctgcgagggcaagaaccactacacccccggcggcatcttcgcccccggcctgcccctgacccccagccccatgatggacaaggccaagcccagccccagcctgaaccacgccagcctgggcttcaacgagtacttccccagcagaccccaccccggcagcctgcccttcagcaccgccccccccaccttccccgccctgacccccggcttccccggcatcttcccccccagcctgtaccccagaccccccctgctgccccccaccagcctgctgaagagccccctgaaccacacccaggacgccaagctgcccagccccctgggcaaccccgccctgcccctggtgagcgccgtgagcaacagcagccagggcaccaccgccgccgccggccccgaggagaagttcgagagcagactggaggacagctgcgtggagaagctgaagaccagaagcagcgacatgagcgacggcagcgacttcgaggacgtgaacaccaccaccggcaccgacctggacaccaccaccggcaccggcagcgacctggacagcgacgtggacagcgaccccgacaaggacaagggcaagggcaagagcgccgagggccagcccaagttcggcggcggcctggccccccccggcgcccccaacagcgtggccgaggtgcccgtgttctacagccagcacagcttcttccccccccccgacgagcagctgctgaccgccaccggcgccgccggcgacagcatcaaggccatcgccagcatcgccgagaagtacttcggccccggcttcatgggcatgcaggagaagaagctgggcagcctgccctaccacagcgccttccccttccagttcctgcccaacttcccccacagcctgtaccccttcaccgacagagccctggcccacaacctgctggtgaaggccgagcccaagagccccagagacgccctgaaggtgggcggccccagcgccgagtgccccttcgacctgaccaccaagcccaaggacgtgaagcccatcctgcccatgcccaagggccccagcgcccccgccagcggcgaggagcagcccctggacctgagcatcggcagcagagccagagccagccagaacggcggcggcagagagcccagaaagaaccacgtgtacggcgagagaaagctgggcgccggcgagggcctgccccaggtgtgccccgccagaatgccccagcagccccccctgcactacgccaagcccagccccttcttcatggaccccatctacagagtggagaagagaaaggtgaccgaccccgtgggcgccctgaaggagaagtacctgagacccagccccctgctgttccacccccagatgagcgccatcgagaccatgaccgagaagctggagagcttcgccgccatgaaggccgacagcggcagcagcctgcagcccctgccccaccaccccttcaacttcagaagccccccccccaccctgagcgaccccatcctgagaaagggcaaggagagatacacctgcagatactgcggcaagatcttccccagaagcgccaacctgaccagacacctgagaacccacaccggcgagcagccctacagatgcaagtactgcgacagaagcttcagcatcagcagcaacctgcagagacacgtgagaaacatccacaacaaggagaagcccttcaagtgccacctgtgcaacagatgcttcggccagcagaccaacctggacagacacctgaagaagcacgagcacgagaacgcccccgtgagccagcaccccggcgtgctgaccaaccacctgggcaccagcgccagcagccccaccagcgagagcgacaaccacgccctgctggacgagaaggaggacagctacttcagcgagatcagaaacttcatcgccaacagcgagatgaaccaggccagcaccagaaccgagaagagagccgacatgcagatcgtggacggcagcgcccagtgccccggcctggccagcgagaagcaggaggacgtggaggaggaggacgacgacgacctggaggaggacgacgaggacagcctggccggcaagagccaggacgacaccgtgagccccgcccccgagccccaggccgcctacgaggacgaggaggacgaggagcccgccgccagcctggccgtgggcttcgaccacaccagaagatgcgccgaggaccacgagggcggcctgctggccctggagcccatgcccaccttcggcaagggcctggacctgagaagagccgccgaggaggccttcgaggtgaaggacgtgctgaacagcaccctggacagcgaggccctgaagcacaccctgtgcagacaggccaagaaccaggcctacgccatgatgctgagcctgagcgaggacacccccctgcacacccccagccagggcagcctggacgcctggctgaaggtgaccggcgccaccagcgagagcggcgccttccaccccatcaaccacctgtag

SEQ ID NO: 94262 - DNA, 3279 bp, synthetic construct
  misc_feature 1..3279: note = Description of Artificial Sequence: Synthetic coding sequence
  source 1..3279: mol_type = other DNA
ttctgcgcctacagcgccaagatctactacaaggtgatcaaggacatcgagcccggcgaggagctgctggtgcacgtgaaggagggcgtgtaccccctgggcaccgtgccccccggcctggacgaggagcccaccttcagatgcgacgagtgcgacgagctgttccagagcaagctggacctgagaagacacaagaagtacacctgcggcagcgtgggcgccgccctgtacgagggcctggccgaggagctgaagcccgagggcctgggcggcggcagcggccaggcccacgagtgcaaggactgcgagagaatgttccccaacaagtacagcctggagcagcacatggtgatccacaccgaggagagagagtacaagtgcgaccagtgccccaaggccttcaactggaagagcaacctgatcagacaccagatgagccacgacagcggcaagagattcgagtgcgagaactgcgtgaaggtgttcaccgaccccagcaacctgcagagacacatcagaagccagcacgtgggcgccagagcccacgcctgccccgactgcggcaagaccttcgccaccagcagcggcctgaagcagcacaagcacatccacagcaccgtgaagcccttcatctgcgaggtgtgccacaagagctacacccagttcagcaacctgtgcagacacaagagaatgcacgccgactgcagaacccagatcaagtgcaaggactgcggccagatgttcagcaccaccagcagcctgaacaagcacagaagattctgcgagggcaagaaccactacacccccggcggcatcttcgcccccggcctgcccctgacccccagccccatgatggacaaggccaagcccagccccagcctgaaccacgccagcctgggcttcaacgagtacttccccagcagaccccaccccggcagcctgcccttcagcaccgccccccccaccttccccgccctgacccccggcttccccggcatcttcccccccagcctgtaccccagaccccccctgctgccccccaccagcctgctgaagagccccctgaaccacacccaggacgccaagctgcccagccccctgggcaaccccgccctgcccctggtgagcgccgtgagcaacagcagccagggcaccaccgccgccgccggccccgaggagaagttcgagagcagactggaggacagctgcgtggagaagctgaagaccagaagcagcgacatgagcgacggcagcgacttcgaggacgtgaacaccaccaccggcaccgacctggacaccaccaccggcaccggcagcgacctggacagcgacgtggacagcgaccccgacaaggacaagggcaagggcaagagcgccgagggccagcccaagttcggcggcggcctggccccccccggcgcccccaacagcgtggccgaggtgcccgtgttctacagccagcacagcttcttccccccccccgacgagcagctgctgaccgccaccggcgccgccggcgacagcatcaaggccatcgccagcatcgccgagaagtacttcggccccggcttcatgggcatgcaggagaagaagctgggcagcctgccctaccacagcgccttccccttccagttcctgcccaacttcccccacagcctgtaccccttcaccgacagagccctggcccacaacctgctggtgaaggccgagcccaagagccccagagacgccctgaaggtgggcggccccagcgccgagtgccccttcgacctgaccaccaagcccaaggacgtgaagcccatcctgcccatgcccaagggccccagcgcccccgccagcggcgaggagcagcccctggacctgagcatcggcagcagagccagagccagccagaacggcggcggcagagagcccagaaagaaccacgtgtacggcgagagaaagctgggcgccggcgagggcctgccccaggtgtgccccgccagaatgccccagcagccccccctgcactacgccaagcccagccccttcttcatggaccccatctacagcagagtggagaagagaaaggtgaccgaccccgtgggcgccctgaaggagaagtacctgagacccagccccctgctgttccacccccagatgagcgccatcgagaccatgaccgagaagctggagagcttcgccgccatgaaggccgacagcggcagcagcctgcagcccctgccccaccaccccttcaacttcagaagccccccccccaccctgagcgaccccatcctgagaaagggcaaggagagatacacctgcagatactgcggcaagatcttccccagaagcgccaacctgaccagacacctgagaacccacaccggcgagcagccctacagatgcaagtactgcgacagaagcttcagcatcagcagcaacctgcagagacacgtgagaaacatccacaacaaggagaagcccttcaagtgccacctgtgcaacagatgcttcggccagcagaccaacctggacagacacctgaagaagcacgagcacgagaacgcccccgtgagccagcaccccggcgtgctgaccaaccacctgggcaccagcgccagcagccccaccagcgagagcgacaaccacgccctgctggacgagaaggaggacagctacttcagcgagatcagaaacttcatcgccaacagcgagatgaaccaggccagcaccagaaccgagaagagagccgacatgcagatcgtggacggcagcgcccagtgccccggcctggccagcgagaagcaggaggacgtggaggaggaggacgacgacgacctggaggaggacgacgaggacagcctggccggcaagagccaggacgacaccgtgagccccgcccccgagccccaggccgcctacgaggacgaggaggacgaggagcccgccgccagcctggccgtgggcttcgaccacaccagaagatgcgccgaggaccacgagggcggcctgctggccctggagcccatgcccaccttcggcaagggcctggacctgagaagagccgccgaggaggccttcgaggtgaaggacgtgctgaacagcaccctggacagcgaggccctgaagcacaccctgtgcagacaggccaagaaccaggcctacgccatgatgctgagcctgagcgaggacacccccctgcacacccccagccagggcagcctggacgcctggctgaaggtgaccggcgccaccagcgagagcggcgccttccaccccatcaaccacctgtag

SEQ ID NO: 94263 - DNA, 3828 bp, synthetic construct
  misc_feature 1..3828: note = Description of Artificial Sequence: Synthetic coding sequence
  source 1..3828: mol_type = other DNA
atgagaagcaaggccagagccagaaagctggccaagagcgacggcgacgtggtgaacaacatgtacgagcccaacagagacctgctggccagccacagcgccgaggacgaggccgaggacagcgccatgagccccatccccgtgggcccccccagccccttccccaccagcgaggacttcacccccaaggagggcagcccctacgaggcccccgtgtacatccccgaggacatccccatccccgccgacttcgagctgagagagagcagcatccccggcgccggcctgggcgtgtgggccaagagaaagatggaggccggcgagagactgggcccctgcgtggtggtgcccagagccgccgccaaggagaccgacttcggctgggagcagatcctgaccgacgtggaggtgagcccccaggagggctgcatcaccaagatcagcgaggacctgggcagcgagaagttctgcgtggacgccaaccaggccggcgccggcagctggctgaagtacatcagagtggcctgcagctgcgacgaccagaacctgaccatgtgccagatcagcgagcagatctactacaaggtgatcaaggacatcgagcccggcgaggagctgctggtgcacgtgaaggagggcgtgtaccccctgggcaccgtgccccccggcctggacgaggagcccaccttcagatgcgacgagtgcgacgagctgttccagagcaagctggacctgagaagacacaagaagtacacctgcggcagcgtgggcgccgccctgtacgagggcctggccgaggagctgaagcccgagggcctgggcggcggcagcggccaggcccacgagtgcaaggactgcgagagaatgttccccaacaagtacagcctggagcagcacatggtgatccacaccgaggagagagagtacaagtgcgaccagtgccccaaggccttcaactggaagagcaacctgatcagacaccagatgagccacgacagcggcaagagattcgagtgcgagaactgcgtgaaggtgttcaccgaccccagcaacctgcagagacacatcagaagccagcacgtgggcgccagagcccacgcctgccccgactgcggcaagaccttcgccaccagcagcggcctgaagcagcacaagcacatccacagcaccgtgaagcccttcatctgcgaggtgtgccacaagagctacacccagttcagcaacctgtgcagacacaagagaatgcacgccgactgcagaacccagatcaagtgcaaggactgcggccagatgttcagcaccaccagcagcctgaacaagcacagaagattctgcgagggcaagaaccactacacccccggcggcatcttcgcccccggcctgcccctgacccccagccccatgatggacaaggccaagcccagccccagcctgaaccacgccagcctgggcttcaacgagtacttccccagcagaccccaccccggcagcctgcccttcagcaccgccccccccaccttccccgccctgacccccggcttccccggcatcttcccccccagcctgtaccccagaccccccctgctgccccccaccagcctgctgaagagccccctgaaccacacccaggacgccaagctgcccagccccctgggcaaccccgccctgcccctggtgagcgccgtgagcaacagcagccagggcaccaccgccgccgccggccccgaggagaagttcgagagcagactggaggacagctgcgtggagaagctgaagaccagaagcagcgacatgagcgacggcagcgacttcgaggacgtgaacaccaccaccggcaccgacctggacaccaccaccggcaccggcagcgacctggacagcgacgtggacagcgaccccgacaaggacaagggcaagggcaagagcgccgagggccagcccaagttcggcggcggcctggccccccccggcgcccccaacagcgtggccgaggtgcccgtgttctacagccagcacagcttcttccccccccccgacgagcagctgctgaccgccaccggcgccgccggcgacagcatcaaggccatcgccagcatcgccgagaagtacttcggccccggcttcatgggcatgcaggagaagaagctgggcagcctgccctaccacagcgccttccccttccagttcctgcccaacttcccccacagcctgtaccccttcaccgacagagccctggcccacaacctgctggtgaaggccgagcccaagagccccagagacgccctgaaggtgggcggccccagcgccgagtgccccttcgacctgaccaccaagcccaaggacgtgaagcccatcctgcccatgcccaagggccccagcgcccccgccagcggcgaggagcagcccctggacctgagcatcggcagcagagccagagccagccagaacggcggcggcagagagcccagaaagaaccacgtgtacggcgagagaaagctgggcgccggcgagggcctgccccaggtgtgccccgccagaatgccccagcagccccccctgcactacgccaagcccagccccttcttcatggaccccatctacagagtggagaagagaaaggtgaccgaccccgtgggcgccctgaaggagaagtacctgagacccagccccctgctgttccacccccagatgagcgccatcgagaccatgaccgagaagctggagagcttcgccgccatgaaggccgacagcggcagcagcctgcagcccctgccccaccaccccttcaacttcagaagccccccccccaccctgagcgaccccatcctgagaaagggcaaggagagatacacctgcagatactgcggcaagatcttccccagaagcgccaacctgaccagacacctgagaacccacaccggcgagcagccctacagatgcaagtactgcgacagaagcttcagcatcagcagcaacctgcagagacacgtgagaaacatccacaacaaggagaagcccttcaagtgccacctgtgcaacagatgcttcggccagcagaccaacctggacagacacctgaagaagcacgagcacgagaacgcccccgtgagccagcaccccggcgtgctgaccaaccacctgggcaccagcgccagcagccccaccagcgagagcgacaaccacgccctgctggacgagaaggaggacagctacttcagcgagatcagaaacttcatcgccaacagcgagatgaaccaggccagcaccagaaccgagaagagagccgacatgcagatcgtggacggcagcgcccagtgccccggcctggccagcgagaagcaggaggacgtggaggaggaggacgacgacgacctggaggaggacgacgaggacagcctggccggcaagagccaggacgacaccgtgagccccgcccccgagccccaggccgcctacgaggacgaggaggacgaggagcccgccgccagcctggccgtgggcttcgaccacaccagaagatgcgccgaggaccacgagggcggcctgctggccctggagcccatgcccaccttcggcaagggcctggacctgagaagagccgccgaggaggccttcgaggtgaaggacgtgctgaacagcaccctggacagcgaggccctgaagcacaccctgtgcagacaggccaagaaccaggcctacgccatgatgctgagcctgagcgaggacacccccctgcacacccccagccagggcagcctggacgcctggctgaaggtgaccggcgccaccagcgagagcggcgccttccaccccatcaaccacctgtag

SEQ ID NO: 94264 - DNA, 3771 bp, synthetic construct
  misc_feature 1..3771: note = Description of Artificial Sequence: Synthetic coding sequence
  source 1..3771: mol_type = other DNA
atgagaagcaaggccagagccagaaagctggccaagagcgacggcgacgtggtgaacaacatgtacgagcccaacagagacctgctggccagccacagcgccgaggacgaggccgaggacagcgccatgagccccatccccgtgggcccccccagccccttccccaccagcgaggacttcacccccaaggagggcagcccctacgaggcccccgtgtacatccccgaggacatccccatccccgccgacttcgagctgagagagagcagcatccccggcgccggcctgggcgtgtgggccaagagaaagatggaggccggcgagagactgggcccctgcgtggtggtgcccagagccgccgccaaggagaccgacttcggctgggagcagatcctgaccgacgtggaggtgagcccccaggagggctgcatcaccaagatcagcgaggacctgggcagcgagaagttctgcgtggacgccaaccaggccggcgccggcagctggctgaagtacatcagagtggcctgcagctgcgacgaccagaacctgaccatgtgccagatcagcgagcagatctactacaaggtgatcaaggacatcgagcccggcgaggagctgctggtgcacgtgaaggagggcgtgtaccccctgggcaccgtgccccccggcctggacgaggagcccaccttcagatgcgacgagtgcgacgagctgttccagagcaagctggacctgagaagacacaagaagtacacctgcggcagcgtgggcgccgccctgtacgagggcctggccgaggagctgaagcccgagggcctgggcggcggcagcggccaggcccacgagtgcaaggactgcgagagaatgttccccaacaagtacagcctggagcagcacatggtgatccacaccgaggagagagagtacaagtgcgaccagtgccccaaggccttcaactggaagagcaacctgatcagacaccagatgagccacgacagcggcaagagattcgagtgcgagaactgcgtgaaggtgttcaccgaccccagcaacctgcagagacacatcagaagccagcacgtgggcgccagagcccacgcctgccccgactgcggcaagaccttcgccaccagcagcggcctgaagcagcacaagcacatccacagcaccgtgaagcccttcatctgcgaggtgtgccacaagagctacacccagttcagcaacctgtgcagacacaagagaatgcacgccgactgcagaacccagatcaagtgcaaggactgcggccagatgttcagcaccaccagcagcctgaacaagcacagaagattctgcgagggcaagaaccactacacccccggcggcatcttcgcccccggcctgcccctgacccccagccccatgatggacaaggccaagcccagccccagcctgaaccacgccagcctgggcttcaacgagtacttccccagcagaccccaccccggcagcctgcccttcagcaccgccccccccaccttccccgccctgacccccggcttccccggcatcttcccccccagcctgtaccccagaccccccctgctgccccccaccagcctgctgaagagccccctgaaccacacccaggacgccaagctgcccagccccctgggcaaccccgccctgcccctggtgagcgccgtgagcaacagcagccagggcaccaccgccgccgccggccccgaggagaagttcgagagcagactggaggacagctgcgtggagaagctgaagaccagaagcagcgacatgagcgacggcagcgacttcgaggacgtgaacaccaccaccggcaccgacctggacaccaccaccggcaccggcagcgacctggacagcgacgtggacagcgaccccgacaaggacaagggcaagggcaagagcgccgagggccagcccaagttcggcggcggcctggccccccccggcgcccccaacagcgtggccgaggtgcccgtgttctacagccagcacagcttcttccccccccccgacgagcagctgctgaccgccaccggcgccgccggcgacagcatcaaggccatcgccagcatcgccgagaagtacttcggccccggcttcatgggcatgcaggagaagaagctgggcagcctgccctaccacagcgccttccccttccagttcctgcccaacttcccccacagcctgtaccccttcaccgacagagccctggcccacaacctgctggtgaaggccgagcccaagagccccagagacgccctgaaggtgggcggccccagcgccgagtgccccttcgacctgaccaccaagcccaaggacgtgaagcccatcctgcccatgcccaagggccccagcgcccccgccagcggcgaggagcagcccctggacctgagcatcggcagcagagccagagccagccagaacggcggcggcagagagcccagaaagaaccacgtgtacggcgagagaaagctgggcgccggcgagggcctgccccaggtgtgccccgccagaatgccccagcagccccccctgcactacgccaagcccagccccttcttcatggaccccatctacagagtggagaagagaaaggtgaccgaccccgtgggcgccctgaaggagaagtacctgagacccagccccctgctgttccacccccagatgagcgccatcgagaccatgaccgagaagctggagagcttcgccgccatgaaggccgacagcggcagcagcctgcagcccctgccccaccaccccttcaacttcagaagccccccccccaccctgagcgaccccatcctgagaaagggcaaggagagatacacctgcagatactgcggcaagatcttccccagaagcgccaacctgaccagacacctgagaacccacaccggcgagcagccctacagatgcaagtactgcgacagaagcttcagcatcagcagcaacctgcagagacacgtgagaaacatccacaacaaggagaagcccttcaagtgccacctgtgcaacagatgcttcggccagcagaccaacctggacagacacctgaagaagcacgagcacgagaacgcccccgtgagccagcaccccggcgtgctgaccaaccacctgggcaccagcgccagcagccccaccagcgagagcgacaaccacgccctgctggacgagaaggaggacagctacttcagcgagatcagaaacttcatcgccaacagcgagatgaaccaggccagcaccagaaccgagaagagagccgacatgcagatcgtggacggcagcgcccagtgccccggcctggccagcgagaagcaggaggacgtggaggaggaggacgacgacgacctggaggaggacgacgaggacagcctggccggcaagagccaggacgacaccgtgagccccgcccccgagccccaggccgcctacgaggacgaggaggacgaggagcccgccgccagcctggccgtgggcttcgaccacaccagaagatgcgccgaggaccacgagggcggcctgctggccctggagcccatgcccaccttcggcaagggcctggacctgagaagagccgccgaggaggccttcgaggtgaaggacgtgctgaacagcaccctggacagcgaggccctgaagcacaccctgtgcagacaggccaagaaccagggcagcctggacgcctggctgaaggtgaccggcgccaccagcgagagcggcgccttccaccccatcaaccacctgtag

SEQ ID NO: 94265 - DNA, 3255 bp, synthetic construct
  misc_feature 1..3255: note = Description of Artificial Sequence: Synthetic coding sequence
  source 1..3255: mol_type = other DNA
atctactacaaggtgatcaaggacatcgagcccggcgaggagctgctggtgcacgtgaaggagggcgtgtaccccctgggcaccgtgccccccggcctggacgaggagcccaccttcagatgcgacgagtgcgacgagctgttccagagcaagctggacctgagaagacacaagaagtacacctgcggcagcgtgggcgccgccctgtacgagggcctggccgaggagctgaagcccgagggcctgggcggcggcagcggccaggcccacgagtgcaaggactgcgagagaatgttccccaacaagtacagcctggagcagcacatggtgatccacaccgaggagagagagtacaagtgcgaccagtgccccaaggccttcaactggaagagcaacctgatcagacaccagatgagccacgacagcggcaagagattcgagtgcgagaactgcgtgaaggtgttcaccgaccccagcaacctgcagagacacatcagaagccagcacgtgggcgccagagcccacgcctgccccgactgcggcaagaccttcgccaccagcagcggcctgaagcagcacaagcacatccacagcaccgtgaagcccttcatctgcgaggtgtgccacaagagctacacccagttcagcaacctgtgcagacacaagagaatgcacgccgactgcagaacccagatcaagtgcaaggactgcggccagatgttcagcaccaccagcagcctgaacaagcacagaagattctgcgagggcaagaaccactacacccccggcggcatcttcgcccccggcctgcccctgacccccagccccatgatggacaaggccaagcccagccccagcctgaaccacgccagcctgggcttcaacgagtacttccccagcagaccccaccccggcagcctgcccttcagcaccgccccccccaccttccccgccctgacccccggcttccccggcatcttcccccccagcctgtaccccagaccccccctgctgccccccaccagcctgctgaagagccccctgaaccacacccaggacgccaagctgcccagccccctgggcaaccccgccctgcccctggtgagcgccgtgagcaacagcagccagggcaccaccgccgccgccggccccgaggagaagttcgagagcagactggaggacagctgcgtggagaagctgaagaccagaagcagcgacatgagcgacggcagcgacttcgaggacgtgaacaccaccaccggcaccgacctggacaccaccaccggcaccggcagcgacctggacagcgacgtggacagcgaccccgacaaggacaagggcaagggcaagagcgccgagggccagcccaagttcggcggcggcctggccccccccggcgcccccaacagcgtggccgaggtgcccgtgttctacagccagcacagcttcttccccccccccgacgagcagctgctgaccgccaccggcgccgccggcgacagcatcaaggccatcgccagcatcgccgagaagtacttcggccccggcttcatgggcatgcaggagaagaagctgggcagcctgccctaccacagcgccttccccttccagttcctgcccaacttcccccacagcctgtaccccttcaccgacagagccctggcccacaacctgctggtgaaggccgagcccaagagccccagagacgccctgaaggtgggcggccccagcgccgagtgccccttcgacctgaccaccaagcccaaggacgtgaagcccatcctgcccatgcccaagggccccagcgcccccgccagcggcgaggagcagcccctggacctgagcatcggcagcagagccagagccagccagaacggcggcggcagagagcccagaaagaaccacgtgtacggcgagagaaagctgggcgccggcgagggcctgccccaggtgtgccccgccagaatgccccagcagccccccctgcactacgccaagcccagccccttcttcatggaccccatctacagagtggagaagagaaaggtgaccgaccccgtgggcgccctgaaggagaagtacctgagacccagccccctgctgttccacccccagatgagcgccatcgagaccatgaccgagaagctggagagcttcgccgccatgaaggccgacagcggcagcagcctgcagcccctgccccaccaccccttcaacttcagaagccccccccccaccctgagcgaccccatcctgagaaagggcaaggagagatacacctgcagatactgcggcaagatcttccccagaagcgccaacctgaccagacacctgagaacccacaccggcgagcagccctacagatgcaagtactgcgacagaagcttcagcatcagcagcaacctgcagagacacgtgagaaacatccacaacaaggagaagcccttcaagtgccacctgtgcaacagatgcttcggccagcagaccaacctggacagacacctgaagaagcacgagcacgagaacgcccccgtgagccagcaccccggcgtgctgaccaaccacctgggcaccagcgccagcagccccaccagcgagagcgacaaccacgccctgctggacgagaaggaggacagctacttcagcgagatcagaaacttcatcgccaacagcgagatgaaccaggccagcaccagaaccgagaagagagccgacatgcagatcgtggacggcagcgcccagtgccccggcctggccagcgagaagcaggaggacgtggaggaggaggacgacgacgacctggaggaggacgacgaggacagcctggccggcaagagccaggacgacaccgtgagccccgcccccgagccccaggccgcctacgaggacgaggaggacgaggagcccgccgccagcctggccgtgggcttcgaccacaccagaagatgcgccgaggaccacgagggcggcctgctggccctggagcccatgcccaccttcggcaagggcctggacctgagaagagccgccgaggaggccttcgaggtgaaggacgtgctgaacagcaccctggacagcgaggccctgaagcacaccctgtgcagacaggccaagaaccaggcctacgccatgatgctgagcctgagcgaggacacccccctgcacacccccagccagggcagcctggacgcctggctgaaggtgaccggcgccaccagcgagagcggcgccttccaccccatcaaccacctgtag

SEQ ID NO: 94266 - DNA, 3774 bp, synthetic construct
  misc_feature 1..3774: note = Description of Artificial Sequence: Synthetic coding sequence
  source 1..3774: mol_type = other DNA
atgagaagcaaggccagagccagaaagctggccaagagcgacggcgacgtggtgaacaacatgtacgagcccaacagagacctgctggccagccacagcgccgaggacgaggccgaggacagcgccatgagccccatccccgtgggcccccccagccccttccccaccagcgaggacttcacccccaaggagggcagcccctacgaggcccccgtgtacatccccgaggacatccccatccccgccgacttcgagctgagagagagcagcatccccggcgccggcctgggcgtgtgggccaagagaaagatggaggccggcgagagactgggcccctgcgtggtggtgcccagagccgccgccaaggagaccgacttcggctgggagcagatcctgaccgacgtggaggtgagcccccaggagggctgcatcaccaagatcagcgaggacctgggcagcgagaagttctgcgtggacgccaaccaggccggcgccggcagctggctgaagtacatcagagtggcctgcagctgcgacgaccagaacctgaccatgtgccagatcagcgagcagatctactacaaggtgatcaaggacatcgagcccggcgaggagctgctggtgcacgtgaaggagggcgtgtaccccctgggcaccgtgccccccggcctggacgaggagcccaccttcagatgcgacgagtgcgacgagctgttccagagcaagctggacctgagaagacacaagaagtacacctgcggcagcgtgggcgccgccctgtacgagggcctggccgaggagctgaagcccgagggcctgggcggcggcagcggccaggcccacgagtgcaaggactgcgagagaatgttccccaacaagtacagcctggagcagcacatggtgatccacaccgaggagagagagtacaagtgcgaccagtgccccaaggccttcaactggaagagcaacctgatcagacaccagatgagccacgacagcggcaagagattcgagtgcgagaactgcgtgaaggtgttcaccgaccccagcaacctgcagagacacatcagaagccagcacgtgggcgccagagcccacgcctgccccgactgcggcaagaccttcgccaccagcagcggcctgaagcagcacaagcacatccacagcaccgtgaagcccttcatctgcgaggtgtgccacaagagctacacccagttcagcaacctgtgcagacacaagagaatgcacgccgactgcagaacccagatcaagtgcaaggactgcggccagatgttcagcaccaccagcagcctgaacaagcacagaagattctgcgagggcaagaaccactacacccccggcggcatcttcgcccccggcctgcccctgacccccagccccatgatggacaaggccaagcccagccccagcctgaaccacgccagcctgggcttcaacgagtacttccccagcagaccccaccccggcagcctgcccttcagcaccgccccccccaccttccccgccctgacccccggcttccccggcatcttcccccccagcctgtaccccagaccccccctgctgccccccaccagcctgctgaagagccccctgaaccacacccaggacgccaagctgcccagccccctgggcaaccccgccctgcccctggtgagcgccgtgagcaacagcagccagggcaccaccgccgccgccggccccgaggagaagttcgagagcagactggaggacagctgcgtggagaagctgaagaccagaagcagcgacatgagcgacggcagcgacttcgaggacgtgaacaccaccaccggcaccgacctggacaccaccaccggcaccggcagcgacctggacagcgacgtggacagcgaccccgacaaggacaagggcaagggcaagagcgccgagggccagcccaagttcggcggcggcctggccccccccggcgcccccaacagcgtggccgaggtgcccgtgttctacagccagcacagcttcttccccccccccgacgagcagctgctgaccgccaccggcgccgccggcgacagcatcaaggccatcgccagcatcgccgagaagtacttcggccccggcttcatgggcatgcaggagaagaagctgggcagcctgccctaccacagcgccttccccttccagttcctgcccaacttcccccacagcctgtaccccttcaccgacagagccctggcccacaacctgctggtgaaggccgagcccaagagccccagagacgccctgaaggtgggcggccccagcgccgagtgccccttcgacctgaccaccaagcccaaggacgtgaagcccatcctgcccatgcccaagggccccagcgcccccgccagcggcgaggagcagcccctggacctgagcatcggcagcagagccagagccagccagaacggcggcggcagagagcccagaaagaaccacgtgtacggcgagagaaagctgggcgccggcgagggcctgccccaggtgtgccccgccagaatgccccagcagccccccctgcactacgccaagcccagccccttcttcatggaccccatctacagcagagtggagaagagaaaggtgaccgaccccgtgggcgccctgaaggagaagtacctgagacccagccccctgctgttccacccccagatgagcgccatcgagaccatgaccgagaagctggagagcttcgccgccatgaaggccgacagcggcagcagcctgcagcccctgccccaccaccccttcaacttcagaagccccccccccaccctgagcgaccccatcctgagaaagggcaaggagagatacacctgcagatactgcggcaagatcttccccagaagcgccaacctgaccagacacctgagaacccacaccggcgagcagccctacagatgcaagtactgcgacagaagcttcagcatcagcagcaacctgcagagacacgtgagaaacatccacaacaaggagaagcccttcaagtgccacctgtgcaacagatgcttcggccagcagaccaacctggacagacacctgaagaagcacgagcacgagaacgcccccgtgagccagcaccccggcgtgctgaccaaccacctgggcaccagcgccagcagccccaccagcgagagcgacaaccacgccctgctggacgagaaggaggacagctacttcagcgagatcagaaacttcatcgccaacagcgagatgaaccaggccagcaccagaaccgagaagagagccgacatgcagatcgtggacggcagcgcccagtgccccggcctggccagcgagaagcaggaggacgtggaggaggaggacgacgacgacctggaggaggacgacgaggacagcctggccggcaagagccaggacgacaccgtgagccccgcccccgagccccaggccgcctacgaggacgaggaggacgaggagcccgccgccagcctggccgtgggcttcgaccacaccagaagatgcgccgaggaccacgagggcggcctgctggccctggagcccatgcccaccttcggcaagggcctggacctgagaagagccgccgaggaggccttcgaggtgaaggacgtgctgaacagcaccctggacagcgaggccctgaagcacaccctgtgcagacaggccaagaaccagggcagcctggacgcctggctgaaggtgaccggcgccaccagcgagagcggcgccttccaccccatcaaccacctgtag

SEQ ID NO: 94267 - DNA, 600 bp, synthetic construct
  misc_feature 1..600: note = Description of Artificial Sequence: Synthetic coding sequence
  source 1..600: mol_type = other DNA
atgagcagcgagaactgcttcgtggccgagaacagcagcctgcaccccgagagcggccaggagaacgacgccaccagcccccacttcagcaccagacacgagggcagcttccaggtgcccgtgctgtgcgccgtgatgaacgtggtgttcatcaccatcctgatcatcgccctgatcgccctgagcgtgggccagtacaactgccccggccagtacaccttcagcatgcccagcgacagccacgtgagcagctgcagcgaggactgggtgggctaccagagaaagtgctacttcatcagcaccgtgaagagaagctggaccagcgcccagaacgcctgcagcgagcacggcgccaccctggccgtgatcgacagcgagaaggacatgaacttcctgaagagatacgccggcagagaggagcactgggtgggcctgaagaaggagcccggccacccctggaagtggagcaacggcaaggagttcaacaactggttcaacgtgaccggcagcgacaagtgcgtgttcctgaagaacaccgaggtgagcagcatggagtgcgagaagaacctgtactggatctgcaacaagccctacaagtag

SEQ ID NO: 94268 - DNA, 228 bp, synthetic construct
  misc_feature 1..228: note = Description of Artificial Sequence: Synthetic coding sequence
  source 1..228: mol_type = other DNA
atgcaccacagaatgaacgagatgaacctgagccccgtgggcatggagcagctgaccagcagcagcgtgagcaacgccctgcccgtgagcggcagccacctgggcctggccgccagccccacccacagcgccatccccgcccccggcctgcccgtggccatccccaacctgggccccagcctgagcagcctgcccagcgccctgagcctgatgctgcccatgggctag

SEQ ID NO: 94269 - DNA, 1893 bp, synthetic construct
  misc_feature 1..1893: note = Description of Artificial Sequence: Synthetic coding sequence
  source 1..1893: mol_type = other DNA
atgctgggcatgtacgtgcccgacagattcagcctgaagagcagcagagtgcaggacggcatgggcctgtacaccgccagaagagtgagaaagggcgagaagttcggccccttcgccggcgagaagagaatgcccgaggacctggacgagaacatggactacagactgatgtgggaggtgagaggcagcaagggcgaggtgctgtacatcctggacgccaccaaccccagacacagcaactggctgagattcgtgcacgaggcccccagccaggagcagaagaacctggccgccatccaggagggcgagaacatcttctacctggccgtggaggacatcgagaccgacaccgagctgctgatcggctacctggacagcgacatggaggccgaggaggaggagcagcagatcatgaccgtgatcaaggagggcgaggtggagaacagcagaagacagagcaccgccggcagaaaggacagactgggctgcaaggaggactacgcctgcccccagtgcgagagcagcttcaccagcgaggacatcctggccgagcacctgcagaccctgcaccagaagcccaccgaggagaaggagttcaagtgcaagaactgcggcaagaagttccccgtgaagcaggccctgcagagacacgtgctgcagtgcaccgccaagagcagcctgaaggagagcagcagaagcttccagtgcagcgtgtgcaacagcagcttcagcagcgccagcagcttcgagcagcaccaggagacctgcagaggcgacgccagattcgtgtgcaaggccgacagctgcggcaagagactgaagagcaaggacgccctgaagagacaccaggagaacgtgcacaccggcgaccccaagaagaagctgatctgcagcgtgtgcaacaagaagtgcagcagcgccagcagcctgcaggagcacagaaagatccacgagatcttcgactgccaggagtgcatgaagaagttcatcagcgccaaccagctgaagagacacatgatcacccacagcgagaagagaccctacaactgcgagatctgcaacaagagcttcaagagactggaccaggtgggcgcccacaaggtgatccacagcgaggacaagccctacaagtgcaagctgtgcggcaagggcttcgcccacagaaacgtgtacaagaaccacaagaagacccacagcgaggagagacccttccagtgcgaggagtgcaaggccctgttcagaacccccttcagcctgcagagacacctgctgatccacaacagcgagagaaccttcaagtgccaccactgcgacgccaccttcaagagaaaggacaccctgaacgtgcacgtgcaggtggtgcacgagagacacaagaagtacagatgcgagctgtgcaacaaggccttcgtgacccccagcgtgctgagaagccacaagaagacccacaccggcgagaaggagaagatctgcccctactgcggccagaagttcgccagcagcggcaccctgagagtgcacatcagaagccacaccggcgagagaccctaccagtgcccctactgcgagaagggcttcagcaagaacgacggcctgaagatgcacatcagaacccacaccagagagaagccctacaagtgcagcgagtgcagcaaggccttcagccagaagagaggcctggacgagcacaagagaacccacaccggcgagaagcccttccagtgcgacgtgtgcgacctggccttcagcctgaagaagatgctgatcagacacaagatgacccacaaccccaacagacccctggccgagtgccagttctgccacaagaagttcaccagaaacgactacctgaaggtgcacatggacaacatccacggcgtggccgacagctag

SEQ ID NO: 94270 - DNA, 336 bp, synthetic construct
  misc_feature 1..336: note = Description of Artificial Sequence: Synthetic coding sequence
  source 1..336: mol_type = other DNA
atgctgggcatgtacgtgcccgacagattcagcctgaagagcagcagagtgcaggacggcatgggcctgtacaccgccagaagagtgagaaagggcgagaagttcggccccttcgccggcgagaagagaatgcccgaggacctggacgagaacatggactacagactgatgtgggaggtgagaggcagcaagggcgaggtgctgtacatcctggacgccaccaaccccagacacagcaactggctgagattcgtgcacgaggcccccagccaggagcagaagaacctggccgccatccaggacaagaacctgggccccgccgagtggagaggctag

SEQ ID NO: 94271 - DNA, 1800 bp, synthetic construct
  misc_feature 1..1800: note = Description of Artificial Sequence: Synthetic coding sequence
  source 1..1800: mol_type = other DNA
atgctgggcatgtacgtgcccgacagattcagcctgaagagcagcagagtgcaggacggcatgggcctgtacaccgccagaagagtgagaaagggcgagaagttcggccccttcgccggcgagaagagaatgcccgaggacctggacgagaacatggactacagactgatgtgggaggtgagaggcagcaagggcgaggtgctgtacatcctggacgccaccaaccccagacacagcaactggctgagattcgtgcacgaggcccccagccaggagcagaagaacctggccgccatccaggagggcgagaacatcttctacctggccgtggaggacatcgagaccgacaccgagctgctgatcggctacctggacagcgacatggaggccgaggaggaggagcagcagatcatgaccgtgatcaaggagggcgaggtggagaacagcagaagacagagcaccgccggcagaaaggacagactgggctgcaaggaggactacgcctgcccccagtgcgagagcagcttcaccagcgaggacatcctggccgagcacctgcagaccctgcaccagaagcccaccgaggagaaggagttcaagtgcaagaactgcggcaagaagttccccgtgaagcaggccctgcagagacacttcgagcagcaccaggagacctgcagaggcgacgccagattcgtgtgcaaggccgacagctgcggcaagagactgaagagcaaggacgccctgaagagacaccaggagaacgtgcacaccggcgaccccaagaagaagctgatctgcagcgtgtgcaacaagaagtgcagcagcgccagcagcctgcaggagcacagaaagatccacgagatcttcgactgccaggagtgcatgaagaagttcatcagcgccaaccagctgaagagacacatgatcacccacagcgagaagagaccctacaactgcgagatctgcaacaagagcttcaagagactggaccaggtgggcgcccacaaggtgatccacagcgaggacaagccctacaagtgcaagctgtgcggcaagggcttcgcccacagaaacgtgtacaagaaccacaagaagacccacagcgaggagagacccttccagtgcgaggagtgcaaggccctgttcagaacccccttcagcctgcagagacacctgctgatccacaacagcgagagaaccttcaagtgccaccactgcgacgccaccttcaagagaaaggacaccctgaacgtgcacgtgcaggtggtgcacgagagacacaagaagtacagatgcgagctgtgcaacaaggccttcgtgacccccagcgtgctgagaagccacaagaagacccacaccggcgagaaggagaagatctgcccctactgcggccagaagttcgccagcagcggcaccctgagagtgcacatcagaagccacaccggcgagagaccctaccagtgcccctactgcgagaagggcttcagcaagaacgacggcctgaagatgcacatcagaacccacaccagagagaagccctacaagtgcagcgagtgcagcaaggccttcagccagaagagaggcctggacgagcacaagagaacccacaccggcgagaagcccttccagtgcgacgtgtgcgacctggccttcagcctgaagaagatgctgatcagacacaagatgacccacaaccccaacagacccctggccgagtgccagttctgccacaagaagttcaccagaaacgactacctgaaggtgcacatggacaacatccacggcgtggccgacagctag

SEQ ID NO: 94272 - DNA, 1506 bp, synthetic construct
  misc_feature 1..1506: note = Description of Artificial Sequence: Synthetic coding sequence
  source 1..1506: mol_type = other DNA
atgctgggcatgtacgtgcccgacagattcagcctgaagagcagcagagtgcaggacggcatgggcctgtacaccgccagaagagtgagaaagggcgagaagttcggccccttcgccggcgagaagagaatgcccgaggacctggacgagaacatggactacagactgatgtgggaggtgagaggcagcaagggcgaggtgctgtacatcctggacgccaccaaccccagacacagcaactggctgagattcgtgcacgaggcccccagccaggagcagaagaacctggccgccatccaggagggcgagaacatcttctacctggccgtggaggacatcgagaccgacaccgagctgctgatcggctacctggacagcgacatggaggccgaggaggaggagcagcagatcatgaccgtgatcaaggagggcgaggtggagaacagcagaagacagagcaccgccggcagaaaggacagactgggctgcaaggaggactacgcctgcccccagtgcgagagcagcttcaccagcgaggacatcctggccgagcacctgcagaccctgcaccagaagcccaccgaggagaaggagttcaagtgcaagaactgcggcaagaagttccccgtgaagcaggccctgcagagacacttcgagcagcaccaggagacctgcagaggcgacgccagattcgtgtgcaaggccgacagctgcggcaagagactgaagagcaaggacgccctgaagagacaccaggagaacgtgcacaccggcgaccccaagaagaagctgatctgcagcgtgtgcaacaagaagtgcagcagcgccagcagcctgcaggagcacagaaagatccacgagatcttcgactgccaggagtgcatgaagaagttcatcagcgccaaccagctgaagagacacatgatcacccacagcgagaagagaccctacaactgcgagatctgcaacaagagcttcaagagactggaccaggtgggcgcccacaaggtgatccacagcgaggacaagccctacaagtgcaagctgtgcggcaagggcttcgcccacagaaacgtgtacaagaaccacaagaagacccacagcgaggagagacccttccagtgcgaggagtgcaaggccctgttcagaacccccttcagcctgcagagacacctgctgatccacaacagcgagagaaccttcaagtgccaccactgcgacgccaccttcaagagaaaggacaccctgaacgtgcacgtgcaggtggtgcacgagagacacaagaagtacagatgcgagctgtgcaacaaggccttcgtgacccccagcgtgctgagaagccacaagaagacccacaccggcgagaaggagaagatctgcccctactgcggccagaagttcgccagcagcggcaccctgagagtgcacatcagaagccacaccggcgaggccgtgcaggtgctgagagtgcagcagggcctgcagcccgaggccagacccggctag

SEQ ID NO: 94273 - DNA, 1227 bp, synthetic construct
  misc_feature 1..1227: note = Description of Artificial Sequence: Synthetic coding sequence
  source 1..1227: mol_type = other DNA
atgtgccagaacttcttcatcgacagctgcgccgcccacggcccccccaccttcgtgaaggacagcgccgtggacaagggccaccccaacagaagcgccctgagcctgccccccggcctgagaatcggccccagcggcatcccccaggccggcctgggcgtgtggaacgaggccagcgacctgcccctgggcctgcacttcggcccctacgagggcagaatcaccgaggacgaggaggccgccaacaacggctacagctggctgatcaccaagggcagaaactgctacgagtacgtggacggcaaggacaagagctgggccaactggatgagatacgtgaactgcgccagagacgacgaggagcagaacctggtggccttccagtaccacagacagatcttctacagaacctgcagagtgatcagacccggctgcgagctgctggtgtggtacggcgacgagtacggccaggagctgggcatcaagtggggcagcaagtggaagaaggagctgatggccggcagagagcccaagcccgagatccacccctgccccagctgctgcctggccttcagcagccagaagttcctgagccagcacgtggagagaaaccacagcagccagaacttccccggccccagcgccagaaagctgctgcagcccgagaacccctgccccggcgaccagaaccaggagcagcagtaccccgacccccacagcagaaacgacaagaccaagggccaggagatcaaggagagaagcaagctgctgaacaagagaacctggcagagagagatcagcagagccttcagcagcccccccaagggccagatgggcagctgcagagtgggcaagagaatcatggaggaggagagcagaaccggccagaaggtgaaccccggcaacaccggcaagctgttcgtgggcgtgggcatcagcagaatcgccaaggtgaagtacggcgagtgcggccagggcttcagcgtgaagagcgacgtgatcacccaccagagaacccacaccggcgagaagccctacgtgtgcagagagtgcggcagaggcttcagctggcagagcgtgctgctgacccaccagagaacccacaccggcgagaagccctacgtgtgcagagagtgcggcagaggcttcagcagacagagcgtgctgctgacccaccagagaacccacaccggcgagaagccctacgtgtgcagagaggacgagtag

SEQ ID NO: 94274 - DNA, 2685 bp, synthetic construct
  misc_feature 1..2685: note = Description of Artificial Sequence: Synthetic coding sequence
  source 1..2685: mol_type = other DNA
atgagccccgagaagagccaggaggagagccccgaggaggacaccgagagaaccgagagaaagcccatggtgaaggacgccttcaaggacatcagcatctacttcaccaaggaggagtgggccgagatgggcgactgggagaagaccagatacagaaacgtgaagagaaactacaacgccctgatcaccatcggcctgagagccaccagacccgccttcatgtgccacagaagacaggccatcaagctgcaggtggacgacaccgaggacagcgacgaggagtggacccccagacagcaggtgaagcccccctggatggccctgagagtggagcagagaaagcaccagaagggcatgcccaaggccagcttcagcaacgagagcagcctgaaggagctgagcagaaccgccaacctgctgaacgccagcggcagcgagcaggcccagaagcccgtgagccccagcggcgaggccagcaccagcggccagcacagcagactgaagctggagctgagaaagaaggagaccgagagaaagatgtacagcctgagagagagaaagggccacgcctacaaggaggtgagcgagccccaggacgacgactacctgtactgcgagatgtgccagaacttcttcatcgacagctgcgccgcccacggcccccccaccttcgtgaaggacagcgccgtggacaagggccaccccaacagaagcgccctgagcctgccccccggcctgagaatcggccccagcggcatcccccaggccggcctgggcgtgtggaacgaggccagcgacctgcccctgggcctgcacttcggcccctacgagggcagaatcaccgaggacgaggaggccgccaacaacggctacagctggctgatcaccaagggcagaaactgctacgagtacgtggacggcaaggacaagagctgggccaactggatgagatacgtgaactgcgccagagacgacgaggagcagaacctggtggccttccagtaccacagacagatcttctacagaacctgcagagtgatcagacccggctgcgagctgctggtgtggtacggcgacgagtacggccaggagctgggcatcaagtggggcagcaagtggaagaaggagctgatggccggcagagagcccaagcccgagatccacccctgccccagctgctgcctggccttcagcagccagaagttcctgagccagcacgtggagagaaaccacagcagccagaacttccccggccccagcgccagaaagctgctgcagcccgagaacccctgccccggcgaccagaaccaggagcagcagtaccccgacccccacagcagaaacgacaagaccaagggccaggagatcaaggagagaagcaagctgctgaacaagagaacctggcagagagagatcagcagagccttcagcagcccccccaagggccagatgggcagctgcagagtgggcaagagaatcatggaggaggagagcagaaccggccagaaggtgaaccccggcaacaccggcaagctgttcgtgggcgtgggcatcagcagaatcgccaaggtgaagtacggcgagtgcggccagggcttcagcgtgaagagcgacgtgatcacccaccagagaacccacaccggcgagaagctgtacgtgtgcagagagtgcggcagaggcttcagctggaagagccacctgctgatccaccagagaatccacaccggcgagaagccctacgtgtgcagagagtgcggcagaggcttcagctggcagagcgtgctgctgacccaccagagaacccacaccggcgagaagccctacgtgtgcagagagtgcggcagaggcttcagcagacagagcgtgctgctgacccaccagagaagacacaccggcgagaagccctacgtgtgcagagagtgcggcagaggcttcagcagacagagcgtgctgctgacccaccagagaagacacaccggcgagaagccctacgtgtgcagagagtgcggcagaggcttcagctggcagagcgtgctgctgacccaccagagaacccacaccggcgagaagccctacgtgtgcagagagtgcggcagaggcttcagctggcagagcgtgctgctgacccaccagagaacccacaccggcgagaagccctacgtgtgcagagagtgcggcagaggcttcagcaacaagagccacctgctgagacaccagagaacccacaccggcgagaagccctacgtgtgcagagagtgcggcagaggcttcagagacaagagccacctgctgagacaccagagaacccacaccggcgagaagccctacgtgtgcagagagtgcggcagaggcttcagagacaagagcaacctgctgagccaccagagaacccacaccggcgagaagccctacgtgtgcagagagtgcggcagaggcttcagcaacaagagccacctgctgagacaccagagaacccacaccggcgagaagccctacgtgtgcagagagtgcggcagaggcttcagaaacaagagccacctgctgagacaccagagaacccacaccggcgagaagccctacgtgtgcagagagtgcggcagaggcttcagcgacagaagcagcctgtgctaccaccagagaacccacaccggcgagaagccctacgtgtgcagagaggacgagtag

SEQ ID NO: 94275 - DNA, 303 bp, synthetic construct
  misc_feature 1..303: note = Description of Artificial Sequence: Synthetic coding sequence
  source 1..303: mol_type = other DNA
atgagccccgagaagagccaggaggagagccccgaggaggacaccgagagaaccgagagaaagcccatggtgaaggacgccttcaaggacatcagcatctacttcaccaaggaggagtgggccgagatgggcgactgggagaagaccagatacagaaacgtgaagagaaactacaacgccctgatcaccatcggcctgagagccaccagacccgccttcatgtgccacagaagacaggccatcaagctgcaggtggacgacaccgaggacagcgacgaggagtggacccccagacagcagtag

SEQ ID NO: 94276 - DNA, 537 bp, synthetic construct
  misc_feature 1..537: note = Description of Artificial Sequence: Synthetic coding sequence
  source 1..537: mol_type = other DNA
atgagcgaggtgagactgccccccctgagagccctggacgacttcgtgctgggcagcgccagactggccgcccccgacccctgcgacccccagagatggtgccacagagtgatcaacaacctgctgtactaccagaccaactacctgctgtgcttcggcatcggcctggccctggccggctacgtgagacccctgcacaccctgctgagcgccctggtggtggccgtggccctgggcgtgctggtgtgggccgccgagaccagagccgccgtgagaagatgcagaagaagccaccccgccgcctgcctggccgccgtgctggccgtgggcctgctggtgctgtgggtggccggcggcgcctgcaccttcctgttcagcatcgccggccccgtgctgctgatcctggtgcacgccagcctgagactgagaaacctgaagaacaagatcgagaacaagatcgagagcatcggcctgaagagaacccccatgggcctgctgctggaggccctgggccaggagcaggaggccggcagctag

SEQ ID NO: 94277 - DNA, 846 bp, synthetic construct
  misc_feature 1..846: note = Description of Artificial Sequence: Synthetic coding sequence
  source 1..846: mol_type = other DNA
atggccggcacctggctgctgctgctgctggccctgggctgccccgccctgcccaccggcgtgggcggcacccccttccccagcctggccccccccatcatgctgctggtggacggcaagcagcagatggtggtggtgtgcctggtgctggacgtggccccccccggcctggacagccccatctggttcagcgccggcaacggcagcgccctggacgccttcacctacggccccagccccgccaccgacggcacctggaccaacctggcccacctgagcctgcccagcgaggagctggccagctgggagcccctggtgtgccacaccggccccggcgccgagggccacagcagaagcacccagcccatgcacctgagcggcgaggccagcaccgccagaacctgcccccaggagcccctgagaggcacccccggcggcgccctgtggctgggcgtgctgagactgctgctgttcaagctgctgctgttcgacctgctgctgacctgcagctgcctgtgcgaccccgccggccccctgcccagccccgccaccaccaccagactgagagccctgggcagccacagactgcaccccgccaccgagaccggcggcagagaggccaccagcagccccagaccccagcccagagacagaagatggggcgacaccccccccggcagaaagcccggcagccccgtgtggggcgagggcagctacctgagcagctaccccacctgccccgcccaggcctggtgcagcagaagcgccctgagagcccccagcagcagcctgggcgccttcttcgccggcgacctgcccccccccctgcaggccggcgccgcctag

SEQ ID NO: 94278 - DNA, 384 bp, synthetic construct
  misc_feature 1..384: note = Description of Artificial Sequence: Synthetic coding sequence
  source 1..384: mol_type = other DNA
atggccgccaccagccccggcccctgggtgagcagccccacccacagaagctgcttcctgcccttcctgaccagaggctgccacaacagagtgtgggccgcccaccccttcctgctgtggccccaccagagctgctgctggtggatggagagcagcagatggtggtggagcgcctggagcctgatgctgcaccccctggccctgaccgcccccggcagaaagcccggcagccccgtgtggggcgagggcagctacctgagcagctaccccacctgccccgcccaggcctggtgcagcagaagcgccctgagagcccccagcagcagcctgggcgccttcttcgccggcgacctgcccccccccctgcaggccggcgccgcctag

SEQ ID NO: 94279 - DNA, 771 bp, synthetic construct
  misc_feature 1..771: note = Description of Artificial Sequence: Synthetic coding sequence
  source 1..771: mol_type = other DNA
atggccggcacctggctgctgctgctgctggccctgggctgccccgccctgcccaccggccccgtgagcttccccagcagccccgaggccgccaccaccggccccatctggttcagcgccggcaacggcagcgccctggacgccttcacctacggccccagccccgccaccgacggcacctggaccaacctggcccacctgagcctgcccagcgaggagctggccagctgggagcccctggtgtgccacaccggccccggcgccgagggccacagcagaagcacccagcccatgcacctgagcggcgaggccagcaccgccagaacctgcccccaggagcccctgagaggcacccccggcggcgccctgtggctgggcgtgctgagactgctgctgttcaagctgctgctgttcgacctgctgctgacctgcagctgcctgtgcgaccccgccggccccctgcccagccccgccaccaccaccagactgagagccctgggcagccacagactgcaccccgccaccgagaccggcggcagagaggccaccagcagccccagaccccagcccagagacagaagatggggcgacaccccccccggcagaaagcccggcagccccgtgtggggcgagggcagctacctgagcagctaccccacctgccccgcccaggcctggtgcagcagaagcgccctgagagcccccagcagcagcctgggcgccttcttcgccggcgacctgcccccccccctgcaggccggcgccgcctag

SEQ ID NO: 94280 - DNA, 525 bp, synthetic construct
  misc_feature 1..525: note = Description of Artificial Sequence: Synthetic coding sequence
  source 1..525: mol_type = other DNA
atggccggcacctggctgctgctgctgctggccctgggctgccccgccctgcccaccggcgaggccagcaccgccagaacctgcccccaggagcccctgagaggcacccccggcggcgccctgtggctgggcgtgctgagactgctgctgttcaagctgctgctgttcgacctgctgctgacctgcagctgcctgtgcgaccccgccggccccctgcccagccccgccaccaccaccagactgagagccctgggcagccacagactgcaccccgccaccgagaccggcggcagagaggccaccagcagccccagaccccagcccagagacagaagatggggcgacaccccccccggcagaaagcccggcagccccgtgtggggcgagggcagctacctgagcagctaccccacctgccccgcccaggcctggtgcagcagaagcgccctgagagcccccagcagcagcctgggcgccttcttcgccggcgacctgcccccccccctgcaggccggcgccgcctag

SEQ ID NO: 94281 - DNA, 438 bp, synthetic construct
  misc_feature 1..438: note = Description of Artificial Sequence: Synthetic coding sequence
  source 1..438: mol_type = other DNA
atgagctgggcccccgtgctgctgatgctgttcgtgtactgcaccggctgcggcccccagcccgtgctgcaccagccccccgccatgagcagcgccctgggcaccaccatcagactgacctgcaccctgagaaacgaccacgacatcggcgtgtacagcgtgtactggtaccagcagagacccggccacccccccagattcctgctgagatacttcagccagagcgacaagagccagggcccccaggtgccccccagattcagcggcagcaaggacgtggccagaaacagaggctacctgagcatcagcgagctgcagcccgaggacgaggccatgtactactgcgccatgggcgccagaagcagcgagaaggaggagagagagagagagtgggaggaggagatggagcccaccgccgccagaaccagagtgccctag

SEQ ID NO: 94282 - DNA, 372 bp, synthetic construct
  misc_feature 1..372: note = Description of Artificial Sequence: Synthetic coding sequence
  source 1..372: mol_type = other DNA
atggcctgcagatgcctgagcttcctgctgatgggcaccttcctgagcgtgagccagaccgtgctggcccagctggacgccctgctggtgttccccggccaggtggcccagctgagctgcaccctgagcccccagcacgtgaccatcagagactacggcgtgagctggtaccagcagagagccggcagcgcccccagatacctgctgtactacagaagcgaggaggaccaccacagacccgccgacatccccgacagattcagcgccgccaaggacgaggcccacaacgcctgcgtgctgaccatcagccccgtgcagcccgaggacgacgccgactactactgcagcgtgggctacggcttcagcccctag

SEQ ID NO: 94283 - DNA, 513 bp, synthetic construct
  misc_feature 1..513: note = Description of Artificial Sequence: Synthetic coding sequence
  source 1..513: mol_type = other DNA
atggacgagcagcccagactgatgcacagccacgccggcgtgggcatggccggccaccccggcctgagccagcacctgcaggacggcgccggcggcaccgagggcgagggcggcagaaagcaggacatcggcgacatcctgcagcagatcatgaccatcaccgaccagagcctggacgaggcccaggccagaaagcacgccctgaactgccacagaatgaagcccgccctgttcaacgtgctgtgcgagatcaaggagaagaccgtgctgagcatcagaggcgcccaggaggaggagcccaccgacccccagctgatgagactggacaacatgctgctggccgagggcgtggccggccccgagaagggcggcggcagcgccgccgccgccgccgccgccgccgccagcggcggcgccggcagcgacaacagcgtggagcacagcgactacagagccaagctgagccagatcagacagatctaccacaccgagctggagaagtacgagcagtag

SEQ ID NO: 94284 - DNA, 1044 bp, synthetic construct
  misc_feature 1..1044: note = Description of Artificial Sequence: Synthetic coding sequence
  source 1..1044: mol_type = other DNA
atggacgagcagcccagactgatgcacagccacgccggcgtgggcatggccggccaccccggcctgagccagcacctgcaggacggcgccggcggcaccgagggcgagggcggcagaaagcaggacatcggcgacatcctgcagcagatcatgaccatcaccgaccagagcctggacgaggcccaggccagaaagcacgccctgaactgccacagaatgaagcccgccctgttcaacgtgctgtgcgagatcaaggagaagaccgtgctgagcatcagaggcgcccaggaggaggagcccaccgacccccagctgatgagactggacaacatgctgctggccgagggcgtggccggccccgagaagggcggcggcagcgccgccgccgccgccgccgccgccgccagcggcggcgccggcagcgacaacagcgtggagcacagcgactacagagccaagctgagccagatcagacagatctaccacaccgagctggagaagtacgagcaggcctgcaacgagttcaccacccacgtgatgaacctgctgagagagcagagcagaaccagacccatcagccccaaggagatcgagagaatggtgagcatcatccacagaaagttcagcagcatccagatgcagctgaagcagagcacctgcgaggccgtgatgatcctgagaagcagattcctggacgccagaagaaagagaagaaacttcaacaagcaggccaccgagatcctgaacgagtacttctacagccacctgagcaacccctaccccagcgaggaggccaaggaggagctggccaagaagtgcggcatcaccgtgagccaggtgagcaactggttcggcaacaagagaatcagatacaagaagaacatcggcaagttccaggaggaggccaacatctacgccgccaagaccgccgtgaccgccaccaacgtgagcgcccacggcagccaggccaacagccccagcacccccaacagcgccggcggctaccccagcccctgctaccagcccgacagaagaatccagtag

SEQ ID NO: 94285 - DNA, 1044 bp, synthetic construct; identical to SEQ ID NO: 94284
  misc_feature 1..1044: note = Description of Artificial Sequence: Synthetic coding sequence
  source 1..1044: mol_type = other DNA

SEQ ID NO: 94286 - DNA, 1293 bp, synthetic construct
  misc_feature 1..1293: note = Description of Artificial Sequence: Synthetic coding sequence
  source 1..1293: mol_type = other DNA
atggacgagcagcccagactgatgcacagccacgccggcgtgggcatggccggccaccccggcctgagccagcacctgcaggacggcgccggcggcaccgagggcgagggcggcagaaagcaggacatcggcgacatcctgcagcagatcatgaccatcaccgaccagagcctggacgaggcccaggccagaaagcacgccctgaactgccacagaatgaagcccgccctgttcaacgtgctgtgcgagatcaaggagaagaccgtgctgagcatcagaggcgcccaggaggaggagcccaccgacccccagctgatgagactggacaacatgctgctggccgagggcgtggccggccccgagaagggcggcggcagcgccgccgccgccgccgccgccgccgccagcggcggcgccggcagcgacaacagcgtggagcacagcgactacagagccaagctgagccagatcagacagatctaccacaccgagctggagaagtacgagcaggcctgcaacgagttcaccacccacgtgatgaacctgctgagagagcagagcagaaccagacccatcagccccaaggagatcgagagaatggtgagcatcatccacagaaagttcagcagcatccagatgcagctgaagcagagcacctgcgaggccgtgatgatcctgagaagcagattcctggacgccagaagaaagagaagaaacttcaacaagcaggccaccgagatcctgaacgagtacttctacagccacctgagcaacccctaccccagcgaggaggccaaggaggagctggccaagaagtgcggcatcaccgtgagccaggtgagcaactggttcggcaacaagagaatcagatacaagaagaacatcggcaagttccaggaggaggccaacatctacgccgccaagaccgccgtgaccgccaccaacgtgagcgcccacggcagccaggccaacagccccagcacccccaacagcgccggcagcagcagcagcttcaacatgagcaacagcggcgacctgttcatgagcgtgcagagcctgaacggcgacagctaccagggcgcccaggtgggcgccaacgtgcagagccaggtggacaccctgagacacgtgatcagccagaccggcggctacagcgacggcctggccgccagccagatgtacagcccccagggcatcagcgccaacggcggctggcaggacgccaccacccccagcagcgtgaccagccccaccgagggccccggcagcgtgcacagcgacaccagcaactag

SEQ ID NO: 94287 - DNA, 978 bp, synthetic construct
  misc_feature 1..978: note = Description of Artificial Sequence: Synthetic coding sequence
  source 1..978: mol_type = other DNA
atgagactggacaacatgctgctggccgagggcgtggccggccccgagaagggcggcggcagcgccgccgccgccgccgccgccgccgccagcggcggcgccggcagcgacaacagcgtggagcacagcgactacagagccaagctgagccagatcagacagatctaccacaccgagctggagaagtacgagcaggcctgcaacgagttcaccacccacgtgatgaacctgctgagagagcagagcagaaccagacccatcagccccaaggagatcgagagaatggtgagcatcatccacagaaagttcagcagcatccagatgcagctgaagcagagcacctgcgaggccgtgatgatcctgagaagcagattcctggacgccagaagaaagagaagaaacttcaacaagcaggccaccgagatcctgaacgagtacttctacagccacctgagcaacccctaccccagcgaggaggccaaggaggagctggccaagaagtgcggcatcaccgtgagccaggtgagcaactggttcggcaacaagagaatcagatacaagaagaacatcggcaagttccaggaggaggccaacatctacgccgccaagaccgccgtgaccgccaccaacgtgagcgcccacggcagccaggccaacagccccagcacccccaacagcgccggcagcagcagcagcttcaacatgagcaacagcggcgacctgttcatgagcgtgcagagcctgaacggcgacagctaccagggcgcccaggtgggcgccaacgtgcagagccaggtggacaccctgagacacgtgatcagccagaccggcggctacagcgacggcctggccgccagccagatgtacagcccccagggcatcagcgccaacggcggctggcaggacgccaccacccccagcagcgtgaccagccccaccgagggccccggcagcgtgcacagcgacaccagcaactag

SEQ ID NO: 94288 - DNA, 1113 bp, synthetic construct
  misc_feature 1..1113: note = Description of Artificial Sequence: Synthetic coding sequence
  source 1..1113: mol_type = other DNA
atgctgctggtgttcttcgtgctgtggacctgcagcctggccctgctggccagcagccagagccccccccccccctgcgccagcgtgctgagcatcagaggcgcccaggaggaggagcccaccgacccccagctgatgagactggacaacatgctgctggccgagggcgtggccggccccgagaagggcggcggcagcgccgccgccgccgccgccgccgccgccagcggcggcgccggcagcgacaacagcgtggagcacagcgactacagagccaagctgagccagatcagacagatctaccacaccgagctggagaagtacgagcaggcctgcaacgagttcaccacccacgtgatgaacctgctgagagagcagagcagaaccagacccatcagccccaaggagatcgagagaatggtgagcatcatccacagaaagttcagcagcatccagatgcagctgaagcagagcacctgcgaggccgtgatgatcctgagaagcagattcctggacgccagaagaaagagaagaaacttcaacaagcaggccaccgagatcctgaacgagtacttctacagccacctgagcaacccctaccccagcgaggaggccaaggaggagctggccaagaagtgcggcatcaccgtgagccaggtgagcaactggttcggcaacaagagaatcagatacaagaagaacatcggcaagttccaggaggaggccaacatctacgccgccaagaccgccgtgaccgccaccaacgtgagcgcccacggcagccaggccaacagccccagcacccccaacagcgccggcagcagcagcagcttcaacatgagcaacagcggcgacctgttcatgagcgtgcagagcctgaacggcgacagctaccagggcgcccaggtgggcgccaacgtgcagagccaggtggacaccctgagacacgtgatcagccagaccggcggctacagcgacggcctggccgccagccagatgtacagcccccagggcatcagcgccaacggcggctggcaggacgccaccacccccagcagcgtgaccagccccaccgagggccccggcagcgtgcacagcgacaccagcaactag

SEQ ID NO: 94289 - DNA, 1263 bp, synthetic construct
  misc_feature 1..1263: note = Description of Artificial Sequence: Synthetic coding sequence
  source 1..1263: mol_type = other DNA
atggacgagcagcccagactgatgcacagccacgccggcgtgggcatggccggccaccccggcctgagccagcacctgcaggacggcgccggcggcaccgagggcgagggcggcagaaagcaggacatcggcgacatcctgcagcagatcatgaccatcaccgaccagagcctggacgaggcccaggccagaaagcacgccctgaactgccacagaatgaagcccgccctgttcaacgtgctgtgcgagatcaaggagaagaccgtgctgagcatcagaggcgcccaggaggaggagcccaccgacccccagctgatgagactggacaacatgctgctggccgagggcgtggccggccccgagaagggcggcggcagcgccgccgccgccgccgccgccgccgccagcggcggcgccggcagcgacaacagcgtggagcacagcgactacagagccaagctgagccagatcagacagatctaccacaccgagctggagaagtacgagcaggcctgcaacgagttcaccacccacgtgatgaacctgctgagagagcagagcagaaccagacccatcagccccaaggagatcgagagaatggtgagcatcatccacagaaagttcagcagcatccagatgcagctgaagcagagcacctgcgaggccgtgatgatcctgagaagcagattcctggacgccagaagaaagagaagaaacttcaacaagcaggccaccgagatcctgaacgagtacttctacagccacctgagcaacccctaccccagcgaggaggccaaggaggagctggccaagaagtgcggcatcaccgtgagccaggtgagcaactggttcggcaacaagagaatcagatacaagaagaacatcggcaagttccaggaggaggccaacatctacgccgccaagaccgccgtgaccgccaccaacgtgagcgcccacggcagccaggccaacagccccagcacccccaacagcgccggcagcagcagcagcttcaacatgagcaacagcggcgacctgttcatgagcgtgcagagcctgaacggcgacagctaccagggcgcccaggtgggcgccaacgtgcagagccaggtggacaccctgagacacgtgatcagccagaccggcggctacagcgacggcctggccgccagccagatgtacagcccccagggcatcagccacctgcccagacaccccagacaggcccactaccacttcagactgcccacctggcacccctag

SEQ ID NO: 94290 - DNA, 906 bp, synthetic construct
  misc_feature 1..906: note = Description of Artificial Sequence: Synthetic coding sequence
  source 1..906: mol_type = other DNA
atgagactggacaacatgctgctggccgagggcgtggccggccccgagaagggcggcggcagcgccgccgccgccgccgccgccgccgccagcggcggcgccggcagcgacaacagcgtggagcacagcgactacagagccaagctgagccagatcagacagatctaccacaccgagctggagaagtacgagcaggcctgcaacgagttcaccacccacgtgatgaacctgctgagagagcagagcagaaccagacccatcagccccaaggagatcgagagaatggtgagcatcatccacagaaagttcagcagcatccagatgcagctgaagcagagcacctgcgaggccgtgatgatcctgagaagcagattcctggacgccagaagaaagagaagaaacttcaacaagcaggccaccgagatcctgaacgagtacttctacagccacctgagcaacccctaccccagcgaggaggccaaggaggagctggccaagaagtgcggcatcaccgtgagccaggtgagcaactggttcggcaacaagagaatcagatacaagaagaacatcggcaagttccaggaggaggccaacatctacgccgccaagaccgccgtgaccgccaccaacgtgagcgcccacggcagccaggccaacagccccagcacccccaacagcgccggcagcagcagcagcttcaacatgagcaacagcggcgacctgttcatgagcgtgcagagcctgaacggcgacagctaccagggcgcccaggtgggcgccaacgtgcagagccaggtggacaccctgagacacgtgatcagccagaccggcggctacagcgacggcctggccgccagccagatgtacagcccccagggcatcagcgagatcgccagaacctactag

SEQ ID NO: 94291 - DNA, 1020 bp, synthetic construct
  misc_feature 1..1020: note = Description of Artificial Sequence: Synthetic coding sequence
  source 1..1020: mol_type = other DNA
atggacgagcagcccagactgatgcacagccacgccggcgtgggcatggccggccaccccggcctgagccagcacctgcaggacggcgccggcggcaccgagggcgagggcggcagaaagcaggacatcggcgacatcctgcagcagatcatgaccatcaccgaccagagcctggacgaggcccaggccagaaagcacgccctgaactgccacagaatgaagcccgccctgttcaacgtgctgtgcgagatcaaggagaagaccgtgctgagcatcagaggcgcccaggaggaggagcccaccgacccccagctgatgagactggacaacatgctgctggccgagggcgtggccggccccgagaagggcggcggcagcgccgccgccgccgccgccgccgccgccagcggcggcgccggcagcgacaacagcgtggagcacagcgactacagagccaagctgagccagatcagacagatctaccacaccgagctggagaagtacgagcaggcctgcaacgagttcaccacccacgtgatgaacctgctgagagagcagagcagaaccagacccatcagccccaaggagatcgagagaatggtgagcatcatccacagaaagttcagcagcatccagatgcagctgaagcagagcacctgcgaggccgtgatgatcctgagaagcagattcctggacgccagaagaaagagaagaaacttcaacaagcaggccaccgagatcctgaacgagtacttctacagccacctgagcaacccctaccccagcgaggaggccaaggaggagctggccaagaagtgcggcatcaccgtgagccaggtggacaccctgagacacgtgatcagccagaccggcggctacagcgacggcctggccgccagccagatgtacagcccccagggcatcagcgccaacggcggctggcaggacgccaccacccccagcagcgtgaccagccccaccgagggccccggcagcgtgcacagcgacaccagcaactag

SEQ ID NO: 94292 - DNA, 978 bp, synthetic construct; identical to SEQ ID NO: 94287
  misc_feature 1..978: note = Description of Artificial Sequence: Synthetic coding sequence
  source 1..978: mol_type = other DNA

SEQ ID NO: 94293 - DNA, 978 bp, synthetic construct; identical to SEQ ID NO: 94287
  misc_feature 1..978: note = Description of Artificial Sequence: Synthetic coding sequence
  source 1..978: mol_type = other DNA

SEQ ID NO: 94294 - DNA, 1293 bp, synthetic construct
  misc_feature 1..1293: note = Description of Artificial Sequence: Synthetic coding sequence
  source 1..1293: mol_type = other DNA
atggacgagagactgctgggcccccccccccccggcggcggcagaggcggcctgggcctggtgagcggcgagcccggcggccccggcgagccccccggcggcggcgaccccggcggcggcagcggcggcgtgcccggcggcagaggcaagcaggacatcggcgacatcctgcagcagatcatgaccatcaccgaccagagcctggacgaggcccaggccaagaagcacgccctgaactgccacagaatgaagcccgccctgttcagcgtgctgtgcgagatcaaggagaagaccggcctgagcatcagaagcagccaggaggaggagcccgtggacccccagctgatgagactggacaacatgctgctggccgagggcgtggccggccccgagaagggcggcggcagcgccgccgccgccgccgccgccgccgccagcggcggcggcgtgagccccgacaacagcatcgagcacagcgactacagaagcaagctggcccagatcagacacatctaccacagcgagctggagaagtacgagcaggcctgcaacgagttcaccacccacgtgatgaacctgctgagagagcagagcagaaccagacccgtggcccccaaggagatggagagaatggtgagcatcatccacagaaagttcagcgccatccagatgcagctgaagcagagcacctgcgaggccgtgatgatcctgagaagcagattcctggacgccagaagaaagagaagaaacttcagcaagcaggccaccgaggtgctgaacgagtacttctacagccacctgagcaacccctaccccagcgaggaggccaaggaggagctggccaagaagtgcggcatcaccgtgagccaggtgagcaactggttcggcaacaagagaatcagatacaagaagaacatcggcaagttccaggaggaggccaacatctacgccgtgaagaccgccgtgagcgtgacccagggcggccacagcagaaccagcagccccaccccccccagcagcgccggcagcggcggcagcttcaacctgagcggcagcggcgacatgttcctgggcatgcccggcctgaacggcgacagctacagcgccagccaggtggagagcctgagacacagcatgggccccggcggctacggcgacaacctgggcggcggccagatgtacagccccagagagatgagagccaacggcagctggcaggaggccgtgacccccagcagcgtgaccagccccaccgagggccccggcagcgtgcacagcgacaccagcaactag

SEQ ID NO: 94295 - DNA, 1293 bp, synthetic construct; identical to SEQ ID NO: 94294
  misc_feature 1..1293: note = Description of Artificial Sequence: Synthetic coding sequence
  source 1..1293: mol_type = other DNA

SEQ ID NO: 94296 - DNA, 1293 bp, synthetic construct; identical to SEQ ID NO: 94294
  misc_feature 1..1293: note = Description of Artificial Sequence: Synthetic coding sequence
  source 1..1293: mol_type = other DNA

SEQ ID NO: 94297 - DNA, 1293 bp, synthetic construct; identical to SEQ ID NO: 94294
  misc_feature 1..1293: note = Description of Artificial Sequence: Synthetic coding sequence
  source 1..1293: mol_type = other DNA

SEQ ID NO: 94298 - DNA, 1293 bp, synthetic construct; identical to SEQ ID NO: 94294
  misc_feature 1..1293: note = Description of Artificial Sequence: Synthetic coding sequence
  source 1..1293: mol_type = other DNA

SEQ ID NO: 94299 - DNA, 1293 bp, synthetic construct; identical to SEQ ID NO: 94294
  misc_feature 1..1293: note = Description of Artificial Sequence: Synthetic coding sequence
  source 1..1293: mol_type = other DNA

SEQ ID NO: 94300 - DNA, 1293 bp, synthetic construct; identical to SEQ ID NO: 94294
  misc_feature 1..1293: note = Description of Artificial Sequence: Synthetic coding sequence
  source 1..1293: mol_type = other DNA

SEQ ID NO: 94301 - DNA, 1392 bp, synthetic construct
  misc_feature 1..1392: note = Description of Artificial Sequence: Synthetic coding sequence
  source 1..1392: mol_type = other DNA
atggacgagagactgctgggcccccccccccccggcggcggcagaggcggcctgggcctggtgagcggcgagcccggcggccccggcgagccccccggcggcggcgaccccggcggcggcagcggcggcgtgcccggcggcagaggcaagcaggacatcggcgacatcctgcagcagatcatgaccatcaccgaccagagcctggacgaggcccaggccaagaagcacgccctgaactgccacagaatgaagcccgccctgttcagcgtgctgtgcgagatcaaggagaagaccggcctgagcatcagaagcagccaggaggaggagcccgtggacccccagctgatgagactggacaacatgctgctggccgagggcgtggccggccccgagaagggcggcggcagcgccgccgccgccgccgccgccgccgccagcggcggcggcgtgagccccgacaacagcatcgagcacagcgactacagaagcaagctggcccagatcagacacatctaccacagcgagctggagaagtacgagcaggcctgcaacgagttcaccacccacgtgatgaacctgctgagagagcagagcagaaccagacccgtggcccccaaggagatggagagaatggtgagcatcatccacagaaagttcagcgccatccagatgcagctgaagcagagcacctgcgaggccgtgatgatcctgagaagcagattcctggacgccagaagaaagagaagaaacttcagcaagcaggccaccgaggtgctgaacgagtacttctacagccacctgagcaacccctaccccagcgaggaggccaaggaggagctggccaagaagtgcggcatcaccgtgagccaggtgctgtggagactgagagaggagctgagcggcaaggtgcacgccagccagctgggcgccgtggtgagcaactggttcggcaacaagagaatcagatacaagaagaacatcggcaagttccaggaggaggccaacatctacgccgtgaagaccgccgtgatcatcgccgagagaggccccttcggcgtgagaggcaccgagctgagcctgcccagcctgcccccccagggcagcggcggcagcttcaacctgagcggcagcggcgacatgttcctgggcatgcccggcctgaacggcgacagctacagcgccagccaggtgagatgccccagccccctgcaggtggagagcctgagacacagcatgggccccggcggctacggcgacaacctgggcggcggccagatgtacagccccagagagatgagagccaacggcagctggcaggaggccgtgacccccagcagcgtgaccagccccaccgagggccccggcagcgtgcacagcgacaccagcaactag

SEQ ID NO: 94302 - DNA, 1392 bp, synthetic construct; identical to SEQ ID NO: 94301
  misc_feature 1..1392: note = Description of Artificial Sequence: Synthetic coding sequence
  source 1..1392: mol_type = other DNA

SEQ ID NO: 94303 - DNA, 1317 bp, synthetic construct
  misc_feature 1..1317: note = Description of Artificial Sequence: Synthetic coding sequence
  source 1..1317: mol_type = other DNA
atggacgagagactgctgggcccccccccccccggcggcggcagaggcggcctgggcctggtgagcggcgagcccggcggccccggcgagccccccggcggcggcgaccccggcggcggcagcggcggcgtgcccggcggcagaggcaagcaggacatcggcgacatcctgcagcagatcatgaccatcaccgaccagagcctggacgaggcccaggccaagaagcacgccctgaactgccacagaatgaagcccgccctgttcagcgtgctgtgcgagatcaaggagaagaccggcctgagcatcagaagcagccaggaggaggagcccgtggacccccagctgatgagactggacaacatgctgctggccgagggcgtggccggccccgagaagggcggcggcagcgccgccgccgccgccgccgccgccgccagcggcggcggcgtgagccccgacaacagcatcgagcacagcgactacagaagcaagctggcccagatcagacacatctaccacagcgagctggagaagtacgagcaggcctgcaacgagttcaccacccacgtgatgaacctgctgagagagcagagcagaaccagacccgtggcccccaaggagatggagagaatggtgagcatcatccacagaaagttcagcgccatccagatgcagctgaagcagagcacctgcgaggccgtgatgatcctgagaagcagattcctggacgccagaagaaagagaagaaacttcagcaagcaggccaccgaggtgctgaacgagtacttctacagccacctgagcaacccctaccccagcgaggaggccaaggaggagctggccaagaagtgcggcatcaccgtgagccaggtgagcaactggttcggcaacaagagaatcagatacaagaagaacatcggcaagttccaggaggaggccaacatctacgccgtgaagaccgccgtgagcgtgacccagggcggccacagcagaaccagcagccccaccccccccagcagcgccggcagcggcggcagcttcaacctgagcggcagcggcgacatgttcctgggcatgcccggcctgaacggcgacagctacagcgccagccaggtgagatgccccagccccctgcaggtggagagcctgagacacagcatgggccccggcggctacggcgacaacctgggcggcggccagatgtacagccccagagagatgagagccaacggcagctggcaggaggccgtgacccccagcagcgtgaccagccccaccgagggccccggcagcgtgcacagcgacaccagcaactag

SEQ ID NO: 94304 - DNA, 1317 bp, synthetic construct; identical to SEQ ID NO: 94303
  misc_feature 1..1317: note = Description of Artificial Sequence: Synthetic coding sequence
  source 1..1317: mol_type = other DNA

SEQ ID NO: 94305 - DNA, 1392 bp, synthetic construct; identical to SEQ ID NO: 94301
  misc_feature 1..1392: note = Description of Artificial Sequence: Synthetic coding sequence
  source 1..1392: mol_type = other DNA

SEQ ID NO: 94306 - DNA, 1392 bp, synthetic construct; identical to SEQ ID NO: 94301
  misc_feature 1..1392: note = Description of Artificial Sequence: Synthetic coding sequence
  source 1..1392: mol_type = other DNA

SEQ ID NO: 94307 - DNA, 1332 bp, synthetic construct
  misc_feature 1..1332: note = Description of Artificial Sequence: Synthetic coding sequence
  source 1..1332: mol_type = other DNA
ggcgccgagcagggcggcggcctgagagcccccccccagctgtggaccaacggctactggggcagacccctgcaggccggcgccggcggcctgggcctggtgagcggcgagcccggcggccccggcgagccccccggcggcggcgaccccggcggcggcagcggcggcgtgcccggcggcagaggcaagcaggacatcggcgacatcctgcagcagatcatgaccatcaccgaccagagcctggacgaggcccaggccaagaagcacgccctgaactgccacagaatgaagcccgccctgttcagcgtgctgtgcgagatcaaggagaagaccggcctgagcatcagaagcagccaggaggaggagcccgtggacccccagctgatgagactggacaacatgctgctggccgagggcgtggccggccccgagaagggcggcggcagcgccgccgccgccgccgccgccgccgccagcggcggcggcgtgagccccgacaacagcatcgagcacagcgactacagaagcaagctggcccagatcagacacatctaccacagcgagctggagaagtacgagcaggcctgcaacgagttcaccacccacgtgatgaacctgctgagagagcagagcagaaccagacccgtggcccccaaggagatggagagaatggtgagcatcatccacagaaagttcagcgccatccagatgcagctgaagcagagcacctgcgaggccgtgatgatcctgagaagcagattcctggacgccagaagaaagagaagaaacttcagcaagcaggccaccgaggtgctgaacgagtacttctacagccacctgagcaacccctaccccagcgaggaggccaaggaggagctggccaagaagtgcggcatcaccgtgagccaggtgagcaactggttcggcaacaagagaatcagatacaagaagaacatcggcaagttccaggaggaggccaacatctacgccgtgaagaccgccgtgagcgtgacccagggcggccacagcagaaccagcagccccaccccccccagcagcgccggcagcggcggcagcttcaacctgagcggcagcggcgacatgttcctgggcatgcccggcctgaacggcgacagctacagcgccagccaggtggagagcctgagacacagcatgggccccggcggctacggcgacaacctgggcggcggccagatgtacagccccagagagatgagagccaacggcagctggcaggaggccgtgacccccagcagcgtgaccagccccaccgagggccccggcagcgtgcacagcgacaccagcaactag

SEQ ID NO: 94308 - DNA, 1332 bp, synthetic construct; identical to SEQ ID NO: 94307
  misc_feature 1..1332: note = Description of Artificial Sequence: Synthetic coding sequence
  source 1..1332: mol_type = other DNA

SEQ ID NO: 94309 - DNA, 1317 bp, synthetic construct; identical to SEQ ID NO: 94303
  misc_feature 1..1317: note = Description of Artificial Sequence: Synthetic coding sequence
  source 1..1317: mol_type = other DNA

SEQ ID NO: 94310 - DNA, 1380 bp, synthetic construct
  misc_feature 1..1380: note = Description of Artificial Sequence: Synthetic coding sequence
  source 1..1380: mol_type = other DNA
atggacgagagactgctgggcccccccccccccggcggcggcagaggcggcctgggcctggtgagcggcgagcccggcggccccggcgagccccccggcggcggcgaccccggcggcggcagcggcggcgtgcccggcggcagaggcaagcaggacatcggcgacatcctgcagcagatcatgaccatcaccgaccagagcctggacgaggcccaggccaagaagcacgccctgaactgccacagaatgaagcccgccctgttcagcgtgctgtgcgagatcaaggagaagaccggcctgagcatcagaagcagccaggaggaggagcccgtggacccccagctgatgagactggacaacatgctgctggccgagggcgtggccggccccgagaagggcggcggcagcgccgccgccgccgccgccgccgccgccagcggcggcggcgtgagccccgacaacagcatcgagcacagcgactacagaagcaagctggcccagatcagacacatctaccacagcgagctggagaagtacgagcaggcctgcaacgagttcaccacccacgtgatgaacctgctgagagagcagagcagaaccagacccgtggcccccaaggagatggagagaatggtgagcatcatccacagaaagttcagcgccatccagatgcagctgaagcagagcacctgcgaggccgtgatgatcctgagaagcagattcctggacgccagaagaaagagaagaaacttcagcaagcaggccaccgaggtgctgaacgagtacttctacagccacctgagcaacccctaccccagcgaggaggccaaggaggagctggccaagaagtgcggcatcaccgtgagccaggtgctgtggagactgagagaggagctgagcggcaaggtgcacgccagccagctgggcgccgtggtgagcaactggttcggcaacaagagaatcagatacaagaagaacatcggcaagttccaggaggaggccaacatctacgccgtgaagaccgccgtgagcgtgacccagggcggccacagcagaaccagcagccccaccccccccagcagcgccggcagcggcggcagcttcaacctgagcggcagcggcgacatgttcctgggcatgcccggcctgaacggcgacagctacagcgccagccaggtgagatgccccagccccctgcaggtggagagcctgagacacagcatgggccccggcggctacggcgacaacctgggcggcggccagatgtacagccccagagagatgagagccaacggcagctggcaggaggccgtgacccccagcagcgtgaccagccccaccgagggccccggcagcgtgcacagcgacaccagcaactag

SEQ ID NO: 94311 - DNA, 1332 bp, synthetic construct; identical to SEQ ID NO: 94307
  misc_feature 1..1332: note = Description of Artificial Sequence: Synthetic coding sequence
  source 1..1332: mol_type = other DNA

SEQ ID NO: 94312 - DNA, 1317 bp, synthetic construct; identical to SEQ ID NO: 94303
  misc_feature 1..1317: note = Description of Artificial Sequence: Synthetic coding sequence
  source 1..1317: mol_type = other DNA

SEQ ID NO: 94313 - DNA, 1317 bp, synthetic construct; identical to SEQ ID NO: 94303
  misc_feature 1..1317: note = Description of Artificial Sequence: Synthetic coding sequence
  source 1..1317: mol_type = other DNA

SEQ ID NO: 94314 - DNA, 1332 bp, synthetic construct; identical to SEQ ID NO: 94307
  misc_feature 1..1332: note = Description of Artificial Sequence: Synthetic coding sequence
  source 1..1332: mol_type = other DNA

SEQ ID NO: 94315 - DNA, 1392 bp, synthetic construct; identical to SEQ ID NO: 94301
  misc_feature 1..1392: note = Description of Artificial Sequence: Synthetic coding sequence
  source 1..1392: mol_type = other DNA

SEQ ID NO: 94316 - DNA, 1332 bp, synthetic construct; identical to SEQ ID NO: 94307
  misc_feature 1..1332: note = Description of Artificial Sequence: Synthetic coding sequence
  source 1..1332: mol_type = other DNA

SEQ ID NO: 94317 - DNA, 1332 bp, synthetic construct; identical to SEQ ID NO: 94307
  misc_feature 1..1332: note = Description of Artificial Sequence: Synthetic coding sequence
  source 1..1332: mol_type = other DNA

SEQ ID NO: 94318 - DNA, 1056 bp, synthetic construct
  misc_feature 1..1056: note = Description of Artificial Sequence: Synthetic coding sequence
  source 1..1056: mol_type = other DNA
atggacgaccagagcagaatgctgcagaccctggccggcgtgaacctggccggccacagcgtgcagggcggcatggccctgcccccccccccccacggccacgagggcgccgacggcgacggcagaaagcaggacatcggcgacatcctgcaccagatcatgaccatcaccgaccagagcctggacgaggcccaggccaagaagcacgccctgaactgccacagaatgaagcccgccctgttcagcgtgctgtgcgagatcaaggagaagaccggcctgagcatcagaggcgcccaggaggaggacccccccgacccccagctgatgagactggacaacatgctgctggccgagggcgtgagcggccccgagaagggcggcggcagcgccgccgccgccgccgccgccgccgccagcggcggcagcagcgacaacagcatcgagcacagcgactacagagccaagctgacccagatcagacagatctaccacaccgagctggagaagtacgagcaggcctgcaacgagttcaccacccacgtgatgaacctgctgagagagcagagcagaaccagacccatcagccccaaggagatcgagagaatggtgggcatcatccacagaaagttcagcagcatccagatgcagctgaagcagagcacctgcgaggccgtgatgatcctgagaagcagattcctggacgccagaagaaagagaagaaacttcagcaagcaggccaccgagatcctgaacgagtacttctacagccacctgagcaacccctaccccagcgaggaggccaaggaggagctggccaagaagtgcagcatcaccgtgagccaggtgagcaactggttcggcaacaagagaatcagatacaagaagaacatcggcaagttccaggaggaggccaacctgtacgccgccaagaccgccgtgaccgccgcccacgccgtggccgccgccgtgcagaacaaccagaccaacagccccaccacccccaacagcggcggctacccccccagctgctaccagagcgacggcagactgcagtag

SEQ ID NO: 94319 - DNA, 762 bp, synthetic construct
  misc_feature 1..762: note = Description of Artificial Sequence: Synthetic coding sequence
  source 1..762: mol_type = other DNA
atgaacctgctgagagagcagagcagaaccagacccatcagccccaaggagatcgagagaatggtgggcatcatccacagaaagttcagcagcatccagatgcagctgaagcagagcacctgcgaggccgtgatgatcctgagaagcagattcctggacgccagaagaaagagaagaaacttcagcaagcaggccaccgagatcctgaacgagtacttctacagccacctgagcaacccctaccccagcgaggaggccaaggaggagctggccaagaagtgcagcatcaccgtgagccaggtgagcaactggttcggcaacaagagaatcagatacaagaagaacatcggcaagttccaggaggaggccaacctgtacgccgccaagaccgccgtgaccgccgcccacgccgtggccgccgccgtgcagaacaaccagaccaacagccccaccacccccaacagcggcagcagcggcagcttcaacctgcccaacagcggcgacatgttcatgaacatgcagagcctgaacggcgacagctaccagggcagccaggtgggcgccaacgtgcagagccaggtggacaccctgagacacgtgatcaaccagaccggcggctacagcgacggcctgggcggcaacagcctgtacagcccccacaacctgaacgccaacggcggctggcaggacgccaccacccccagcagcgtgaccagccccaccgagggccccggcagcgtgcacagcgacaccagcaactag

SEQ ID NO: 94320 - DNA, 1368 bp, synthetic construct
  misc_feature 1..1368: note = Description of Artificial Sequence: Synthetic coding sequence
  source 1..1368: mol_type = other DNA
atggacgaccagagcagaatgctgcagaccctggccggcgtgaacctggccggccacagcgtgcagggcggcatggccctgcccccccccccccacggccacgagggcgccgacggcgacggcagaaagcaggacatcggcgacatcctgcaccagatcatgaccatcaccgaccagagcctggacgaggcccaggccaagaagcacgccctgaactgccacagaatgaagcccgccctgttcagcgtgctgtgcgagatcaaggagaagaccggcctgagcatcagaggcgcccaggaggaggacccccccgacccccagctgatgagactggacaacatgctgctggccgagggcgtgagcggccccgagaagggcggcggcagcgccgccgccgccgccgccgccgccgccagcggcggcagcagcgacaacagcatcgagcacagcgactacagagccaagctgacccagatcagacagatctaccacaccgagctggagaagtacgagcaggcctgcaacgagttcaccacccacgtgatgaacctgctgagagagcagagcagaaccagacccatcagccccaaggagatcgagagaatggtgggcatcatccacagaaagttcagcagcatccagatgcagctgaagcagagcacctgcgaggccgtgatgatcctgagaagcagattcctggacgccagaagaaagagaagaaacttcagcaagcaggccaccgagatcctgaacgagtacttctacagccacctgagcaacccctaccccagcgaggaggccaaggaggagctggccaagaagtgcagcatcaccgtgagccagagcctggtgaaggaccccaaggagagaggcagcaagggcagcgacatccagcccaccagcgtggtgagcaactggttcggcaacaagagaatcagatacaagaagaacatcggcaagttccaggaggaggccaacctgtacgccgccaagaccgccgtgaccgccgcccacgccgtggccgccgccgtgcagaacaaccagaccaacagccccaccacccccaacagcggcagcagcggcagcttcaacctgcccaacagcggcgacatgttcatgaacatgcagagcctgaacggcgacagctaccagggcagccaggtgggcgccaacgtgcagagccaggtggacaccctgagacacgtgatcaaccagaccggcggctacagcgacggcctgggcggcaacagcctgtacagcccccacaacctgaacgccaacggcggctggcaggacgccaccacccccagcagcgtgaccagccccaccgagggccccggcagcgtgcacagcgacaccagcaactag

SEQ ID NO: 94321 - DNA, 1305 bp, synthetic construct
  misc_feature 1..1305: note = Description of Artificial Sequence: Synthetic coding sequence
  source 1..1305: mol_type = other DNA
atggacgaccagagcagaatgctgcagaccctggccggcgtgaacctggccggccacagcgtgcagggcggcatggccctgcccccccccccccacggccacgagggcgccgacggcgacggcagaaagcaggacatcggcgacatcctgcaccagatcatgaccatcaccgaccagagcctggacgaggcccaggccaagaagcacgccctgaactgccacagaatgaagcccgccctgttcagcgtgctgtgcgagatcaaggagaagaccggcctgagcatcagaggcgcccaggaggaggacccccccgacccccagctgatgagactggacaacatgctgctggccgagggcgtgagcggccccgagaagggcggcggcagcgccgccgccgccgccgccgccgccgccagcggcggcagcagcgacaacagcatcgagcacagcgactacagagccaagctgacccagatcagacagatctaccacaccgagctggagaagtacgagcaggcctgcaacgagttcaccacccacgtgatgaacctgctgagagagcagagcagaaccagacccatcagccccaaggagatcgagagaatggtgggcatcatccacagaaagttcagcagcatccagatgcagctgaagcagagcacctgcgaggccgtgatgatcctgagaagcagattcctggacgccagaagaaagagaagaaacttcagcaagcaggccaccgagatcctgaacgagtacttctacagccacctgagcaacccctaccccagcgaggaggccaaggaggagctggccaagaagtgcagcatcaccgtgagccaggtgagcaactggttcggcaacaagagaatcagatacaagaagaacatcggcaagttccaggaggaggccaacctgtacgccgccaagaccgccgtgaccgccgcccacgccgtggccgccgccgtgcagaacaaccagaccaacagccccaccacccccaacagcggcagcagcggcagcttcaacctgcccaacagcggcgacatgttcatgaacatgcagagcctgaacggcgacagctaccagggcagccaggtgggcgccaacgtgcagagccaggtggacaccctgagacacgtgatcaaccagaccggcggctacagcgacggcctgggcggcaacagcctgtacagcccccacaacctgaacgccaacggcggctggcaggacgccaccacccccagcagcgtgaccagccccaccgagggccccggcagcgtgcacagcgacaccagcaactag

SEQ ID NO: 94322 - DNA, 789 bp, synthetic construct
  misc_feature 1..789: note = Description of Artificial Sequence: Synthetic coding sequence
  source 1..789: mol_type = other DNA
atgagaggcctgagcatcagaggcgcccaggaggaggacccccccgacccccagctgatgagactggacaacatgctgctggccgagggcgtgagcggccccgagaagggcggcggcagcgccgccgccgccgccgccgccgccgccagcggcggcagcagcgacaacagcatcgagcacagcgactacagagccaagctgacccagatcagacagatctaccacaccgagctggagaagtacgagcaggcctgcaacgagttcaccacccacgtgatgaacctgctgagagagcagagcagaaccagacccatcagccccaaggagatcgagagaatggtgggcatcatccacagaaagttcagcagcatccagatgcagctgaagcagagcacctgcgaggccgtgatgatcctgagaagcagattcctggacgccagaagaaagagaagaaacttcagcaagcaggccaccgagatcctgaacgagtacttctacagccacctgagcaacccctaccccagcgaggaggccaaggaggagctggccaagaagtgcagcatcaccgtgagccaggtgagcaactggttcggcaacaagagaatcagatacaagaagaacatcggcaagttccaggaggaggccaacctgtacgccgccaagaccgccgtgaccgccgcccacgccgtggccgccgccgtgcagaacaaccagaccaacagccccaccacccccaacagcggcggctacccccccagctgctaccagagcgacggcagactgcagtag

SEQ ID NO: 94323 - DNA, 1080 bp, synthetic construct
  misc_feature 1..1080: note = Description of Artificial Sequence: Synthetic coding sequence
  source 1..1080: mol_type = other DNA
atgaagcccgccctgttcagcgtgctgtgcgagatcaaggagaagaccggcctgagcatcagaggcgcccaggaggaggacccccccgacccccagctgatgagactggacaacatgctgctggccgagggcgtgagcggccccgagaagggcggcggcagcgccgccgccgccgccgccgccgccgccagcggcggcagcagcgacaacagcatcgagcacagcgactacagagccaagctgacccagatcagacagatctaccacaccgagctggagaagtacgagcaggcctgcaacgagttcaccacccacgtgatgaacctgctgagagagcagagcagaaccagacccatcagccccaaggagatcgagagaatggtgggcatcatccacagaaagttcagcagcatccagatgcagctgaagcagagcacctgcgaggccgtgatgatcctgagaagcagattcctggacgccagaagaaagagaagaaacttcagcaagcaggccaccgagatcctgaacgagtacttctacagccacctgagcaacccctaccccagcgaggaggccaaggaggagctggccaagaagtgcagcatcaccgtgagccaggtgagcaactggttcggcaacaagagaatcagatacaagaagaacatcggcaagttccaggaggaggccaacctgtacgccgccaagaccgccgtgaccgccgcccacgccgtggccgccgccgtgcagaacaaccagaccaacagccccaccacccccaacagcggcagcagcggcagcttcaacctgcccaacagcggcgacatgttcatgaacatgcagagcctgaacggcgacagctaccagggcagccaggtgggcgccaacgtgcagagccaggtggacaccctgagacacgtgatcaaccagaccggcggctacagcgacggcctgggcggcaacagcctgtacagcccccacaacctgaacgccaacggcggctggcaggacgccaccacccccagcagcgtgaccagccccaccgagggccccggcagcgtgcacagcgacaccagcaactag

SEQ ID NO: 94324 - DNA, 1530 bp, synthetic construct
  misc_feature 1..1530: note = Description of Artificial Sequence: Synthetic coding sequence
  source 1..1530: mol_type = other DNA
atggagagaagaagactgtggggcagcatccagagcagatacatcagcatgagcgtgtggaccagccccagaagactggtggagctggccggccagagcctgctgaaggacgaggccctggccatcgccgccctggagctgctgcccagagagctgttcccccccctgttcatggccgccttcgacggcagacacagccagaccctgaaggccatggtgcaggcctggcccttcacctgcctgcccctgggcgtgctgatgaagggccagcacctgcacctggagaccttcaaggccgtgctggacggcctggacgtgctgctggcccaggaggtgagacccagaagatggaagctgcaggtgctggacctgagaaagaacagccaccaggacttctggaccgtgtggagcggcaacagagccagcctgtacagcttccccgagcccgaggccgcccagcccatgaccaagaagagaaaggtggacggcctgagcaccgaggccgagcagcccttcatccccgtggaggtgctggtggacctgttcctgaaggagggcgcctgcgacgagctgttcagctacctgatcgagaaggtgaagagaaagaagaacgtgctgagactgtgctgcaagaagctgaagatcttcgccatgcccatgcaggacatcaagatgatcctgaagatggtgcagctggacagcatcgaggacctggaggtgacctgcacctggaagctgcccaccctggccaagttcagcccctacctgggccagatgatcaacctgagaagactgctgctgagccacatccacgccagcagctacatcagccccgagaaggaggagcagtacatcgcccagttcaccagccagttcctgagcctgcagtgcctgcaggccctgtacgtggacagcctgttcttcctgagaggcagactggaccagctgctgagacacgtgatgaaccccctggagaccctgagcatcaccaactgcagactgagcgagggcgacgtgatgcacctgagccagagccccagcgtgagccagctgagcgtgctgagcctgagcggcgtgatgctgaccgacgtgagccccgagcccctgcaggccctgctggagagagccagcgccaccctgcaggacctggtgttcgacgagtgcggcatcaccgacgaccagctgctggccctgctgcccagcctgagccactgcagccagctgaccaccctgagcttctacggcaacagcatcagcatcagcgccctgcagagcctgctgcagcacctgatcggcctgagcaacctgacccacgtgctgtaccccgtgcccctggagagctacgaggacatccacggcaccctgcacctggagagactggcctacctgcacgccagactgagagagctgctgtgcgagctgggcagacccagcatggtgtggctgagcgccaacccctgcccccactgcggcgacagaaccttctacgaccccgagcccatcctgtgcccctgcttcatgcccaactag

SEQ ID NO: 94325 - DNA, 1530 bp, synthetic construct; identical to SEQ ID NO: 94324
  misc_feature 1..1530: note = Description of Artificial Sequence: Synthetic coding sequence
  source 1..1530: mol_type = other DNA

SEQ ID NO: 94326 - DNA, 1530 bp, synthetic construct; identical to SEQ ID NO: 94324
  misc_feature 1..1530: note = Description of Artificial Sequence: Synthetic coding sequence
  source 1..1530: mol_type = other DNA

SEQ ID NO: 94327 - DNA, 261 bp, synthetic construct
  misc_feature 1..261: note = Description of Artificial Sequence: Synthetic coding sequence
  source 1..261: mol_type = other DNA
atggagagaagaagactgtggggcagcatccagagcagatacatcagcatgagcgtgtggaccagccccagaagactggtggagctggccggccagagcctgctgaaggacgaggccctggccatcgccgccctggagctgctgcccagagagctgttcccccccctgttcatggccgccttcgacggcagacacagccagaccctgaaggccatggtgcaggcctggcccttcacctgcctgcccctgggcgtgctgtag

SEQ ID NO: 94328 - DNA, 1530 bp, synthetic construct; identical to SEQ ID NO: 94324
  misc_feature 1..1530: note = Description of Artificial Sequence: Synthetic coding sequence
  source 1..1530: mol_type = other DNA

SEQ ID NO: 94329 - DNA, 348 bp, synthetic construct
  misc_feature 1..348: note = Description of Artificial Sequence: Synthetic coding sequence
  source 1..348: mol_type = other DNA
atggagagaagaagactgtggggcagcatccagagcagatacatcagcatgagcgtgtggaccagccccagaagactggtggagctggccggccagagcctgctgaaggacgaggccctggccatcgccgccctggagctgctgcccagagagctgttcccccccctgttcatggccgccttcgacggcagacacagccagaccctgaaggccatggtgcaggcctggcccttcacctgcctgcccctgggcgtgctgatgaagggccagcacctgcacctggagaccttcaaggccgtgctggacggcctggacgtgctgctggcccaggaggtgagacccagatag

SEQ ID NO: 94330 - DNA, 459 bp, synthetic construct
  misc_feature 1..459: note = Description of Artificial Sequence: Synthetic coding sequence
  source 1..459: mol_type = other DNA
atggagagaagaagactgtggggcagcatccagagcagatacatcagcatgagcgtgtggaccagccccagaagactggtggagctggccggccagagcctgctgaaggacgaggccctggccatcgccgccctggagctgctgcccagagagctgttcccccccctgttcatggccgccttcgacggcagacacagccagaccctgaaggccatggtgcaggcctggcccttcacctgcctgcccctgggcgtgctgatgaagggccagcacctgcacctggagaccttcaaggccgtgctggacggcctggacgtgctgctggcccaggaggtgagacccagaagatggaagctgcaggtgctggacctgagaaagaacagccaccaggacttctggaccgtgtggagcggcaacagagccagcctgtacagcttccccgagcccgaggccgcctag

SEQ ID NO: 94331 - DNA, 1482 bp, synthetic construct
  misc_feature 1..1482: note = Description of Artificial Sequence: Synthetic coding sequence
  source 1..1482: mol_type = other DNA
atgagcgtgtggaccagccccagaagactggtggagctggccggccagagcctgctgaaggacgaggccctggccatcgccgccctggagctgctgcccagagagctgttcccccccctgttcatggccgccttcgacggcagacacagccagaccctgaaggccatggtgcaggcctggcccttcacctgcctgcccctgggcgtgctgatgaagggccagcacctgcacctggagaccttcaaggccgtgctggacggcctggacgtgctgctggcccaggaggtgagacccagaagatggaagctgcaggtgctggacctgagaaagaacagccaccaggacttctggaccgtgtggagcggcaacagagccagcctgtacagcttccccgagcccgaggccgcccagcccatgaccaagaagagaaaggtggacggcctgagcaccgaggccgagcagcccttcatccccgtggaggtgctggtggacctgttcctgaaggagggcgcctgcgacgagctgttcagctacctgatcgagaaggtgaagagaaagaagaacgtgctgagactgtgctgcaagaagctgaagatcttcgccatgcccatgcaggacatcaagatgatcctgaagatggtgcagctggacagcatcgaggacctggaggtgacctgcacctggaagctgcccaccctggccaagttcagcccctacctgggccagatgatcaacctgagaagactgctgctgagccacatccacgccagcagctacatcagccccgagaaggaggagcagtacatcgcccagttcaccagccagttcctgagcctgcagtgcctgcaggccctgtacgtggacagcctgttcttcctgagaggcagactggaccagctgctgagacacgtgatgaaccccctggagaccctgagcatcaccaactgcagactgagcgagggcgacgtgatgcacctgagccagagccccagcgtgagccagctgagcgtgctgagcctgagcggcgtgatgctgaccgacgtgagccccgagcccctgcaggccctgctggagagagccagcgccaccctgcaggacctggtgttcgacgagtgcggcatcaccgacgaccagctgctggccctgctgcccagcctgagccactgcagccagctgaccaccctgagcttctacggcaacagcatcagcatcagcgccctgcagagcctgctgcagcacctgatcggcctgagcaacctgacccacgtgctgtaccccgtgcccctggagagctacgaggacatccacggcaccctgcacctggagagactggcctacctgcacgccagactgagagagctgctgtgcgagctgggcagacccagcatggtgtggctgagcgccaacccctgcccccactgcggcgacagaaccttctacgaccccgagcccatcctgtgcccctgcttcatgcccaactag

SEQ ID NO: 94332 - DNA, 606 bp, synthetic construct
  misc_feature 1..606: note = Description of Artificial Sequence: Synthetic coding sequence
  source 1..606: mol_type = other DNA
atggagagaagaagactgtggggcagcatccagagcagatacatcagcatgagcgtgtggaccagccccagaagactggtggagctggccggccagagcctgctgaaggacgaggccctggccatcgccgccctggagctgctgcccagagagctgttcccccccctgttcatggccgccttcgacggcagacacagccagaccctgaaggccatggtgcaggcctggcccttcacctgcctgcccctgggcgtgctgatgaagggccagcacctgcacctggagaccttcaaggccgtgctggacggcctggacgtgctgctggcccaggaggtgagacccagaagatggaagctgcaggtgctggacctgagaaagaacagccaccaggacttctggaccgtgtggagcggcaacagagccagcctgtacagcttccccgagcccgaggccgcccagcccatgaccaagaagagaaaggtggacggcctgagcaccgaggccgagcagcccttcatccccgtggaggtgctggtggacctgttcctgaaggagggcgcctgcgacgagctgttcagctacctgatcgagaaggtgaagagatag

SEQ ID NO: 94333 - DNA, 1482 bp, synthetic construct; identical to SEQ ID NO: 94331
  misc_feature 1..1482: note = Description of Artificial Sequence: Synthetic coding sequence
  source 1..1482: mol_type = other DNA

SEQ ID NO: 94334 - DNA, 1530 bp, synthetic construct; identical to SEQ ID NO: 94324
  misc_feature 1..1530: note = Description of Artificial Sequence: Synthetic coding sequence
  source 1..1530: mol_type = other DNA

SEQ ID NO: 94335 - DNA, 369 bp, synthetic construct
  misc_feature 1..369: note = Description of Artificial Sequence: Synthetic coding sequence
  source 1..369: mol_type = other DNA
atggccgcccccgtggacctggagctgaagaaggccttcaccgagctgcaggccaaggtgatcgacacccagcagaaggtgaagctggccgacatccagatcgagcagctgaacagaaccaagaagcacgcccacctgaccgacaccgagatcatgaccctggtggacgagaccaacatgtacgagggcgtgggcagaatgttcatcctgcagagcaaggaggccatccacagccagctgctggagaagcagaagatcgccgaggagaagatcaaggagctggagcagaagaagagctacctggagagaagcgtgaaggaggccgaggacaacatcagagagatgctgatggccagaagagcccagtag

SEQ ID NO: 94336 - DNA, 465 bp, synthetic construct
  misc_feature 1..465: note = Description of Artificial Sequence: Synthetic coding sequence
  source 1..465: mol_type = other DNA
atggccgagaacagcggcagagccggcaagagcagcggcagcggcgccggcaagggcgccgtgagcgccgagcaggtgatcgccggcttcaacagactgagacaggagcagagaggcctggccagcaaggccgccgagctggagatggagctgaacgagcacagcctggtgatcgacaccctgaaggaggtggacgagaccagaaagtgctacagaatggtgggcggcgtgctggtggagagaaccgtgaaggaggtgctgcccgccctggagaacaacaaggagcagatccagaagatcatcgagaccctgacccagcagctgcaggccaagggcaaggagctgaacgagttcagagagaagcacaacatcagactgatgggcgaggacgagaagcccgccgccaaggagaacagcgagggcgccggcgccaaggccagcagcgccggcgtgctggtgagctag

SEQ ID NO: 94337 - DNA, 405 bp, synthetic construct
  misc_feature 1..405: note = Description of Artificial Sequence: Synthetic coding sequence
  source 1..405: mol_type = other DNA
atggccgccaccatgaagaaggccgccgccgaggacgtgaacgtgaccttcgaggaccagcagaagatcaacaagttcgccagaaacaccagcagaatcaccgagctgaaggaggagatcgaggtgaagaagaagcagctgcagaacctggaggacgcctgcgacgacatcatgctggccgacgacgactgcctgatgatcccctaccagatcggcgacgtgttcatcagccacagccaggaggagacccaggagatgctggaggaggccaagaagaacctgcaggaggagatcgacgccctggagagcagagtggagagcatccagagagtgctggccgacctgaaggtgcagctgtacgccaagttcggcagcaacatcaacctggaggccgacgagagctag

SEQ ID NO: 94338 - DNA, 465 bp, synthetic construct
  misc_feature 1..465: note = Description of Artificial Sequence: Synthetic coding sequence
  source 1..465: mol_type = other DNA
atggcccagagcatcaacatcaccgagctgaacctgccccagctggagatgctgaagaaccagctggaccaggaggtggagttcctgagcaccagcatcgcccagctgaaggtggtgcagaccaagtacgtggaggccaaggactgcctgaacgtgctgaacaagagcaacgagggcaaggagctgctggtgcccctgaccagcagcatgtacgtgcccggcaagctgcacgacgtggagcacgtgctgatcgacgtgggcaccggctactacgtggagaagaccgccgaggacgccaaggacttcttcaagagaaagatcgacttcctgaccaagcagatggagaagatccagcccgccctgcaggagaagcacgccatgaagcaggccgtgatggagatgatgagccagaagatccagcagctgaccgccctgggcgccgcccaggccaccgccaaggcctag

SEQ ID NO: 94339 - DNA, 330 bp, synthetic construct
  misc_feature 1..330: note = Description of Artificial Sequence: Synthetic coding sequence
  source 1..330: mol_type = other DNA
atggcccagagcatcaacatcaccgagctgaacctgccccagctggagatgctgaagaaccagctggaccagatgtacgtgcccggcaagctgcacgacgtggagcacgtgctgatcgacgtgggcaccggctactacgtggagaagaccgccgaggacgccaaggacttcttcaagagaaagatcgacttcctgaccaagcagatggagaagatccagcccgccctgcaggagaagcacgccatgaagcaggccgtgatggagatgatgagccagaagatccagcagctgaccgccctgggcgccgcccaggccaccgccaaggcctag

SEQ ID NO: 94340 - DNA, 465 bp, synthetic construct; identical to SEQ ID NO: 94338
  misc_feature 1..465: note = Description of Artificial Sequence: Synthetic coding sequence
  source 1..465: mol_type = other DNA

SEQ ID NO: 94341 - DNA, 1281 bp, synthetic construct
  misc_feature 1..1281: note = Description of Artificial Sequence: Synthetic coding sequence
  source 1..1281: mol_type = other DNA
atgggcaccctgagcgcccccccctgcacccagagaatcaagtggaagggcctgctgctgaccgccagcctgctgaacttctggaacctgcccaccaccgcccaggtgaccatcgaggccgagcccaccaaggtgagcgagggcaaggacgtgctgctgctggtgcacaacctgccccagaacctgaccggctacatctggtacaagggccagatgagagacctgtaccactacatcaccagctacgtggtggacggcgagatcatcatctacggccccgcctacagcggcagagagaccgcctacagcaacgccagcctgctgatccagaacgtgaccagagaggacgccggcagctacaccctgcacatcatcaagggcgacgacggcaccagaggcgtgaccggcagattcaccttcaccctgcacctggagacccccaagcccagcatcagcagcagcaacctgaaccccagagagaccatggaggccgtgagcctgacctgcgaccccgagacccccgacgccagctacctgtggtggatgaacggccagagcctgcccatgacccacagcctgaagctgagcgagaccaacagaaccctgttcctgctgggcgtgaccaagtacaccgccggcccctacgagtgcgagatcagaaaccccgtgagcgccagcagaagcgaccccgtgaccctgaacctgctgcccaagctgcccaagccctacatcaccatcaacaacctgaaccccagagagaacaaggacgtgctgaacttcacctgcgagcccaagagcgagaactacacctacatctggtggctgaacggccagagcctgcccgtgagccccagagtgaagagacccatcgagaacagaatcctgatcctgcccagcgtgaccagaaacgagaccggcccctaccagtgcgagatcagagacagatacggcggcatcagaagcgaccccgtgaccctgaacgtgctgtacggccccgacctgcccagaatctaccccagcttcacctactacagaagcggcgaggtgctgtacctgagctgcagcgccgacagcaacccccccgcccagtacagctggaccatcaacgagaagttccagctgcccggccagaagctgttcatcagacacatcaccaccaagcacagcggcctgtacgtgtgcagcgtgagaaacagcgccaccggcaaggagagcagcaagagcatgaccgtggaggtgagcggcaagtggatccccgccagcctggccatcggcttctag

SEQ ID NO: 94342 - DNA, 432 bp, synthetic construct
  misc_feature 1..432: note = Description of Artificial Sequence: Synthetic coding sequence
  source 1..432: mol_type = other DNA
atgggcaccctgagcgcccccccctgcacccagagaatcaagtggaagggcctgctgctgaccgccagcctgctgaacttctggaacctgcccaccaccgcccaggtgaccatcgaggccgagcccaccaaggtgagcgagggcaaggacgtgctgctgctggtgcacaacctgccccagaacctgaccggctacatctggtacaagggccagatgagagacctgtaccactacatcaccagctacgtggtggacggcgagatcatcatctacggccccgcctacagcggcagagagaccgcctacagcaacgccagcctgctgatccagaacgtgaccagagaggacgccggcagctacaccctgcacatcatcaagggcgacgacggcaccagaggcgtgaccggcagattcaccttcaccctgcactag

SEQ ID NO: 94343 - DNA, 1287 bp, synthetic construct
  misc_feature 1..1287: note = Description of Artificial Sequence: Synthetic coding sequence
  source 1..1287: mol_type = other DNA
atgggcaccctgagcgcccccccctgcacccagagaatcaagtggaagggcctgctgctgaccgccagcctgctgaacttctggaacctgcccaccaccgcccaggtgaccatcgaggccgagcccaccaaggtgagcgagggcaaggacgtgctgctgctggtgcacaacctgccccagaacctgaccggctacatctggtacaagggccagatgagagacctgtaccactacatcaccagctacgtggtggacggcgagatcatcatctacggccccgcctacagcggcagagagaccgcctacagcaacgccagcctgctgatccagaacgtgaccagagaggacgccggcagctacaccctgcacatcatcaagggcgacgacggcaccagaggcgtgaccggcagattcaccttcaccctgcacctggagacccccaagcccagcatcagcagcagcaacctgaaccccagagagaccatggaggccgtgagcctgacctgcgaccccgagacccccgacgccagctacctgtggtggatgaacggccagagcctgcccatgacccacagcctgaagctgagcgagaccaacagaaccctgttcctgctgggcgtgaccaagtacaccgccggcccctacgagtgcgagatcagaaaccccgtgagcgccagcagaagcgaccccgtgaccctgaacctgctgcccaagctgcccaagccctacatcaccatcaacaacctgaaccccagagagaacaaggacgtgctgaacttcacctgcgagcccaagagcgagaactacacctacatctggtggctgaacggccagagcctgcccgtgagccccagagtgaagagacccatcgagaacagaatcctgatcctgcccagcgtgaccagaaacgagaccggcccctaccagtgcgagatcagagacagatacggcggcatcagaagcgaccccgtgaccctgaacgtgctgtacggccccgacctgcccagaatctaccccagcttcacctactacagaagcggcgaggtgctgtacctgagctgcagcgccgacagcaacccccccgcccagtacagctggaccatcaacgagaagttccagctgcccggccagaagctgttcatcagacacatcaccaccaagcacagcggcctgtacgtgtgcagcgtgagaaacagcgccaccggcaaggagagcagcaagagcatgaccgtggaggtgagcgcctacagcagcagcatcaactacaccagcggcaacagaaactag

SEQ ID NO: 94344 - DNA, 1260 bp, synthetic construct
  misc_feature 1..1260: note = Description of Artificial Sequence: Synthetic coding sequence
  source 1..1260: mol_type = other DNA
atgggcaccctgagcgcccccccctgcacccagagaatcaagtggaagggcctgctgctgaccgccagcctgctgaacttctggaacctgcccaccaccgcccaggtgaccatcgaggccgagcccaccaaggtgagcgagggcaaggacgtgctgctgctggtgcacaacctgccccagaacctgaccggctacatctggtacaagggccagatgagagacctgtaccactacatcaccagctacgtggtggacggcgagatcatcatctacggccccgcctacagcggcagagagaccgcctacagcaacgccagcctgctgatccagaacgtgaccagagaggacgccggcagctacaccctgcacatcatcaagggcgacgacggcaccagaggcgtgaccggcagattcaccttcaccctgcacctggagacccccaagcccagcatcagcagcagcaacctgaaccccagagagaccatggaggccgtgagcctgacctgcgaccccgagacccccgacgccagctacctgtggtggatgaacggccagagcctgcccatgacccacagcctgaagctgagcgagaccaacagaaccctgttcctgctgggcgtgaccaagtacaccgccggcccctacgagtgcgagatcagaaaccccgtgagcgccagcagaagcgaccccgtgaccctgaacctgctgcccaagctgcccaagccctacatcaccatcaacaacctgaaccccagagagaacaaggacgtgctgaacttcacctgcgagcccaagagcgagaactacacctacatctggtggctgaacggccagagcctgcccgtgagccccagagtgaagagacccatcgagaacagaatcctgatcctgcccagcgtgaccagaaacgagaccggcccctaccagtgcgagatcagagacagatacggcggcatcagaagcgaccccgtgaccctgaacgtgctgtacggccccgacctgcccagaatctaccccagcttcacctactacagaagcggcgaggtgctgtacctgagctgcagcgccgacagcaacccccccgcccagtacagctggaccatcaacgagaagttccagctgcccggccagaagctgttcatcagacacatcaccaccaagcacagcggcctgtacgtgtgcagcgtgagaaacagcgccaccggcaaggagagcagcaagagcatgaccgtggaggtgagcgactggaccgtgccctag

SEQ ID NO: 94345 - DNA, 1254 bp, synthetic construct
  misc_feature 1..1254: note = Description of Artificial Sequence: Synthetic coding sequence
  source 1..1254: mol_type = other DNA
atgggcaccctgagcgcccccccctgcacccagagaatcaagtggaagggcctgctgctgaccgccagcctgctgaacttctggaacctgcccaccaccgcccaggtgaccatcgaggccgagcccaccaaggtgagcgagggcaaggacgtgctgctgctggtgcacaacctgccccagaacctgaccggctacatctggtacaagggccagatgagagacctgtaccactacatcaccagctacgtggtggacggcgagatcatcatctacggccccgcctacagcggcagagagaccgcctacagcaacgccagcctgctgatccagaacgtgaccagagaggacgccggcagctacaccctgcacatcatcaagggcgacgacggcaccagaggcgtgaccggcagattcaccttcaccctgcacctggagacccccaagcccagcatcagcagcagcaacctgaaccccagagagaccatggaggccgtgagcctgacctgcgaccccgagacccccgacgccagctacctgtggtggatgaacggccagagcctgcccatgacccacagcctgaagctgagcgagaccaacagaaccctgttcctgctgggcgtgaccaagtacaccgccggcccctacgagtgcgagatcagaaaccccgtgagcgccagcagaagcgaccccgtgaccctgaacctgctgcccaagctgcccaagccctacatcaccatcaacaacctgaaccccagagagaacaaggacgtgctgaacttcacctgcgagcccaagagcgagaactacacctacatctggtggctgaacggccagagcctgcccgtgagccccagagtgaagagacccatcgagaacagaatcctgatcctgcccagcgtgaccagaaacgagaccggcccctaccagtgcgagatcagagacagatacggcggcatcagaagcgaccccgtgaccctgaacgtgctgtacggccccgacctgcccagaatctaccccagcttcacctactacagaagcggcgaggtgctgtacctgagctgcagcgccgacagcaacccccccgcccagtacagctggaccatcaacgagaagttccagctgcccggccagaagctgttcatcagacacatcaccaccaagcacagcggcctgtacgtgtgcagcgtgagaaacagcgccaccggcaaggagagcagcaagagcatgaccgtggaggtgagcgaggccctgtag

SEQ ID NO: 94346 - DNA, 642 bp, synthetic construct
  misc_feature 1..642: note = Description of Artificial Sequence: Synthetic coding sequence
  source 1..642: mol_type = other DNA
atgggccccctgagcgcccccccctgcaccgagcacatcaagtggaagggcctgctgctgaccgtggagacccccaagcccagcatcagcagcagcaacctgaaccccagagaggccatggagaccgtgatcctgacctgcaaccccgagacccccgacgccagctacctgtggtggatgaacggccagagcctgcccatgacccacagaatgcagctgagcgagaccaacagaaccctgttcctgttcggcgtgaccaagtacaccgccggcccctacgagtgcgagatctggaacagcggcagcgccagcagaagcgaccccgtgaccctgaacctgctgcacggccccgacctgcccagaatcttccccagcgtgaccagctactacagcggcgagaacctggacctgagctgcttcgccaacagcaacccccccgcccagtacagctggaccatcaacggcaagttccagctgagcggccagaagctgttcatcccccagatcacccccaagcacaacggcctgtacgcctgcagcgccagaaacagcgccaccggcgaggagagcagcaccagcctgaccatcagagtgatcgccccccccggcctgggcaccttcgccttcaacaaccccacctag

SEQ ID NO: 94347 - DNA, 1008 bp, synthetic construct
  misc_feature 1..1008: note = Description of Artificial Sequence: Synthetic coding sequence
  source 1..1008: mol_type = other DNA
atgggccccctgagcgcccccccctgcaccgagcacatcaagtggaagggcctgctgctgaccgccctgctgctgaacttctggaacctgcccaccaccgcccaggtgatgatcgaggcccagccccccaaggtgagcgagggcaaggacgtgctgctgctggtgcacaacctgccccagaacctgaccggctacatctggtacaagggccagatcagagacctgtaccactacatcaccagctacgtggtggacggccagatcatcatctacggccccgcctacagcggcagagagaccgtgtacagcaacgccagcctgctgatccagaacgtgaccagagaggacgccggcagctacaccctgcacatcatcaagagaggcgacggcaccagaggcgtgaccggctacttcaccttcaccctgtacctggagacccccaagcccagcatcagcagcagcaacctgaaccccagagaggccatggagaccgtgatcctgacctgcaaccccgagacccccgacgccagctacctgtggtggatgaacggccagagcctgcccatgacccacagaatgcagctgagcgagaccaacagaaccctgttcctgttcggcgtgaccaagtacaccgccggcccctacgagtgcgagatctggaacagcggcagcgccagcagaagcgaccccgtgaccctgaacctgctgcacggccccgacctgcccagaatcttccccagcgtgaccagctactacagcggcgagaacctggacctgagctgcttcgccaacagcaacccccccgcccagtacagctggaccatcaacggcaagttccagctgagcggccagaagctgttcatcccccagatcacccccaagcacaacggcctgtacgcctgcagcgccagaaacagcgccaccggcgaggagagcagcaccagcctgaccatcagagtgatcgccccccccggcctgggcaccttcgccttcaacaaccccacctag

SEQ ID NO: 94348 - DNA, 1008 bp, synthetic construct; identical to SEQ ID NO: 94347
  misc_feature 1..1008: note = Description of Artificial Sequence: Synthetic coding sequence
  source 1..1008: mol_type = other DNA

SEQ ID NO: 94349 - DNA, 642 bp, synthetic construct; identical to SEQ ID NO: 94346
  misc_feature 1..642: note = Description of Artificial Sequence: Synthetic coding sequence
  source 1..642: mol_type = other DNA

SEQ ID NO: 94350 - DNA, 1008 bp, synthetic construct
  misc_feature 1..1008: note = Description of Artificial Sequence: Synthetic coding sequence
  source 1..1008: mol_type = other DNA
atgggccccctgagcgcccccccctgcaccgagcacatcaagtggaagggcctgctggtgaccgccagcctgctgaacttctggaacctgcccaccaccgcccaggtgaccatcgaggcccagccccccaaggtgagcgagggcaaggacgtgctgctgctggtgcacaacctgccccagaacctgaccggctacatctggtacaagggccagatcagagacctgtaccactacatcaccagctacgtggtggacggccagatcatcatctacggccccgcctacagcggcagagagaccgcctacagcaacgccagcctgctgatccagaacgtgaccagagaggacgccggcagctacaccctgcacatcatcaagagaggcgacggcaccagaggcgtgaccggctacttcaccttcaccctgtacctggagacccccaagcccagcatcagcagcagcaacctgaaccccagagaggccatggagaccgtgatcctgacctgcgaccccgagacccccgacaccagctaccagtggtggatgaacggccagagcctgcccatgacccacagattccagctgagcgagaccaacagaaccctgttcctgttcggcgtgaccaagtacaccgccggcccctacgagtgcgagatcagaaacagcggcagcgccagcagaagcgaccccgtgaccctgaacctgctgcacggccccgacctgcccagaatccaccccagctacaccaactacagaagcggcgacaacctgtacctgagctgcttcgccaacagcaacccccccgcccagtacagctggaccatcaacggcaagttccagcagagcggccagaacctgttcatcccccagatcaccaccaagcacagcggcctgtacgtgtgcagcgtgagaaacagcgccaccggcgaggagagcagcaccagcctgaccgtgaaggtgagcgccagcaccagaatcggcctgctgcccctgctgaaccccacctag

SEQ ID NO: 94351 - DNA, 1008 bp, synthetic construct; identical to SEQ ID NO: 94350
  misc_feature 1..1008: note = Description of Artificial Sequence: Synthetic coding sequence
  source 1..1008: mol_type = other DNA

SEQ ID NO: 94352 - DNA, 1008 bp, synthetic construct; identical to SEQ ID NO: 94350
  misc_feature 1..1008: note = Description of Artificial Sequence: Synthetic coding sequence
  source 1..1008: mol_type = other DNA

SEQ ID NO: 94353 - DNA, 1287 bp, synthetic construct
  misc_feature 1..1287: note = Description of Artificial Sequence: Synthetic coding sequence
  source 1..1287: mol_type = other DNA
atgggccccctgagcgcccccccctgcacccagagaatcacctggaagggcctgctgctgaccgccctgctgctgaacttctggaacctgcccaccaccgcccaggtgaccatcgaggccgagcccaccaaggtgagcaagggcaaggacgtgctgctgctggtgcacaacctgccccagaacctggccggctacatctggtacaagggccagatgaaggacctgtaccactacatcaccagctacgtggtggacggccagatcatcatctacggccccgcctacagcggcagagagaccgtgtacagcaacgccagcctgctgatccagaacgtgaccagagaggacgccggcagctacaccctgcacatcgtgaagagaggcgacggcaccagaggcgagaccggccacttcaccttcaccctgtacctggagacccccaagcccagcatcagcagcagcaacctgtaccccagagaggacatggaggccgtgagcctgacctgcgaccccgagacccccgacgccagctacctgtggtggatgaacggccagagcctgcccatgacccacagcctgcagctgagcaagaacaagagaaccctgttcctgttcggcgtgaccaagtacaccgccggcccctacgagtgcgagatcagaaaccccgtgagcgccagcagaagcgaccccgtgaccctgaacctgctgcccaagctgcccaagccctacatcaccatcaacaacctgaaccccagagagaacaaggacgtgctggccttcacctgcgagcccaagagcgagaactacacctacatctggtggctgaacggccagagcctgcccgtgagccccagagtgaagagacccatcgagaacagaatcctgatcctgcccagcgtgaccagaaacgagaccggcccctaccagtgcgagatccaggacagatacggcggcatcagaagctaccccgtgaccctgaacgtgctgtacggccccgacctgcccagaatctaccccagcttcacctactaccacagcggcgagaacctgtacctgagctgcttcgccgacagcaacccccccgccgagtacagctggaccatcaacggcaagttccagctgagcggccagaagctgttcatcccccagatcaccaccaagcacagcggcctgtacgcctgcagcgtgagaaacagcgccaccggcatggagagcagcaagagcatgaccgtgaaggtgagcgcccccagcggcaccggccacctgcccggcctgaaccccctgtag

SEQ ID NO: 94354 - DNA, 981 bp, synthetic construct
  misc_feature 1..981: note = Description of Artificial Sequence: Synthetic coding sequence
  source 1..981: mol_type = other DNA
atgggccccctgagcgcccccccctgcacccagagaatcacctggaagggcgtgctgctgaccgccagcctgctgaacttctggaacccccccaccaccgcccaggtgaccatcgaggcccagccccccaaggtgagcgagggcaaggacgtgctgctgctggtgcacaacctgccccagaacctggccggctacatctggtacaagggccagatgacctacctgtaccactacatcaccagctacgtggtggacggccagagaatcatctacggccccgcctacagcggcagagagagagtgtacagcaacgccagcctgctgatccagaacgtgacccaggaggacgccggcagctacaccctgcacatcatcaagagaagagacggcaccggcggcgtgaccggccacttcaccttcaccctgcacctggagacccccaagcccagcatcagcagcagcaacctgaaccccagagaggccatggaggccgtgatcctgacctgcgaccccgccacccccgccgccagctaccagtggtggatgaacggccagagcctgcccatgacccacagactgcagctgagcaagaccaacagaaccctgttcatcttcggcgtgaccaagtacatcgccggcccctacgagtgcgagatcagaaaccccgtgagcgccagcagaagcgaccccgtgaccctgaacctgctgcacggccccgacctgcccagcatctaccccagcttcacctactacagaagcggcgagaacctgtacctgagctgcttcgccgagagcaaccccagagcccagtacagctggaccatcaacggcaagttccagctgagcggccagaagctgagcatcccccagatcaccaccaagcacagcggcctgtacgcctgcagcgtgagaaacagcgccaccggcaaggagagcagcaagagcatcaccgtgaaggtgagcgactggatcctgccctag

SEQ ID NO: 94355 - DNA, 1260 bp, synthetic construct
  misc_feature 1..1260: note = Description of Artificial Sequence: Synthetic coding sequence
  source 1..1260: mol_type = other DNA
atgggccccctgagcgcccccccctgcacccagagaatcacctggaagggcgtgctgctgaccgccagcctgctgaacttctggaacccccccaccaccgcccaggtgaccatcgaggcccagccccccaaggtgagcgagggcaaggacgtgctgctgctggtgcacaacctgccccagaacctggccggctacatctggtacaagggccagatgacctacctgtaccactacatcaccagctacgtggtggacggccagagaatcatctacggccccgcctacagcggcagagagagagtgtacagcaacgccagcctgctgatccagaacgtgacccaggaggacgccggcagctacaccctgcacatcatcaagagaagagacggcaccggcggcgtgaccggccacttcaccttcaccctgcacctggagacccccaagcccagcatcagcagcagcaacctgaaccccagagaggccatggaggccgtgatcctgacctgcgaccccgccacccccgccgccagctaccagtggtggatgaacggccagagcctgcccatgacccacagactgcagctgagcaagaccaacagaaccctgttcatcttcggcgtgaccaagtacatcgccggcccctacgagtgcgagatcagaaaccccgtgagcgccagcagaagcgaccccgtgaccctgaacctgctgcccaagctgagcaagccctacatcaccatcaacaacctgaaccccagagagaacaaggacgtgctgaccttcacctgcgagcccaagagcaagaactacacctacatctggtggctgaacggccagagcctgcccgtgagccccagagtgaagagacccatcgagaacagaatcctgatcctgcccaacgtgaccagaaacgagaccggcccctaccagtgcgagatcagagacagatacggcggcatcagaagcgaccccgtgaccctgaacgtgctgtacggccccgacctgcccagcatctaccccagcttcacctactacagaagcggcgagaacctgtacctgagctgcttcgccgagagcaaccccagagcccagtacagctggaccatcaacggcaagttccagctgagcggccagaagctgagcatcccccagatcaccaccaagcacagcggcctgtacgcctgcagcgtgagaaacagcgccaccggcaaggagagcagcaagagcatcaccgtgaaggtgagcgactggatcctgccctag

SEQ ID NO: 94356 - DNA, 981 bp, synthetic construct
  misc_feature 1..981: note = Description of Artificial Sequence: Synthetic coding sequence
  source 1..981: mol_type = other DNA
atgggccccctgagcgcccccccctgcacccagagaatcacctggaagggcgtgctgctgaccgccagcctgctgaacttctggaacccccccaccaccgcccaggtgaccatcgaggcccagccccccaaggtgagcgagggcaaggacgtgctgctgctggtgcacaacctgccccagaacctggccggctacatctggtacaagggccagatgacctacctgtaccactacatcaccagctacgtggtggacggccagagaatcatctacggccccgcctacagcggcagagagagagtgtacagcaacgccagcctgctgatccagaacgtgacccaggaggacgccggcagctacaccctgcacatcatcaagagaagagacggcaccggcggcgtgaccggccacttcaccttcaccctgcaccccaagctgagcaagccctacatcaccatcaacaacctgaaccccagagagaacaaggacgtgctgaccttcacctgcgagcccaagagcaagaactacacctacatctggtggctgaacggccagagcctgcccgtgagccccagagtgaagagacccatcgagaacagaatcctgatcctgcccaacgtgaccagaaacgagaccggcccctaccagtgcgagatcagagacagatacggcggcatcagaagcgaccccgtgaccctgaacgtgctgtacggccccgacctgcccagcatctaccccagcttcacctactacagaagcggcgagaacctgtacctgagctgcttcgccgagagcaaccccagagcccagtacagctggaccatcaacggcaagttccagctgagcggccagaagctgagcatcccccagatcaccaccaagcacagcggcctgtacgcctgcagcgtgagaaacagcgccaccggcaaggagagcagcaagagcatcaccgtgaaggtgagcgactggatcctgccctag

SEQ ID NO: 94357 - DNA, 1008 bp, synthetic construct
  misc_feature 1..1008: note = Description of Artificial Sequence: Synthetic coding sequence
  source 1..1008: mol_type = other DNA
atgggccccctgagcgcccccccctgcacccagcacatcacctggaagggcctgctgctgaccgccagcctgctgaacttctggaacctgcccatcaccgcccaggtgaccatcgaggccctgccccccaaggtgagcgagggcaaggacgtgctgctgctggtgcacaacctgccccagaacctggccggctacatctggtacaagggccagctgatggacctgtaccactacatcaccagctacgtggtggacggccagatcaacatctacggccccgcctacaccggcagagagaccgtgtacagcaacgccagcctgctgatccagaacgtgaccagagaggacgccggcagctacaccctgcacatcatcaagagaggcgacagaaccagaggcgtgaccggctacttcaccttcaacctgtacctgaagctgcccaagccctacatcaccatcaacaacagcaagcccagagagaacaaggacgtgctggccttcacctgcgagcccaagagcgagaactacacctacatctggtggctgaacggccagagcctgcccgtgagccccagagtgaagagacccatcgagaacagaatcctgatcctgcccagcgtgaccagaaacgagaccggcccctacgagtgcgagatcagagacagagacggcggcatgagaagcgaccccgtgaccctgaacgtgctgtacggccccgacctgcccagcatctaccccagcttcacctactacagaagcggcgagaacctgtacctgagctgcttcgccgagagcaacccccccgccgagtacttctggaccatcaacggcaagttccagcagagcggccagaagctgagcatcccccagatcaccaccaagcacagaggcctgtacacctgcagcgtgagaaacagcgccaccggcaaggagagcagcaagagcatgaccgtggaggtgagcgcccccagcggcatcggcagactgcccctgctgaaccccatctag

SEQ ID NO: 94358 - DNA, 1008 bp, synthetic construct; identical to SEQ ID NO: 94357
  misc_feature 1..1008: note = Description of Artificial Sequence: Synthetic coding sequence
  source 1..1008: mol_type = other DNA

SEQ ID NO: 94359 - DNA, 1008 bp, synthetic construct; identical to SEQ ID NO: 94357
  misc_feature 1..1008: note = Description of Artificial Sequence: Synthetic coding sequence
  source 1..1008: mol_type = other DNA

SEQ ID NO: 94360 - DNA, 1275 bp, synthetic construct
  misc_feature 1..1275: note = Description of Artificial Sequence: Synthetic coding sequence
  source 1..1275: mol_type = other DNA
atgggccccctgagcgcccccccctgcacccagcacatcacctggaagggcctgctgctgaccgccagcctgctgaacttctggaacctgcccaccaccgcccaggtgatcatcgaggccaagccccccaaggtgagcgagggcaaggacgtgctgctgctggtgcacaacctgccccagaacctgaccggctacatctggtacaagggccagatgaccgacctgtaccactacatcaccagctacgtggtgcacggccagatcatctacggccccgcctacagcggcagagagaccgtgtacagcaacgccagcctgctgatccagaacgtgacccaggaggacgccggcagctacaccctgcacatcatcaagagaggcgacggcaccggcggcgtgaccggctacttcaccgtgaccctgtacagcgagacccccaagcccagcatcagcagcagcaacctgaaccccagagaggtgatggaggccgtgagactgatctgcgaccccgagacccccgacgccagctacctgtggctgctgaacggccagaacctgcccatgacccacagactgcagctgagcaagaccaacagaaccctgtacctgttcggcgtgaccaagtacatcgccggcccctacgagtgcgagatcagaaaccccgtgagcgccagcagaagcgaccccgtgaccctgaacctgctgcccaagctgcccatgccctacatcaccatcaacaacctgaaccccagagagaagaaggacgtgctggccttcacctgcgagcccaagagcagaaactacacctacatctggtggctgaacggccagagcctgcccgtgagccccagagtgaagagacccatcgagaacagaatcctgatcctgcccagcgtgaccagaaacgagaccggcccctaccagtgcgagatcagagacagatacggcggcatcagaagcaaccccgtgaccctgaacgtgctgtacggccccgacctgcccagaatctaccccagcttcacctactacagaagcggcgagaacctggacctgagctgcttcgccgacagcaacccccccgccgagtacagctggaccatcaacggcaagttccagctgagcggccagaagctgttcatcccccagatcaccaccaaccacagcggcctgtacgcctgcagcgtgagaaacagcgccaccggcaaggagatcagcaagagcatgatcgtgaaggtgagcggcccctgccacggcaaccagaccgagagccactag

SEQ ID NO: 94361 - DNA, 1308 bp, synthetic construct
  misc_feature 1..1308: note = Description of Artificial Sequence: Synthetic coding sequence
  source 1..1308: mol_type = other DNA
atgggccccctgagcgcccccccctgcacccagcacatcacctggaagggcctgctgctgaccgccagcctgctgaacttctggaacctgcccaccaccgcccaggtgatcatcgaggccaagccccccaaggtgagcgagggcaaggacgtgctgctgctggtgcacaacctgccccagaacctgaccggctacatctggtacaagggccagatgaccgacctgtaccactacatcaccagctacgtggtgcacggccagatcatctacggccccgcctacagcggcagagagaccgtgtacagcaacgccagcctgctgatccagaacgtgacccaggaggacgccggcagctacaccctgcacatcatcaagagaggcgacggcaccggcggcgtgaccggctacttcaccgtgaccctgtacagcgagacccccaagcccagcatcagcagcagcaacctgaaccccagagaggtgatggaggccgtgagactgatctgcgaccccgagacccccgacgccagctacctgtggctgctgaacggccagaacctgcccatgacccacagactgcagctgagcaagaccaacagaaccctgtacctgttcggcgtgaccaagtacatcgccggcccctacgagtgcgagatcagaaaccccgtgagcgccagcagaagcgaccccgtgaccctgaacctgctgcccaagctgcccatgccctacatcaccatcaacaacctgaaccccagagagaagaaggacgtgctggccttcacctgcgagcccaagagcagaaactacacctacatctggtggctgaacggccagagcctgcccgtgagccccagagtgaagagacccatcgagaacagaatcctgatcctgcccagcgtgaccagaaacgagaccggcccctaccagtgcgagatcagagacagatacggcggcatcagaagcaaccccgtgaccctgaacgtgctgtacggccccgacctgcccagaatctaccccagcttcacctactacagaagcggcgagaacctggacctgagctgcttcgccgacagcaacccccccgccgagtacagctggaccatcaacggcaagttccagctgagcggccagaagctgttcatcccccagatcaccaccaaccacagcggcctgtacgcctgcagcgtgagaaacagcgccaccggcaaggagatcagcaagagcatgatcgtgaaggtgagcgagaccgccagcccccaggtgacctacgccggccccaacacctggttccaggagatcctgctgctgtag

SEQ ID NO: 94362 - DNA, 606 bp, synthetic construct
  misc_feature 1..606: note = Description of Artificial Sequence: Synthetic coding sequence
  source 1..606: mol_type = other DNA
atgggcggcgacgagaacagaggcgtgaccggccacttcaccttcaccctgtacctggagacccccaagcccagcatcagcagcagcaagctgaaccccagagaggccatggaggccgtgagcctgacctgcgaccccgagacccccgacgccagctacctgtggtggatgaacggccagagcctgcccatgagccacagactgcagctgagcgagaccaacagaaccctgttcctgctgggcgtgaccaagtacaccgccggcccctacgagtgcgagatcagaaaccccgtgagcgccagcagaagcgaccccttcaccctgaacctgctgcacggccccgacctgcccagaatctaccccagcttcacctactacagaagcggcgaggtgctgtacctgagctgcagcgccgacagcaacccccccgcccagtacagctggaccatcaacggcaagttccagctgagcggccagaagctgttcatcccccagatcaccaccaagcacagcggcctgtacgcctgcagcgtgagaaacagcgccaccggcaaggagagcagcaagagcatgaccgtgaaggtgagcgactggaccctgccctag

SEQ ID NO: 94363 - DNA, 1281 bp, synthetic construct
  misc_feature 1..1281: note = Description of Artificial Sequence: Synthetic coding sequence
  source 1..1281: mol_type = other DNA
atgggcctgctgagcgcccccccctgcacccagagaatcacctggaagggcctgctgctgaccgccagcctgctgaacttctggaacccccccaccaccgcccaggtgaccatcgaggcccagcccaccaaggtgagcgagggcaaggacgtgctgctgctggtgcacaacctgccccagaacctgaccggctacatctggtacaagggccagatcagagacctgtaccactacatcaccagctacgtggtggacggccagatcatcatctacggccccgcctacagcggcagagagaccatctacagcaacgccagcctgctgatccagaacgtgacccaggaggacgccggcagctacaccctgcacatcatcatgggcggcgacgagaacagaggcgtgaccggccacttcaccttcaccctgtacctggagacccccaagcccagcatcagcagcagcaagctgaaccccagagaggccatggaggccgtgagcctgacctgcgaccccgagacccccgacgccagctacctgtggtggatgaacggccagagcctgcccatgagccacagactgcagctgagcgagaccaacagaaccctgttcctgctgggcgtgaccaagtacaccgccggcccctacgagtgcgagatcagaaaccccgtgagcgccagcagaagcgaccccttcaccctgaacctgctgcccaagctgcccaagccctacatcaccatcaacaacctgaagcccagagagaacaaggacgtgctgaacttcacctgcgagcccaagagcgagaactacacctacatctggtggctgaacggccagagcctgcccgtgagccccagagtgaagagacccatcgagaacagaatcctgatcctgcccagcgtgaccagaaacgagaccggcccctaccagtgcgagatcagagaccagtacggcggcatcagaagctaccccgtgaccctgaacgtgctgtacggccccgacctgcccagaatctaccccagcttcacctactacagaagcggcgaggtgctgtacctgagctgcagcgccgacagcaacccccccgcccagtacagctggaccatcaacggcaagttccagctgagcggccagaagctgttcatcccccagatcaccaccaagcacagcggcctgtacgcctgcagcgtgagaaacagcgccaccggcaaggagagcagcaagagcatgaccgtgaaggtgagcggcaagagaatccccgtgagcctggccatcggcatctag

SEQ ID NO: 94364 - DNA, 717 bp, synthetic construct
  misc_feature 1..717: note = Description of Artificial Sequence: Synthetic coding sequence
  source 1..717: mol_type = other DNA
atgagccacagactgcagctgagcgagaccaacagaaccctgttcctgctgggcgtgaccaagtacaccgccggcccctacgagtgcgagatcagaaaccccgtgagcgccagcagaagcgaccccttcaccctgaacctgctgcccaagctgcccaagccctacatcaccatcaacaacctgaagcccagagagaacaaggacgtgctgaacttcacctgcgagcccaagagcgagaactacacctacatctggtggctgaacggccagagcctgcccgtgagccccagagtgaagagacccatcgagaacagaatcctgatcctgcccagcgtgaccagaaacgagaccggcccctaccagtgcgagatcagagaccagtacggcggcatcagaagctaccccgtgaccctgaacgtgctgtacggccccgacctgcccagaatctaccccagcttcacctactacagaagcggcgaggtgctgtacctgagctgcagcgccgacagcaacccccccgcccagtacagctggaccatcaacggcaagttccagctgagcggccagaagctgttcatcccccagatcaccaccaagcacagcggcctgtacgcctgcagcgtgagaaacagcgccaccggcaaggagagcagcaagagcatgaccgtgaaggtgagcgcctacagcagcagcatcaactacaccgccgtgtactag

SEQ ID NO: 94365 - DNA, 1260 bp, synthetic construct
  misc_feature 1..1260: note = Description of Artificial Sequence: Synthetic coding sequence
  source 1..1260: mol_type = other DNA
atgggcctgctgagcgcccccccctgcacccagagaatcacctggaagggcctgctgctgaccgccagcctgctgaacttctggaacccccccaccaccgcccaggtgaccatcgaggcccagcccaccaaggtgagcgagggcaaggacgtgctgctgctggtgcacaacctgccccagaacctgaccggctacatctggtacaagggccagatcagagacctgtaccactacatcaccagctacgtggtggacggccagatcatcatctacggccccgcctacagcggcagagagaccatctacagcaacgccagcctgctgatccagaacgtgacccaggaggacgccggcagctacaccctgcacatcatcatgggcggcgacgagaacagaggcgtgaccggccacttcaccttcaccctgtacctggagacccccaagcccagcatcagcagcagcaagctgaaccccagagaggccatggaggccgtgagcctgacctgcgaccccgagacccccgacgccagctacctgtggtggatgaacggccagagcctgcccatgagccacagactgcagctgagcgagaccaacagaaccctgttcctgctgggcgtgaccaagtacaccgccggcccctacgagtgcgagatcagaaaccccgtgagcgccagcagaagcgaccccttcaccctgaacctgctgcccaagctgcccaagccctacatcaccatcaacaacctgaagcccagagagaacaaggacgtgctgaacttcacctgcgagcccaagagcgagaactacacctacatctggtggctgaacggccagagcctgcccgtgagccccagagtgaagagacccatcgagaacagaatcctgatcctgcccagcgtgaccagaaacgagaccggcccctaccagtgcgagatcagagaccagtacggcggcatcagaagctaccccgtgaccctgaacgtgctgtacggccccgacctgcccagaatctaccccagcttcacctactacagaagcggcgaggtgctgtacctgagctgcagcgccgacagcaacccccccgcccagtacagctggaccatcaacggcaagttccagctgagcggccagaagctgttcatcccccagatcaccaccaagcacagcggcctgtacgcctgcagcgtgagaaacagcgccaccggcaaggagagcagcaagagcatgaccgtgaaggtgagcgactggaccctgccctag

SEQ ID NO: 94366 - DNA, 894 bp, synthetic construct
  misc_feature 1..894: note = Description of Artificial Sequence: Synthetic coding sequence
  source 1..894: mol_type = other DNA
atgggcctgctgagcgcccccccctgcacccagagaatcacctggaagggcctgctgctgaccgtggagacccccaagcccagcatcagcagcagcaagctgaaccccagagaggccatggaggccgtgagcctgacctgcgaccccgagacccccgacgccagctacctgtggtggatgaacggccagagcctgcccatgagccacagactgcagctgagcgagaccaacagaaccctgttcctgctgggcgtgaccaagtacaccgccggcccctacgagtgcgagatcagaaaccccgtgagcgccagcagaagcgaccccttcaccctgaacctgctgcccaagctgcccaagccctacatcaccatcaacaacctgaagcccagagagaacaaggacgtgctgaacttcacctgcgagcccaagagcgagaactacacctacatctggtggctgaacggccagagcctgcccgtgagccccagagtgaagagacccatcgagaacagaatcctgatcctgcccagcgtgaccagaaacgagaccggcccctaccagtgcgagatcagagaccagtacggcggcatcagaagctaccccgtgaccctgaacgtgctgtacggccccgacctgcccagaatctaccccagcttcacctactacagaagcggcgaggtgctgtacctgagctgcagcgccgacagcaacccccccgcccagtacagctggaccatcaacggcaagttccagctgagcggccagaagctgttcatcccccagatcaccaccaagcacagcggcctgtacgcctgcagcgtgagaaacagcgccaccggcaaggagagcagcaagagcatgaccgtgaaggtgagcgactggaccctgccctag

SEQ ID NO: 94367 - DNA, 1209 bp, synthetic construct
  misc_feature 1..1209: note = Description of Artificial Sequence: Synthetic coding sequence
  source 1..1209: mol_type = other DNA
atgggccccctgcccgcccccagctgcacccagagaatcacctggaagggcctgctgctgaccgccagcctgctgaacttctggaacccccccaccaccgccgaggtgaccatcgaggcccagccccccaaggtgagcgagggcaaggacgtgctgctgctggtgcacaacctgccccagaacctgcccggctacttctggtacaagggcgagatgaccgacctgtaccactacatcatcagctacatcgtggacggcaagatcatcatctacggccccgcctacagcggcagagagaccgtgtacagcaacgccagcctgctgatccagaacgtgaccagaaaggacgccggcacctacaccctgcacatcatcaagagaggcgacgagaccagagaggagatcagacacttcaccttcaccctgtacctggagacccccaagccctacatcagcagcagcaacctgaaccccagagaggccatggaggccgtgagactgatctgcgaccccgagaccctggacgccagctacctgtggtggatgaacggccagagcctgcccgtgacccacagactgcagctgagcaagaccaacagaaccctgtacctgttcggcgtgaccaagtacatcgccggcccctacgagtgcgagatcagaaaccccgtgagcgccagcagaagcgaccccgtgaccctgaacctgctgcacggccccgacctgcccagaatctaccccagcttcacctactacagaagcggcgagaacctggacctgagctgcttcaccgagagcaacccccccgccgagtacttctggaccatcaacggcaagttccagcagagcggccagaagctgttcatcccccagatcaccagaaaccacagcggcctgtacgcctgcagcgtgcacaacagcgccaccggcaaggagatcagcaagagcatgaccgtgaaggtgagcggcaagtggatccccgccagcctggccgtgggcttctacgtggagagcatctggctgagcgagaagagccaggagaacatcttcatccccagcctgtgccccatgggcaccagcaagagccagatcctgctgctgaacccccccaacctgagcctgcagaccctgttcagcctgttcttctgcttcctgatggccgacctggtgagcggcctgaagaaggtgggcagaggcctgtaccagccctag

SEQ ID NO: 94368 - DNA, 1281 bp, synthetic construct
  misc_feature 1..1281: note = Description of Artificial Sequence: Synthetic coding sequence
  source 1..1281: mol_type = other DNA
atgggccccctgcccgcccccagctgcacccagagaatcacctggaagggcctgctgctgaccgccagcctgctgaacttctggaacccccccaccaccgccgaggtgaccatcgaggcccagccccccaaggtgagcgagggcaaggacgtgctgctgctggtgcacaacctgccccagaacctgcccggctacttctggtacaagggcgagatgaccgacctgtaccactacatcatcagctacatcgtggacggcaagatcatcatctacggccccgcctacagcggcagagagaccgtgtacagcaacgccagcctgctgatccagaacgtgaccagaaaggacgccggcacctacaccctgcacatcatcaagagaggcgacgagaccagagaggagatcagacacttcaccttcaccctgtacctggagacccccaagccctacatcagcagcagcaacctgaaccccagagaggccatggaggccgtgagactgatctgcgaccccgagaccctggacgccagctacctgtggtggatgaacggccagagcctgcccgtgacccacagactgcagctgagcaagaccaacagaaccctgtacctgttcggcgtgaccaagtacatcgccggcccctacgagtgcgagatcagaaaccccgtgagcgccagcagaagcgaccccgtgaccctgaacctgctgcccaagctgcccatcccctacatcaccatcaacaacctgaaccccagagagaacaaggacgtgctggccttcacctgcgagcccaagagcgagaactacacctacatctggtggctgaacggccagagcctgcccgtgagccccggcgtgaagagacccatcgagaacagaatcctgatcctgcccagcgtgaccagaaacgagaccggcccctaccagtgcgagatcagagacagatacggcggcctgagaagcaaccccgtgatcctgaacgtgctgtacggccccgacctgcccagaatctaccccagcttcacctactacagaagcggcgagaacctggacctgagctgcttcaccgagagcaacccccccgccgagtacttctggaccatcaacggcaagttccagcagagcggccagaagctgttcatcccccagatcaccagaaaccacagcggcctgtacgcctgcagcgtgcacaacagcgccaccggcaaggagatcagcaagagcatgaccgtgaaggtgagcggcccctgccacggcgacctgaccgagagccagagctag

SEQ ID NO: 94369 - DNA, 723 bp, synthetic construct
  misc_feature 1..723: note = Description of Artificial Sequence: Synthetic coding sequence
  source 1..723: mol_type = other DNA
atgggccccctgcccgcccccagctgcacccagagaatcacctggaagggcctgctgctgaccgccagcctgctgaacttctggaacccccccaccaccgccgaggtgaccatcgaggcccagccccccaaggtgagcgagggcaaggacgtgctgctgctggtgcacaacctgccccagaacctgcccggctacttctggtacaagggcgagatgaccgacctgtaccactacatcatcagctacatcgtggacggcaagatcatcatctacggccccgcctacagcggcagagagaccgtgtacagcaacgccagcctgctgatccagaacgtgaccagaaaggacgccggcacctacaccctgcacatcatcaagagaggcgacgagaccagagaggagatcagacacttcaccttcaccctgtactacggccccgacctgcccagaatctaccccagcttcacctactacagaagcggcgagaacctggacctgagctgcttcaccgagagcaacccccccgccgagtacttctggaccatcaacggcaagttccagcagagcggccagaagctgttcatcccccagatcaccagaaaccacagcggcctgtacgcctgcagcgtgcacaacagcgccaccggcaaggagatcagcaagagcatgaccgtgaaggtgagcggcccctgccacggcgacctgaccgagagccagagctag

SEQ ID NO: 94370 - DNA, 1164 bp, synthetic construct
  misc_feature 1..1164: note = Description of Artificial Sequence: Synthetic coding sequence
  source 1..1164: mol_type = other DNA
atgggccccctgcccgcccccagctgcacccagagaatcacctggaagggcctgctgctgaccgccagcctgctgaacttctggtacaagggcgagatgaccgacctgtaccactacatcatcagctacatcgtggacggcaagatcatcatctacggccccgcctacagcggcagagagaccgtgtacagcaacgccagcctgctgatccagaacgtgaccagaaaggacgccggcacctacaccctgcacatcatcaagagaggcgacgagaccagagaggagatcagacacttcaccttcaccctgtacctggagacccccaagccctacatcagcagcagcaacctgaaccccagagaggccatggaggccgtgagactgatctgcgaccccgagaccctggacgccagctacctgtggtggatgaacggccagagcctgcccgtgacccacagactgcagctgagcaagaccaacagaaccctgtacctgttcggcgtgaccaagtacatcgccggcccctacgagtgcgagatcagaaaccccgtgagcgccagcagaagcgaccccgtgaccctgaacctgctgcccaagctgcccatcccctacatcaccatcaacaacctgaaccccagagagaacaaggacgtgctggccttcacctgcgagcccaagagcgagaactacacctacatctggtggctgaacggccagagcctgcccgtgagccccggcgtgaagagacccatcgagaacagaatcctgatcctgcccagcgtgaccagaaacgagaccggcccctaccagtgcgagatcagagacagatacggcggcctgagaagcaaccccgtgatcctgaacgtgctgtacggccccgacctgcccagaatctaccccagcttcacctactacagaagcggcgagaacctggacctgagctgcttcaccgagagcaacccccccgccgagtacttctggaccatcaacggcaagttccagcagagcggccagaagctgttcatcccccagatcaccagaaaccacagcggcctgtacgcctgcagcgtgcacaacagcgccaccggcaaggagatcagcaagagcatgaccgtgaaggtgagcggcccctgccacggcgacctgaccgagagccagagctag

SEQ ID NO: 94371 - DNA, 1002 bp, synthetic construct
  misc_feature 1..1002: note = Description of Artificial Sequence: Synthetic coding sequence
  source 1..1002: mol_type = other DNA
atgggccccctgcccgcccccagctgcacccagagaatcacctggaagggcctgctgctgaccgccagcctgctgaacttctggaacccccccaccaccgccgaggtgaccatcgaggcccagccccccaaggtgagcgagggcaaggacgtgctgctgctggtgcacaacctgccccagaacctgcccggctacttctggtacaagggcgagatgaccgacctgtaccactacatcatcagctacatcgtggacggcaagatcatcatctacggccccgcctacagcggcagagagaccgtgtacagcaacgccagcctgctgatccagaacgtgaccagaaaggacgccggcacctacaccctgcacatcatcaagagaggcgacgagaccagagaggagatcagacacttcaccttcaccctgtacagcaagctgcccatcccctacatcaccatcaacaacctgaaccccagagagaacaaggacgtgctggccttcacctgcgagcccaagagcgagaactacacctacatctggtggctgaacggccagagcctgcccgtgagccccggcgtgaagagacccatcgagaacagaatcctgatcctgcccagcgtgaccagaaacgagaccggcccctaccagtgcgagatcagagacagatacggcggcctgagaagcaaccccgtgatcctgaacgtgctgtacggccccgacctgcccagaatctaccccagcttcacctactacagaagcggcgagaacctggacctgagctgcttcaccgagagcaacccccccgccgagtacttctggaccatcaacggcaagttccagcagagcggccagaagctgttcatcccccagatcaccagaaaccacagcggcctgtacgcctgcagcgtgcacaacagcgccaccggcaaggagatcagcaagagcatgaccgtgaaggtgagcggcccctgccacggcgacctgaccgagagccagagctag

SEQ ID NO: 94372 - DNA, 1032 bp, synthetic construct
  misc_feature 1..1032: note = Description of Artificial Sequence: Synthetic coding sequence
  source 1..1032: mol_type = other DNA
atgctgctgctgaagaagcacaccgaggacatcagcagcgtgtacgagatcagagagagactgggcagcggcgccttcagcgaggtggtgctggcccaggagagaggcagcgcccacctggtggccctgaagtgcatccccaagaaggccctgagaggcaaggaggccctggtggagaacgagatcgccgtgctgagaagaatcagccaccccaacatcgtggccctggaggacgtgcacgagagccccagccacctgtacctggccatggagctggtgaccggcggcgagctgttcgacagaatcatggagagaggcagctacaccgagaaggacgccagccacctggtgggccaggtgctgggcgccgtgagctacctgcacagcctgggcatcgtgcacagagacctgaagcccgagaacctgctgtacgccacccccttcgaggacagcaagatcatggtgagcgacttcggcctgagcaagatccaggccggcaacatgctgggcaccgcctgcggcacccccggctacgtggcccccgagctgctggagcagaagccctacggcaaggccgtggacgtgtgggccctgggcgtgatcagctacatcctgctgtgcggctacccccccttctacgacgagagcgaccccgagctgttcagccagatcctgagagccagctacgagttcgacagccccttctgggacgacatcagcgagagcgccaaggacttcatcagacacctgctggagagagacccccagaagagattcacctgccagcaggccctgagacacctgtggatcagcggcgacaccgccttcgacagagacatcctgggcagcgtgagcgagcagatcagaaagaacttcgccagaacccactggaagagagccttcaacgccaccagcttcctgagacacatcagaaagctgggccagatccccgagggcgagggcgccagcgagcagggcatggccagacacagccacagcggcctgagagccggccagccccccaagtggtag

SEQ ID NO: 94373 - DNA, 1101 bp, synthetic construct
  misc_feature 1..1101: note = Description of Artificial Sequence: Synthetic coding sequence
  source 1..1101: mol_type = other DNA
atgctgctgctgaagaagcacaccgaggacatcagcagcgtgtacgagatcagagagagactgggcagcggcgccttcagcgaggtggtgctggcccaggagagaggcagcgcccacctggtggccctgaagtgcatccccaagaaggccctgagaggcaaggaggccctggtggagaacgagatcgccgtgctgagaagaatcagccaccccaacatcgtggccctggaggacgtgcacgagagccccagccacctgtacctggccatggagctggtgaccggcggcgagctgttcgacagaatcatggagagaggcagctacaccgagaaggacgccagccacctggtgggccaggtgctgggcgccgtgagctacctgcacagcctgggcatcgtgcacagagacctgaagcccgagaacctgctgtacgccacccccttcgaggacagcaagatcatggtgagcgacttcggcctgagcaagatccaggccggcaacatgctgggcaccgcctgcggcacccccggctacgccgagcccgtgaccctgagcggcatggccgcctgcgtgcccgtgagagccagcgtgtgcctgtggccccccgcccccgagctgctggagcagaagccctacggcaaggccgtggacgtgtgggccctgggcgtgatcagctacatcctgctgtgcggctacccccccttctacgacgagagcgaccccgagctgttcagccagatcctgagagccagctacgagttcgacagccccttctgggacgacatcagcgagagcgccaaggacttcatcagacacctgctggagagagacccccagaagagattcacctgccagcaggccctgagacacctgtggatcagcggcgacaccgccttcgacagagacatcctgggcagcgtgagcgagcagatcagaaagaacttcgccagaacccactggaagagagccttcaacgccaccagcttcctgagacacatcagaaagctgggccagatccccgagggcgagggcgccagcgagcagggcatggccagacacagccacagcggcctgagagccggccagccccccaagtggtag

SEQ ID NO: 94374 - DNA, 1083 bp, synthetic construct
  misc_feature 1..1083: note = Description of Artificial Sequence: Synthetic coding sequence
  source 1..1083: mol_type = other DNA
atgtggagaagagtgtgcggcggcctggccggcagaagacccagcggcgacatgctgctgctgaagaagcacaccgaggacatcagcagcgtgtacgagatcagagagagactgggcagcggcgccttcagcgaggtggtgctggcccaggagagaggcagcgcccacctggtggccctgaagtgcatccccaagaaggccctgagaggcaaggaggccctggtggagaacgagatcgccgtgctgagaagaatcagccaccccaacatcgtggccctggaggacgtgcacgagagccccagccacctgtacctggccatggagctggtgaccggcggcgagctgttcgacagaatcatggagagaggcagctacaccgagaaggacgccagccacctggtgggccaggtgctgggcgccgtgagctacctgcacagcctgggcatcgtgcacagagacctgaagcccgagaacctgctgtacgccacccccttcgaggacagcaagatcatggtgagcgacttcggcctgagcaagatccaggccggcaacatgctgggcaccgcctgcggcacccccggctacgtggcccccgagctgctggagcagaagccctacggcaaggccgtggacgtgtgggccctgggcgtgatcagctacatcctgctgtgcggctacccccccttctacgacgagagcgaccccgagctgttcagccagatcctgagagccagctacgagttcgacagccccttctgggacgacatcagcgagagcgccaaggacttcatcagacacctgctggagagagacccccagaagagattcacctgccagcaggccctgagacacctgtggatcagcggcgacaccgccttcgacagagacatcctgggcagcgtgagcgagcagatcagaaagaacttcgccagaacccactggaagagagccttcaacgccaccagcttcctgagacacatcagaaagctgggccagatccccgagggcgagggcgccagcgagcagggcatggccagacacagccacagcggcctgagagccggccagccccccaagtggtag

SEQ ID NO: 94375 - DNA, 1032 bp, synthetic construct; identical to SEQ ID NO: 94372
  misc_feature 1..1032: note = Description of Artificial Sequence: Synthetic coding sequence
  source 1..1032: mol_type = other DNA

SEQ ID NO: 94376 - DNA, 1101 bp, synthetic construct; identical to SEQ ID NO: 94373
  misc_feature 1..1101: note = Description of Artificial Sequence: Synthetic coding sequence
  source 1..1101: mol_type = other DNA

SEQ ID NO: 94377 - DNA, 132 bp, synthetic construct
  misc_feature 1..132: note = Description of Artificial Sequence: Synthetic coding sequence
  source 1..132: mol_type = other DNA
atgctgctgctgaagaagcacaccgaggacatcagcagcgtgtacgagatcagagagagactgggcagcggcgccttcagcgaggtggtgctggcccaggagagaggcagcgcccacctggtggccctgtag

SEQ ID NO: 94378 - DNA, 675 bp, synthetic construct
  misc_feature 1..675: note = Description of Artificial Sequence: Synthetic coding sequence
  source 1..675: mol_type = other DNA
atgctgctgctgaagaagcacaccgaggacatcagcagcgtgtacgagatcagagagagactgggcagcggcgccttcagcgaggtggtgctggcccaggagagaggcagcgcccacctggtggccctgaagtgcatccccaagaaggccctgagaggcaaggaggccctggtggagaacgagatcgccgtgctgagaagaatcagccaccccaacatcgtggccctggaggacgtgcacgagagccccagccacctgtacctggccatggagctggtgaccggcggcgagctgttcgacagaatcatggagagaggcagctacaccgagaaggacgccagccacctggtgggccaggtgctgggcgccgtgagctacctgcacagcctgggcatcgtgcacagagacctgaagcccgagaacctgctgtacgccacccccttcgaggacagcaagatcatggtgagcgacttcggcctgagcaagatccaggccggcaacatgctgggcaccgcctgcggcacccccggctacgtggcccccgagctgctggagcagaagccctacggcaaggccgtggacgtgtgggccctgggcgtgatcagctacatcctgctgtgcggctacccccccttctacgacgagagcgaccccgagctgttcagccagatctag

SEQ ID NO: 94379 - DNA, 132 bp, synthetic construct; identical to SEQ ID NO: 94377
  misc_feature 1..132: note = Description of Artificial Sequence: Synthetic coding sequence
  source 1..132: mol_type = other DNA

SEQ ID NO: 94380 - DNA, 132 bp, synthetic construct; identical to SEQ ID NO: 94377
  misc_feature 1..132: note = Description of Artificial Sequence: Synthetic coding sequence
  source 1..132: mol_type = other DNA

SEQ ID NO: 94381 - DNA, 261 bp, synthetic construct
  misc_feature 1..261: note = Description of Artificial Sequence: Synthetic coding sequence
  source 1..261: mol_type = other DNA
atgctgctgctgaagaagcacaccgaggacatcagcagcgtgtacgagatcagagagagactgggcagcggcgccttcagcgaggtggtgctggcccaggagagaggcagcgcccacctggtggccctgaagtgcatccccaagaaggccctgagaggcaaggaggccctggtggagaacgagatcgccgtgctgagaagaatcagccaccccaacatcgtggccctggaggacgtgcacgagagccccagccacctgtag

SEQ ID NO: 94382 - DNA, 246 bp, synthetic construct
  misc_feature 1..246: note = Description of Artificial Sequence: Synthetic coding sequence
  source 1..246: mol_type = other DNA
tgaatcagcggcgacaccgccttcgacagagacatcctgggcagcgtgagcgagcagatcagaaagaacttcgccagaacccactggaagagagccttcaacgccaccagcttcctgagacacatcagaaagctgggccagatccccgagggcgagggcgccagcgagcagggcatggccagacacagccacagcggcggcccccagggcctgagcttcctgcacggctgctgcgtgctgagatag

SEQ ID NO: 94383 - DNA, 681 bp, synthetic construct
  misc_feature 1..681: note = Description of Artificial Sequence: Synthetic coding sequence
  source 1..681: mol_type = other DNA
atgctgctgctgaagaagcacaccgaggacatcagcagcgtgtacgagatcagagagagactgggcagcggcgccttcagcgaggtggtgctggcccaggagagaggcagcgcccacctggtggccctgaagtgcatccccaagaaggccctgagaggcaaggaggccctggtggagaacgagatcgccgtgctgagaagaatcagccaccccaacatcgtggccctggaggacgtgcacgagagccccagccacctgtacctggccatggagctggtgaccggcggcgagctgttcgacagaatcatggagagaggcagctacaccgagaaggacgccagccacctggtgggccaggtgctgggcgccgtgagctacctgcacagcctgggcatcgtgcacagagacctgaagcccgagaacctgctgtacgccacccccttcgaggacagcaagatcatggtgagcgacttcggcctgagcaagatccaggccggcaacatgctgggcaccgcctgcggcacccccggctacgtggcccccgagctgctggagcagaagccctacggcaaggccgtggacgtgtgggccctgggcgtgatcagctacatcctgctgtgcggctacccccccttctacgacgagagcgaccccgagctgttcagccagatcctgagatag

SEQ ID NO: 94384 - DNA, 1281 bp, synthetic construct
  misc_feature 1..1281: note = Description of Artificial Sequence: Synthetic coding sequence
  source 1..1281: mol_type = other DNA
atggaggccgccttcggccaggtggccggcagcgcctgccccagaagaggcggcgagggcagagactggaaggccgagagcctggccgacctgtggcccaagagcagccccggcgacagccacagatggtgcaagggccccggcgccggccccgccggcccccagctgagagaggccgccagagccagcagcggcctgggcggcggcggcagacaccccagcagaatccccgccatcgccctgcaggacatgctgctgctgaagaagcacaccgaggacatcagcagcgtgtacgagatcagagagagactgggcagcggcgccttcagcgaggtggtgctggcccaggagagaggcagcgcccacctggtggccctgaagtgcatccccaagaaggccctgagaggcaaggaggccctggtggagaacgagatcgccgtgctgagaagaatcagccaccccaacatcgtggccctggaggacgtgcacgagagccccagccacctgtacctggccatggagctggtgaccggcggcgagctgttcgacagaatcatggagagaggcagctacaccgagaaggacgccagccacctggtgggccaggtgctgggcgccgtgagctacctgcacagcctgggcatcgtgcacagagacctgaagcccgagaacctgctgtacgccacccccttcgaggacagcaagatcatggtgagcgacttcggcctgagcaagatccaggccggcaacatgctgggcaccgcctgcggcacccccggctacgtggcccccgagctgctggagcagaagccctacggcaaggccgtggacgtgtgggccctgggcgtgatcagctacatcctgctgtgcggctacccccccttctacgacgagagcgaccccgagctgttcagccagatcctgagagccagctacgagttcgacagccccttctgggacgacatcagcgagagcgccaaggacttcatcagacacctgctggagagagacccccagaagagattcacctgccagcaggccctgagacacctgtggatcagcggcgacaccgccttcgacagagacatcctgggcagcgtgagcgagcagatcagaaagaacttcgccagaacccactggaagagagccttcaacgccaccagcttcctgagacacatcagaaagctgggccagatccccgagggcgagggcgccagcgagcagggcatggccagacacagccacagcggcctgagagccggccagccccccaagtggtag

SEQ ID NO: 94385 - DNA, 132 bp, synthetic construct; identical to SEQ ID NO: 94377
  misc_feature 1..132: note = Description of Artificial Sequence: Synthetic coding sequence
  source 1..132: mol_type = other DNA

SEQ ID NO: 94386 - DNA, 4884 bp, synthetic construct
  misc_feature 1..4884: note = Description of Artificial Sequence: Synthetic coding sequence
  source 1..4884: mol_type = other DNA
atgagactgtggagctgggtgctgcacctgggcctgctgagcgccgccctgggctgcggcctggccgagagacccagaagagccagaagagaccccagagccggcagaccccccagacccgccgccggccccgccacctgcgccaccagagccgccagaggcagaagagccagccccccccccccccccccccccggcggcgcctgggaggccgtgagagtgcccagaagaagacagcagagagaggccagaggcgccaccgaggagcccagcccccccagcagagccctgtacttcagcggcagaggcgagcagctgagactgagagccgacctggagctgcccagagacgccttcaccctgcaggtgtggctgagagccgagggcggccagagaagccccgccgtgatcaccggcctgtacgacaagtgcagctacatcagcagagacagaggctgggtggtgggcatccacaccatcagcgaccaggacaacaaggaccccagatacttcttcagcctgaagaccgacagagccagacaggtgaccaccatcaacgcccacagaagctacctgcccggccagtgggtgtacctggccgccacctacgacggccagttcatgaagctgtacgtgaacggcgcccaggtggccaccagcggcgagcaggtgggcggcatcttcagccccctgacccagaagtgcaaggtgctgatgctgggcggcagcgccctgaaccacaactacagaggctacatcgagcacttcagcctgtggaaggtggccagaacccagagagagatcctgagcgacatggagacccacggcgcccacaccgccctgccccagctgctgctgcaggagaactgggacaacgtgaagcacgcctggagccccatgaaggacggcagcagccccaaggtggagttcagcaacgcccacggcttcctgctggacaccagcctggagccccccctgtgcggccagaccctgtgcgacaacaccgaggtgatcgccagctacaaccagctgagcagcttcagacagcccaaggtggtgagatacagagtggtgaacctgtacgaggacgaccacaagaaccccaccgtgaccagagagcaggtggacttccagcaccaccagctggccgaggccttcaagcagtacaacatcagctgggagctggacgtgctggaggtgagcaacagcagcctgagaagaagactgatcctggccaactgcgacatcagcaagatcggcgacgagaactgcgaccccgagtgcaaccacaccctgaccggccacgacggcggcgactgcagacacctgagacaccccgccttcgtgaagaagcagcacaacggcgtgtgcgacatggactgcaactacgagagattcaacttcgacggcggcgagtgctgcgaccccgagatcaccaacgtgacccagacctgcttcgaccccgacagcccccacagagcctacctggacgtgaacgagctgaagaacatcctgaagctggacggcagcacccacctgaacatcttcttcgccaagagcagcgaggaggagctggccggcgtggccacctggccctgggacaaggaggccctgatgcacctgggcggcatcgtgctgaaccccagcttctacggcatgcccggccacacccacaccatgatccacgagatcggccacagcctgggcctgtaccacgtgttcagaggcatcagcgagatccagagctgcagcgacccctgcatggagaccgagcccagcttcgagaccggcgacctgtgcaacgacaccaaccccgcccccaagcacaagagctgcggcgaccccggccccggcaacgacacctgcggcttccacagcttcttcaacaccccctacaacaacttcatgagctacgccgacgacgactgcaccgacagcttcacccccaaccaggtggccagaatgcactgctacctggacctggtgtaccagggctggcagcccagcagaaagcccgcccccgtggccctggccccccaggtgctgggccacaccaccgacagcgtgaccctggagtggttcccccccatcgacggccacttcttcgagagagagctgggcagcgcctgccacctgtgcctggagggcagaatcctggtgcagtacgccagcaacgccagcagccccatgccctgcagccccagcggccactggagccccagagaggccgagggccaccccgacgtggagcagccctgcaagagcagcgtgagaacctggagccccaacagcgccgtgaacccccacaccgtgccccccgcctgccccgagccccagggctgctacctggagctggagttcctgtaccccctggtgcccgagagcctgaccatctgggtgaccttcgtgagcaccgactgggacagcagcggcgccgtgaacgacatcaagctgctggccgtgagcggcaagaacatcagcctgggcccccagaacgtgttctgcgacgtgcccctgaccatcagactgtgggacgtgggcgaggaggtgtacggcatccagatctacaccctggacgagcacctggagatcgacgccgccatgctgaccagcaccgccgacacccccctgtgcctgcagtgcaagcccctgaagtacaaggtggtgagagacccccccctgcagatggacgtggccagcatcctgcacctgaacagaaagttcgtggacatggacctgaacctgggcagcgtgtaccagtactgggtgatcaccatcagcggcaccgaggagagcgagcccagccccgccgtgacctacatccacggcagcggctactgcggcgacggcatcatccagaaggaccagggcgagcagtgcgacgacatgaacaagatcaacggcgacggctgcagcctgttctgcagacaggaggtgagcttcaactgcatcgacgagcccagcagatgctacttccacgacggcgacggcgtgtgcgaggagttcgagcagaagaccagcatcaaggactgcggcgtgtacaccccccagggcttcctggaccagtgggccagcaacgccagcgtgagccaccaggaccagcagtgccccggctgggtgatcatcggccagcccgccgccagccaggtgtgcagaaccaaggtgatcgacctgagcgagggcatcagccagcacgcctggtacccctgcaccatcagctacccctacagccagctggcccagaccaccttctggctgagagcctacttcagccagcccatggtggccgccgccgtgatcgtgcacctggtgaccgacggcacctactacggcgaccagaagcaggagaccatcagcgtgcagctgctggacaccaaggaccagagccacgacctgggcctgcacgtgctgagctgcagaaacaaccccctgatcatccccgtggtgcacgacctgagccagcccttctaccacagccaggccgtgagagtgagcttcagcagccccctggtggccatcagcggcgtggccctgagaagcttcgacaacttcgaccccgtgaccctgagcagctgccagagaggcgagacctacagccccgccgagcagagctgcgtgcacttcgcctgcgagaagaccgactgccccgagctggccgtggagaacgccagcctgaactgcagcagcagcgacagataccacggcgcccagtgcaccgtgagctgcagaaccggctacgtgctgcagatcagaagagacgacgagctgatcaagagccagaccggccccagcgtgaccgtgacctgcaccgagggcaagtggaacaagcaggtggcctgcgagcccgtggactgcagcatccccgaccaccaccaggtgtacgccgccagcttcagctgccccgagggcaccaccttcggcagccagtgcagcttccagtgcagacaccccgcccagctgaagggcaacaacagcctgctgacctgcatggaggacggcctgtggagcttccccgaggccctgtgcgagctgatgtgcctggcccccccccccgtgcccaacgccgacctgcagaccgccagatgcagagagaacaagcacaaggtgggcagcttctgcaagtacaagtgcaagcccggctaccacgtgcccggcagcagcagaaagagcaagaagagagccttcaagacccagtgcacccaggacggcagctggcaggagggcgcctgcgtgcccgtgacctgcgacccccccccccccaagttccacggcctgtaccagtgcaccaacggcttccagttcaacagcgagtgcagaatcaagtgcgaggacagcgacgccagccagggcctgggcagcaacgtgatccactgcagaaaggacggcacctggaacggcagcttccacgtgtgccaggagatgcagggccagtgcagcgtgcccaacgagctgaacagcaacctgaagctgcagtgccccgacggctacgccatcggcagcgagtgcgccaccagctgcctggaccacaacagcgagagcatcatcctgcccatgaacgtgaccgtgagagacatcccccactggctgaaccccaccagagtggagagagtggtgtgcaccgccggcctgaagtggtacccccaccccgccctgatccactgcgtgaagggctgcgagcccttcatgggcgacaactactgcgacgccatcaacaacagagccttctgcaactacgacggcggcgactgctgcaccagcaccgtgaagaccaagaaggtgacccccttccccatgagctgcgacctgcagggcgactgcgcctgcagagacccccaggcccaggagcacagcagaaaggacctgagaggctacagccacggctag

SEQ ID NO: 94387 - DNA, 1701 bp, synthetic construct
  misc_feature 1..1701: note = Description of Artificial Sequence: Synthetic coding sequence
  source 1..1701: mol_type = other DNA
atggactgcaactacgagagattcaacttcgacggcggcgagtgctgcgaccccgagatcaccaacgtgacccagacctgcttcgaccccgacagcccccacagagcctacctggacgtgaacgagctgaagaacatcctgaagctggacggcagcacccacctgaacatcttcttcgccaagagcagcgaggaggagctggccggcgtggccacctggccctgggacaaggaggccctgatgcacctggacgacgactgcaccgacagcttcacccccaaccaggtggccagaatgcactgctacctggacctggtgtaccagggctggcagcccagcagaaagcccgcccccgtggccctggccccccaggtgctgggccacaccaccgacagcgtgaccctggagtggttcccccccatcgacggccacttcttcgagagagagctgggcagcgcctgccacctgtgcctggagggcagaatcctggtgcagtacgccagcaacgccagcagccccatgccctgcagccccagcggccactggagccccagagaggccgagggccaccccgacgtggagcagccctgcaagagcagcgtgagaacctggagccccaacagcgccgtgaacccccacaccgtgccccccgcctgccccgagccccagggctgctacctggagctggagttcctgtaccccctggtgcccgagagcctgaccatctgggtgaccttcgtgagcaccgactgggacagcagcggcgccgtgaacgacatcaagctgctggccgtgagcggcaagaacatcagcctgggcccccagaacgtgttctgcgacgtgcccctgaccatcagactgtgggacgtgggcgaggaggtgtacggcatccagatctacaccctggacgagcacctggagatcgacgccgccatgctgaccagcaccgccgacacccccctgtgcctgcagtgcaagcccctgaagtacaaggtggtgagagacccccccctgcagatggacgtggccagcatcctgcacctgaacagaaagttcgtggacatggacctgaacctgggcagcgtgtaccagtactgggtgatcaccatcagcggcaccgaggagagcgagcccagccccgccgtgacctacatccacggcagcggctactgcggcgacggcatcatccagaaggaccagggcgagcagtgcgacgacatgaacaagatcaacggcgacggctgcagcctgttctgcagacaggaggtgagcttcaactgcatcgacgagcccagcagatgctacttccacgacggcgacggcgtgtgcgaggagttcgagcagaagaccagcatcaaggactgcggcgtgtacaccccccagggcttcctggaccagtgggccagcaacgccagcgtgagccaccaggaccagcagtgccccggctgggtgatcatcggccagcccgccgccagccaggtgtgcagaaccaaggtgatcgacctgagcgagggcatcagcgcctgcctggtgcccctgcaccaccagctgcccatcttccccgccggcagcgaccacttcctggcccccggcgtgttcttcagcaccaacggctgcagaagctgccactgcccccccggcgacggctgggacatcctgtggggccccaaggccggcgaccaccagagagccgccgcctag

SEQ ID NO: 94388 - DNA, 1998 bp, synthetic construct
  misc_feature 1..1998: note = Description of Artificial Sequence: Synthetic coding sequence
  source 1..1998: mol_type = other DNA
atgaacaagatcaacggcgacggctgcagcctgttctgcagacaggaggtgagcttcaactgcatcgacgagcccagcagatgctacttccacgacggcgacggcgtgtgcgaggagttcgagcagaagaccagcatcaaggactgcggcgtgtacaccccccagggcttcctggaccagtgggccagcaacgccagcgtgagccaccaggaccagcagtgccccggctgggtgatcatcggccagcccgccgccagccaggtgtgcagaaccaaggtgatcgacctgagcgagggcatcagccagcacgcctggtacccctgcaccatcagctacccctacagccagctggcccagaccaccttctggctgagagcctacttcagccagcccatggtggccgccgccgtgatcgtgcacctggtgaccgacggcacctactacggcgaccagaagcaggagaccatcagcgtgcagctgctggacaccaaggaccagagccacgacctgggcctgcacgtgctgagctgcagaaacaaccccctgatcatccccgtggtgcacgacctgagccagcccttctaccacagccaggccgtgagagtgagcttcagcagccccctggtggccatcagcggcgtggccctgagaagcttcgacaacttcgaccccgtgaccctgagcagctgccagagaggcgagacctacagccccgccgagcagagctgcgtgcacttcgcctgcgagaagaccgactgccccgagctggccgtggagaacgccagcctgaactgcagcagcagcgacagataccacggcgcccagtgcaccgtgagctgcagaaccggctacgtgctgcagatcagaagagacgacgagctgatcaagagccagaccggccccagcgtgaccgtgacctgcaccgagggcaagtggaacaagcaggtggcctgcgagcccgtggactgcagcatccccgaccaccaccaggtgtacgccgccagcttcagctgccccgagggcaccaccttcggcagccagtgcagcttccagtgcagacaccccgcccagctgaagggcaacaacagcctgctgacctgcatggaggacggcctgtggagcttccccgaggccctgtgcgagctgatgtgcctggcccccccccccgtgcccaacgccgacctgcagaccgccagatgcagagagaacaagcacaaggtgggcagcttctgcaagtacaagtgcaagcccggctaccacgtgcccggcagcagcagaaagagcaagaagagagccttcaagacccagtgcacccaggacggcagctggcaggagggcgcctgcgtgcccgtgacctgcgacccccccccccccaagttccacggcctgtaccagtgcaccaacggcttccagttcaacagcgagtgcagaatcaagtgcgaggacagcgacgccagccagggcctgggcagcaacgtgatccactgcagaaaggacggcacctggaacggcagcttccacgtgtgccaggagatgcagggccagtgcagcgtgcccaacgagctgaacagcaacctgaagctgcagtgccccgacggctacgccatcggcagcgagtgcgccaccagctgcctggaccacaacagcgagagcatcatcctgcccatgaacgtgaccgtgagagacatcccccactggctgaaccccaccagagtggagagagtggtgtgcaccgccggcctgaagtggtacccccaccccgccctgatccactgcgtgaagggctgcgagcccttcatgggcgacaactactgcgacgccatcaacaacagagccttctgcaactacgacggcggcgactgctgcaccagcaccgtgaagaccaagaaggtgacccccttccccatgagctgcgacctgcagggcgactgcgcctgcagagacccccaggcccaggagcacagcagaaaggacctgagaggctacagccacggctag

SEQ ID NO: 94389 - DNA, 4449 bp, synthetic construct
  misc_feature 1..4449: note = Description of Artificial Sequence: Synthetic coding sequence
  source 1..4449: mol_type = other DNA
atgagaaaggacagactgctgcacctgtgcctggtgctgctgctgatcctgctgagcgccagcgacagcaacagcaccgagccccagtacatggtgctggtgcccagcctgctgcacaccgaggcccccaagaagggctgcgtgctgctgagccacctgaacgagaccgtgaccgtgagcgccagcctggagagcggcagagagaacagaagcctgttcaccgacctggtggccgagaaggacctgttccactgcgtgagcttcaccctgcccagaatcagcgccagcagcgaggtggccttcctgagcatccagatcaagggccccacccaggacttcagaaagagaaacaccgtgctggtgctgaacacccagagcctggtgttcgtgcagaccgacaagcccatgtacaagcccggccagaccgtgagattcagagtggtgagcgtggacgagaacttcagacccagaaacgagctgatccccctgatctacctggagaaccccagaagaaacagaatcgcccagtggcagagcctgaagctggaggccggcatcaaccagctgagcttccccctgagcagcgagcccatccagggcagctacagagtggtggtgcagaccgagagcggcggcagaatccagcaccccttcaccgtggaggagttcgtgctgcccaagttcgaggtgaaggtgcaggtgcccaagatcatcagcatcatggacgagaaggtgaacatcaccgtgtgcggcgagtacacctacggcaagcccgtgcccggcctggccaccgtgagcctgtgcagaaagctgagcagagtgctgaactgcgacaagcaggaggtgtgcgaggagttcagccagcagctgaacagcaacggctgcatcacccagcaggtgcacaccaagatgctgcagatcaccaacaccggcttcgagatgaagctgagagtggaggccagaatcagagaggagggcaccgacctggaggtgaccgccaacagaatcagcgagatcaccaacatcgtgagcaagctgaagttcgtgaaggtggacagccacttcagacagggcatccccttcttcgcccaggtgctgctggtggacggcaagggcgtgcccatccccaacaagctgttcttcatcagcgtgaacgacgccaactactacagcaacgccaccaccaacgagcagggcctggcccagttcagcatcaacaccaccagcatcagcgtgaacaagctgttcgtgagagtgttcaccgtgcaccccaacctgtgcttccactacagctgggtggccgaggaccaccagggcgcccagcacaccgccaacagagtgttcagcctgagcggcagctacatccacctggagcccgtggccggcaccctgccctgcggccacaccgagaccatcaccgcccactacaccctgaacagacaggccatgggcgagctgagcgagctgagcttccactacctgatcatggccaagggcgtgatcgtgagaagcggcacccacaccctgcccgtggagagcggcgacatgaagggcagcttcgccctgagcttccccgtggagagcgacgtggcccccatcgccagaatgttcatcttcgccatcctgcccgacggcgaggtggtgggcgacagcgagaagttcgagatcgagaactgcctggccaacaaggtggacctgagcttcagccccgcccagagcccccccgccagccacgcccacctgcaggtggccgccgccccccagagcctgtgcgccctgagagccgtggaccagagcgtgctgctgatgaagcccgaggccgagctgagcgtgagcagcgtgtacaacctgctgaccgtgaaggacctgaccaacttccccgacaacgtggaccagcaggaggaggagcagggccactgccccagacccttcttcatccacaacggcgccatctacgtgcccctgagcagcaacgaggccgacatctacagcttcctgaagggcatgggcctgaaggtgttcaccaacagcaagatcagaaagcccaagagctgcagcgtgatccccagcgtgagcgccggcgccgtgggccagggctactacggcgccggcctgggcgtggtggagagaccctacgtgccccagctgggcacctacaacgtgatccccctgaacaacgagcagagcagcggccccgtgcccgagaccgtgagaagctacttccccgagacctggatctgggagctggtggccgtgaacagcagcggcgtggccgaggtgggcgtgaccgtgcccgacaccatcaccgagtggaaggccggcgccttctgcctgagcgaggacgccggcctgggcatcagcagcaccgccagcctgagagccttccagcccttcttcgtggagctgaccatgccctacagcgtgatcagaggcgaggtgttcaccctgaaggccaccgtgctgaactacctgcccaagtgcatcagagtgagcgtgcagctgaaggccagccccgccttcctggccagccagaacaccaagggcgaggagagctactgcatctgcggcaacgagagacagaccctgagctggaccgtgacccccaagaccctgggcaacgtgaacttcagcgtgagcgccgaggccatgcagagcctggagctgtgcggcaacgaggtggtggaggtgcccgagatcaagagaaaggacaccgtgatcaagaccctgctggtggaggccgagggcatcgagcaggagaagaccttcagcagcatgacctgcgccagcggcgccaacgtgagcgagcagctgagcctgaagctgcccagcaacgtggtgaaggagagcgccagagccagcttcagcgtgctgggcgacatcctgggcagcgccatgcagaacatccagaacctgctgcagatgccctacggctgcggcgagcagaacatggtgctgttcgcccccaacatctacgtgctgaactacctgaacgagacccagcagctgacccaggagatcaaggccaaggccgtgggctacctgatcaccggctaccagagacagctgaactacaagcaccaggacggcagctacagcaccttcggcgagagatacggcagaaaccagggcaacacctggctgaccgccttcgtgctgaagaccttcgcccaggccagaagctacatcttcatcgacgaggcccacatcacccagagcctgacctggctgagccagatgcagaaggacaacggctgcttcagaagcagcggcagcctgctgaacaacgccatcaagggcggcgtggaggacgaggccaccctgagcgcctacgtgaccatcgccctgctggagatccccctgcccgtgaccaaccccatcgtgagaaacgccctgttctgcctggagagcgcctggaacgtggccaaggagggcacccacggcagccacgtgtacaccaaggccctgctggcctacgccttcagcctgctgggcaagcagaaccagaacagagagatcctgaacagcctggacaaggaggccgtgaaggaggacaacctggtgcactgggagagaccccagagacccaaggcccccgtgggccacctgtaccagacccaggcccccagcgccgaggtggagatgaccagctacgtgctgctggcctacctgaccgcccagcccgcccccaccagcggcgacctgaccagcgccaccaacatcgtgaagtggatcatgaagcagcagaacgcccagggcggcttcagcagcacccaggacaccgtggtggccctgcacgccctgagcagatacggcgccgccaccttcaccagaaccgagaagaccgcccaggtgaccgtgcaggacagccagaccttcagcaccaacttccaggtggacaacaacaacctgctgctgctgcagcagatcagcctgcccgagctgcccggcgagtacgtgatcaccgtgaccggcgagagatgcgtgtacctgcagaccagcatgaagtacaacatcctgcccgagaaggaggacagccccttcgccctgaaggtgcagaccgtgccccagacctgcgacggccacaaggcccacaccagcttccagatcagcctgaccatcagctacaccggcaacagacccgccagcaacatggtgatcgtggacgtgaagatggtgagcggcttcatccccctgaagcccaccgtgaagatgctggagagaagcagcagcgtgagcagaaccgaggtgagcaacaaccacgtgctgatctacgtggagcaggtgaccaaccagaccctgagcttcagcttcatggtgctgcaggacatccccgtgggcgacctgaagcccgccatcgtgaaggtgtacgactactacgagaccgacgagagcgtggtggccgagtacatcgccccctgcagcaccgacaccgagcacggcaacgtgtag

SEQ ID NO: 94390 - DNA, 3807 bp, synthetic construct
  misc_feature 1..3807: note = Description of Artificial Sequence: Synthetic coding sequence
  source 1..3807: mol_type = other DNA
atgagcgagagctacagaagaaccaccttccccgtgagattcagagtggtgagcgtggacgagaacttcagacccagaaacgagctgatccccctgatctacctggagaaccccagaagaaacagaatcgcccagtggcagagcctgaagctggaggccggcatcaaccagctgagcttccccctgagcagcgagcccatccagggcagctacagagtggtggtgcagaccgagagcggcggcagaatccagcaccccttcaccgtggaggagttcgtgctgcccaagttcgaggtgaaggtgcaggtgcccaagatcatcagcatcatggacgagaaggtgaacatcaccgtgtgcggcgagtacacctacggcaagcccgtgcccggcctggccaccgtgagcctgtgcagaaagctgagcagagtgctgaactgcgacaagcaggaggtgtgcgaggagttcagccagcagctgaacagcaacggctgcatcacccagcaggtgcacaccaagatgctgcagatcaccaacaccggcttcgagatgaagctgagagtggaggccagaatcagagaggagggcaccgacctggaggtgaccgccaacagaatcagcgagatcaccaacatcgtgagcaagctgaagttcgtgaaggtggacagccacttcagacagggcatccccttcttcgcccaggtgctgctggtggacggcaagggcgtgcccatccccaacaagctgttcttcatcagcgtgaacgacgccaactactacagcaacgccaccaccaacgagcagggcctggcccagttcagcatcaacaccaccagcatcagcgtgaacaagctgttcgtgagagtgttcaccgtgcaccccaacctgtgcttccactacagctgggtggccgaggaccaccagggcgcccagcacaccgccaacagagtgttcagcctgagcggcagctacatccacctggagcccgtggccggcaccctgccctgcggccacaccgagaccatcaccgcccactacaccctgaacagacaggccatgggcgagctgagcgagctgagcttccactacctgatcatggccaagggcgtgatcgtgagaagcggcacccacaccctgcccgtggagagcggcgacatgaagggcagcttcgccctgagcttccccgtggagagcgacgtggcccccatcgccagaatgttcatcttcgccatcctgcccgacggcgaggtggtgggcgacagcgagaagttcgagatcgagaactgcctggccaacaaggtggacctgagcttcagccccgcccagagcccccccgccagccacgcccacctgcaggtggccgccgccccccagagcctgtgcgccctgagagccgtggaccagagcgtgctgctgatgaagcccgaggccgagctgagcgtgagcagcgtgtacaacctgctgaccgtgaaggacctgaccaacttccccgacaacgtggaccagcaggaggaggagcagggccactgccccagacccttcttcatccacaacggcgccatctacgtgcccctgagcagcaacgaggccgacatctacagcttcctgaagggcatgggcctgaaggtgttcaccaacagcaagatcagaaagcccaagagctgcagcgtgatccccagcgtgagcgccggcgccgtgggccagggctactacggcgccggcctgggcgtggtggagagaccctacgtgccccagctgggcacctacaacgtgatccccctgaacaacgagcagagcagcggccccgtgcccgagaccgtgagaagctacttccccgagacctggatctgggagctggtggccgtgaacagcagcggcgtggccgaggtgggcgtgaccgtgcccgacaccatcaccgagtggaaggccggcgccttctgcctgagcgaggacgccggcctgggcatcagcagcaccgccagcctgagagccttccagcccttcttcgtggagctgaccatgccctacagcgtgatcagaggcgaggtgttcaccctgaaggccaccgtgctgaactacctgcccaagtgcatcagagccgagggcatcgagcaggagaagaccttcagcagcatgacctgcgccagcggcgccaacgtgagcgagcagctgagcctgaagctgcccagcaacgtggtgaaggagagcgccagagccagcttcagcgtgctgggcgacatcctgggcagcgccatgcagaacatccagaacctgctgcagatgccctacggctgcggcgagcagaacatggtgctgttcgcccccaacatctacgtgctgaactacctgaacgagacccagcagctgacccaggagatcaaggccaaggccgtgggctacctgatcaccggctaccagagacagctgaactacaagcaccaggacggcagctacagcaccttcggcgagagatacggcagaaaccagggcaacacctggctgaccgccttcgtgctgaagaccttcgcccaggccagaagctacatcttcatcgacgaggcccacatcacccagagcctgacctggctgagccagatgcagaaggacaacggctgcttcagaagcagcggcagcctgctgaacaacgccatcaagggcggcgtggaggacgaggccaccctgagcgcctacgtgaccatcgccctgctggagatccccctgcccgtgaccaaccccatcgtgagaaacgccctgttctgcctggagagcgcctggaacgtggccaaggagggcacccacggcagccacgtgtacaccaaggccctgctggcctacgccttcagcctgctgggcaagcagaaccagaacagagagatcctgaacagcctggacaaggaggccgtgaaggaggacaacctggtgcactgggagagaccccagagacccaaggcccccgtgggccacctgtaccagacccaggcccccagcgccgaggtggagatgaccagctacgtgctgctggcctacctgaccgcccagcccgcccccaccagcggcgacctgaccagcgccaccaacatcgtgaagtggatcatgaagcagcagaacgcccagggcggcttcagcagcacccaggacaccgtggtggccctgcacgccctgagcagatacggcgccgccaccttcaccagaaccgagaagaccgcccaggtgaccgtgcaggacagccagaccttcagcaccaacttccaggtggacaacaacaacctgctgctgctgcagcagatcagcctgcccgagctgcccggcgagtacgtgatcaccgtgaccggcgagagatgcgtgtacctgcagaccagcatgaagtacaacatcctgcccgagaaggaggacagccccttcgccctgaaggtgcagaccgtgccccagacctgcgacggccacaaggcccacaccagcttccagatcagcctgaccatcagctacaccggcaacagacccgccagcaacatggtgatcgtggacgtgaagatggtgagcggcttcatccccctgaagcccaccgtgaagatgctggagagaagcagcagcgtgagcagaaccgaggtgagcaacaaccacgtgctgatctacgtggagcaggtgaccaaccagaccctgagcttcagcttcatggtgctgcaggacatccccgtgggcgacctgaagcccgccatcgtgaaggtgtacgactactacgagaccgacgagagcgtggtggccgagtacatcgccccctgcagcaccgacaccgagcacggcaacgtgtag

SEQ ID NO: 94391 - DNA, 660 bp, synthetic construct
  misc_feature 1..660: note = Description of Artificial Sequence: Synthetic coding sequence
  source 1..660: mol_type = other DNA
atggtgaagtacttcctgggccagagcgtgctgagaagcagctgggaccaggtgttcgccgccttctggcagagataccccaacccctacagcaagcacgtgctgaccgaggacatcgtgcacagagaggtgacccccgaccagaagctgctgagcagaagactgctgaccaagaccaacagaatgcccagatgggccgagagactgttccccgccaacgtggcccacagcgtgtacgtgctggaggacagcatcgtggacccccagaaccagaccatgaccaccttcacctggaacatcaaccacgccagactgatggtggtggaggagagatgcgtgtactgcgtgaacagcgacaacagcggctggaccgagatcagaagagaggcctgggtgagcagcagcctgttcggcgtgagcagagccgtgcaggagttcggcctggccagattcaagagcaacgtgaccaagaccatgaagggcttcgagtacatcctggccaagctgcagggcgaggcccccagcaagaccctggtggagaccgccaaggaggccaaggagaaggccaaggagaccgccctggccgccaccgagaaggccaaggacctggccagcaaggccgccaccaagaagcagcagcagcagcagcagttcgtgtag

SEQ ID NO: 94392 - DNA, 1770 bp, synthetic construct
  misc_feature 1..1770: note = Description of Artificial Sequence: Synthetic coding sequence
  source 1..1770: mol_type = other DNA
atgagcagcagctactggagcgagaccagcagcagcagctgcggcacccagcagctgcccgaggtgctgcagtgccagccccagcactaccactgctaccaccagagcagccaggcccagcagccccccgagaagaacgtggtgtacgagagagtgagaacctacagcggccccatgaacaaggtggtgcaggccctggaccccttcaacagcagagaggtgctgagccccctgaagaccaccagcagctaccagaacctggtgtggagcgaccacagccaggagctgcacagccccaccctgaagatcagcacctgcgcccccagcaccctgcacatcacccagaacaccgagcaggagctgcacagccccaccgtgaagctgaccacctacccccagaccaccatcagaaagtacgtggtgcagaaccccgagcaggagcccctgagccagttcctgagaggcagccacttcttccccggcaacaacgtgatctacgagaagaccatcagaaaggtggagaagctgaacaccgaccagggctgccacccccaggcccagtgccaccaccacatcatccagcagccccaggtgatccacagcgcccactggcagcagcccgacagcagccagcagatccaggccatcaccggcaacaaccccatcagcacccacatcggcaacgagctgtgccacagcggcagcagccagatctgcgagcaggtgatcatccaggacgacggccccgagaagctggaccccagatacttcggcgagctgctggccgacctgagcagaaagaacaccgacctgtaccactgcctgctggagcacctgcagagaatcggcggcagcaagcaggacttcgagagcaccgacgagagcgaggacatcgagagcctgatccccaagggcctgagcgagttcaccaagcagcagatcagatacatcctgcagatgagaggcatgagcgacaagagcctgagactggtgctgagcaccttcagcaacatcagagaggagctgggccacctgcagaacgacatgaccagcctggagaacgacaagatgagactggagaaggacctgagcttcaaggacacccagctgaaggagtacgaggagctgctggccagcgtgagagccaacaaccaccagcagcagcagggcctgcaggacagcagcagcaagtgccaggccctggaggagaacaacctgagcctgagacacaccctgagcgacatggagtacagactgaaggagctggagtactgcaagagaaacctggagcaggagaaccagaacctgagaatgcaggtgagcgagacctgcaccggccccatgctgcaggccaagatggacgagatcggcaaccactacaccgagatggtgaagaacctgagaatggagaaggacagagagatctgcagactgagaagccagctgaaccagtaccacaaggacgtgagcaagagagagggcagctgcagcgacttccagttcaagctgcacgagctgaccagcctgctggaggagaaggacagcctgatcaagagacagagcgaggagctgagcaagctgagacaggagatctacagcagccacaaccagcccagcaccggcggcagaaccaccatcaccaccaagaagtacagaacccagtaccccatcctgggcctgctgtacgacgactacgagtacatcccccccggcagcgagacccagaccatcgtgatcgagaagaccgaggacaagtacacctgcccctag

SEQ ID NO: 94393 - DNA, 921 bp, synthetic construct
  misc_feature 1..921: note = Description of Artificial Sequence: Synthetic coding sequence
  source 1..921: mol_type = other DNA
atgagcagcagctactggagcgagaccagcagcagcagctgcggcacccagcagctgcccgaggtgctgcagtgccagccccagcactaccactgctaccaccagagcagccaggcccagcagccccccgagaagaacgtggtgtacgagagagtgagaacctacagcggccccatgaacaaggtggtgcaggccctggaccccttcaacagcagagaggtgctgagccccctgaagaccaccagcagctaccagaacctggtgtggagcgaccacagccaggagctgcacagccccaccctgaagatcagcacctgcgcccccagcaccctgcacatcacccagaacaccgagcaggagctgcacagccccaccgtgaagctgaccacctacccccagaccaccatcagaaagtacgtggtgcagaaccccgagcaggagcccctgagccagttcctgagaggcagccacttcttccccggcaacaacgtgatctacgagaagaccatcagaaaggtggagaagctgaacaccgaccagggctgccacccccaggcccagtgccaccaccacatcatccagcagccccaggtgatccacagcgcccactggcagcagcccgacagcagccagcagatccaggccatcaccggcaacaaccccatcagcacccacatcggcaacgagctgtgccacagcggcagcagccagatctgcgagcaggtgatcatccaggacgacggccccgagaagctggaccccagatacttcggcgagctgctggccgacctgagcagaaagaacaccgacctgtaccactgcctgctggagcacctgcagagaatcggcagaaagcagagcctgagcagcacctacaccatcagacacggcatccagaccaagagaaccggcatcctgtag

SEQ ID NO: 94394 - DNA, 1788 bp, synthetic construct
  misc_feature 1..1788: note = Description of Artificial Sequence: Synthetic coding sequence
  source 1..1788: mol_type = other DNA
atgagcagcagctactggagcgagaccagcagcagcagctgcggcacccagcagctgcccgaggtgctgcagtgccagccccagcactaccactgctaccaccagagcagccaggcccagcagccccccgagaagaacgtggtgtacgagagagtgagaacctacagcggccccatgaacaaggtggtgcaggccctggaccccttcaacagcagagaggtgctgagccccctgaagaccaccagcagctaccagaacctggtgtggagcgaccacagccaggagctgcacagccccaccctgaagatcagcacctgcgcccccagcaccctgcacatcacccagaacaccgagcaggagctgcacagccccaccgtgaagctgaccacctacccccagaccaccatcagaaagtacgtggtgcagaaccccgagcaggagcccctgagccagttcctgagaggcagccacttcttccccggcaacaacgtgatctacgagaagaccatcagaaaggtggagaagctgaacaccgaccagggctgccacccccaggcccagtgccaccaccacatcatccagcagccccaggtgatccacagcgcccactggcagcagcccgacagcagccagcagatccaggccatcaccggcaacaaccccatcagcacccacatcggcaacgagctgtgccacagcggcagcagccagatctgcgagcaggtgatcatccaggacgacggccccgagaagctggaccccagatacttcggcgagctgctggccgacctgagcagaaagaacaccgacctgtaccactgcctgctggagcacctgcagagaatcggcggcagcaagcaggacttcgagagcaccgacgagagcgaggacatcgagagcctgatccccaagggcctgagcgagttcaccaagcagcagatcagatacatcctgcagatgagaggcatgagcgacaagagcctgagactggtgctgagcaccttcagcaacatcagagaggagctgggccacctgcagaacgacatgaccagcctggagaacgacaagatgagactggagaaggacctgagcttcaaggacacccagctgaaggagtacgaggagctgctggccagcgtgagagccaacaaccaccagcagcagcagggcctgcaggacagcagcagcaagtgccaggccctggaggagaacaacctgagcctgagacacaccctgagcgacatggagtacagactgaaggagctggagtactgcaagagaaacctggagcaggagaaccagaacctgagaatgcaggtgagcgagacctgcaccggccccatgctgcaggccaagatggacgagatcggcaaccactacaccgagatggtgaagaacctgagaatggagaaggacagagagatctgcagactgagaagccagctgaaccagtaccacaaggacgtgagcaagagagagggcagctgcagcgacttccagttcaagctgcacgagctgaccagcctgctggaggagaaggacagcctgatcaagagacagagcgaggagctgagcaagctgagacaggagatctacagcagccacaaccagcccagcaccggcggcagaaccaccatcaccaccaagaagtacagaacccagtaccccatcctgggcctgctgtacgacgactacgagtacatcccccccggcagcgagacccagaccatcgtgatcgagaagaccgaggacaagtacacctgcgtgagcagcctgggccacttctag

SEQ ID NO: 94395 - DNA, 921 bp, synthetic construct
  misc_feature 1..921: note = Description of Artificial Sequence: Synthetic coding sequence
  source 1..921: mol_type = other DNA
atggccagcagatggtggagatggagaagaggctgcagctggaagcccgccgccagaagccccggccccggcagccccggcagagccggccccctgggccccagcgccgccgccgaggtgagagcccaggtgcacagaagaaagggcctggacctgagccagatcccctacatcaacctggtgaagcacctgaccagcgcctgccccaacgtgtgcagaatcagcagattccaccacaccacccccgacagcaagacccacagcggcgagaagtacaccgaccccttcaagctgggctggagagacctgaagggcctgtacgaggacatcagaaaggagctgctgatcagcaccagcgagctgaaggagatgagcgagtactacttcgacggcaagggcaaggccttcagacccatcatcgtggccctgatggccagagcctgcaacatccaccacaacaacagcagacacgtgcaggccagccagagagccatcgccctgatcgccgagatgatccacaccgccagcctggtgcacgacgacgtgatcgacgacgccagcagcagaagaggcaagcacaccgtgaacaagatctggggcgagaagaaggccgtgctggccggcgacctgatcctgagcgccgccagcatcgccctggccagaatcggcaacaccaccgtgatcagcatcctgacccaggtgatcgaggacctggtgagaggcgagttcctgcagctgggcagcaaggagaacgagaacgagagattcgcccactacctggagaagaccttcaagaagaccgccagcctgatcgccaacagctgcaaggccgtgttccccagaaacgagtgctacgaccacgccaccgtgcagttcgcctggagatgcagacagagcagcaccgtgtgcaccaccgagtag

SEQ ID NO: 94396 - DNA, 1248 bp, synthetic construct
  misc_feature 1..1248: note = Description of Artificial Sequence: Synthetic coding sequence
  source 1..1248: mol_type = other DNA
atggccagcagatggtggagatggagaagaggctgcagctggaagcccgccgccagaagccccggccccggcagccccggcagagccggccccctgggccccagcgccgccgccgaggtgagagcccaggtgcacagaagaaagggcctggacctgagccagatcccctacatcaacctggtgaagcacctgaccagcgcctgccccaacgtgtgcagaatcagcagattccaccacaccacccccgacagcaagacccacagcggcgagaagtacaccgaccccttcaagctgggctggagagacctgaagggcctgtacgaggacatcagaaaggagctgctgatcagcaccagcgagctgaaggagatgagcgagtactacttcgacggcaagggcaaggccttcagacccatcatcgtggccctgatggccagagcctgcaacatccaccacaacaacagcagacacgtgcaggccagccagagagccatcgccctgatcgccgagatgatccacaccgccagcctggtgcacgacgacgtgatcgacgacgccagcagcagaagaggcaagcacaccgtgaacaagatctggggcgagaagaaggccgtgctggccggcgacctgatcctgagcgccgccagcatcgccctggccagaatcggcaacaccaccgtgatcagcatcctgacccaggtgatcgaggacctggtgagaggcgagttcctgcagctgggcagcaaggagaacgagaacgagagattcgcccactacctggagaagaccttcaagaagaccgccagcctgatcgccaacagctgcaaggccgtgagcgtgctgggctgccccgaccccgtggtgcacgagatcgcctaccagtacggcaagaacgtgggcatcgccttccagctgatcgacgacgtgctggacttcaccagctgcagcgaccagatgggcaagcccaccagcgccgacctgaagctgggcctggccaccggccccgtgctgttcgcctgccagcagttccccgagatgaacgccatgatcatgagaagattcagcctgcccggcgacgtggacagagccagacagtacgtgctgcagagcgacggcgtgcagcagaccacctacctggcccagcagtactgccacgaggccatcagagagatcagcaagctgagacccagccccgagagagacgccctgatccagctgagcgagatcgtgctgaccagagacaagtag

SEQ ID NO: 94397 - DNA, 1131 bp, synthetic construct
  misc_feature 1..1131: note = Description of Artificial Sequence: Synthetic coding sequence
  source 1..1131: mol_type = other DNA
atgcccgcccacgtgcacagaagaaagggcctggacctgagccagatcccctacatcaacctggtgaagcacctgaccagcgcctgccccaacgtgtgcagaatcagcagattccaccacaccacccccgacagcaagacccacagcggcgagaagtacaccgaccccttcaagctgggctggagagacctgaagggcctgtacgaggacatcagaaaggagctgctgatcagcaccagcgagctgaaggagatgagcgagtactacttcgacggcaagggcaaggccttcagacccatcatcgtggccctgatggccagagcctgcaacatccaccacaacaacagcagacacgtgcaggccagccagagagccatcgccctgatcgccgagatgatccacaccgccagcctggtgcacgacgacgtgatcgacgacgccagcagcagaagaggcaagcacaccgtgaacaagatctggggcgagaagaaggccgtgctggccggcgacctgatcctgagcgccgccagcatcgccctggccagaatcggcaacaccaccgtgatcagcatcctgacccaggtgatcgaggacctggtgagaggcgagttcctgcagctgggcagcaaggagaacgagaacgagagattcgcccactacctggagaagaccttcaagaagaccgccagcctgatcgccaacagctgcaaggccgtgagcgtgctgggctgccccgaccccgtggtgcacgagatcgcctaccagtacggcaagaacgtgggcatcgccttccagctgatcgacgacgtgctggacttcaccagctgcagcgaccagatgggcaagcccaccagcgccgacctgaagctgggcctggccaccggccccgtgctgttcgcctgccagcagttccccgagatgaacgccatgatcatgagaagattcagcctgcccggcgacgtggacagagccagacagtacgtgctgcagagcgacggcgtgcagcagaccacctacctggcccagcagtactgccacgaggccatcagagagatcagcaagctgagacccagccccgagagagacgccctgatccagctgagcgagatcgtgctgaccagagacaagtag

SEQ ID NO: 94398 - DNA, 723 bp, synthetic construct
  misc_feature 1..723: note = Description of Artificial Sequence: Synthetic coding sequence
  source 1..723: mol_type = other DNA
atgaacttcagacagctgctgctgcacctgcccagatacctgggcgccagcggcagccccagaagactgtggtggagccccagcctggacaccatcagcagcgtgggcagctggagaggcagaagcagcaagagccccgcccactggaaccaggtggtgagcgaggccgagaagatcgtgggctaccccaccagcttcatgagcctgagatgcctgctgagcgacgagctgagcaacatcgccatgcaggtgagaaagctggtgggcacccagcaccccctgctgaccaccgccagaggcctggtgcacgacagctggaacagcctgcagctgagaggcctggtggtgctgctgatcagcaaggccgccggccccagcagcgtgaacaccagctgccagaactacgacatggtgagcggcatctacagctgccagagaagcctggccgagatcaccgagctgatccacatcgccctgctggtgcacagaggcatcgtgaacctgaacgagctgcagagcagcgacggccccctgaaggacatgcagttcggcaacaagatcgccatcctgagcggcgacttcctgctggccaacgcctgcaacggcctggccctgctgcagaacaccaagagcttcagcttcaacggccccatcgccatctaccagatgggcgactgcgagagcgcctggatcctgagcaagcaccccagagccctgagctag

SEQ ID NO: 94399 - DNA, 270 bp, synthetic construct
  misc_feature 1..270: note = Description of Artificial Sequence: Synthetic coding sequence
  source 1..270: mol_type = other DNA
atggagctggccaagcacgacgccgaggtgcagaacatggccttccagtacggcaagcacatggccatgagccacaagatcaacagcgacgtgcagcccttcatcaaggagaagaccagcgacagcatgaccttcaacctgaacagcgcccccgtggtgctgcaccaggagttcctgggcagagacctgtggatcaagcagatcggcgagagcagcagcaccgaggtgcagctgagcaacttccagcagatgctgctgagcaccctgtag

SEQ ID NO: 94400 - DNA, 1200 bp, synthetic construct
  misc_feature 1..1200: note = Description of Artificial Sequence: Synthetic coding sequence
  source 1..1200: mol_type = other DNA
atgaacttcagacagctgctgctgcacctgcccagatacctgggcgccagcggcagccccagaagactgtggtggagccccagcctggacaccatcagcagcgtgggcagctggagaggcagaagcagcaagagccccgcccactggaaccaggtggtgagcgaggccgagaagatcgtgggctaccccaccagcttcatgagcctgagatgcctgctgagcgacgagctgagcaacatcgccatgcaggtgagaaagctggtgggcacccagcaccccctgctgaccaccgccagaggcctggtgcacgacagctggaacagcctgcagctgagaggcctggtggtgctgctgatcagcaaggccgccggccccagcagcgtgaacaccagctgccagaactacgacatggtgagcggcatctacagctgccagagaagcctggccgagatcaccgagctgatccacatcgccctgctggtgcacagaggcatcgtgaacctgaacgagctgcagagcagcgacggccccctgaaggacatgcagttcggcaacaagatcgccatcctgagcggcgacttcctgctggccaacgcctgcaacggcctggccctgctgcagaacaccaaggtggtggagctgctggccagcgccctgatggacctggtgcagggcgtgtaccacgagaacagcaccagcaaggagagctacatcaccgacgacatcggcatcagcacctggaaggagcagaccttcctgagccacggcgccctgctggccaagagctgccaggccgccatggagctggccaagcacgacgccgaggtgcagaacatggccttccagtacggcaagcacatggccatgagccacaagatcaacagcgacgtgcagcccttcatcaaggagaagaccagcgacagcatgaccttcaacctgaacagcgcccccgtggtgctgcaccaggagttcctgggcagagacctgtggatcaagcagatcggcgaggcccaggagaagggcagactggactacgccaagctgagagagagaatcaaggccggcaagggcgtgaccagcgccatcgacctgtgcagataccacggcaacaaggccctggaggccctggagagcttcccccccagcgaggccagaagcgccctggagaacatcgtgttcgccgtgaccagattcagctag

SEQ ID NO: 94401 - DNA, 243 bp, synthetic construct
  misc_feature 1..243: note = Description of Artificial Sequence: Synthetic coding sequence
  source 1..243: mol_type = other DNA
gtgcagaacatggccttccagtacggcaagcacatggccatgagccacaagatcaacagcgacgtgcagcccttcatcaaggagaagaccagcgacagcatgaccttcaacctgaacagcgcccccgtggtgctgcaccaggagttcctgggcagagacctgtggatcaagcagatcggcgagagcagcagcaccgaggtgcagctgagcaacttccagcagatgctgctgagcaccctgtag

SEQ ID NO: 94402 - DNA, 894 bp, synthetic construct
  misc_feature 1..894: note = Description of Artificial Sequence: Synthetic coding sequence
  source 1..894: mol_type = other DNA
atgaacttcagacagctgctgctgcacctgcccagatacctgggcgccagcggcagccccagaagactgtggtggagccccagcctggacaccatcagcagcgtgggcagctggagaggcagaagcagcaagagccccgcccactggaaccaggtggtgagcgaggccgagaagatcgtgggctaccccaccagcttcatgagcctgagatgcctgctgagcgacgagctgagcaacatcgccatgcaggtgagaaagctggtgggcacccagcaccccctgctgaccaccgccagaggcctggtgcacgacagctggaacagcctgcagctgagaggcctggtggtgctgctgatcagcaaggccgccggccccagcagcgtgaacaccagctgccagaactacgacatggtgagcggcatctacagctgccagagaagcctggccgagatcaccgagctgatccacatcgccctgctggtgcacagaggcatcgtgaacctgaacgagctgcagagcagcgacggccccctgaaggacatgcagttcggcaacaagatcgccatcctgagcggcgacttcctgctggccaacgcctgcaacggcctggccctgctgcagaacaccaaggtggtggagctgctggccagcgccctgatggacctggtgcagggcgtgtaccacgagaacagcaccagcaaggcccaggagaagggcagactggactacgccaagctgagagagagaatcaaggccggcaagggcgtgaccagcgccatcgacctgtgcagataccacggcaacaaggccctggaggccctggagagcttcccccccagcgaggccagaagcgccctggagaacatcgtgttcgccgtgaccagattcagctag

SEQ ID NO: 94403 - DNA, 882 bp, synthetic construct
  misc_feature 1..882: note = Description of Artificial Sequence: Synthetic coding sequence
  source 1..882: mol_type = other DNA
atgggcagagtggtggccgagctggtgagcagcctgctgggcctgtggctgctgctgtgcagctgcggctgccccgagggcgccgagctgagagccccccccgacaagatcgccatcatcggcgccggcatcggcggcaccagcgccgcctactacctgagacagaagttcggcaaggacgtgaagatcgacctgttcgagagagaggaggtgggcggcagactggccaccatgatggtgcagggccaggagtacgaggccggcggcagcgtgatccaccccctgaacctgcacatgaagagattcgtgaaggacctgggcctgagcgccgtgcaggccagcggcggcctgctgggcatctacaacggcgagaccctggtgttcgaggagagcaactggttcatcatcaacgtgatcaagctggtgtggagatacggcttccagagcctgagaatgcacatgtgggtggaggacgtgctggacaagttcatgagaatctacagataccagagccacgactacgccttcagcagcgtggagaagctgctgcacgccctgggcggcgacgacttcctgggcatgctgaacagaaccctgctggagaccctgcagaaggccggcttcagcgagaagttcctgaacgagatgatcgcccccgtgatgagagtgaactacggccagagcaccgacatcaacgccttcgtgggcgccgtgagcctgagctgcagcgacagcggcctgtgggccgtggagggcggcaacaagctggtgtgcagcggcctgctgcaggccagcaagagcaacctgatcagcggcagcgtgatgtacatcgaggagaagaccaagaccaagtacaccgtgctgggcctgtgccccctgtag

SEQ ID NO: 94404 - DNA, 1518 bp, synthetic construct
  misc_feature 1..1518: note = Description of Artificial Sequence: Synthetic coding sequence
  source 1..1518: mol_type = other DNA
atgggcagagtggtggccgagctggtgagcagcctgctgggcctgtggctgctgctgtgcagctgcggctgccccgagggcgccgagctgagagccccccccgacaagatcgccatcatcggcgccggcatcggcggcaccagcgccgcctactacctgagacagaagttcggcaaggacgtgaagatcgacctgttcgagagagaggaggtgggcggcagactggccaccatgatggtgcagggccaggagtacgaggccggcggcagcgtgatccaccccctgaacctgcacatgaagagattcgtgaaggacctgggcctgagcgccgtgcaggccagcggcggcctgctgggcatctacaacggcgagaccctggtgttcgaggagagcaactggttcatcatcaacgtgatcaagctggtgtggagatacggcttccagagcctgagaatgcacatgtgggtggaggacgtgctggacaagttcatgagaatctacagataccagagccacgactacgccttcagcagcgtggagaagctgctgcacgccctgggcggcgacgacttcctgggcatgctgaacagaaccctgctggagaccctgcagaaggccggcttcagcgagaagttcctgaacgagatgatcgcccccgtgatgagagtgaactacggccagagcaccgacatcaacgccttcgtgggcgccgtgagcctgagctgcagcgacagcggcctgtgggccgtggagggcggcaacaagctggtgtgcagcggcctgctgcaggccagcaagagcaacctgatcagcggcagcgtgatgtacatcgaggagaagaccaagaccaagtacaccggcaaccccaccaagatgtacgaggtggtgtaccagatcggcaccgagaccagaagcgacttctacgacatcgtgctggtggccacccccctgaacagaaagatgagcaacatcaccttcctgaacttcgacccccccatcgaggagttccaccagtactaccagcacatcgtgaccaccctggtgaagggcgagctgaacaccagcatcttcagcagcagacccatcgacaagttcggcctgaacaccgtgctgaccaccgacaacagcgacctgttcatcaacagcatcggcatcgtgcccagcgtgagagagaaggaggaccccgagcccagcaccgacggcacctacgtgtggaagatcttcagccaggagaccctgaccaaggcccagatcctgaagctgttcctgagctacgactacgccgtgaagaagccctggctggcctacccccactacaagccccccgagaagtgccccagcatcatcctgcacgacagactgtactacctgaacggcatcgagtgcgccgccagcgccatggagatgagcgccatcgccgcccacaacgccgccctgctggcctaccacagatggaacggccacaccgacatgatcgaccaggacggcctgtacgagaagctgaagaccgagctgtag

SEQ ID NO: 94405 - DNA, 1287 bp, synthetic construct
  misc_feature 1..1287: note = Description of Artificial Sequence: Synthetic coding sequence
  source 1..1287: mol_type = other DNA
atgatggtgcagggccaggagtacgaggccggcggcagcgtgatccaccccctgaacctgcacatgaagagattcgtgaaggacctgggcctgagcgccgtgcaggccagcggcggcctgctgggcatctacaacggcgagaccctggtgttcgaggagagcaactggttcatcatcaacgtgatcaagctggtgtggagatacggcttccagagcctgagaatgcacatgtgggtggaggacgtgctggacaagttcatgagaatctacagataccagagccacgactacgccttcagcagcgtggagaagctgctgcacgccctgggcggcgacgacttcctgggcatgctgaacagaaccctgctggagaccctgcagaaggccggcttcagcgagaagttcctgaacgagatgatcgcccccgtgatgagagtgaactacggccagagcaccgacatcaacgccttcgtgggcgccgtgagcctgagctgcagcgacagcggcctgtgggccgtggagggcggcaacaagctggtgtgcagcggcctgctgcaggccagcaagagcaacctgatcagcggcagcgtgatgtacatcgaggagaagaccaagaccaagtacaccggcaaccccaccaagatgtacgaggtggtgtaccagatcggcaccgagaccagaagcgacttctacgacatcgtgctggtggccacccccctgaacagaaagatgagcaacatcaccttcctgaacttcgacccccccatcgaggagttccaccagtactaccagcacatcgtgaccaccctggtgaagggcgagctgaacaccagcatcttcagcagcagacccatcgacaagttcggcctgaacaccgtgctgaccaccgacaacagcgacctgttcatcaacagcatcggcatcgtgcccagcgtgagagagaaggaggaccccgagcccagcaccgacggcacctacgtgtggaagatcttcagccaggagaccctgaccaaggcccagatcctgaagctgttcctgagctacgactacgccgtgaagaagccctggctggcctacccccactacaagccccccgagaagtgccccagcatcatcctgcacgacagactgtactacctgaacggcatcgagtgcgccgccagcgccatggagatgagcgccatcgccgcccacaacgccgccctgctggcctaccacagatggaacggccacaccgacatgatcgaccaggacggcctgtacgagaagctgaagaccgagctgtag

SEQ ID NO: 94406 - DNA, 1284 bp, synthetic construct
  misc_feature 1..1284: note = Description of Artificial Sequence: Synthetic coding sequence
  source 1..1284: mol_type = other DNA
atggtgcagggccaggagtacgaggccggcggcagcgtgatccaccccctgaacctgcacatgaagagattcgtgaaggacctgggcctgagcgccgtgcaggccagcggcggcctgctgggcatctacaacggcgagaccctggtgttcgaggagagcaactggttcatcatcaacgtgatcaagctggtgtggagatacggcttccagagcctgagaatgcacatgtgggtggaggacgtgctggacaagttcatgagaatctacagataccagagccacgactacgccttcagcagcgtggagaagctgctgcacgccctgggcggcgacgacttcctgggcatgctgaacagaaccctgctggagaccctgcagaaggccggcttcagcgagaagttcctgaacgagatgatcgcccccgtgatgagagtgaactacggccagagcaccgacatcaacgccttcgtgggcgccgtgagcctgagctgcagcgacagcggcctgtgggccgtggagggcggcaacaagctggtgtgcagcggcctgctgcaggccagcaagagcaacctgatcagcggcagcgtgatgtacatcgaggagaagaccaagaccaagtacaccggcaaccccaccaagatgtacgaggtggtgtaccagatcggcaccgagaccagaagcgacttctacgacatcgtgctggtggccacccccctgaacagaaagatgagcaacatcaccttcctgaacttcgacccccccatcgaggagttccaccagtactaccagcacatcgtgaccaccctggtgaagggcgagctgaacaccagcatcttcagcagcagacccatcgacaagttcggcctgaacaccgtgctgaccaccgacaacagcgacctgttcatcaacagcatcggcatcgtgcccagcgtgagagagaaggaggaccccgagcccagcaccgacggcacctacgtgtggaagatcttcagccaggagaccctgaccaaggcccagatcctgaagctgttcctgagctacgactacgccgtgaagaagccctggctggcctacccccactacaagccccccgagaagtgccccagcatcatcctgcacgacagactgtactacctgaacggcatcgagtgcgccgccagcgccatggagatgagcgccatcgccgcccacaacgccgccctgctggcctaccacagatggaacggccacaccgacatgatcgaccaggacggcctgtacgagaagctgaagaccgagctgtag

SEQ ID NO: 94407 - DNA, 1485 bp, synthetic construct
  misc_feature 1..1485: note = Description of Artificial Sequence: Synthetic coding sequence
  source 1..1485: mol_type = other DNA
atggccagagccgcccccctgctggccgccctgaccgccctgctggccgccgccgccgccggcggcgacgccccccccggcaagatcgccgtggtgggcgccggcatcggcggcagcgccgtggcccacttcctgcagcagcacttcggccccagagtgcagatcgacgtgtacgagaagggcaccgtgggcggcagactggccaccatcagcgtgaacaagcagcactacgagagcggcgccgccagcttccacagcctgagcctgcacatgcaggacttcgtgaagctgctgggcctgagacacagaagagaggtggtgggcagaagcgccatcttcggcggcgagcacttcatgctggaggagaccgactggtacctgctgaacctgttcagactgtggtggcactacggcatcagcttcctgagactgcagatgtgggtggaggaggtgatggagaagttcatgagaatctacaagtaccaggcccacggctacgccttcagcggcgtggaggagctgctgtacagcctgggcgagagcaccttcgtgaacatgacccagcacagcgtggccgagagcctgctgcaggtgggcgtgacccagagattcatcgacgacgtggtgagcgccgtgctgagagccagctacggccagagcgccgccatgcccgccttcgccggcgccatgagcctggccggcgcccagggcagcctgtggagcgtggagggcggcaacaagctggtgtgcagcggcctgctgaagctgaccaaggccaacgtgatccacgccaccgtgaccagcgtgaccctgcacagcaccgagggcaaggccctgtaccaggtggcctacgagaacgaggtgggcaacagcagcgacttctacgacatcgtggtgatcgccacccccctgcacctggacaacagcagcagcaacctgaccttcgccggcttccacccccccatcgacgacgtgcagggcagcttccagcccaccgtggtgagcctggtgcacggctacctgaacagcagctacttcggcttccccgaccccaagctgttccccttcgccaacatcctgaccaccgacttccccagcttcttctgcaccctggacaacatctgccccgtgaacatcagcgccagcttcagaagaaagcagccccaggaggccgccgtgtggagagtgcagagccccaagcccctgttcagaacccagctgaagaccctgttcagaagctactacagcgtgcagaccgccgagtggcaggcccaccccctgtacggcagcagacccaccctgcccagattcgccctgcacgaccagctgttctacctgaacgccctggagtgggccgccagcagcgtggaggtgatggccgtggccgccaagaacgtggccctgctggcctacaacagatggtaccaggacctggacaagatcgaccagaaggacctgatgcacaaggtgaagaccgagctgtag

SEQ ID NO: 94408 - DNA, 531 bp, synthetic construct
  misc_feature 1..531: note = Description of Artificial Sequence: Synthetic coding sequence
  source 1..531: mol_type = other DNA
atgaaggtgctgctgtgcgacctgctgctgctgagcctgttcagcagcgtgttcagcagctgccagagagactgcctgacctgccaggagaagctgcaccccgccctggacagcttcgacctggaggtgtgcatcctggagtgcgaggagaaggtgttccccagccccctgtggaccccctgcaccaaggtgatggccagaagcagctggcagctgagccccgccgcccccgagcacgtggccgccgccctgtaccagcccagagccagcgagatgcagcacctgagaagaatgcccagagtgagaagcctgttccaggagcaggaggagcccgagcccggcatggaggaggccggcgagatggagcagaagcagctgcagaagagattcggcggcttcaccggcgccagaaagagcgccagaaagctggccaaccagaagagattcagcgagttcatgagacagtacctggtgctgagcatgcagagcagccagagaagaagaaccctgcaccagaacggcaacgtgtag

SEQ ID NO: 94409 - DNA, 465 bp, synthetic construct
  misc_feature 1..465: note = Description of Artificial Sequence: Synthetic coding sequence
  source 1..465: mol_type = other DNA
atgaaggtgctgctgtgcgacctgctgctgctgagcctgttcagcagcgtgttcagcagctgccagagagactgcctgacctgccaggagaagctgcaccccgccctggacagcttcgacctggaggtgtgcatcctggagtgcgaggagaaggtgttccccagccccctgtggaccccctgcaccaaggtgatggccagaagcagctggcagctgagccccgccgcccccgagcacgtggccgccgccctgtaccagcccagagccagcgagatgcagcacctgagaagaatgcccagagtgagaagcctgttccaggagcaggaggagcccgagcccggcatggaggaggccggcgagatggagcagaagcagctgcagaagagattcggcggcttcaccggcgccagaaagagcgccagaaagctggccaaccagaagagattcagcgagttcatgagatag

SEQ ID NO: 94410 - DNA, 1230 bp, synthetic construct
  misc_feature 1..1230: note = Description of Artificial Sequence: Synthetic coding sequence
  source 1..1230: mol_type = other DNA
atgaccgagctgcccgcccccctgagctacttccagaacgcccagatgagcgaggacaaccacctgagcaacaccgtgagaagccagaacgacaacagagagagacaggagcacaacgacagaagaagcctgggccaccccgagcccctgagcaacggcagaccccagggcaacagcagacaggtggtggagcaggacgaggaggaggacgaggagctgaccctgaagtacggcgccaagcacgtgatcatgctgttcgtgcccgtgaccctgtgcatggtggtggtggtggccaccatcaagagcgtgagcttctacaccagaaaggacggccagctgatctacacccccttcaccgaggacaccgagaccgtgggccagagagccctgcacagcatcctgaacgccgccatcatgatcagcgtgatcgtggtgatgaccatcctgctggtggtgctgtacaagtacagatgctacaaggtgatccacgcctggctgatcatcagcagcctgctgctgctgttcttcttcagcttcatctacctgggcgaggtgttcaagacctacaacgtggccgtggactacatcaccgtggccctgctgatctggaacttcggcgtggtgggcatgatcagcatccactggaagggccccctgagactgcagcaggcctacctgatcatgatcagcgccctgatggccctggtgttcatcaagtacctgcccgagtggaccgcctggctgatcctggccgtgatcagcgtgtacgacctggtggccgtgctgtgccccaagggccccctgagaatgctggtggagaccgcccaggagagaaacgagaccctgttccccgccctgatctacagcagcaccatggtgtggctggtgaacatggccgagggcgaccccgaggcccagagaagagtgagcaagaacagcaagtacaacgccgagagaggcgtgaagctgggcctgggcgacttcatcttctacagcgtgctggtgggcaaggccagcgccaccgccagcggcgactggaacaccaccatcgcctgcttcgtggccatcctgatcggcctgtgcctgaccctgctgctgctggccatcttcaagaaggccctgcccgccctgcccatcagcatcaccttcggcctggtgttctacttcgccaccgactacctggtgcagcccttcatggaccagctggccttccaccagttctacatctag

SEQ ID NO: 94411 - DNA, 1404 bp, synthetic construct
  misc_feature 1..1404: note = Description of Artificial Sequence: Synthetic coding sequence
  source 1..1404: mol_type = other DNA
atgaccgagctgcccgcccccctgagctacttccagaacgcccagatgagcgaggacaaccacctgagcaacaccgtgagaagccagaacgacaacagagagagacaggagcacaacgacagaagaagcctgggccaccccgagcccctgagcaacggcagaccccagggcaacagcagacaggtggtggagcaggacgaggaggaggacgaggagctgaccctgaagtacggcgccaagcacgtgatcatgctgttcgtgcccgtgaccctgtgcatggtggtggtggtggccaccatcaagagcgtgagcttctacaccagaaaggacggccagctgatctacacccccttcaccgaggacaccgagaccgtgggccagagagccctgcacagcatcctgaacgccgccatcatgatcagcgtgatcgtggtgatgaccatcctgctggtggtgctgtacaagtacagatgctacaaggtgatccacgcctggctgatcatcagcagcctgctgctgctgttcttcttcagcttcatctacctgggcgaggtgttcaagacctacaacgtggccgtggactacatcaccgtggccctgctgatctggaacttcggcgtggtgggcatgatcagcatccactggaagggccccctgagactgcagcaggcctacctgatcatgatcagcgccctgatggccctggtgttcatcaagtacctgcccgagtggaccgcctggctgatcctggccgtgatcagcgtgtacgacctggtggccgtgctgtgccccaagggccccctgagaatgctggtggagaccgcccaggagagaaacgagaccctgttccccgccctgatctacagcagcaccatggtgtggctggtgaacatggccgagggcgaccccgaggcccagagaagagtgagcaagaacagcaagtacaacgccgagagcaccgagagagagagccaggacaccgtggccgagaacgacgacggcggcttcagcgaggagtgggaggcccagagagacagccacctgggcccccacagaagcacccccgagagcagagccgccgtgcaggagctgagcagcagcatcctggccggcgaggaccccgaggagagaggcgtgaagctgggcctgggcgacttcatcttctacagcgtgctggtgggcaaggccagcgccaccgccagcggcgactggaacaccaccatcgcctgcttcgtggccatcctgatcggcctgtgcctgaccctgctgctgctggccatcttcaagaaggccctgcccgccctgcccatcagcatcaccttcggcctggtgttctacttcgccaccgactacctggtgcagcccttcatggaccagctggccttccaccagttctacatctag

SEQ ID NO: 94412 - DNA, 1137 bp, synthetic construct
  misc_feature 1..1137: note = Description of Artificial Sequence: Synthetic coding sequence
  source 1..1137: mol_type = other DNA
atgaccgagctgcccgcccccctgagctacttccagaacgcccagatgagcgaggacaaccacctgagcaacaccgtgagaagccagaacgacaacagagagagacaggagcacaacgacagaagaagcctgggccaccccgagcccctgagcaacggcagaccccagggcaacagcagacaggtggtggagcaggacgaggaggaggacgaggagctgaccctgaagtacggcgccaagcacgtgatcatgctgttcgtgcccgtgaccctgtgcatggtggtggtggtggccaccatcaagagcgtgagcttctacaccagaaaggacggccagctgatctacacccccttcaccgaggacaccgagaccgtgggccagagagccctgcacagcatcctgaacgccgccatcatgatcagcgtgatcgtggtgatgaccatcctgctggtggtgctgtacaagtacagatgctacaaggtgatccacgcctggctgatcatcagcagcctgctgctgctgttcttcttcagcttcatctacctgggcgaggtgttcaagacctacaacgtggccgtggactacatcaccgtggccctgctgatctggaacttcggcgtggtgggcatgatcagcatccactggaagggccccctgagactgcagcaggcctacctgatcatgatcagcgccctgatggccctggtgttcatcaagtacctgcccgagtggaccgcctggctgatcctggccgtgatcagcgtgtacgacctggtggccgtgctgtgccccaagggccccctgagaatgctggtggagaccgcccaggagagaaacgagaccctgttccccgccctgatctacagcagcaccatggtgtggctggtgaacatggccgagggcgaccccgaggcccagagaagagtgagcaagaacagcaagtacaacgccgagagagcctgcctgccccccgccgccatcaacctgctgagcatcgcccccatggcccccagactgttcatgcccaagggcgcctgcagacccaccgcccagaagggcagccacaagaccctgctgcagagaatgatgatggccggcagcgtgagaaacggcaagcccagaggcaccgtgatctag

SEQ ID NO: 94413 - DNA, 1392 bp, synthetic construct
  misc_feature 1..1392: note = Description of Artificial Sequence: Synthetic coding sequence
  source 1..1392: mol_type = other DNA
atgaccgagctgcccgcccccctgagctacttccagaacgcccagatgagcgaggacaaccacctgagcaacaccaacgacaacagagagagacaggagcacaacgacagaagaagcctgggccaccccgagcccctgagcaacggcagaccccagggcaacagcagacaggtggtggagcaggacgaggaggaggacgaggagctgaccctgaagtacggcgccaagcacgtgatcatgctgttcgtgcccgtgaccctgtgcatggtggtggtggtggccaccatcaagagcgtgagcttctacaccagaaaggacggccagctgatctacacccccttcaccgaggacaccgagaccgtgggccagagagccctgcacagcatcctgaacgccgccatcatgatcagcgtgatcgtggtgatgaccatcctgctggtggtgctgtacaagtacagatgctacaaggtgatccacgcctggctgatcatcagcagcctgctgctgctgttcttcttcagcttcatctacctgggcgaggtgttcaagacctacaacgtggccgtggactacatcaccgtggccctgctgatctggaacttcggcgtggtgggcatgatcagcatccactggaagggccccctgagactgcagcaggcctacctgatcatgatcagcgccctgatggccctggtgttcatcaagtacctgcccgagtggaccgcctggctgatcctggccgtgatcagcgtgtacgacctggtggccgtgctgtgccccaagggccccctgagaatgctggtggagaccgcccaggagagaaacgagaccctgttccccgccctgatctacagcagcaccatggtgtggctggtgaacatggccgagggcgaccccgaggcccagagaagagtgagcaagaacagcaagtacaacgccgagagcaccgagagagagagccaggacaccgtggccgagaacgacgacggcggcttcagcgaggagtgggaggcccagagagacagccacctgggcccccacagaagcacccccgagagcagagccgccgtgcaggagctgagcagcagcatcctggccggcgaggaccccgaggagagaggcgtgaagctgggcctgggcgacttcatcttctacagcgtgctggtgggcaaggccagcgccaccgccagcggcgactggaacaccaccatcgcctgcttcgtggccatcctgatcggcctgtgcctgaccctgctgctgctggccatcttcaagaaggccctgcccgccctgcccatcagcatcaccttcggcctggtgttctacttcgccaccgactacctggtgcagcccttcatggaccagctggccttccaccagttctacatctag

SEQ ID NO: 94414 - DNA, 555 bp, synthetic construct
  misc_feature 1..555: note = Description of Artificial Sequence: Synthetic coding sequence
  source 1..555: mol_type = other DNA
atgaccgagctgcccgcccccctgagctacttccagaacgcccagatgagcgaggacaaccacctgagcaacaccgtgagaagccagaacgacaacagagagagacaggagcacaacgacagaagaagcctgggccaccccgagcccctgagcaacggcagaccccagggcaacagcagacaggtggtggagcaggacgaggaggaggacgaggagctgaccctgaagtacggcgccaagcacgtgatcatgctgttcgtgcccgtgaccctgtgcatggtggtggtggtggccaccatcaagagcgtgagcttctacaccagaaaggacggccagctgatctacacccccttcaccgaggacaccgagaccgtgggccagagagccctgcacagcatcctgaacgccgccatcatgatcagcgtgatcgtggtgatgaccatcctgctggtggtgctgtacaagtacagatgctacaaggtgagcatgagacacagaagcctgctgagcaccctgttcttcctgtggctgggcatcctggtgaccgtgacctag

SEQ ID NO: 94415 - DNA, 1392 bp, synthetic construct; identical to SEQ ID NO: 94413
  misc_feature 1..1392: note = Description of Artificial Sequence: Synthetic coding sequence
  source 1..1392: mol_type = other DNA

SEQ ID NO: 94416 - DNA, 279 bp, synthetic construct
  misc_feature 1..279: note = Description of Artificial Sequence: Synthetic coding sequence
  source 1..279: mol_type = other DNA
atgaccgagctgcccgcccccctgagctacttccagaacgcccagatgagcgaggacaaccacctgagcaacaccaacgacaacagagagagacaggagcacaacgacagaagaagcctgggccaccccgagcccctgagcaacggcagaccccagggcaacagcagacaggtggtggagcaggacgaggaggaggacgaggagctgaccctgaagtacggcgccaagcacgtgatcatgctgttcgtgcccgtgaccctgtgcatggtggtggtgtag

SEQ ID NO: 94417 - DNA, 444 bp, synthetic construct
  misc_feature 1..444: note = Description of Artificial Sequence: Synthetic coding sequence
  source 1..444: mol_type = other DNA
atgaccgagctgcccgcccccctgagctacttccagaacgcccagatgagcgaggacaaccacctgagcaacaccaacgacaacagagagagacaggagcacaacgacagaagaagcctgggccaccccgagcccctgagcaacggcagaccccagggcaacagcagacaggtggtggagcaggacgaggaggaggacgaggagctgaccctgaagtacggcgccaagcacgtgatcatgctgttcgtgcccgtgaccctgtgcatggtggtggtggtggccaccatcaagagcgtgagcttctacaccagaaaggacggccagctgatctacacccccttcaccgaggacaccgagaccgtgggccagagagccctgcacagcatcctgaacgccgccatcatgatcagcgtgatcgtggtgatgaccatcctgctggtgtag

SEQ ID NO: 94418 - DNA, 330 bp, synthetic construct
  misc_feature 1..330: note = Description of Artificial Sequence: Synthetic coding sequence
  source 1..330: mol_type = other DNA
atgaccgagctgcccgcccccctgagctacttccagaacgcccagatgagcgaggacaaccacctgagcaacaccgtgagaagccagaacgacaacagagagagacaggagcacaacgacagaagaagcctgggccaccccgagcccctgagcaacggcagaccccagggcaacagcagacaggtggtggagcaggacgaggaggaggacgaggagctgaccctgaagtacggcgccaagcacgtgatcatgctgttcgtgcccgtgaccctgtgcatggtggtggtggtggccaccatcaagagcgtgagcttctacaccagaaagtag

SEQ ID NO: 94419 - DNA, 468 bp, synthetic construct
  misc_feature 1..468: note = Description of Artificial Sequence: Synthetic coding sequence
  source 1..468: mol_type = other DNA
atgaccgagctgcccgcccccctgagctacttccagaacgcccagatgagcgaggacaaccacctgagcaacaccgtgagaagccagaacgacaacagagagagacaggagcacaacgacagaagaagcctgggccaccccgagcccctgagcaacggcagaccccagggcaacagcagacaggtggtggagcaggacgaggaggaggacgaggagctgaccctgaagtacggcgccaagcacgtgatcatgctgttcgtgcccgtgaccctgtgcatggtggtggtggtggccaccatcaagagcgtgagcttctacaccagaaaggacggccagctgatctacacccccttcaccgaggacaccgagaccgtgggccagagagccctgcacagcatcctgaacgccgccatcatgatcagcgtgatcgtggtgatgaccatcctgctggtggtgctgtacaagtag

SEQ ID NO: 94420 - DNA, 177 bp, synthetic construct
  misc_feature 1..177: note = Description of Artificial Sequence: Synthetic coding sequence
  source 1..177: mol_type = other DNA
atgaccgagctgcccgcccccctgagctacttccagaacgcccagatgagcgaggacaaccacctgagcaacaccaacgacaacagagagagacaggagcacaacgacagaagaagcctgggccaccccgagcccctgagcaacggcagaccccagggcaacagcagacaggtgtag

SEQ ID NO: 94421 - DNA, 279 bp, synthetic construct; identical to SEQ ID NO: 94416
  misc_feature 1..279: note = Description of Artificial Sequence: Synthetic coding sequence
  source 1..279: mol_type = other DNA

SEQ ID NO: 94422 - DNA, 192 bp, synthetic construct
  misc_feature 1..192: note = Description of Artificial Sequence: Synthetic coding sequence
  source 1..192: mol_type = other DNA
atgaccgagctgcccgcccccctgagctacttccagaacgcccagatgagcgaggacaaccacctgagcaacaccaacgacaacagagagagacaggagcacaacgacagaagaagcctgggccaccccgagcccctgagcaacggcagaccccagggcaacagcagacaggtggtggagcaggacgagtag

SEQ ID NO: 94423 - DNA, 276 bp, synthetic construct
  misc_feature 1..276: note = Description of Artificial Sequence: Synthetic coding sequence
  source 1..276: mol_type = other DNA
atgaccgagctgcccgcccccctgagctacttccagaacgcccagatgagcgaggacaaccacctgagcaacaccaacgacaacagagagagacaggagcacaacgacagaagaagcctgggccaccccgagcccctgagcaacggcagaccccagggcaacagcagacaggtggtggagcaggacgaggaggaggacgaggagctgaccctgaagtacggcgccaagcacgtgatcatgctgttcgtgcccgtgaccctgtgcatggtggtgtag

SEQ ID NO: 94424 - DNA, 189 bp, synthetic construct
  misc_feature 1..189: note = Description of Artificial Sequence: Synthetic coding sequence
  source 1..189: mol_type = other DNA
atgaccgagctgcccgcccccctgagctacttccagaacgcccagatgagcgaggacaaccacctgagcaacaccaacgacaacagagagagacaggagcacaacgacagaagaagcctgggccaccccgagcccctgagcaacggcagaccccagggcaacagcagacaggtggtggagcaggactag

SEQ ID NO: 94425 - DNA, 300 bp, synthetic construct
  misc_feature 1..300: note = Description of Artificial Sequence: Synthetic coding sequence
  source 1..300: mol_type = other DNA
atgaccgagctgcccgcccccctgagctacttccagaacgcccagatgagcgaggacaaccacctgagcaacaccgtgagaagccagaacgacaacagagagagacaggagcacaacgacagaagaagcctgggccaccccgagcccctgagcaacggcagaccccagggcaacagcagacaggtggtggagcaggacgaggaggaggacgaggagctgaccctgaagtacggcgccaagcacgtgatcatgctgttcgtgcccgtgaccctgtgcatggtggtggtggtggccacctag

SEQ ID NO: 94426 - DNA, 408 bp, synthetic construct
  misc_feature 1..408: note = Description of Artificial Sequence: Synthetic coding sequence
  source 1..408: mol_type = other DNA
atgaccgagctgcccgcccccctgagctacttccagaacgcccagatgagcgaggacaaccacctgagcaacaccaacgacaacagagagagacaggagcacaacgacagaagaagcctgggccaccccgagcccctgagcaacggcagaccccagggcaacagcagacaggtggtggagcaggacgaggaggaggacgaggagctgaccctgaagtacggcgccaagcacgtgatcatgctgttcgtgcccgtgaccctgtgcatggtggtggtggtggccaccatcaagagcgtgagcttctacaccagaaaggacggccagctgatctacacccccttcaccgaggacaccgagaccgtgggccagagagccctgcacagcatcctgaacgccgccatcatgtag

SEQ ID NO: 94427 - DNA, 330 bp, synthetic construct
  misc_feature 1..330: note = Description of Artificial Sequence: Synthetic coding sequence
  source 1..330: mol_type = other DNA
atgaccgagctgcccgcccccctgagctacttccagaacgcccagatgagcgaggacaaccacctgagcaacaccaacgacaacagagagagacaggagcacaacgacagaagaagcctgggccaccccgagcccctgagcaacggcagaccccagggcaacagcagacaggtggtggagcaggacgaggaggaggacgaggagctgaccctgaagtacggcgccaagcacgtgatcatgctgttcgtgcccgtgaccctgtgcatggtggtggtggtggccaccatcaagagcgtgagcttctacaccagaaaggacggccagctgtag

SEQ ID NO: 94428 - DNA, 1248 bp, synthetic construct
  misc_feature 1..1248: note = Description of Artificial Sequence: Synthetic coding sequence
  source 1..1248: mol_type = other DNA
atgctgaccttcatggccagcgacagcgaggaggaggtgtgcgacgagagaaccagcctgatgagcgccgagagccccacccccagaagctgccaggagggcagacagggccccgaggacggcgagaacaccgcccagtggagaagccaggagaacgaggaggacggcgaggaggaccccgacagatacgtgtgcagcggcgtgcccggcagaccccccggcctggaggaggagctgaccctgaagtacggcgccaagcacgtgatcatgctgttcgtgcccgtgaccctgtgcatgatcgtggtggtggccaccatcaagagcgtgagattctacaccgagaagaacggccagctgatctacacccccttcaccgaggacacccccagcgtgggccagagactgctgaacagcgtgctgaacaccctgatcatgatcagcgtgatcgtggtgatgaccatcttcctggtggtgctgtacaagtacagatgctacaagttcatccacggctggctgatcatgagcagcctgatgctgctgttcctgttcacctacatctacctgggcgaggtgctgaagacctacaacgtggccatggactaccccaccctgctgctgaccgtgtggaacttcggcgccgtgggcatggtgtgcatccactggaagggccccctggtgctgcagcaggcctacctgatcatgatcagcgccctgatggccctggtgttcatcaagtacctgcccgagtggagcgcctgggtgatcctgggcgccatcagcgtgtacgccgccatggtgtggaccgtgggcatggccaagctggaccccagcagccagggcgccctgcagctgccctacgaccccgagatggaggaggacagctacgacagcttcggcgagcccagctaccccgaggtgttcgagccccccctgaccggctaccccggcgaggagctggaggaggaggaggagagaggcgtgaagctgggcctgggcgacttcatcttctacagcgtgctggtgggcaaggccgccgccaccggcagcggcgactggaacaccaccctggcctgcttcgtggccatcctgatcggcctgtgcctgaccctgctgctgctggccgtgttcaagaaggccctgcccgccctgcccatcagcatcaccttcggcctgatcttctacttcagcaccgacaacctggtgagacccttcatggacaccctggccagccaccagctgtacatctag

SEQ ID NO: 94429 - DNA, 1446 bp, synthetic construct
  misc_feature 1..1446: note = Description of Artificial Sequence: Synthetic coding sequence
  source 1..1446: mol_type = other DNA
atgctggccggcaccgtgagattcgccagacactgcctgaagttcttccccgcccagaagcccgcctgcgtggacttcggcgccagcagaggcagagccatgctgaccttcatggccagcgacagcgaggaggaggtgtgcgacgagagaaccagcctgatgagcgccgagagccccacccccagaagctgccaggagggcagacagggccccgaggacggcgagaacaccgcccagtggagaagccaggagaacgaggaggacggcgaggaggaccccgacagatacgtgtgcagcggcgtgcccggcagaccccccggcctggaggaggagctgaccctgaagtacggcgccaagcacgtgatcatgctgttcgtgcccgtgaccctgtgcatgatcgtggtggtggccaccatcaagagcgtgagattctacaccgagaagaacggccagctgatctacacccccttcaccgaggacacccccagcgtgggccagagactgctgaacagcgtgctgaacaccctgatcatgatcagcgtgatcgtggtgatgaccatcttcctggtggtgctgtacaagtacagatgctacaagttcatccacggctggctgatcatgagcagcctgatgctgctgttcctgttcacctacatctacctgggcgaggtgctgaagacctacaacgtggccatggactaccccaccctgctgctgaccgtgtggaacttcggcgccgtgggcatggtgtgcatccactggaagggccccctggtgctgcagcaggcctacctgatcatgatcagcgccctgatggccctggtgttcatcaagtacctgcccgagtggagcgcctgggtgatcctgggcgccatcagcgtgtacgacctggtggccgtgctgtgccccaagggccccctgagaatgctggtggagaccgcccaggagagaaacgagcccatcttccccgccctgatctacagcagcgccatggtgtggaccgtgggcatggccaagctggaccccagcagccagggcgccctgcagctgccctacgaccccgagatggaggaggacagctacgacagcttcggcgagcccagctaccccgaggtgttcgagccccccctgaccggctaccccggcgaggagctggaggaggaggaggagagaggcgtgaagctgggcctgggcgacttcatcttctacagcgtgctggtgggcaaggccgccgccaccggcagcggcgactggaacaccaccctggcctgcttcgtggccatcctgatcggcctgtgcctgaccctgctgctgctggccgtgttcaagaaggccctgcccgccctgcccatcagcatcaccttcggcctgatcttctacttcagcaccgacaacctggtgagacccttcatggacaccctggccagccaccagctgtacatctag

SEQ ID NO: 94430 - DNA, 1347 bp, synthetic construct
  misc_feature 1..1347: note = Description of Artificial Sequence: Synthetic coding sequence
  source 1..1347: mol_type = other DNA
atgctgaccttcatggccagcgacagcgaggaggaggtgtgcgacgagagaaccagcctgatgagcgccgagagccccacccccagaagctgccaggagggcagacagggccccgaggacggcgagaacaccgcccagtggagaagccaggagaacgaggaggacggcgaggaggaccccgacagatacgtgtgcagcggcgtgcccggcagaccccccggcctggaggaggagctgaccctgaagtacggcgccaagcacgtgatcatgctgttcgtgcccgtgaccctgtgcatgatcgtggtggtggccaccatcaagagcgtgagattctacaccgagaagaacggccagctgatctacacccccttcaccgaggacacccccagcgtgggccagagactgctgaacagcgtgctgaacaccctgatcatgatcagcgtgatcgtggtgatgaccatcttcctggtggtgctgtacaagtacagatgctacaagttcatccacggctggctgatcatgagcagcctgatgctgctgttcctgttcacctacatctacctgggcgaggtgctgaagacctacaacgtggccatggactaccccaccctgctgctgaccgtgtggaacttcggcgccgtgggcatggtgtgcatccactggaagggccccctggtgctgcagcaggcctacctgatcatgatcagcgccctgatggccctggtgttcatcaagtacctgcccgagtggagcgcctgggtgatcctgggcgccatcagcgtgtacgacctggtggccgtgctgtgccccaagggccccctgagaatgctggtggagaccgcccaggagagaaacgagcccatcttccccgccctgatctacagcagcgccatggtgtggaccgtgggcatggccaagctggaccccagcagccagggcgccctgcagctgccctacgaccccgagatggaggaggacagctacgacagcttcggcgagcccagctaccccgaggtgttcgagccccccctgaccggctaccccggcgaggagctggaggaggaggaggagagaggcgtgaagctgggcctgggcgacttcatcttctacagcgtgctggtgggcaaggccgccgccaccggcagcggcgactggaacaccaccctggcctgcttcgtggccatcctgatcggcctgtgcctgaccctgctgctgctggccgtgttcaagaaggccctgcccgccctgcccatcagcatcaccttcggcctgatcttctacttcagcaccgacaacctggtgagacccttcatggacaccctggccagccaccagctgtacatctag

SEQ ID NO: 94431 - DNA, 1446 bp, synthetic construct; identical to SEQ ID NO: 94429
  misc_feature 1..1446: note = Description of Artificial Sequence: Synthetic coding sequence
  source 1..1446: mol_type = other DNA

SEQ ID NO: 94432 - DNA, 1344 bp, synthetic construct
  misc_feature 1..1344: note = Description of Artificial Sequence: Synthetic coding sequence
  source 1..1344: mol_type = other DNA
atgctgaccttcatggccagcgacagcgaggaggaggtgtgcgacgagagaaccagcctgatgagcgccgagagccccacccccagaagctgccaggagggcagacagggccccgaggacggcgagaacaccgcccagtggagaagccaggagaacgaggaggacggcgaggaggaccccgacagatacgtgtgcagcggcgtgcccggcagaccccccggcctggaggaggagctgaccctgaagtacggcgccaagcacgtgatcatgctgttcgtgcccgtgaccctgtgcatgatcgtggtggtggccaccatcaagagcgtgagattctacaccgagaagaacggccagctgatctacacccccttcaccgaggacacccccagcgtgggccagagactgctgaacagcgtgctgaacaccctgatcatgatcagcgtgatcgtggtgatgaccatcttcctggtggtgctgtacaagtacagatgctacaagttcatccacggctggctgatcatgagcagcctgatgctgctgttcctgttcacctacatctacctgggcgaggtgctgaagacctacaacgtggccatggactaccccaccctgctgctgaccgtgtggaacttcggcgccgtgggcatggtgtgcatccactggaagggccccctggtgctgcagcaggcctacctgatcatgatcagcgccctgatggccctggtgttcatcaagtacctgcccgagtggagcgcctgggtgatcctgggcgccatcagcgtgtacgacctggtggccgtgctgtgccccaagggccccctgagaatgctggtggagaccgcccaggagagaaacgagcccatcttccccgccctgatctacagcagcgccatggtgtggaccgtgggcatggccaagctggaccccagcagccagggcgccctgcagctgccctacgaccccgagatggaggacagctacgacagcttcggcgagcccagctaccccgaggtgttcgagccccccctgaccggctaccccggcgaggagctggaggaggaggaggagagaggcgtgaagctgggcctgggcgacttcatcttctacagcgtgctggtgggcaaggccgccgccaccggcagcggcgactggaacaccaccctggcctgcttcgtggccatcctgatcggcctgtgcctgaccctgctgctgctggccgtgttcaagaaggccctgcccgccctgcccatcagcatcaccttcggcctgatcttctacttcagcaccgacaacctggtgagacccttcatggacaccctggccagccaccagctgtacatctag

SEQ ID NO: 94433 - DNA, 390 bp, synthetic construct
  misc_feature 1..390: note = Description of Artificial Sequence: Synthetic coding sequence
  source 1..390: mol_type = other DNA
atgctgaccttcatggccagcgacagcgaggaggaggtgtgcgacgagagaaccagcctgatgagcgccgagagccccacccccagaagctgccaggagggcagacagggccccgaggacggcgagaacaccgcccagtggagaagccaggagaacgaggaggacggcgaggaggaccccgacagatacgtgtgcagcggcgtgcccggcagaccccccggcctggaggaggagctgaccctgaagtacggcgccaagcacgtgatcatgctgttcgtgcccgtgaccctgtgcatgatcgtggtggtggccaccatcaagagcgtgagattctacaccgagaagaacggccagctgatctacacccccttcaccgaggacaccccctag

SEQ ID NO: 94434 - DNA, 66 bp, synthetic construct
  misc_feature 1..66: note = Description of Artificial Sequence: Synthetic coding sequence
  source 1..66: mol_type = other DNA
atgctgaccttcatggccagcgacagcgaggaggaggtgtgcgacgagagaaccagcctgatgtag

SEQ ID NO: 94435 - DNA, 990 bp, synthetic construct
  misc_feature 1..990: note = Description of Artificial Sequence: Synthetic coding sequence
  source 1..990: mol_type = other DNA
atggcctggagaggctgggcccagagaggctggggctgcggccaggcctggggcgccagcgtgggcggcagaagctgcgaggagctgaccgccgtgctgacccccccccagctgctgggcagaagattcaacttcttcatccagcagaagtgcggcttcagaaaggcccccagaaaggtggagcccagaagaagcgaccccggcaccagcggcgaggcctacaagagaagcgccctgatcccccccgtggaggagaccgtgttctaccccagcccctaccccatcagaagcctgatcaagcccctgttcttcaccgtgggcttcaccggctgcgccttcggcagcgccgccatctggcagtacgagagcctgaagagcagagtgcagagctacttcgacggcatcaaggccgactggctggacagcatcagaccccagaaggagggcgacttcagaaaggagatcaacaagtggtggaacaacctgagcgacggccagagaaccgtgaccggcatcatcgccgccaacgtgctggtgttctgcctgtggagagtgcccagcctgcagagaaccatgatcagatacttcaccagcaaccccgccagcagcgtgatcagcaacttcgtgagctacgtgggcaaggtggccaccggcagatacggccccagcctgggcgccagcggcgccatcatgaccgtgctggccgccgtgtgcaccaagatccccgagggcagactggccatcatcttcctgcccatgttcaccttcaccgccggcaacgccctgaaggccatcatcgccatggacaccgccggcatgatcctgggctggaagttcttcgaccacgccgcccacctgggcggcgccctgttcggcatctggtacgtgacctacggccacgagctgatctggaagaacagagagcccctggtgaagatctggcacgagatcagaaccaacggccccaagaagggcggcggcagcaagtag

SEQ ID NO: 94436 - DNA, 1140 bp, synthetic construct
  misc_feature 1..1140: note = Description of Artificial Sequence: Synthetic coding sequence
  source 1..1140: mol_type = other DNA
atggcctggagaggctgggcccagagaggctggggctgcggccaggcctggggcgccagcgtgggcggcagaagctgcgaggagctgaccgccgtgctgacccccccccagctgctgggcagaagattcaacttcttcatccagcagaagtgcggcttcagaaaggcccccagaaaggtggagcccagaagaagcgaccccggcaccagcggcgaggcctacaagagaagcgccctgatcccccccgtggaggagaccgtgttctaccccagcccctaccccatcagaagcctgatcaagcccctgttcttcaccgtgggcttcaccggctgcgccttcggcagcgccgccatctggcagtacgagagcctgaagagcagagtgcagagctacttcgacggcatcaaggccgactggctggacagcatcagaccccagaaggagggcgacttcagaaaggagatcaacaagtggtggaacaacctgagcgacggccagagaaccgtgaccggcatcatcgccgccaacgtgctggtgttctgcctgtggagagtgcccagcctgcagagaaccatgatcagatacttcaccagcaaccccgccagcaaggtgctgtgcagccccatgctgctgagcaccttcagccacttcagcctgttccacatggccgccaacatgtacgtgctgtggagcttcagcagcagcatcgtgaacatcctgggccaggagcagttcatggccgtgtacctgagcgccggcgtgatcagcaacttcgtgagctacgtgggcaaggtggccaccggcagatacggccccagcctgggcgccagcggcgccatcatgaccgtgctggccgccgtgtgcaccaagatccccgagggcagactggccatcatcttcctgcccatgttcaccttcaccgccggcaacgccctgaaggccatcatcgccatggacaccgccggcatgatcctgggctggaagttcttcgaccacgccgcccacctgggcggcgccctgttcggcatctggtacgtgacctacggccacgagctgatctggaagaacagagagcccctggtgaagatctggcacgagatcagaaccaacggccccaagaagggcggcggcagcaagtag

SEQ ID NO: 94437 - DNA, 663 bp, synthetic construct
  misc_feature 1..663: note = Description of Artificial Sequence: Synthetic coding sequence
  source 1..663: mol_type = other DNA
atggccagcgccaccgacagcagatacggccagaaggagagcagcgaccagaacttcgactacatgttcaagatcctgatcatcggcaacagcagcgtgggcaagaccagcttcctgttcagatacgccgacgacagcttcacccccgccttcgtgagcaccgtgggcatcgacttcaaggtgaagaccatctacagaaacgacaagagaatcaagctgcagatctgggacaccgccggccaggagagatacagaaccatcaccaccgcctactacagaggcgccatgggcttcatcctgatgtacgacatcaccaacgaggagagcttcaacgccgtgcaggactggagcacccagatcaagacctacagctgggacaacgcccaggtgctgctggtgggcaacaagtgcgacatggaggacgagagagtggtgagcagcgagagaggcagacagctggccgaccacctgggcttcgagttcttcgaggccagcgccaaggacaacatcaacgtgaagcagaccttcgagagactggtggacgtgatctgcgagaagatgagcgagagcctggacaccgccgaccccgccgtgaccggcgccaagcagggcccccagctgagcgaccagcaggtgcccccccaccaggactgcgcctgctag

SEQ ID NO: 94438 - DNA, 306 bp, synthetic construct
  misc_feature 1..306: note = Description of Artificial Sequence: Synthetic coding sequence
  source 1..306: mol_type = other DNA
atgaacctggagagagtgagcaacgaggagaagctgaacctgtgcagaaagtactacctgggcggcttcgccttcctgcccttcctgtggctggtgaacatcttctggttcttcagagaggccttcctggtgcccgcctacaccgagcagagccagatcaagggctacgtgtggagaagcgccgtgggcttcctgttctgggtgatcgtgctgaccagctggatcaccatcttccagatctacagacccagatggggcgccctgggcgactacctgagcttcaccatccccctgggcaccccctag

SEQ ID NO: 94439 - DNA, 378 bp, synthetic construct
  misc_feature 1..378: note = Description of Artificial Sequence: Synthetic coding sequence
  source 1..378: mol_type = other DNA
atggccaagtacctggcccagatcatcgtgatgggcgtgcaggtggtgggcagagccttcgccagagccctgagacaggagttcgccgccagcagagccgccgccgacgccagaggcagagccggccacagaagcgccgccgccagcaacctgagcggcctgagcctgcaggaggcccagcagatcctgaacgtgagcaagctgagccccgaggaggtgcagaagaactacgagcacctgttcaaggtgaacgacaagagcgtgggcggcagcttctacctgcagagcaaggtggtgagagccaaggagagactggacgaggagctgaagatccaggcccaggaggacagagagaagggccagatgccccacacctag

SEQ ID NO: 94440 - DNA, 2496 bp, synthetic construct
  misc_feature 1..2496: note = Description of Artificial Sequence: Synthetic coding sequence
  source 1..2496: mol_type = other DNA
atgcccctggagatggagcccaagatgagcaagctggccttcggctgccagagaagcagcaccagcgacgacgacagcggctgcgccctggaggagtacgcctgggtgccccccggcctgagacccgagcagatccagctgtacttcgcctgcctgcccgaggagaaggtgccctacgtgaacagccccggcgagaagcacagaatcaagcagctgctgtaccagctgcccccccacgacaacgaggtgagatactgccagagcctgagcgaggaggagaagaaggagctgcaggtgttcagcgcccagagaaagaaggaggccctgggcagaggcaccatcaagctgctgagcagagccgtgatgcacgccgtgtgcgagcagtgcggcctgaagatcaacggcggcgaggtggccgtgttcgccagcagagccggccccggcgtgtgctggcaccccagctgcttcgtgtgcttcacctgcaacgagctgctggtggacctgatctacttctaccaggacggcaagatccactgcggcagacaccacgccgagctgctgaagcccagatgcagcgcctgcgacgagatcatcttcgccgacgagtgcaccgaggccgagggcagacactggcacatgaagcacttctgctgcctggagtgcgagaccgtgctgggcggccagagatacatcatgaaggacggcagacccttctgctgcggctgcttcgagagcctgtacgccgagtactgcgagacctgcggcgagcacatcggcgtggaccacgcccagatgacctacgacggccagcactggcacgccaccgaggcctgcttcagctgcgcccagtgcaaggccagcctgctgggctgccccttcctgcccaagcagggccagatctactgcagcaagacctgcagcctgggcgaggacgtgcacgccagcgacagcagcgacagcgccttccagagcgccagaagcagagacagcagaagaagcgtgagaatgggcaagagcagcagaagcgccgaccagtgcagacagagcctgctgctgagccccgccctgaactacaagttccccggcctgagcggcaacgccgacgacaccctgagcagaaagctggacgacctgagcctgagcagacagggcaccagcttcgccagcgaggagttctggaagggcagagtggagcaggagacccccgaggaccccgaggagtgggccgaccacgaggactacatgacccagctgctgctgaagttcggcgacaagagcctgttccagccccagcccaacgagatggacatcagagccagcgagcactggatcagcgacaacatggtgaagagcaagaccgagctgaagcagaacaaccagagcctggccagcaagaagtaccagagcgacatgtactgggcccagagccaggacggcctgggcgacagcgcctacggcagccaccccggccccgccagcagcagaagactgcaggagctggagctggaccacggcgccagcggctacaaccacgacgagacccagtggtacgaggacagcctggagtgcctgagcgacctgaagcccgagcagagcgtgagagacagcatggacagcctggccctgagcaacatcaccggcgccagcgtggacggcgagaacaagcccagacccagcctgtacagcctgcagaacttcgaggagatggagaccgaggactgcgagaagatgagcaacatgggcaccctgaacagcagcatgctgcacagaagcgccgagagcctgaagagcctgagcagcgagctgtgccccgagaagatcctgcccgaggagaagcccgtgcacctgcccgtgctgagaagaagcaagagccagagcagaccccagcaggtgaagttcagcgacgacgtgatcgacaacggcaactacgacatcgagatcagacagccccccatgagcgagagaaccagaagaagagtgtacaacttcgaggagagaggcagcagaagccaccaccacagaagaagaagaagcagaaagagcagaagcgacaacgccctgaacctggtgaccgagagaaagtacagccccaaggacagactgagactgtacacccccgacaactacgagaagttcatccagaacaagagcgccagagagatccaggcctacatccagaacgccgacctgtacggccagtacgcccacgccaccagcgactacggcctgcagaaccccggcatgaacagattcctgggcctgtacggcgaggacgacgacagctggtgcagcagcagcagcagcagcagcgacagcgaggaggagggctacttcctgggccagcccatcccccagcccagaccccagagattcgcctactacaccgacgacctgagcagcccccccagcgccctgcccaccccccagttcggccagagaaccaccaagagcaagaagaagaagggccacaagggcaagaactgcatcatcagctag

SEQ ID NO: 94441 - DNA, 2496 bp, synthetic construct; identical to SEQ ID NO: 94440
  misc_feature 1..2496: note = Description of Artificial Sequence: Synthetic coding sequence
  source 1..2496: mol_type = other DNA

SEQ ID NO: 94442 - DNA, 2496 bp, synthetic construct; identical to SEQ ID NO: 94440
  misc_feature 1..2496: note = Description of Artificial Sequence: Synthetic coding sequence
  source 1..2496: mol_type = other DNA

SEQ ID NO: 94443 - DNA, 333 bp, synthetic construct
  misc_feature 1..333: note = Description of Artificial Sequence: Synthetic coding sequence
  source 1..333: mol_type = other DNA
atgcccctggagatggagcccaagatgagcaagctggccttcggctgccagagaagcagcaccagcgacgacgacagcggctgcgccctggaggagtacgcctgggtgccccccggcctgagacccgagcagatccagctgtacttcgcctgcctgcccgaggagaaggtgccctacgtgaacagccccggcgagaagcacagaatcaagcagctgctgtaccagctgcccccccacgacaacgaggtgagatactgccagagcctgagcgaggaggagaagaaggagctgcaggtgttcagcgcccagagaaagaaggaggccctgggctag

SEQ ID NO: 94444 - DNA, 2496 bp, synthetic construct; identical to SEQ ID NO: 94440
  misc_feature 1..2496: note = Description of Artificial Sequence: Synthetic coding sequence
  source 1..2496: mol_type = other DNA

SEQ ID NO: 94445 - DNA, 360 bp, synthetic construct
  misc_feature 1..360: note = Description of Artificial Sequence: Synthetic coding sequence
  source 1..360: mol_type = other DNA
atgcccctggagatggagcccaagatgagcaagctggccttcggctgccagagaagcagcaccagcgacgacgacagcggctgcgccctggaggagtacgcctgggtgccccccggcctgagacccgagcagatccagctgtacttcgcctgcctgcccgaggagaaggtgccctacgtgaacagccccggcgagaagcacagaatcaagcagctgctgtaccagctgcccccccacgacaacgaggtgagatactgccagagcctgagcgaggaggagaagaaggagctgcaggtgttcagcgcccagagaaagaaggaggccctgggcagaggcaccatcaagctgctgagcagatag

SEQ ID NO: 94446 - DNA, 480 bp, synthetic construct
  misc_feature 1..480: note = Description of Artificial Sequence: Synthetic coding sequence
  source 1..480: mol_type = other DNA
atgcccctggagatggagcccaagatgagcaagctggccttcggctgccagagaagcagcaccagcgacgacgacagcggctgcgccctggaggagtacgcctgggtgccccccggcctgagacccgagcagatccagctgtacttcgcctgcctgcccgaggagaaggtgccctacgtgaacagccccggcgagaagcacagaatcaagcagctgctgtaccagctgcccccccacgacaacgaggtgagatactgccagagcctgagcgaggaggagaagaaggagctgcaggtgttcagcgcccagagaaagaaggaggccctgggcagaggcaccatcaagctgctgagcagagccgtgatgcacgccgtgtgcgagcagtgcggcctgaagatcaacggcggcgaggtggccgtgttcgccagcagagccggccccggcgtgtgctggcaccccagctgcttcgtgtgcttctag

SEQ ID NO: 94447 - DNA, 2496 bp, synthetic construct; identical to SEQ ID NO: 94440
  misc_feature 1..2496: note = Description of Artificial Sequence: Synthetic coding sequence
  source 1..2496: mol_type = other DNA

SEQ ID NO: 94448 - DNA, 2535 bp, synthetic construct
  misc_feature 1..2535: note = Description of Artificial Sequence: Synthetic coding sequence
  source 1..2535: mol_type = other DNA
atggtgaccgtgatgcccctggagatggagaagaccatcagcaagctgatgttcgacttccagagaaacagcaccagcgacgacgacagcggctgcgccctggaggagtacgcctgggtgccccccggcctgaagcccgagcaggtgcaccagtactacagctgcctgcccgaggagaaggtgccctacgtgaacagccccggcgagaagctgagaatcaagcagctgctgcaccagctgcccccccacgacaacgaggtgagatactgcaacagcctggacgaggaggagaagagagagctgaagctgttcagcagccagagaaagagagagaacctgggcagaggcaacgtgagacccttccccgtgaccatgaccggcgccatctgcgagcagtgcggcggccagatcaacggcggcgacatcgccgtgttcgccagcagagccggccacggcgtgtgctggcaccccccctgcttcgtgtgcaccgtgtgcaacgagctgctggtggacctgatctacttctaccaggacggcaagatctactgcggcagacaccacgccgagtgcctgaagcccagatgcgccgcctgcgacgagatcatcttcgccgacgagtgcaccgaggccgagggcagacactggcacatgaagcacttctgctgcttcgagtgcgagaccgtgctgggcggccagagatacatcatgaaggagggcagaccctactgctgccactgcttcgagagcctgtacgccgagtactgcgacacctgcgcccagcacatcggcatcgaccagggccagatgacctacgacggccagcactggcacgccaccgagacctgcttctgctgcgcccactgcaagaagagcctgctgggcagacccttcctgcccaagcagggccagatcttctgcagcagagcctgcagcgccggcgaggaccccaacggcagcgacagcagcgacagcgccttccagaacgccagagccaaggagagcagaagaagcgccaagatcggcaagaacaagggcaagaccgaggagcccatgctgaaccagcacagccagctgcaggtgagcagcaacagactgagcgccgacgtggaccccctgagcctgcagatggacatgctgagcctgagcagccagacccccagcctgaacagagaccccatctggagaagcagagaggagccctaccactacggcaacaagatggagcagaaccagacccagagccccctgcagctgctgagccagtgcaacatcagaaccagctacagccccggcggccagggcgccggcgcccagcccgagatgtggggcaagcacttcagcaaccccaagagaagcagcagcctggccatgaccggccacgccggcagcttcatcaaggagtgcagagaggactactaccccggcagactgagaagccaggagagctacagcgacatgagcagccagagcttcagcgagaccagaggcagcatccaggtgcccaagtacgaggaggaggaggaggaggagggcggcctgagcacccagcagtgcagaaccagacaccccatcagcagcctgaagtacaccgaggacatgacccccaccgagcagacccccagaggcagcatggagagcctggccctgagcaacgccaccggcctgagcgccgacggcggcgccaagagacaggagcacctgagcagattcagcatgcccgacctgagcaaggacagcggcatgaacgtgagcgagaagctgagcaacatgggcaccctgaacagcagcatgcagttcagaagcgccgagagcgtgagaagcctgctgagcgcccagcagtaccaggagatggagggcaacctgcaccagctgagcaaccccatcggctacagagacctgcagagccacggcagaatgcaccagagcttcgacttcgacggcggcatggccggcagcaagctgcccggccaggagggcgtgagaatccagcccatgagcgagagaaccagaagaagagccaccagcagagacgacaacagaagattcagaccccacagaagcagaagaagcagaagaagcagaagcgacaacgccctgcacctggccagcgagagagaggccatcagcagactgaaggacagaccccccctgagagccagagaggactacgaccagttcatgagacagagaagcttccaggagagcatgggccacggcagcagaagagacctgtacggccagtgccccagaaccgtgagcgacctggccctgcagaacgccttcggcgacagatggggcccctacttcgccgagtacgactggtgcagcacctgcagcagcagcagcgagagcgacaacgagggctacttcctgggcgagcccatcccccagcccgccagactgagatacgtgaccagcgacgagctgctgcacaagtacagcagctacggcctgcccaagagcagcaccctgggcggcagaggccagctgcacagcagaaagagacagaagagcaagaactgcatcatcagctag

SEQ ID NO: 94449 - DNA, 453 bp, synthetic construct
  misc_feature 1..453: note = Description of Artificial Sequence: Synthetic coding sequence
  source 1..453: mol_type = other DNA
atggtgaccgtgatgcccctggagatggagaagaccatcagcaagctgatgttcgacttccagagaaacagcaccagcgacgacgacagcggctgcgccctggaggagtacgcctgggtgccccccggcctgaagcccgagcaggtgcaccagtactacagctgcctgcccgaggagaaggtgccctacgtgaacagccccggcgagaagctgagaatcaagcagctgctgcaccagctgcccccccacgacaacgaggtgagatactgcaacagcctggacgaggaggagaagagagagctgaagctgttcagcagccagagaaagagagagaacctgggcagaggcaacgtgagacccttccccgtgaccatgaccggcgccatctgcgagcagtgcggcggccagatcaacggcggcgacatcgccgtgttcgccagcagagccggctag

SEQ ID NO: 94450 - DNA, 1263 bp, synthetic construct
  misc_feature 1..1263: note = Description of Artificial Sequence: Synthetic coding sequence
  source 1..1263: mol_type = other DNA
atggagaccttcgaccccaccgagctgcccgagctgctgaagctgtactacagaagactgttcccctacagccagtactacagatggctgaactacggcggcgtgatcaagaactacttccagcacagagagttcagcttcaccctgaaggacgacatctacatcagataccagagcttcaacaaccagagcgacctggagaaggagatgcagaagatgaacccctacaagatcgacatcggcgccgtgtacagccacagacccaaccagcacaacaccgtgaagctgggcgccttccaggcccaggagaaggagctggtgttcgacatcgacatgaccgactacgacgacgtgagaagatgctgcagcagcgccgacatctgccccaagtgctggaccctgatgaccatggccatcagaatcatcgacagagccctgaaggaggacttcggcttcaagcacagactgtgggtgtacagcggcagaagaggcgtgcactgctgggtgtgcgacgagagcgtgagaaagctgagcagcgccgtgagaagcggcatcgtggagtacctgagcctggtgaagggcggccaggacgtgaagaagaaggtgcacctgagcgagaagatccaccccttcatcagaaagagcatcaacatcatcaagaagtacttcgaggagtacgccctggtgaaccaggacatcctggagaacaaggagagctgggacaagatcctggccctggtgcccgagaccatccacgacgagctgcagcagagcttccagaagagccacaacagcctgcagagatgggagcacctgaagaaggtggccagcagataccagaacaacatcaagaacgacaagtacggcccctggctggagtgggagatcatgctgcagtactgcttccccagactggacatcaacgtgagcaagggcatcaaccacctgctgaagagccccttcagcgtgcaccccaagaccggcagaatcagcgtgcccatcgacctgcagaaggtggaccagttcgaccccttcaccgtgcccaccatcagcttcatctgcagagagctggacgccatcagcaccaacgaggaggagaaggaggagaacgaggccgagagcgacgtgaagcacagaaccagagactacaagaagaccagcctggccccctacgtgaaggtgttcgagcacttcctggagaacctggacaagagcagaaagggcgagctgctgaagaagagcgacctgcagaaggacttctag

SEQ ID NO: 94451 - DNA, 1284 bp, synthetic construct
  misc_feature 1..1284: note = Description of Artificial Sequence: Synthetic coding sequence
  source 1..1284: mol_type = other DNA
atggagaccttcgaccccaccgagctgcccgagctgctgaagctgtactacagaagactgttcccctacagccagtactacagatggctgaactacggcggcgtgatcaagaactacttccagcacagagagttcagcttcaccctgaaggacgacatctacatcagataccagagcttcaacaaccagagcgacctggagaaggagatgcagaagatgaacccctacaagatcgacatcggcgccgtgtacagccacagacccaaccagcacaacaccgtgaagctgggcgccttccaggcccaggagaaggagctggtgttcgacatcgacatgaccgactacgacgacgtgagaagatgctgcagcagcgccgacatctgccccaagtgctggaccctgatgaccatggccatcagaatcatcgacagagccctgaagggcaaggacttcggcttcaagcacagactgtgggtgtacagcggcagaagaggcgtgcactgctgggtgtgcgacgagagcgtgagaaagctgagcagcgccgtgagaagcggcatcgtggagtacctgagcctggtgaagggcggccaggacgtgaagaagaaggtgcacctgagcgagaagatccaccccttcatcagaaagagcatcaacatcatcaagaagtacttcgaggagtacgccctggtgaaccaggacatcctggagaacaaggagagctgggacaagatcctggccctgatgggcctgttcctgaacgaccccagccccatccacgacgagctgcagcagagcttccagaagagccacaacagcctgcagagatgggagcacctgaagaaggtggccagcagataccagaacaacatcaagaacgacaagtacggcccctggctggagtgggagatcatgctgcagtactgcttccccagactggacatcaacgtgagcaagggcatcaaccacctgctgaagagccccttcagcgtgcaccccaagaccggcagaatcagcgtgcccatcgacctgcagaaggtggaccagttcgaccccttcaccgtgcccaccatcagcttcatctgcagagagctggacgccatcagcaccaacgaggaggagaaggaggagaacgaggccgagagcgacgtgaagcacagaaccagagactacaagaagaccagcctggccccctacgtgaaggtgttcgagcacttcctggagaacctggacaagagcagaaagggcgagctgctgaagaagagcgacctgcagaaggacttctag

SEQ ID NO: 94452 - DNA, 762 bp, synthetic construct
  misc_feature 1..762: note = Description of Artificial Sequence: Synthetic coding sequence
  source 1..762: mol_type = other DNA
atggccaacctgggctgctggatgctggtgctgttcgtggccacctggagcgacctgggcctgtgcaagaagagacccaagcccggcggctggaacaccggcggcagcagataccccggccagggcagccccggcggcaacagataccccccccagggcggcggcggctggggccagccccacggcggcggctggggccagccccacggcggcggctggggccagccccacggcggcggctggggccagccccacggcggcggctggggccagggcggcggcacccacagccagtggaacaagcccagcaagcccaagaccaacatgaagcacatggccggcgccgccgccgccggcgccgtggtgggcggcctgggcggctacatgctgggcagcgccatgagcagacccatcatccacttcggcagcgactacgaggacagatactacagagagaacatgcacagataccccaaccaggtgtactacagacccatggacgagtacagcaaccagaacaacttcgtgcacgactgcgtgaacatcaccatcaagcagcacaccgtgaccaccaccaccaagggcgagaacttcaccgagaccgacgtgaagatgatggagagagtggtggagcagatgtgcatcacccagtacgagagagagagccaggcctactaccagagaggcagcagcatggtgctgttcagcagcccccccgtgatcctgctgatcagcttcctgatcttcctgatcgtgggctag

SEQ ID NO: 94453 - DNA, 750 bp, synthetic construct
  misc_feature 1..750: note = Description of Artificial Sequence: Synthetic coding sequence
  source 1..750: mol_type = other DNA
atggccaacctgggctgctggatgctggtgctgttcgtggccacctggagcgacctgggcctgtgcaagaagagacccaagcccggcggctggaacaccggcggcagcagataccccggccagggcagccccggcggcaacagataccccccccagggcggcggcggctggggccagccccacggcggcggctggggccagccccacggcggcggctggggccagccccacggcggcggctggggccagccccacggcggcggctggggccagggcggcggcacccacagccagtggaacaagcccagcaagcccaagaccaacatgaagcacatggccggcgccgccgccgccggcgccgtggtgggcggcctgggcggctacatgctgggcagcgccatgagcagacccatcatccacttcggcagcgactacgaggacagatactacagagagaacatgcacagataccccaaccaggtgtactacagacccatggacgagtacagcaaccagaacaacttcgtgcacgactgcgtgaacatcaccatcaagcagcacaccgtgaccaccaccaccaagggcgagaacttcaccgagaccgacgtgaagatgatggagagagtggtggagcagatgtgcatcacccagtacgagagagagagccaggcctactaccagagaggcagcagcatggtgctgttcagcagcccccccgtgatcctgctgatcagcttcctgatcttctag

SEQ ID NO: 94454 - DNA, 762 bp, synthetic construct; identical to SEQ ID NO: 94452
  misc_feature 1..762: note = Description of Artificial Sequence: Synthetic coding sequence
  source 1..762: mol_type = other DNA

SEQ ID NO: 94455 - DNA, 579 bp, synthetic construct
  misc_feature 1..579: note = Description of Artificial Sequence: Synthetic coding sequence
  source 1..579: mol_type = other DNA
atggagcactggggccagccccacggcggcggctggggccagccccacggcggcggctggggccagccccacggcggcggctggggccagggcggcggcacccacagccagtggaacaagcccagcaagcccaagaccaacatgaagcacatggccggcgccgccgccgccggcgccgtggtgggcggcctgggcggctacatgctgggcagcgccatgagcagacccatcatccacttcggcagcgactacgaggacagatactacagagagaacatgcacagataccccaaccaggtgtactacagacccatggacgagtacagcaaccagaacaacttcgtgcacgactgcgtgaacatcaccatcaagcagcacaccgtgaccaccaccaccaagggcgagaacttcaccgagaccgacgtgaagatgatggagagagtggtggagcagatgtgcatcacccagtacgagagagagagccaggcctactaccagagaggcagcagcatggtgctgttcagcagcccccccgtgatcctgctgatcagcttcctgatcttcctgatcgtgggctag

SEQ ID NO: 94456 - DNA, 654 bp, synthetic construct
  misc_feature 1..654: note = Description of Artificial Sequence: Synthetic coding sequence
  source 1..654: mol_type = other DNA
atggccaacctgggctgctggatgctggtgctgttcgtggccacctggagcgacctgggcctgtgcaagaagagacccaagcccggcggctggaacaccggcggcagcagataccccggccagggcagccccggcggcaacagataccccccccagggcggcggcggctggggccagccccacggcggcggctggggccagccccacggcggcggctggggccagccccacggcggcggctggggccagccccacggcggcggctggggccagggcggcggcacccacagccagtggaacaagcccagcaagcccaagaccaacatgaagcacatggccggcgccgccgccgccggcgccgtggtgggcggcctgggcggctacatgctgggcagcgccatgagcagacccatcatccacttcggcagcgactacgaggacagatactacagagagaacatgcacagataccccaaccaggtgtactacagacccatggacgagtacagcaaccagaacaacttcgtgcacgactgcgtgaacatcaccatcaagcagcacaccgtgaccaccaccaccaagggcgagaacttcaccgagaccgacgtgaagatgatggagagagtggtggagcagatgtgcatcacccagtag

SEQ ID NO: 94457 - DNA, 531 bp, synthetic construct
  misc_feature 1..531: note = Description of Artificial Sequence: Synthetic coding sequence
  source 1..531: mol_type = other DNA
atgagaaagcacctgagctggtggtggctggccaccgtgtgcatgctgctgttcagccacctgagcgccgtgcagaccagaggcatcaagcacagaatcaagtggaacagaaaggccctgcccagcaccgcccagatcaccgaggcccaggtggccgagaacagacccggcgccttcatcaagcagggcagaaagctggacatcgacttcggcgccgagggcaacagatactacgaggccaactactggcagttccccgacggcatccactacaacggctgcagcgaggccaacgtgaccaaggaggccttcgtgaccggctgcatcaacgccacccaggccgccaaccagggcgagttccagaagcccgacaacaagctgcaccagcaggtgctgtggagactggtgcaggagctgtgcagcctgaagcactgcgagttctggctggagagaggcgccggcctgagagtgaccatgcaccagcccgtgctgctgtgcctgctggccctgatctggctgaccgtgaagtag

SEQ ID NO: 94458 - DNA, 1023 bp, synthetic construct
  misc_feature 1..1023: note = Description of Artificial Sequence: Synthetic coding sequence
  source 1..1023: mol_type = other DNA
atggccaccggcggctacagaaccagcagcggcctgggcggcagcaccaccgacttcctggaggagtggaaggccaagagagagaagatgagagccaagcagaacccccccggccccgccccccccggcggcggcagcagcgacgccgccggcaagccccccgccggcgccctgggcacccccgccgccgccgccgccaacgagctgaacaacaacctgcccggcggcgcccccgccgcccccgccgtgcccggccccggcggcgtgaactgcgccgtgggcagcgccatgctgaccagagccgcccccggccccagaagaagcgaggacgagccccccgccgccagcgccagcgccgccccccccccccagagagacgaggaggagcccgacggcgtgcccgagaagggcaagagcagcggccccagcgccagaaagggcaagggccagatcgagaagagaaagctgagagagaagagaagaagcaccggcgtggtgaacatccccgccgccgagtgcctggacgagtacgaggacgacgaggccggccagaaggagagaaagagagaggacgccatcacccagcagaacaccatccagaacgaggccgtgaacctgctggaccccggcagcagctacctgctgcaggagccccccagaaccgtgagcggcagatacaagagcaccaccagcgtgagcgaggaggacgtgagcagcagatacagcagaaccgacagaagcggcttccccagatacaacagagacgccaacgtgagcggcaccctggtgagcagcagcaccctggagaagaagatcgaggacctggagaaggaggtggtgagagagagacaggagaacctgagactggtgagactgatgcaggacaaggaggagatgatcggcaagctgaaggaggagatcgacctgctgaacagagacctggacgacatcgaggacgagaacgagcagctgaagcaggagaacaagaccctgctgaaggtggtgggccagctgaccagatag

SEQ ID NO: 94459 - DNA, 231 bp, synthetic construct
  misc_feature 1..231: note = Description of Artificial Sequence: Synthetic coding sequence
  source 1..231: mol_type = other DNA
atggccaccggcggctacagaaccagcagcggcctgggcggcagcaccaccgacttcctggaggagtggaaggccaagagagagaagatgagagccaagcagaacccccccggccccgccccccccggcggcggcagcagcgacgccgccggcaagccccccgccggcgccctgggcacccccgccgccgccgccgccaacgagctgaacaacaacctgcccggcggctag

SEQ ID NO: 94460 - DNA, 195 bp, synthetic construct
  misc_feature 1..195: note = Description of Artificial Sequence: Synthetic coding sequence
  source 1..195: mol_type = other DNA
atggccaccggcggctacagaaccagcagcggcctgggcggcagcaccaccgacttcctggaggagtggaaggccaagagagagaagatgagagccaagcagaacccccccggccccgccccccccggcggcggcagcagcgacgccgccggcaagccccccgccggcgccctgggcacccccgccgccgcctag

SEQ ID NO: 94461 - DNA, 663 bp, synthetic construct
  misc_feature 1..663: note = Description of Artificial Sequence: Synthetic coding sequence
  source 1..663: mol_type = other DNA
atgaagagcgtgatctaccacgccctgagccagaaggaggccaacgacagcgacgtgcagcccagcggcgcccagagagccgaggccttcgtgagagccttcctgaagagaagcacccccagaatgagcccccaggccagagaggaccagctgcagagaaaggccgtggtgctggagtacttcaccagacacaagagaaaggagaagaagaagaaggccaagggcctgagcgccagacagagaagagagctgagactgttcgacatcaagcccgagcagcagagatacagcctgttcctgcccctgcacgagctgtggaagcagtacatcagagacctgtgcagcggcctgaagcccgacacccagccccagatgatccaggccaagctgctgaaggccgacctgcacggcgccatcatcagcgtgaccaagagcaagtgccccagctacgtgggcatcaccggcatcctgctgcaggagaccaagcacatcttcaagatcatcaccaaggaggacagactgaaggtgatccccaagctgaactgcgtgttcaccgtggagaccgacggcttcatcagctacatctacggcagcaagttccagctgagaagcagcgagagaagcgccaagaagttcaaggccaagggcaccatcgacctgtag

SEQ ID NO: 94462 - DNA, 1695 bp, synthetic construct
  misc_feature 1..1695: note = Description of Artificial Sequence: Synthetic coding sequence
  source 1..1695: mol_type = other DNA
atgagcagccacggcaacagcctgttcctgagagagagcggccagagactgggcagagtgggctggctgcagagactgcaggagagcctgcagcagagagccctgagaaccagactgagactgcagaccatgaccctggagcacgtgctgagattcctgagaagaaacgccttcatcctgctgaccgtgagcgccgtggtgatcggcgtgagcctggccttcgccctgagaccctaccagctgacctacagacagatcaagtacttcagcttccccggcgagctgctgatgagaatgctgcagatgctggtgctgcccctgatcgtgagcagcctggtgaccggcatggccagcctggacaacaaggccaccggcagaatgggcatgagagccgccgtgtactacatggtgaccaccatcatcgccgtgttcatcggcatcctgatggtgaccatcatccaccccggcaagggcagcaaggagggcctgcacagagagggcagaatcgagaccatccccaccgccgacgccttcatggacctgatcagaaacatgttcccccccaacctggtggaggcctgcttcaagcagttcaagacccagtacagcaccagagtggtgaccagaaccatggtgagaaccgagaacggcagcgagcccggcgccagcatgcccccccccttcagcgtggagaacggcaccagcttcctggagaacgtgaccagagccctgggcaccctgcaggagatgctgagcttcgaggagaccgtgcccgtgcccggcagcgccaacggcatcaacgccctgggcctggtggtgttcagcgtggccttcggcctggtgatcggcggcatgaagcacaagggcagagtgctgagagacttcttcgacagcctgaacgaggccatcatgagactggtgggcatcatcatctggtacgcccccgtgggcatcctgttcctgatcgccggcaagatcctggagatggaggacatggccgtgctgggcggccagctgggcatgtacaccctgaccgtgatcgtgggcctgttcctgcacgccggcatcgtgctgcccctgatctacttcctggtgacccacagaaaccccttccccttcatcggcggcatgctgcaggccctgatcaccgccatgggcaccagcagcagcagcgccaccctgcccatcaccttcagatgcctggaggagggcctgggcgtggacagaagaatcaccagattcgtgctgcccgtgggcgccaccgtgaacatggacggcaccgccctgtacgaggccctggccgccatcttcatcgcccaggtgaacaactacgagctgaacctgggccagatcaccaccatcagcatcaccgccaccgccgccagcgtgggcgccgccggcatcccccaggccggcctggtgaccatggtgatcgtgctgaccagcgtgggcctgcccaccgaggacatcaccctgatcatcgccgtggactggttcctggacagactgagaaccatgaccaacgtgctgggcgacagcatcggcgccgccgtgatcgagcacctgagccagagagagctggagctgcaggaggccgagctgaccctgcccagcctgggcaagccctacaagagcctgatggcccaggagaagggcgccagcagaggcagaggcggcaacgagagcgccatgtag

SEQ ID NO: 94463 - DNA, 420 bp, synthetic construct
  misc_feature 1..420: note = Description of Artificial Sequence: Synthetic coding sequence
  source 1..420: mol_type = other DNA
atgcactgcctgagaaagagaagaatgacccccatgagcagatacagcctgttcctgcccctgcacgagctgtggaagcagtacatcagagacctgtgcagcggcctgaagcccgacacccagccccagatgatccaggccaagctgctgaaggccgacctgcacggcgccatcatcagcgtgaccaagagcaagtgccccagctacgtgggcatcaccggcatcctgctgcaggagaccaagcacatcttcaagatcatcaccaaggaggacagactgaaggtgatccccaagctgaactgcgtgttcaccgtggagaccgacggcttcatcagctacatctacggcagcaagttccagctgagaagcagcgagagaagcgccaagaagttcaaggccaagggcaccatcgacctgtag

SEQ ID NO: 94464 - DNA, 342 bp, synthetic construct
  misc_feature 1..342: note = Description of Artificial Sequence: Synthetic coding sequence
  source 1..342: mol_type = other DNA
atggtgagattcaagcacagatacctgctgtgcgagctggtgagcgacgaccccagatgcagactgagcctggacgacagagtgctgagcagcctggtgagagacaccatcgccagagtgcacggcaccttcggcgccgccgcctgcagcatcggcttcgccggcaccatcagaacctgccagaagttcctgatccagtacaacagaagacagctgctgatcctgctgcagaactgcaccgacgagggcgagagagaggccatccagaagagcgtgaccagaagctgcctgctggaggaggaggaggagagcggcgaggaggccgccgaggccatggagtag

SEQ ID NO: 94465 - DNA, 492 bp, synthetic construct
  misc_feature 1..492: note = Description of Artificial Sequence: Synthetic coding sequence
  source 1..492: mol_type = other DNA
atggtgagattcaagcacagatacctgctgtgcgagctggtgagcgacgaccccagatgcagactgagcctggacgacagagtgctgagcagcctggtgagagacaccatcgccagagtgcacggcaccttcggcgccgccgcctgcagcatcggcttcgccgtgagatacctgaacgcctacaccggcatcgtgctgctgagatgcagaaaggagttctaccagctggtgtggagcgccctgcccttcatcacctacctggagaacaagggccacagatacccctgcttcttcaacaccctgcacgtgggcggcaccatcagaacctgccagaagttcctgatccagtacaacagaagacagctgctgatcctgctgcagaactgcaccgacgagggcgagagagaggccatccagaagagcgtgaccagaagctgcctgctggaggaggaggaggagagcggcgaggaggccgccgaggccatggagtag

SEQ ID NO: 94466 - DNA, 423 bp, synthetic construct
  misc_feature 1..423: note = Description of Artificial Sequence: Synthetic coding sequence
  source 1..423: mol_type = other DNA
atggccgagaacagagagcccagaggcgccgtggaggccgagctggaccccgtggagtacaccctgagaaagagactgcccagcagactgcccagaagacccaacgacatctacgtgaacatgaagaccgacttcaaggcccagctggccagatgccagaagctgctggacggcggcgccagaggccagaacgcctgcagcgagatctacatccacggcctgggcctggccatcaacagagccatcaacatcgccctgcagctgcaggccggcagcttcggcagcctgcaggtggccgccaacaccagcaccgtggagctggtggacgagctggagcccgagaccgacaccagagagcccctgaccagaatcagaaacaacagcgccatccacatcagagtgttcagagtgacccccaagtag

SEQ ID NO: 94467 - DNA, 414 bp, synthetic construct
  misc_feature 1..414: note = Description of Artificial Sequence: Synthetic coding sequence
  source 1..414: mol_type = other DNA
atggccgagaacagagagcccagaggcgccgtggaggccgagctggaccccgtggagtacaccctgagaaagagactgcccagcagactgcccagaagacccaacgacatctacgtgaacatgaagaccgacttcaaggcccagctggccagatgccagaagctgctggacggcggcgccagaggccagaacgcctgcagcgagatctacatccacggcctgggcctggccatcaacagagccatcaacatcgccctgcagctgcaggccggcagcttcggcagcctgcaggtggccgccaacaccagcaccgtggagctggtggacgagctggagcccgagaccgacaccagagagcccctgaccagaatcagaaacaacagcgccatccacatcagagtgttcagagtgtag

SEQ ID NO: 94468 - DNA, 708 bp, synthetic construct
  misc_feature 1..708: note = Description of Artificial Sequence: Synthetic coding sequence
  source 1..708: mol_type = other DNA
atgagaagaggcgccccccaggaccaggagctggtgggccccggcccccccggcagaggcagcagaggcgcccccccccccctgggccccgtggtgcccgtgctggtgttcccccccgacctggtgttcagagccgaccagagaagcggccccagacagctgctgaccctgtacaaccccaccggcaccgccctgagattcagagtgctgtgcaccgcccccgccaagtacaccgtgttcgacgccgagggctacgtgaagccccagagctgcatcgacatcgtgatcagacacgtggcccccatccccagccactacgacgtgcaggacagattcagaatcgagctgagcgaggagggcgccgagggcagagtggtgggcagaaaggacatcaccagcatcctgagagcccccgcctaccccctggagctgcagggccagcccgaccccgcccccagacccggcccccccgccggcacccccccccccaccgccagacacttccaggagcaccccagacagcagctggccaccagcagcttcctgctgttcctgctgaccggcatcgtgagcgtggccttcctgctgctgcccctgcccgacgagctgggcagccagctgccccaggtgctgcacgtgagcctgggccagaagctggtggccgcctacgtgctgggcctgctgaccatggtgttcctgagaacctag

SEQ ID NO: 94469 - DNA, 1248 bp, synthetic construct
  misc_feature 1..1248: note = Description of Artificial Sequence: Synthetic coding sequence
  source 1..1248: mol_type = other DNA
atgagaggcgccaacgcctgggcccccctgtgcctgctgctggccgccgccacccagctgagcagacagcagagccccgagagacccgtgttcacctgcggcggcatcctgaccggcgagagcggcttcatcggcagcgagggcttccccggcgtgtacccccccaacagcaagtgcacctggaagatcaccgtgcccgagggcaaggtggtggtgctgaacttcagattcatcgacctggagagcgacaacctgtgcagatacgacttcgtggacgtgtacaacggccacgccaacggccagagaatcggcagattctgcggcaccttcagacccggcgccctggtgagcagcggcaacaagatgatggtgcagatgatcagcgacgccaacaccgccggcaacggcttcatggccatgttcagcgccgccgagcccaacgagagaggcgaccagtactgcggcggcctgctggacagacccagcggcagcttcaagacccccaactggcccgacagagactaccccgccggcgtgacctgcgtgtggcacatcgtggcccccaagaaccagctgatcgagctgaagttcgagaagttcgacgtggagagagacaactactgcagatacgactacgtggccgtgttcaacggcggcgaggtgaacgacgccagaagaatcggcaagtactgcggcgacagcccccccgcccccatcgtgagcgagagaaacgagctgctgatccagttcctgagcgacctgagcctgaccgccgacggcttcatcggccactacatcttcagacccaagaagctgcccaccaccaccgagcagcccgtgaccaccaccttccccgtgaccaccggcctgaagcccaccgtggccctgtgccagcagaagtgcagaagaaccggcaccctggagggcaactactgcagcagcgacttcgtgctggccggcaccgtgatcaccaccatcaccagagacggcagcctgcacgccaccgtgagcatcatcaacatctacaaggagggcaacctggccatccagcaggccggcaagaacatgagcgccagactgaccgtggtgtgcaagcagtgccccctgctgagaagaggcctgaactacatcatcatgggccaggtgggcgaggacggcagaggcaagatcatgcccaacagcttcatcatgatgttcaagaccaagaaccagaagctgctggacgccctgaagaacaagcagtgctag

SEQ ID NO: 94470 - DNA, 2184 bp, synthetic construct
  misc_feature 1..2184: note = Description of Artificial Sequence: Synthetic coding sequence
  source 1..2184: mol_type = other DNA
atgagacccctgctgctgctggccctgctgggctggctgctgctggccgaggccaagggcgacgccaagcccgaggacaacctgctggtgctgaccgtggccaccaaggagaccgagggcttcagaagattcaagagaagcgcccagttcttcaactacaagatccaggccctgggcctgggcgaggactggaacgtggagaagggcaccagcgccggcggcggccagaaggtgagactgctgaagaaggccctggagaagcacgccgacaaggaggacctggtgatcctgttcgccgacagctacgacgtgctgttcgccagcggccccagagagctgctgaagaagttcagacaggccagaagccaggtggtgttcagcgccgaggagctgatctaccccgacagaagactggagaccaagtaccccgtggtgagcgacggcaagagattcctgggcagcggcggcttcatcggctacgcccccaacctgagcaagctggtggccgagtgggagggccaggacagcgacagcgaccagctgttctacaccaagatcttcctggaccccgagaagagagagcagatcaacatcaccctggaccacagatgcagaatcttccagaacctggacggcgccctggacgaggtggtgctgaagttcgagatgggccacgtgagagccagaaacctggcctacgacaccctgcccgtgctgatccacggcaacggccccaccaagctgcagctgaactacctgggcaactacatccccagattctggaccttcgagaccggctgcaccgtgtgcgacgagggcctgagaagcctgaagggcatcggcgacgaggccctgcccaccgtgctggtgggcgtgttcatcgagcagcccacccccttcgtgagcctgttcttccagagactgctgagactgcactacccccagaagcacatgagactgttcatccacaaccacgagcagcaccacaaggcccaggtggaggagttcctggcccagcacggcagcgagtaccagagcgtgaagctggtgggccccgaggtgagaatggccaacgccgacgccagaaacatgggcgccgacctgtgcagacaggacagaagctgcacctactacttcagcgtggacgccgacgtggccctgaccgagcccaacagcctgagactgctgatccagcagaacaagaacgtgatcgcccccctgatgaccagacacggcagactgtggagcaacttctggggcgccctgagcgccgacggctactacgccagaagcgaggactacgtggacatcgtgcagggcagaagagtgggcgtgtggaacgtgccctacatcagcaacatctacctgatcaagggcagcgccctgagaggcgagctgcagagcagcgacctgttccaccacagcaagctggaccccgacatggccttctgcgccaacatcagacagcaggacgtgttcatgttcctgaccaacagacacaccctgggccacctgctgagcctggacagctacagaaccacccacctgcacaacgacctgtgggaggtgttcagcaaccccgaggactggaaggagaagtacatccaccagaactacaccaaggccctggccggcaagctggtggagaccccctgccccgacgtgtactggttccccatcttcaccgaggtggcctgcgacgagctggtggaggagatggagcacttcggccagtggagcctgggcaacaacaaggacaacagaatccagggcggctacgagaacgtgcccaccatcgacatccacatgaaccagatcggcttcgagagagagtggcacaagttcctgctggagtacatcgcccccatgaccgagaagctgtaccccggctactacaccagagcccagttcgacctggccttcgtggtgagatacaagcccgacgagcagcccagcctgatgccccaccacgacgccagcaccttcaccatcaacatcgccctgaacagagtgggcgtggactacgagggcggcggctgcagattcctgagatacaactgcagcatcagagcccccagaaagggctggaccctgatgcaccccggcagactgacccactaccacgagggcctgcccaccaccagaggcaccagatacatcgccgtgagcttcgtggacccctag

SEQ ID NO: 94471 - DNA, 600 bp, synthetic construct
  misc_feature 1..600: note = Description of Artificial Sequence: Synthetic coding sequence
  source 1..600: mol_type = other DNA
atgagacccctgctgctgctggccctgctgggctggctgctgctggccgaggccaagggcgacgccaagcccgaggacaacctgctggtgctgaccgtggccaccaaggagaccgagggcttcagaagattcaagagaagcgcccagttcttcaactacaagatccaggccctgggcctgggcgaggactggaacgtggagaagggcaccagcgccggcggcggccagaaggtgagactgctgaagaaggccctggagaagcacgccgacaaggaggacctggtgatcctgttcgccgacagctacgacgtgctgttcgccagcggccccagagagctgctgaagaagttcagacaggccagaagccaggtggtgttcagcgccgaggagctgatctaccccgacagaagactggagaccaagtaccccgtggtgagcgacggcaagagattcctgggcagcggcggcttcatcggctacgcccccaacctgagcaagctggtggccgagtgggagggccaggacagcgacagcgaccagctgttctacaccaagatcttcctggaccccgagaagagagtgagcagactgcacagctag

SEQ ID NO: 94472 - DNA, 2325 bp, synthetic construct
  misc_feature 1..2325: note = Description of Artificial Sequence: Synthetic coding sequence
  source 1..2325: mol_type = other DNA
atgagacccctgctgctgctggccctgctgggctggctgctgctggccgaggccaagggcgacgccaagcccgaggccccctgctgccaggagggcctgagagccggcggcagcggcagcctgcacctgggcagagacttcaccgtgctggccggcgccagaggcagccccagccccagcgtgagcagcatccccagattctggatccccggcagcgacaacctgctggtgctgaccgtggccaccaaggagaccgagggcttcagaagattcaagagaagcgcccagttcttcaactacaagatccaggccctgggcctgggcgaggactggaacgtggagaagggcaccagcgccggcggcggccagaaggtgagactgctgaagaaggccctggagaagcacgccgacaaggaggacctggtgatcctgttcgccgacagctacgacgtgctgttcgccagcggccccagagagctgctgaagaagttcagacaggccagaagccaggtggtgttcagcgccgaggagctgatctaccccgacagaagactggagaccaagtaccccgtggtgagcgacggcaagagattcctgggcagcggcggcttcatcggctacgcccccaacctgagcaagctggtggccgagtgggagggccaggacagcgacagcgaccagctgttctacaccaagatcttcctggaccccgagaagagagagcagatcaacatcaccctggaccacagatgcagaatcttccagaacctggacggcgccctggacgaggtggtgctgaagttcgagatgggccacgtgagagccagaaacctggcctacgacaccctgcccgtgctgatccacggcaacggccccaccaagctgcagctgaactacctgggcaactacatccccagattctggaccttcgagaccggctgcaccgtgtgcgacgagggcctgagaagcctgaagggcatcggcgacgaggccctgcccaccgtgctggtgggcgtgttcatcgagcagcccacccccttcgtgagcctgttcttccagagactgctgagactgcactacccccagaagcacatgagactgttcatccacaaccacgagcagcaccacaaggcccaggtggaggagttcctggcccagcacggcagcgagtaccagagcgtgaagctggtgggccccgaggtgagaatggccaacgccgacgccagaaacatgggcgccgacctgtgcagacaggacagaagctgcacctactacttcagcgtggacgccgacgtggccctgaccgagcccaacagcctgagactgctgatccagcagaacaagaacgtgatcgcccccctgatgaccagacacggcagactgtggagcaacttctggggcgccctgagcgccgacggctactacgccagaagcgaggactacgtggacatcgtgcagggcagaagagtgggcgtgtggaacgtgccctacatcagcaacatctacctgatcaagggcagcgccctgagaggcgagctgcagagcagcgacctgttccaccacagcaagctggaccccgacatggccttctgcgccaacatcagacagcaggacgtgttcatgttcctgaccaacagacacaccctgggccacctgctgagcctggacagctacagaaccacccacctgcacaacgacctgtgggaggtgttcagcaaccccgaggactggaaggagaagtacatccaccagaactacaccaaggccctggccggcaagctggtggagaccccctgccccgacgtgtactggttccccatcttcaccgaggtggcctgcgacgagctggtggaggagatggagcacttcggccagtggagcctgggcaacaacaaggacaacagaatccagggcggctacgagaacgtgcccaccatcgacatccacatgaaccagatcggcttcgagagagagtggcacaagttcctgctggagtacatcgcccccatgaccgagaagctgtaccccggctactacaccagagcccagttcgacctggccttcgtggtgagatacaagcccgacgagcagcccagcctgatgccccaccacgacgccagcaccttcaccatcaacatcgccctgaacagagtgggcgtggactacgagggcggcggctgcagattcctgagatacaactgcagcatcagagcccccagaaagggctggaccctgatgcaccccggcagactgacccactaccacgagggcctgcccaccaccagaggcaccagatacatcgccgtgagcttcgtggacccctag

SEQ ID NO: 94473 - DNA, 1176 bp, synthetic construct
  misc_feature 1..1176: note = Description of Artificial Sequence: Synthetic coding sequence
  source 1..1176: mol_type = other DNA
atgagacccctgctgctgctggccctgctgggctggctgctgctggccgaggccaagggcgacgccaagcccgaggacaacctgctggtgctgaccgtggccaccaaggagaccgagggcttcagaagattcaagagaagcgcccagttcttcaactacaagatccaggccctgggcctgggcgaggactggaacgtggagaagggcaccagcgccggcggcggccagaaggtgagactgctgaagaaggccctggagaagcacgccgacaaggaggacctggtgatcctgttcgccgacagctacgacgtgctgttcgccagcggccccagagagctgctgaagaagttcagacaggccagaagccaggtggtgttcagcgccgaggagctgatctaccccgacagaagactggagaccaagtaccccgtggtgagcgacggcaagagattcctgctggaggacgtgttcatgttcctgaccaacagacacaccctgggccacctgctgagcctggacagctacagaaccacccacctgcacaacgacctgtgggaggtgttcagcaaccccgaggactggaaggagaagtacatccaccagaactacaccaaggccctggccggcaagctggtggagaccccctgccccgacgtgtactggttccccatcttcaccgaggtggcctgcgacgagctggtggaggagatggagcacttcggccagtggagcctgggcaacaacaaggacaacagaatccagggcggctacgagaacgtgcccaccatcgacatccacatgaaccagatcggcttcgagagagagtggcacaagttcctgctggagtacatcgcccccatgaccgagaagctgtaccccggctactacaccagagcccagttcgacctggccttcgtggtgagatacaagcccgacgagcagcccagcctgatgccccaccacgacgccagcaccttcaccatcaacatcgccctgaacagagtgggcgtggactacgagggcggcggctgcagattcctgagatacaactgcagcatcagagcccccagaaagggctggaccctgatgcaccccggcagactgacccactaccacgagggcctgcccaccaccagaggcaccagatacatcgccgtgagcttcgtggacccctag

SEQ ID NO: 94474 - DNA, 852 bp, synthetic construct
  misc_feature 1..852: note = Description of Artificial Sequence: Synthetic coding sequence
  source 1..852: mol_type = other DNA
atgagacccctgctgctgctggccctgctgggctggctgctgctggccgaggccaagggcgacgccaagcccgaggacaacctgctggtgctgaccgtggccaccaaggagaccgagggcttcagaagattcaagagaagcgcccagttcttcaactacaagatccaggccctgggcctgggcgaggactggaacgtggagaagggcaccagcgccggcggcggccagaaggtgagactgctgaagaaggccctggagaagcacgccgacaaggaggacctggtgatcctgttcgccgacagctacgacgtgctgttcgccagcggccccagagagctgctgaagaagttcagacaggccagaagccaggtggtgttcagcgccgaggagctgatctaccccgacagaagactggagaccaagtaccccgtggtgagcgacggcaagagattcctgggcagcggcggcttcatcggctacgcccccaacctgagcaagctggtggccgagtgggagggccaggacagcgacagcgaccagctgttctacaccaagatcttcctggaccccgagaagagagagcagatcaacatcaccctggaccacagatgcagaatcttccagaacctggacggcgccctggtgagcccctggggccagggccacctgcccggcgcctgctacgagctgaccgccagcgtgctgaccagcgagctgagcgtgatgcccagcttccccgccgtggtgctgcagctgaactacctgggcaactacatccccagattctggaccttcgagaccggctgcaccgtgtgcgacgagggcctgagaagcctgaagggcatcggctag

SEQ ID NO: 94475 - DNA, 678 bp, synthetic construct
  misc_feature 1..678: note = Description of Artificial Sequence: Synthetic coding sequence
  source 1..678: mol_type = other DNA
atgagacccctgctgctgctggccctgctgggctggctgctgctggccgaggccaagggcgacgccaagcccgaggccccctgctgccaggagggcctgagagccggcggcagcggcagcctgcacctgggcagagacttcaccgtgctggccggcgccagaggcagccccagccccagcgtgagcagcatccccagattctggatccccggcagcgacaacctgctggtgctgaccgtggccaccaaggagaccgagggcttcagaagattcaagagaagcgcccagttcttcaactacaagatccaggccctgggcctgggcgaggactggaacgtggagaagggcaccagcgccggcggcggccagaaggtgagactgctgaagaaggccctggagaagcacgccgacaaggaggacctggtgatcctgttcgccgacagctacgacgtgctgttcgccagcggccccagagagctgctgaagaagttcagacaggccagaagccaggtggtgttcagcgccgaggagctgatctaccccgacagaagactggagaccaagtaccccgtggtgagcgacggcaagagattcctgggcagcggcggcttcatcggctacgcccccaacctgagcaagctggtggccgagtgggagggccaggacagcgacagctag

SEQ ID NO: 94476 - DNA, 2277 bp, synthetic construct
  misc_feature 1..2277: note = Description of Artificial Sequence: Synthetic coding sequence
  source 1..2277: mol_type = other DNA
atgggcggctgcaccgtgaagccccagctgctgctgctggccctggtgctgcacccctggaacccctgcctgggcgccgacagcgagaagcccagcagcatccccaccgacaagctgctggtgatcaccgtggccaccaaggagagcgacggcttccacagattcatgcagagcgccaagtacttcaactacaccgtgaaggtgctgggccagggcgaggagtggagaggcggcgacggcatcaacagcatcggcggcggccagaaggtgagactgatgaaggaggtgatggagcactacgccgaccaggacgacctggtggtgatgttcaccgagtgcttcgacgtgatcttcgccggcggccccgaggaggtgctgaagaagttccagaaggccaaccacaaggtggtgttcgccgccgacggcatcctgtggcccgacaagagactggccgacaagtaccccgtggtgcacatcggcaagagatacctgaacagcggcggcttcatcggctacgccccctacgtgaacagaatcgtgcagcagtggaacctgcaggacaacgacgacgaccagctgttctacaccaaggtgtacatcgaccccctgaagagagaggccatcaacatcaccctggaccacaagtgcaagatcttccagaccctgaacggcgccgtggacgaggtggtgctgaagttcgagaacggcaaggccagagccaagaacaccttctacgagaccctgcccgtggccatcaacggcaacggccccaccaagatcctgctgaactacttcggcaactacgtgcccaacagctggacccaggacaacggctgcaccctgtgcgagttcgacaccgtggacctgagcgccgtggacgtgcaccccaacgtgagcatcggcgtgttcatcgagcagcccacccccttcctgcccagattcctggacatcctgctgaccctggactaccccaaggaggccctgaagctgttcatccacaacaaggaggtgtaccacgagaaggacatcaaggtgttcttcgacaaggccaagcacgagatcaagaccatcaagatcgtgggccccgaggagaacctgagccaggccgaggccagaaacatgggcatggacttctgcagacaggacgagaagtgcgactactacttcagcgtggacgccgacgtggtgctgaccaaccccagaaccctgaagatcctgatcgagcagaacagaaagatcatcgcccccctggtgaccagacacggcaagctgtggagcaacttctggggcgccctgagccccgacggctactacgccagaagcgaggactacgtggacatcgtgcagggcaacagagtgggcgtgtggaacgtgccctacatggccaacgtgtacctgatcaagggcaagaccctgagaagcgagatgaacgagagaaactacttcgtgagagacaagctggaccccgacatggccctgtgcagaaacgccagagagatgaccctgcagagagagaaggacagccccacccccgagaccttccagatgctgagcccccccaagggcgtgttcatgtacatcagcaacagacacgagttcggcagactgctgagcaccgccaactacaacaccagccactacaacaacgacctgtggcagatcttcgagaaccccgtggactggaaggagaagtacatcaacagagactacagcaagatcttcaccgagaacatcgtggagcagccctgccccgacgtgttctggttccccatcttcagcgagaaggcctgcgacgagctggtggaggagatggagcactacggcaagtggagcggcggcaagcaccacgacagcagaatcagcggcggctacgagaacgtgcccaccgacgacatccacatgaagcaggtggacctggagaacgtgtggctgcacttcatcagagagttcatcgcccccgtgaccctgaaggtgttcgccggctactacaccaagggcttcgccctgctgaacttcgtggtgaagtacagccccgagagacagagaagcctgagaccccaccacgacgccagcaccttcaccatcaacatcgccctgaacaacgtgggcgaggacttccagggcggcggctgcaagttcctgagatacaactgcagcatcgagagccccagaaagggctggagcttcatgcaccccggcagactgacccacctgcacgagggcctgcccgtgaagaacggcaccagatacatcgccgtgagcttcatcgacccctag

SEQ ID NO: 94477 - DNA, 2214 bp, synthetic construct
  misc_feature 1..2214: note = Description of Artificial Sequence: Synthetic coding sequence
  source 1..2214: mol_type = other DNA
atgggcggctgcaccgtgaagccccagctgctgctgctggccctggtgctgcacccctggaacccctgcctgggcgccgacagcgagaagcccagcagcatccccaccgacaagctgctggtgatcaccgtggccaccaaggagagcgacggcttccacagattcatgcagagcgccaagtacttcaactacaccgtgaaggtgctgggccagggcgaggagtggagaggcggcgacggcatcaacagcatcggcggcggccagaaggtgagactgatgaaggaggtgatggagcactacgccgaccaggacgacctggtggtgatgttcaccgagtgcttcgacgtgatcttcgccggcggccccgaggaggtgctgaagaagttccagaaggccaaccacaaggtggtgttcgccgccgacggcatcctgtggcccgacaagagactggccgacaagtaccccgtggtgcacatcggcaagagatacctgaacagcggcggcttcatcggctacgccccctacgtgaacagaatcgtgcagcagtggaacctgcaggacaacgacgacgaccagctgttctacaccaaggtgtacatcgaccccctgaagagagaggccatcaacatcaccctggaccacaagtgcaagatcttccagaccctgaacggcgccgtggacgaggtggtgctgaagttcgagaacggcaaggccagagccaagaacaccttctacgagaccctgcccgtggccatcaacggcaacggccccaccaagatcctgctgaactacttcggcaactacgtgcccaacagctggacccaggacaacggctgcaccctgtgcgagttcgacaccgtggacctgagcgccgtggacgtgcaccccaacgtgagcatcggcgtgttcatcgagcagcccacccccttcctgcccagattcctggacatcctgctgaccctggactaccccaaggaggccctgaagctgttcatccacaacaaggaggtgtaccacgagaaggacatcaaggtgttcttcgacaaggccaagcacgagatcaagaccatcaagatcgtgggccccgaggagaacctgagccaggccgaggccagaaacatgggcatggacttctgcagacaggacgagaagtgcgactactacttcagcgtggacgccgacgtggtgctgaccaaccccagaaccctgaagatcctgatcgagcagaacagaaagatcatcgcccccctggtgaccagacacggcaagctgtggagcaacttctggggcgccctgagccccgacggctactacgccagaagcgaggactacgtggacatcgtgcagggcaacagagtgggcgtgtggaacgtgccctacatggccaacgtgtacctgatcaagggcaagaccctgagaagcgagatgaacgagagaaactacttcgtgagagacaagctggaccccgacatggccctgtgcagaaacgccagagagatgggcgtgttcatgtacatcagcaacagacacgagttcggcagactgctgagcaccgccaactacaacaccagccactacaacaacgacctgtggcagatcttcgagaaccccgtggactggaaggagaagtacatcaacagagactacagcaagatcttcaccgagaacatcgtggagcagccctgccccgacgtgttctggttccccatcttcagcgagaaggcctgcgacgagctggtggaggagatggagcactacggcaagtggagcggcggcaagcaccacgacagcagaatcagcggcggctacgagaacgtgcccaccgacgacatccacatgaagcaggtggacctggagaacgtgtggctgcacttcatcagagagttcatcgcccccgtgaccctgaaggtgttcgccggctactacaccaagggcttcgccctgctgaacttcgtggtgaagtacagccccgagagacagagaagcctgagaccccaccacgacgccagcaccttcaccatcaacatcgccctgaacaacgtgggcgaggacttccagggcggcggctgcaagttcctgagatacaactgcagcatcgagagccccagaaagggctggagcttcatgcaccccggcagactgacccacctgcacgagggcctgcccgtgaagaacggcaccagatacatcgccgtgagcttcatcgacccctag

SEQ ID NO: 94478 - DNA, 1257 bp, synthetic construct
  misc_feature 1..1257: note = Description of Artificial Sequence: Synthetic coding sequence
  source 1..1257: mol_type = other DNA
atgctggagaaccacatcctgcacaagagaatctacatcctgaccttcttcagccagcagatcttcatcctgtgccacgcccacttcatcttcttcttcaccgtgagagacttctgcagacaggacgagaagtgcgactactacttcagcgtggacgccgacgtggtgctgaccaaccccagaaccctgaagatcctgatcgagcagaacagaaagatcatcgcccccctggtgaccagacacggcaagctgtggagcaacttctggggcgccctgagccccgacggctactacgccagaagcgaggactacgtggacatcgtgcagggcaacagagtgggcgtgtggaacgtgccctacatggccaacgtgtacctgatcaagggcaagaccctgagaagcgagatgaacgagagaaactacttcgtgagagacaagctggaccccgacatggccctgtgcagaaacgccagagagatgaccctgcagagagagaaggacagccccacccccgagaccttccagatgctgagcccccccaagggcgtgttcatgtacatcagcaacagacacgagttcggcagactgctgagcaccgccaactacaacaccagccactacaacaacgacctgtggcagatcttcgagaaccccgtggactggaaggagaagtacatcaacagagactacagcaagatcttcaccgagaacatcgtggagcagccctgccccgacgtgttctggttccccatcttcagcgagaaggcctgcgacgagctggtggaggagatggagcactacggcaagtggagcggcggcaagcaccacgacagcagaatcagcggcggctacgagaacgtgcccaccgacgacatccacatgaagcaggtggacctggagaacgtgtggctgcacttcatcagagagttcatcgcccccgtgaccctgaaggtgttcgccggctactacaccaagggcttcgccctgctgaacttcgtggtgaagtacagccccgagagacagagaagcctgagaccccaccacgacgccagcaccttcaccatcaacatcgccctgaacaacgtgggcgaggacttccagggcggcggctgcaagttcctgagatacaactgcagcatcgagagccccagaaagggctggagcttcatgcaccccggcagactgacccacctgcacgagggcctgcccgtgaagaacggcaccagatacatcgccgtgagcttcatcgacccctag

SEQ ID NO: 94479 - DNA, 2112 bp, synthetic construct
  misc_feature 1..2112: note = Description of Artificial Sequence: Synthetic coding sequence
  source 1..2112: mol_type = other DNA
atgcagagcgccaagtacttcaactacaccgtgaaggtgctgggccagggcgaggagtggagaggcggcgacggcatcaacagcatcggcggcggccagaaggtgagactgatgaaggaggtgatggagcactacgccgaccaggacgacctggtggtgatgttcaccgagtgcttcgacgtgatcttcgccggcggccccgaggaggtgctgaagaagttccagaaggccaaccacaaggtggtgttcgccgccgacggcatcctgtggcccgacaagagactggccgacaagtaccccgtggtgcacatcggcaagagatacctgaacagcggcggcttcatcggctacgccccctacgtgaacagaatcgtgcagcagtggaacctgcaggacaacgacgacgaccagctgttctacaccaaggtgtacatcgaccccctgaagagagaggccatcaacatcaccctggaccacaagtgcaagatcttccagaccctgaacggcgccgtggacgaggtggtgctgaagttcgagaacggcaaggccagagccaagaacaccttctacgagaccctgcccgtggccatcaacggcaacggccccaccaagatcctgctgaactacttcggcaactacgtgcccaacagctggacccaggacaacggctgcaccctgtgcgagttcgacaccgtggacctgagcgccgtggacgtgcaccccaacgtgagcatcggcgtgttcatcgagcagcccacccccttcctgcccagattcctggacatcctgctgaccctggactaccccaaggaggccctgaagctgttcatccacaacaaggaggtgtaccacgagaaggacatcaaggtgttcttcgacaaggccaagcacgagatcaagaccatcaagatcgtgggccccgaggagaacctgagccaggccgaggccagaaacatgggcatggacttctgcagacaggacgagaagtgcgactactacttcagcgtggacgccgacgtggtgctgaccaaccccagaaccctgaagatcctgatcgagcagaacagaaagatcatcgcccccctggtgaccagacacggcaagctgtggagcaacttctggggcgccctgagccccgacggctactacgccagaagcgaggactacgtggacatcgtgcagggcaacagagtgggcgtgtggaacgtgccctacatggccaacgtgtacctgatcaagggcaagaccctgagaagcgagatgaacgagagaaactacttcgtgagagacaagctggaccccgacatggccctgtgcagaaacgccagagagatgaccctgcagagagagaaggacagccccacccccgagaccttccagatgctgagcccccccaagggcgtgttcatgtacatcagcaacagacacgagttcggcagactgctgagcaccgccaactacaacaccagccactacaacaacgacctgtggcagatcttcgagaaccccgtggactggaaggagaagtacatcaacagagactacagcaagatcttcaccgagaacatcgtggagcagccctgccccgacgtgttctggttccccatcttcagcgagaaggcctgcgacgagctggtggaggagatggagcactacggcaagtggagcggcggcaagcaccacgacagcagaatcagcggcggctacgagaacgtgcccaccgacgacatccacatgaagcaggtggacctggagaacgtgtggctgcacttcatcagagagttcatcgcccccgtgaccctgaaggtgttcgccggctactacaccaagggcttcgccctgctgaacttcgtggtgaagtacagccccgagagacagagaagcctgagaccccaccacgacgccagcaccttcaccatcaacatcgccctgaacaacgtgggcgaggacttccagggcggcggctgcaagttcctgagatacaactgcagcatcgagagccccagaaagggctggagcttcatgcaccccggcagactgacccacctgcacgagggcctgcccgtgaagaacggcaccagatacatcgccgtgagcttcatcgacccctag

SEQ ID NO: 94480 - DNA, 1092 bp, synthetic construct; identical to SEQ ID NO: 77645
  misc_feature 1..1092: note = Description of Artificial Sequence: Synthetic coding sequence
  source 1..1092: mol_type = other DNA

SEQ ID NO: 94481 - DNA, 231 bp, synthetic construct
  misc_feature 1..231: note = Description of Artificial Sequence: Synthetic coding sequence
  source 1..231: mol_type = other DNA
atgaccagcagcggccccggccccagattcctgctgctgctgcccctgctgctgccccccgccgccagcgccagcgacagacccagaggcagagaccccgtgaaccccgagaagctgctggtgatcaccgtggccaccgccgagaccgagggctacctgagattcctgagaagcgccgagttcttcaactacaccgtgagaaccctgggcctgggcgaggagtggagatag

SEQ ID NO: 94482 - DNA, 732 bp, synthetic construct
  misc_feature 1..732: note = Description of Artificial Sequence: Synthetic coding sequence
  source 1..732: mol_type = other DNA
atggagaagtacgccgacagagaggacatgatcatcatgttcgtggacagctacgacgtgatcctggccggcagccccaccgagctgctgaagaagttcgtgcagagcggcagcagactgctgttcagcgccgagagcttctgctggcccgagtggggcctggccgagcagtaccccgaggtgggcaccggcaagagattcctgaacagcggcggcttcatcggcttcgccaccaccatccaccagatcgtgagacagtggaagtacaaggacgacgacgacgaccagctgttctacaccagactgtacctggaccccggcctgagagagaagctgagcctgaacctggaccacaagagcagaatcttccagaacctgaacggcgccctggacgaggtggtgctgaagttcgacagaaacagagtgagaatcagaaacgtggcctacgacaccctgcccatcgtggtgcacggcaacggccccaccaagctgcagctgaactacctgggcaactacgtgcccaacggctggacccccgagggcggctgcggcttctgcaaccaggacagaagaaccctgcccggcggccccgccagcccccccggcgtgagcggcagagtgtgcggcaccgcctacagcgtgagcgcccccctgcccgccgccgccgccacccccggcctgagccccagacagggccaccccttccccgcccagcagagaggcctgccctag

SEQ ID NO: 94483 - DNA, 1740 bp, synthetic construct
  misc_feature 1..1740: note = Description of Artificial Sequence: Synthetic coding sequence
  source 1..1740: mol_type = other DNA
atggccgccaagagcgacggcgccgccgccagcgccagccccgaccccgagggcgccgccggcggcgccagaggcagcgccggcggcagaggcgaggccgccgccgccgccggcccccccggcgtggtgggcgccggcggccccggccccagatacgagctgagagactgctgctgggtgctgtgcgccctgctggtgttcttcagcgacggcgccaccgacctgtggctggccgccagctactacctgcagaaccagcacacctacttcagcctgaccctgctgttcgtgctgctgcccagcctggtggtgcagctgctgagcttcagatggttcgtgtacgactacagcgagcccgccggcagccccggccccgccgtgagcaccaaggacagcgtggccggcggcgccgccatcagcaccaaggacagcgccggcgccttcagaaccaaggagggcagccccgagcccggcccccagcccgcccccagcagcgccagcgcctacagaagaagatgctgcagactgtgcatctggctgctgcagaccctggtgcacctgctgcagctgggccaggtgtggagatacctgagagccctgtacctgggcctgcagagcagatggagaggcgagagactgagaagacacttctactggcagatgctgttcgagagcgccgacgtgagcatgctgagactgctggagaccttcctgagaagcgccccccagctggtgctgcagctgagcctgctggtgcacagaggcggcgcccccgacctgctgcccgccctgagcaccagcgccagcctggtgagcctggcctggaccctggccagctaccagaaggtgctgagagacagcagagacgacaagagacccctgagctacaagggcgccgtggcccaggtgctgtggcacctgttcagcatcgccgccagaggcctggccttcgccctgttcgccagcgtgtacaagctgtacttcggcatcttcatcgtggcccactggtgcgtgatgaccttctgggtgatccagggcgagaccgacttctgcatgagcaagtgggaggagatcatctacaacatggtggtgggcatcatctacatcttctgctggttcaacgtgaaggagggcagaagcagaagaagaatgaccctgtaccactgcatcgtgctgctggagaacgccgccctgaccggcttctggtacagcagcagaaacttcagcaccgacttctacagcctgatcatggtgtgcgtggtggccagcagcttcgccctgggcatcttcttcatgtgcgtgtactactgcctgctgcaccccaacggccccatgctgggcccccaggcccccggctgcatcttcagaaaggccagcgagccctgcggcccccccgccgacgccatcaccagcccccccagaagcctgcccagaaccaccggcgccgagagagacggcgccagcgccggcgagagagccggcacccccaccccccccgtgttccaggtgagacccggcctgccccccacccccgtggccagaaccctgagaaccgagggccccgtgatcagaatcgacctgcccagaaagaagtaccccgcctgggacgcccacttcatcgacagaagactgagaaagaccatcctggccctggagtacagcagccccgccacccccagactgcagtacagaagcgtgggcaccagccaggagctgctggagtacgagaccaccgtgtag

SEQ ID NO: 94484 - DNA, 765 bp, synthetic construct
  misc_feature 1..765: note = Description of Artificial Sequence: Synthetic coding sequence
  source 1..765: mol_type = other DNA
atggcctggcagggcctggtgctggccgcctgcctgctgatgttccccagcaccaccgccgactgcctgagcagatgcagcctgtgcgccgtgaagacccaggacggccccaagcccatcaaccccctgatctgcagcctgcagtgccaggccgccctgctgcccagcgaggagtgggagagatgccagagcttcctgagcttcttcacccccagcaccctgggcctgaacgacaaggaggacctgggcagcaagagcgtgggcgagggcccctacagcgagctggccaagctgagcggcagcttcctgaaggagctggagaagagcaagttcctgcccagcatcagcaccaaggagaacaccctgagcaagagcctggaggagaagctgagaggcctgagcgacggcttcagagagggcgccgagagcgagctgatgagagacgcccagctgaacgacggcgccatggagaccggcaccctgtacctggccgaggaggaccccaaggagcaggtgaagagatacggcggcttcctgagaaagtaccccaagagaagcagcgaggtggccggcgagggcgacggcgacagcatgggccacgaggacctgtacaagagatacggcggcttcctgagaagaatcagacccaagctgaagtgggacaaccagaagagatacggcggcttcctgagaagacagttcaaggtggtgaccagaagccaggaggaccccaacgcctacagcggcgagctgttcgacgcctag

SEQ ID NO: 94485 - DNA, 765 bp, synthetic construct; identical to SEQ ID NO: 94484
  misc_feature 1..765: note = Description of Artificial Sequence: Synthetic coding sequence
  source 1..765: mol_type = other DNA

SEQ ID NO: 94486 - DNA, 804 bp, synthetic construct
  misc_feature 1..804: note = Description of Artificial Sequence: Synthetic coding sequence
  source 1..804: mol_type = other DNA
atggccagattcctgaccctgtgcacctggctgctgctgctgggccccggcctgctggccaccgtgagagccgagtgcagccaggactgcgccacctgcagctacagactggtgagacccgccgacatcaacttcctggcctgcgtgatggagtgcgagggcaagctgcccagcctgaagatctgggagacctgcaaggagctgctgcagctgagcaagcccgagctgccccaggacggcaccagcaccctgagagagaacagcaagcccgaggagagccacctgctggccaagagatacggcggcttcatgaagagatacggcggcttcatgaagaagatggacgagctgtaccccatggagcccgaggaggaggccaacggcagcgagatcctggccaagagatacggcggcttcatgaagaaggacgccgaggaggacgacagcctggccaacagcagcgacctgctgaaggagctgctggagaccggcgacaacagagagagaagccaccaccaggacggcagcgacaacgaggaggaggtgagcaagagatacggcggcttcatgagaggcctgaagagaagcccccagctggaggacgaggccaaggagctgcagaagagatacggcggcttcatgagaagagtgggcagacccgagtggtggatggactaccagaagagatacggcggcttcctgaagagattcgccgaggccctgcccagcgacgaggagggcgagagctacagcaaggaggtgcccgagatggagaagagatacggcggcttcatgagattctag

SEQ ID NO: 94487 - DNA, 804 bp, synthetic construct; identical to SEQ ID NO: 94486
  misc_feature 1..804: note = Description of Artificial Sequence: Synthetic coding sequence
  source 1..804: mol_type = other DNA

SEQ ID NO: 94488 - DNA, 318 bp, synthetic construct
  misc_feature 1..318: note = Description of Artificial Sequence: Synthetic coding sequence
  source 1..318: mol_type = other DNA
atggccagattcctgaccctgtgcacctggctgctgctgctgggccccggcctgctggccaccgtgagagccgagtgcagccaggactgcgccacctgcagctacagactggtgagacccgccgacatcaacttcctggcctgcgtgatggagtgcgagggcaagctgcccagcctgaagatctgggagacctgcaaggagctgctgcagctgagcaagcccgagctgccccaggacggcaccagcaccctgagagagaacagcaagcccgaggagagccacctgctggccaagagatacggcggcttcatgaagtag

SEQ ID NO: 94489 - DNA, 570 bp, synthetic construct
  misc_feature 1..570: note = Description of Artificial Sequence: Synthetic coding sequence
  source 1..570: mol_type = other DNA
atggccagattcctgaccctgtgcacctggctgctgctgctgggccccggcctgctggccaccgtgagagccgagtgcagccaggactgcgccacctgcagctacagactggtgagacccgccgacatcaacttcctggcctgcgtgatggagtgcgagggcaagctgcccagcctgaagatctgggagacctgcaaggagctgctgcagctgagcaagcccgagctgccccaggacggcaccagcaccctgagagagaacagcaagcccgaggagagccacctgctggccaagagatacggcggcttcatgaagagatacggcggcttcatgaagaagatggacgagctgtaccccatggagcccgaggaggaggccaacggcagcgagatcctggccaagagatacggcggcttcatgaagaaggacgccgaggaggacgacagcctggccaacagcagcgacctgctgaaggagctgctggagaccggcgacaacagagagagaagccaccaccaggacggcagcgacaacgaggaggagaagaagaagaagaagagaaaggagtag

SEQ ID NO: 94490 - DNA, 423 bp, synthetic construct
  misc_feature 1..423: note = Description of Artificial Sequence: Synthetic coding sequence
  source 1..423: mol_type = other DNA
atggccggctggcagagctacgtggacaacctgatgtgcgacggctgctgccaggaggccgccatcgtgggctactgcgacgccaagtacgtgtgggccgccaccgccggcggcgtgttccagagcatcacccccatcgagatcgacatgatcgtgggcaaggacagagagggcttcttcaccaacggcctgaccctgggcgccaagaagtgcagcgtgatcagagacagcctgtacgtggacggcgactgcaccatggacatcagaaccaagagccagggcggcgagcccacctacaacgtggccgtgggcagagccggcagagtgctggtgttcgtgatgggcaaggagggcgtgcacggcggcggcctgaacaagaaggcctacagcatggccaagtacctgagagacagcggcttctag

SEQ ID NO: 94491 - DNA, 423 bp, synthetic construct
  misc_feature 1..423: note = Description of Artificial Sequence: Synthetic coding sequence
  source 1..423: mol_type = other DNA
atggccggctggcagagctacgtggacaacctgatgtgcgacggctgctgccaggaggccgccatcgtgggctactgcgacgccaagtacgtgtgggccgccaccgccggcggcgtgttccagagcatcacccccatcgagatcgacatgatcgtgggcaaggacagagagggcttcttcaccaacggcctgaccctgggcgccaagaagtgcagcgtgatcagagacagcctgtacgtggacggcgactgcaccatggacatcagaaccaagagccagggcggcgagcccacctacaacgtggccgtgggcagagccggcagagccctggtgatcgtgatgggcaaggagggcgtgcacggcggcaccctgaacaagaaggcctacgagctggccctgtacctgagaagaagcgacgtgtag

SEQ ID NO: 94492 - DNA, 414 bp, synthetic construct
  misc_feature 1..414: note = Description of Artificial Sequence: Synthetic coding sequence
  source 1..414: mol_type = other DNA
atgggcgactggaaggtgtacatcagcgccgtgctgagagaccagagaatcgacgacgtggccatcgtgggccacgccgacaacagctgcgtgtgggccagcagacccggcggcctgctggccgccatcagcccccaggaggtgggcgtgctgaccggccccgacagacacaccttcctgcaggccggcctgagcgtgggcggcagaagatgctgcgtgatcagagaccacctgctggccgagggcgacggcgtgctggacgccagaaccaagggcctggacgccagagccgtgtgcgtgggcagagcccccagagccctgctggtgctgatgggcagaagaggcgtgcacggcggcatcctgaacaagaccgtgcacgagctgatcagaggcctgagaatgcagggcgcctag

SEQ ID NO: 94493 - DNA, 1167 bp, synthetic construct
  misc_feature 1..1167: note = Description of Artificial Sequence: Synthetic coding sequence
  source 1..1167: mol_type = other DNA
atgaagtggatggtggtggtgctggtgtgcctgcagctgctggaggccgccgtggtgaaggtgcccctgaagaagttcaagagcatcagagagaccatgaaggagaagggcctgctgggcgagttcctgagaacccacaagtacgaccccgcctggaagtacagattcggcgacctgagcgtgacctacgagcccatggcctacatggacgccgcctacttcggcgagatcagcatcggcacccccccccagaacttcctggtgctgttcgacaccggcagcagcaacctgtgggtgcccagcgtgtactgccagagccaggcctgcaccagccacagcagattcaaccccagcgagagcagcacctacagcaccaacggccagaccttcagcctgcagtacggcagcggcagcctgaccggcttcttcggctacgacaccctgaccgtgcagagcatccaggtgcccaaccaggagttcggcctgagcgagaacgagcccggcaccaacttcgtgtacgcccagttcgacggcatcatgggcctggcctaccccgccctgagcgtggacgaggccaccaccgccatgcagggcatggtgcaggagggcgccctgaccagccccgtgttcagcgtgtacctgagcaaccagcagggcagcagcggcggcgccgtggtgttcggcggcgtggacagcagcctgtacaccggccagatctactgggcccccgtgacccaggagctgtactggcagatcggcatcgaggagttcctgatcggcggccaggccagcggctggtgcagcgagggctgccaggccatcgtggacaccggcaccagcctgctgaccgtgccccagcagtacatgagcgccctgctgcaggccaccggcgcccaggaggacgagtacggccagttcctggtgaactgcaacagcatccagaacctgcccagcctgaccttcatcatcaacggcgtggagttccccctgccccccagcagctacatcctgagcaacaacggctactgcaccgtgggcgtggagcccacctacctgagcagccagaacggccagcccctgtggatcctgggcgacgtgttcctgagaagctactacagcgtgtacgacctgggcaacaacagagtgggcttcgccaccgccgcctag

SEQ ID NO: 94494 - DNA, 315 bp, synthetic construct
  misc_feature 1..315: note = Description of Artificial Sequence: Synthetic coding sequence
  source 1..315: mol_type = other DNA
atgaagtggatggtggtggtgctggtgtgcctgcagctgctggaggccgccgtggtgaaggtgcccctgaagaagttcaagagcatcagagagaccatgaaggagaagggcctgctgggcgagttcctgagaacccacaagtacgaccccgcctggaagtacagattcggcgacctgagcgtgacctacgagcccatggcctacatggacgccgcctacttcggcgagatcagcatcggcacccccccccagaacttcctggtgctgttcgacaccggcagcagccccctgcccctggaccccgcccccagctag

SEQ ID NO: 94495 - DNA, 411 bp, synthetic construct
  misc_feature 1..411: note = Description of Artificial Sequence: Synthetic coding sequence
  source 1..411: mol_type = other DNA
atgaagtggatggtggtggtgctggtgtgcctgcagctgctggaggccgccgtggtgaaggtgcccctgaagaagttcaagagcatcagagagaccatgaaggagaagggcctgctgggcgagttcctgagaacccacaagtacgaccccgcctggaagtacagattcggcgacctgagcgtgacctacgagcccatggcctacatggacgtgcagagcatccaggtgcccaaccaggagttcggcctgagcgagaacgagcccggcaccaacttcgtgtacgcccagttcgacggcatcatgggcctggcctaccccgccctgagcgtggacgaggccaccaccgccatgcagggcatggtgcaggagggcgccctgaccagccccgtgttcagcgtgtacctgagctag

SEQ ID NO: 94496 - DNA, 948 bp, synthetic construct
  misc_feature 1..948: note = Description of Artificial Sequence: Synthetic coding sequence
  source 1..948: mol_type = other DNA
atgaagtggatggtggtggtgctggtgtgcctgcagctgctggaggccgccgtggtgaaggtgcccctgaagaagttcaagagcatcagagagaccatgaaggagaagggcctgctgggcgagttcctgagaacccacaagtacgaccccgcctggaagtacagattcggcgacctgagcgtgacctacgagcccatggcctacatggacgccgcctacttcggcgagatcagcatcggcacccccccccagaacttcctggtgctgttcgacaccggcagcagcaacctgtgggtgcccagcgtgtactgccagagccaggcctgcaccagccacagcagattcaaccccagcgagagcagcacctacagcaccaacggccagaccttcagcctgcagtacggcagcggcagcctgaccggcttcttcggctacgacaccctgaccgtgcagagcatccaggtgcccaaccaggagttcggcctgagcgagaacgagcccggcaccaacttcgtgtacgcccagttcgacggcatcatgggcctggcctaccccgccctgagcgtggacgaggccaccaccgccatgcagggcatggtgcaggagggcgccctgaccagccccgtgttcagcgtgtacctgagcaacctggtgctggagagcagcggcctgggccccctgctgacccccagcagagccgccccccccagcagcaccctgcagctgcccgagaagcccctggagcagacctggaacatcctgacccccttcaccaagaccctgcccgtgagcaacctgagcagaaaggtgaccagctgggccggcgtgggcatccccgtgacctgcctgcccgaggccggcagcggcggcgagagaagagccgagtgcggcctgggcgtgcccaccaccagaggcccccccagaagccagcaccacagcggcgcctag

SEQ ID NO: 94497 - DNA, 543 bp, synthetic construct
  misc_feature 1..543: note = Description of Artificial Sequence: Synthetic coding sequence
  source 1..543: mol_type = other DNA
atgctgtgcctgctgctgaccctgggcgtggccctggtgtgcggcgtgcccgccatggacatcccccagaccaagcaggacctggagctgcccaagctggccggcacctggcacagcatggccatggccaccaacaacatcagcctgatggccaccctgaaggcccccctgagagtgcacatcaccagcctgctgcccacccccgaggacaacctggagatcgtgctgcacagatgggagaacaacagctgcgtggagaagaaggtgctgggcgagaagaccgagaaccccaagaagttcaagatcaactacaccgtggccaacgaggccaccctgctggacaccgactacgacaacttcctgttcctgtgcctgcaggacaccaccacccccatccagagcatgatgtgccagtacctggccagagtgctggtggaggacgacgagatcatgcagggcttcatcagagccttcagacccctgcccagacacctgtggtacctgctggacctgaagcagatggaggagccctgcagattctag

SEQ ID NO: 94498 - DNA, 261 bp, synthetic construct
  misc_feature 1..261: note = Description of Artificial Sequence: Synthetic coding sequence
  source 1..261: mol_type = other DNA
atgctgtgcctgctgctgaccctgggcgtggccctggtgtgcggcgtgcccgccatggacatcccccagaccaagcaggacctggagctgcccaaggacaccaccacccccatccagagcatgatgtgccagtacctggccagagtgctggtggaggacgacgagatcatgcagggcttcatcagagccttcagacccctgcccagacacctgtggtacctgctggacctgaagcagatggaggccccctgctggctgtag

SEQ ID NO: 94499 - DNA, 543 bp, synthetic construct; identical to SEQ ID NO: 94497
  misc_feature 1..543: note = Description of Artificial Sequence: Synthetic coding sequence
  source 1..543: mol_type = other DNA

SEQ ID NO: 94500 - DNA, 438 bp, synthetic construct
  misc_feature 1..438: note = Description of Artificial Sequence: Synthetic coding sequence
  source 1..438: mol_type = other DNA
atgctgtgcctgctgctgaccctgggcgtggccctggtgtgcggcgtgcccgccatggacatcccccagaccaagcaggacctggagctgcccaaggcccccctgagagtgcacatcaccagcctgctgcccacccccgaggacaacctggagatcgtgctgcacagatgggagaacaacagctgcgtggagaagaaggtgctgggcgagaagaccgagaaccccaagaagttcaagatcaactgcaaggccagcggcgccccccagctgagctggaagccccagggccccagaaccgaccccgccagcagcaccgccagagtgctggtggaggacgacgagatcatgcagggcttcatcagagccttcagacccctgcccagacacctgtggtacctgctggacctgaagcagatggaggagccctgcagattctag

SEQ ID NO: 94501 - DNA, 399 bp, synthetic construct
  misc_feature 1..399: note = Description of Artificial Sequence: Synthetic coding sequence
  source 1..399: mol_type = other DNA
ctgatggccaccctgaaggcccccctgagagtgcacatcaccagcctgctgcccacccccgaggacaacctggagatcgtgctgcacagatgggagaacaacagctgcgtggagaagaaggtgctgggcgagaagaccgagaaccccaagaagttcaagatcaactacaccgtggccaacgaggccaccctgctggacaccgactacgacaacttcctgttcctgtgcctgcaggacaccaccacccccatccagagcatgatgtgccagtacctggccagagtgctggtggaggacgacgagatcatgcagggcttcatcagagccttcagacccctgcccagacacctgtggtacctgctggacctgaagcagatggaggagccctgcagattctag

SEQ ID NO: 94502 - DNA, 396 bp, synthetic construct
  misc_feature 1..396: note = Description of Artificial Sequence: Synthetic coding sequence
  source 1..396: mol_type = other DNA
tgagtgcccgccatggacatcccccagaccaagcaggacctggagctgcccaaggcccccctgagagtgcacatcaccagcctgctgcccacccccgaggacaacctggagatcgtgctgcacagatgggagaacaacagctgcgtggagaagaaggtgctgggcgagaagaccgagaaccccaagaagttcaagatcaactgcaaggccagcggcgccccccagctgagctggaagccccagggccccagaaccgaccccgccagcagcaccgccagagtgctggtggaggacgacgagatcatgcagggcttcatcagagccttcagacccctgcccagacacctgtggtacctgctggacctgaagcagatggaggagccctgcagattctag

SEQ ID NO: 94503 - DNA, 381 bp, synthetic construct
  misc_feature 1..381: note = Description of Artificial Sequence: Synthetic coding sequence
  source 1..381: mol_type = other DNA
tgacccctgagagtgcacatcaccagcctgctgcccacccccgaggacaacctggagatcgtgctgcacagatgggagaacaacagctgcgtggagaagaaggtgctgggcgagaagaccgagaaccccaagaagttcaagatcaactacaccgtggccaacgaggccaccctgctggacaccgactacgacaacttcctgttcctgtgcctgcaggacaccaccacccccatccagagcatgatgtgccagtacctggccagagtgctggtggaggacgacgagatcatgcagggcttcatcagagccttcagacccctgcccagacacctgtggtacctgctggacctgaagcagatggaggagccctgcagattctag

SEQ ID NO: 94504 - DNA, 102 bp, synthetic construct
  misc_feature 1..102: note = Description of Artificial Sequence: Synthetic coding sequence
  source 1..102: mol_type = other DNA
tgagagatcatgcagggcttcatcagagccttcagacccctgcccagacacctgtggtacctgctggacctgaagcagatggaggagccctgcagattctag

SEQ ID NO: 94505 - DNA, 543 bp, synthetic construct; identical to SEQ ID NO: 94497
  misc_feature 1..543: note = Description of Artificial Sequence: Synthetic coding sequence
  source 1..543: mol_type = other DNA

SEQ ID NO: 94506 - DNA, 510 bp, synthetic construct
  misc_feature 1..510: note = Description of Artificial Sequence: Synthetic coding sequence
  source 1..510: mol_type = other DNA
atgctgtgcctgctgctgaccctgggcgtggccctggtgtgcggcgtgcccgccatggacatcccccagaccaagcaggacctggagctgcccaagctggccggcacctggcacagcatggccatggccaccaacaacatcagcctgatggccaccctgaaggcccccctgagagtgcacatcaccagcctgctgcccacccccgaggacaacctggagatcgtgctgcacagatgggagaacaacagctgcgtggagaagaaggtgctgggcgagaagaccgagaaccccaagaagttcaagatcaactacaccgtggccaacgaggccaccctgctggacaccgactacgacaacttcctgttcctgtgcctgcaggacaccaccacccccatccagagcatgatgtgccagtacctggagagctggtggagaaccatgagaagctgcagagacagcagcggcctgagcggcccctgccccggcacctacggcacctgctggacctag

SEQ ID NO: 94507 - DNA, 2274 bp, synthetic construct
  misc_feature 1..2274: note = Description of Artificial Sequence: Synthetic coding sequence
  source 1..2274: mol_type = other DNA
atgagcagaaagatcagcaaggagagcaagaaggtgaacatcagcagcagcctggagagcgaggacatcagcctggagaccaccgtgcccaccgacgacatcagcagcagcgaggagagagagggcaaggtgagaatcaccagacagctgatcgagagaaaggagctgctgcacaacatccagctgctgaagatcgagctgagccagaagaccatgatgatcgacaacctgaaggtggactacctgaccaagatcgaggagctggaggagaagctgaacgacgccctgcaccagaagcagctgctgaccctgagactggacaaccagctggccttccagcagaaggacgccagcaagtaccaggagctgatgaagcaggagatggagaccatcctgctgagacagaagcagctggaggagaccaacctgcagctgagagagaaggccggcgacgtgagaagaaacctgagagacttcgagctgaccgaggagcagtacatcaagctgaaggccttccccgaggaccagctgagcatccccgagtacgtgagcgtgagattctacgagctggtgaaccccctgagaaaggagatctgcgagctgcaggtgaagaagaacatcctggccgaggagctgagcaccaacaagaaccagctgaagcagctgaccgagacctacgaggaggacagaaagaactacagcgaggtgcagatcagatgccagagactggccctggagctggccgacaccaagcagctgatccagcagggcgactacagacaggagaactacgacaaggtgaagagcgagagagacgccctggagcaggaggtgatcgagctgagaagaaagcacgagatcctggaggccagccacatgatccagaccaaggagagaagcgagctgagcaaggaggtggtgaccctggagcagaccgtgaccctgctgcagaaggacaaggagtacctgaacagacagaacatggagctgagcgtgagatgcgcccacgaggaggacagactggagagactgcaggcccagctggaggagagcaagaaggccagagaggagatgtacgagaagtacgtggccagcagagaccactacaagaccgagtacgagaacaagctgcacgacgagctggagcagatcagactgaagaccaaccaggagatcgaccagctgagaaacgccagcagagagatgtacgagagagagaacagaaacctgagagaggccagagacaacgccgtggccgagaaggagagagccgtgatggccgagaaggacgccctggagaagcacgaccagctgctggacagatacagagagctgcagctgagcaccgagagcaaggtgaccgagttcctgcaccagagcaagctgaagagcttcgagagcgagagagtgcagctgctgcaggaggagaccgccagaaacctgacccagtgccagctggagtgcgagaagtaccagaagaagctggaggtgctgaccaaggagttctacagcctgcaggccagcagcgagaagagaatcaccgagctgcaggcccagaacagcgagcaccaggccagactggacatctacgagaagctggagaaggagctggacgagatcatcatgcagaccgccgagatcgagaacgaggacgaggccgagagagtgctgttcagctacggctacggcgccaacgtgcccaccaccgccaagagaagactgaagcagagcgtgcacctggccagaagagtgctgcagctggagaagcagaacagcctgatcctgaaggacctggagcacagaaaggaccaggtgacccagctgagccaggagctggacagagccaacagcctgctgaaccagacccagcagccctacagatacctgatcgagagcgtgagacagagagacagcaagatcgacagcctgaccgagagcatcgcccagctggagaaggacgtgagcaacctgaacaaggagaagagcgccctgctgcagaccaagaaccagatggccctggacctggagcagctgctgaaccacagagaggagctggccgccatgaagcagatcctggtgaagatgcacagcaagcacagcgagaacagcctgctgctgaccaagaccgagcccaagcacgtgaccgagaaccagaagagcaagaccctgaacgtgcccaaggagcacgaggacaacatcttcacccccaagcccaccctgttcaccaagaaggaggcccccgagtggagcaagaagcagaagatgaagacctag

SEQ ID NO: 94508 - DNA, 651 bp, synthetic construct
  misc_feature 1..651: note = Description of Artificial Sequence: Synthetic coding sequence
  source 1..651: mol_type = other DNA
ttcagaaccgccaaggtggagaacgaggacgaggccgagagagtgctgttcagctacggctacggcgccaacgtgcccaccaccgccaagagaagactgaagcagagcgtgcacctggccagaagagtgctgcagctggagaagcagaacagcctgatcctgaaggacctggagcacagaaaggaccaggtgacccagctgagccaggagctggacagagccaacagcctgctgaaccagacccagcagccctacagatacctgatcgagagcgtgagacagagagacagcaagatcgacagcctgaccgagagcatcgcccagctggagaaggacgtgagcaacctgaacaaggagaagagcgccctgctgcagaccaagaaccagatggccctggacctggagcagctgctgaaccacagagaggagctggccgccatgaagcagatcctggtgaagatgcacagcaagcacagcgagaacagcctgctgctgaccaagaccgagcccaagcacgtgaccgagaaccagaagagcaagaccctgaacgtgcccaaggagcacgaggacaacatcttcacccccaagcccaccctgttcaccaagaaggaggcccccgagtggagcaagaagcagaagatgaagacctag

SEQ ID NO: 94509 - DNA, 1245 bp, synthetic construct
  misc_feature 1..1245: note = Description of Artificial Sequence: Synthetic coding sequence
  source 1..1245: mol_type = other DNA
atgagcagaaagatcagcaaggagagcaagaaggtgaacatcagcagcagcctggagagcgaggacatcagcctggagaccaccgtgcccaccgacgacatcagcagcagcgaggagagagagggcaaggtgagaatcaccagacagctgatcgagagaaaggagctgctgcacaacatccagctgctgaagatcgagctgagccagaagaccatgatgatcgacaacctgaaggtggactacctgaccaagatcgaggagctggaggagaagctgaacgacgccctgcaccagaagcagctgctgaccctgagactggacaaccagctggccttccagcagaaggacgccagcaagtaccaggagctgatgaagcaggagatggagaccatcctgctgagacagaagcagctggaggagaccaacctgcagctgagagagaaggccggcgacgtgagaagaaacctgagagacttcgagctgaccgaggagcagtacatcaagctgaaggccttccccgaggaccagctgagcatccccgagtacgtgagcgtgagattctacgagctggtgaaccccctgagaaaggagatctgcgagctgcaggtgaagaagaacatcctggccgaggagctgagcaccaacaagaaccagctgaagcagctgaccgagacctacgaggaggacagaaagaactacagcgaggtgcagatcagatgccagagactggccctggagctggccgacaccaagcagctgatccagcagggcgactacagacaggagaactacgacaaggtgaagagcgagagagacgccctggagcaggaggtgatcgagctgagaagaaagcacgagatcctggaggccagccacatgatccagaccaaggagagaagcgagctgagcaaggaggtggtgaccctggagcagaccgtgaccctgctgcagaaggacaaggagtacctgaacagacagaacatggagctgagcgtgagatgcgcccacgaggaggacagactggagagactgcaggcccagctggaggagagcaagaaggccagagaggagatgtacgagaagtacgtggccagcagagaccactacaagaccgagtacgagaacaagctgcacgacgagctggagcagatcagactgaagaccaaccaggagatcgaccagctgagaaacgccagcagagagatgtacgagagagagaacagaaagaagagaaagaagaagtag

SEQ ID NO: 94510 - DNA, 1734 bp, synthetic construct
  misc_feature 1..1734: note = Description of Artificial Sequence: Synthetic coding sequence
  source 1..1734: mol_type = other DNA
atgaccgagctggccggcgccagcagcagctgctgccacagacccgccggcagaggcgccatgcagagcgtgctgcaccacttccagagactgagaggcagagagggcggcagccacttcatcaacaccagcagccccagaggcgaggccaagatgagcatcaccagcgacgaggtgaacttcctggtgtacagatacctgcaggagagcggcttcagccacagcgccttcaccttcggcatcgagagccacatcagccagagcaacatcaacggcaccctggtgccccccgccgccctgatcagcatcctgcagaagggcctgcagtacgtggaggccgagatcagcatcaacgaggacggcaccgtgttcgacggcagacccatcgagagcctgagcctgatcgacgccgtgatgcccgacgtggtgcagaccagacagcaggccttcagagagaagctggcccagcagcaggccagcgccgccgccgccgccgccgccgccaccgccgccgccaccgccgccaccaccaccagcgccggcgtgagccaccagaaccccagcaagaacagagaggccaccgtgaacggcgaggagaacagagcccacagcgtgaacaaccacgccaagcccatggagatcgacggcgaggtggagatccccagcagcaaggccaccgtgctgagaggccacgagagcgaggtgttcatctgcgcctggaaccccgtgagcgacctgctggccagcggcagcggcgacagcaccgccagaatctggaacctgaacgagaacagcaacggcggcagcacccagctggtgctgagacactgcatcagagagggcggccacgacgtgcccagcaacaaggacgtgaccagcctggactggaacaccaacggcaccctgctggccaccggcagctacgacggcttcgccagaatctggaccgaggacggcaacctggccagcaccctgggccagcacaagggccccatcttcgccctgaagtggaacagaaagggcaactacatcctgagcgccggcgtggacaagaccaccatcatctgggacgcccacaccggcgaggccaagcagcagttccccttccacagcgcccccgccctggacgtggactggcagaacaacaccaccttcgccagctgcagcaccgacatgtgcatccacgtgtgcagactgggctgcgacagacccgtgaagaccttccagggccacaccaacgaggtgaacgccatcaagtgggaccccagcggcatgctgctggccagctgcagcgacgacatgaccctgaagatctggagcatgaagcaggaggtgtgcatccacgacctgcaggcccacaacaaggagatctacaccatcaagtggagccccaccggccccgccaccagcaaccccaacagcaacatcatgctggccagcgccagcttcgacagcaccgtgagactgtgggacatcgagagaggcgtgtgcacccacaccctgaccaagcaccaggagcccgtgtacagcgtggccttcagccccgacggcaagtacctggccagcggcagcttcgacaagtgcgtgcacatctggaacacccagagcggcaacctggtgcacagctacagaggcaccggcggcatcttcgaggtgtgctggaacgccagaggcgacaaggtgggcgccagcgccagcgacggcagcgtgtgcgtgctggacctgagaaagtag

SEQ ID NO: 94511 - DNA, 432 bp, synthetic construct
  misc_feature 1..432: note = Description of Artificial Sequence: Synthetic coding sequence
  source 1..432: mol_type = other DNA
atggccgccgaggacgtggtggccaccggcgccgaccccagcgacctggagagcggcggcctgctgcacgagatcttcaccagccccctgaacctgctgctgctgggcctgtgcatcttcctgctgtacaagatcgtgagaggcgaccagcccgccgccagcggcgacagcgacgacgacgagcccccccccctgcccagactgaagagaagagacttcacccccgccgagctgagaagattcgacggcgtgcaggaccccagaatcctgatggccatcaacggcaaggtgttcgacgtgaccaagggcagaaagttctacggccccgtgaagtaccaccacgtgggcaagctgctgaaggagggcgaggagcccaccgtgtacagcgacgaggaggagcccaaggacgagagcgccagaaagaacgactag

SEQ ID NO: 94512 - DNA, 672 bp, synthetic construct
  misc_feature 1..672: note = Description of Artificial Sequence: Synthetic coding sequence
  source 1..672: mol_type = other DNA
atggccgccggcgacggcgacgtgaagctgggcaccctgggcagcggcagcgagagcagcaacgacggcggcagcgagagccccggcgacgccggcgccgccgccgagggcggcggctgggccgccgccgccctggccctgctgaccggcggcggcgagatgctgctgaacgtggccctggtggccctggtgctgctgggcgcctacagactgtgggtgagatggggcagaagaggcctgggcgccggcgccggcgccggcgaggagagccccgccaccagcctgcccagaatgaagaagagagacttcagcctggagcagctgagacagtacgacggcagcagaaaccccagaatcctgctggccgtgaacggcaaggtgttcgacgtgaccaagggcagcaagttctacggccccgccggcccctacggcatcttcgccggcagagacgccagcagaggcctggccaccttctgcctggacaaggacgccctgagagacgagtacgacgacctgagcgacctgaacgccgtgcagatggagagcgtgagagagtgggagatgcagttcaaggagaagtacgactacgtgggcagactgctgaagcccggcgaggagcccagcgagtacaccgacgaggaggacaccaaggaccacaacaagcaggactag

SEQ ID NO: 94513 - DNA, 402 bp, synthetic construct
  misc_feature 1..402: note = Description of Artificial Sequence: Synthetic coding sequence
  source 1..402: mol_type = other DNA
atggccgccggcgacggcgacgtgaagctgggcaccctgggcagcggcagcgagagcagcaacgacggcggcagcgagagccccggcgacgccggcgccgccgccgagggcggcggctgggccgccgccgccctggccctgctgaccggcggcggcgagatgctgctgaacgtggccctggtggccctggtgctgctgggcgcctacagactgtgggtgagatggggcagaagaggcctgggcgccggcgccggcgccggcctgcagctgggcgccgccgcccccgtgagaagactgccccagcccgcccaccccgccagaggccagtgggagagcctgagaagagaccagagacagcaggtgctgagacccggcggcagcatctggaacatctgctggtag

SEQ ID NO: 94514 - DNA, 744 bp, synthetic construct
  misc_feature 1..744: note = Description of Artificial Sequence: Synthetic coding sequence
  source 1..744: mol_type = other DNA
atgggcggcgccggcagaggcgtgggcgagggcagaggcagaggcggcggcggcagaagatggagagccgtgatggccgccggcgacggcgacgtgaagctgggcaccctgggcagcggcagcgagagcagcaacgacggcggcagcgagagccccggcgacgccggcgccgccgccgagggcggcggctgggccgccgccgccctggccctgctgaccggcggcggcgagatgctgctgaacgtggccctggtggccctggtgctgctgggcgcctacagactgtgggtgagatggggcagaagaggcctgggcgccggcgccggcgccggcgaggagagccccgccaccagcctgcccagaatgaagaagagagacttcagcctggagcagctgagacagtacgacggcagcagaaaccccagaatcctgctggccgtgaacggcaaggtgttcgacgtgaccaagggcagcaagttctacggccccgccggcccctacggcatcttcgccggcagagacgccagcagaggcctggccaccttctgcctggacaaggacgccctgagagacgagtacgacgacctgagcgacctgaacgccgtgcagatggagagcgtgagagagtgggagatgcagttcaaggagaagtacgactacgtgggcagactgctgaagcccggcgaggagcccagcgagtacaccgacgaggaggacaccaaggaccacaacaagcaggactag

SEQ ID NO: 94515 - DNA, 1041 bp, synthetic construct
  misc_feature 1..1041: note = Description of Artificial Sequence: Synthetic coding sequence
  source 1..1041: mol_type = other DNA
atggccatggcccagaagctgagccacctgctgcccagcctgagacaggtgatccaggagccccagctgagcctgcagcccgagcccgtgttcaccgtggacagagccgaggtgccccccctgttctggaagccctacatctacgccggctacagacccctgcaccagacctggagattctacttcagaaccctgttccagcagcacaacgaggccgtgaacgtgtggacccacctgctggccgccctggtgctgctgctgagactggccctgttcgtggagaccgtggacttctggggcgacccccacgccctgcccctgttcatcatcgtgctggccagcttcacctacctgagcttcagcgccctggcccacctgctgcaggccaagagcgagttctggcactacagcttcttcttcctggactacgtgggcgtggccgtgtaccagttcggcagcgccctggcccacttctactacgccatcgagcccgcctggcacgcccaggtgcaggccgtgttcctgcccatggccgccttcctggcctggctgagctgcatcggcagctgctacaacaagtacatccagaagcccggcctgctgggcagaacctgccaggaggtgcccagcgtgctggcctacgccctggacatcagccccgtggtgcacagaatcttcgtgagcagcgaccccaccaccgacgaccccgccctgctgtaccacaagtgccaggtggtgttcttcctgctggccgccgccttcttcagcaccttcatgcccgagagatggttccccggcagctgccacgtgttcggccagggccaccagctgttccacatcttcctggtgctgtgcaccctggcccagctggaggccgtggccctggactacgaggccagaagacccatctacgagcccctgcacacccactggccccacaacttcagcggcctgttcctgctgaccgtgggcagcagcatcctgaccgccttcctgctgagccagctggtgcagagaaagctggaccagaagaccaagtag

SEQ ID NO: 94516 - DNA, 867 bp, synthetic construct
  misc_feature 1..867: note = Description of Artificial Sequence: Synthetic coding sequence
  source 1..867: mol_type = other DNA
atgcagatcccccaggccccctggcccgtggtgtgggccgtgctgcagctgggctggagacccggctggttcctggacagccccgacagaccctggaacccccccaccttcagccccgccctgctggtggtgaccgagggcgacaacgccaccttcacctgcagcttcagcaacaccagcgagagcttcgtgctgaactggtacagaatgagccccagcaaccagaccgacaagctggccgccttccccgaggacagaagccagcccggccaggactgcagattcagagtgacccagctgcccaacggcagagacttccacatgagcgtggtgagagccagaagaaacgacagcggcacctacctgtgcggcgccatcagcctggcccccaaggcccagatcaaggagagcctgagagccgagctgagagtgaccgagagaagagccgaggtgcccaccgcccaccccagccccagccccagacccgccggccagttccagaccctggtggtgggcgtggtgggcggcctgctgggcagcctggtgctgctggtgtgggtgctggccgtgatctgcagcagagccgccagaggcaccatcggcgccagaagaaccggccagcccctgaaggaggaccccagcgccgtgcccgtgttcagcgtggactacggcgagctggacttccagtggagagagaagacccccgagccccccgtgccctgcgtgcccgagcagaccgagtacgccaccatcgtgttccccagcggcatgggcaccagcagccccgccagaagaggcagcgccgacggccccagaagcgcccagcccctgagacccgaggacggccactgcagctggcccctgtag

SEQ ID NO: 94517 - DNA, 540 bp, synthetic construct
  misc_feature 1..540: note = Description of Artificial Sequence: Synthetic coding sequence
  source 1..540: mol_type = other DNA
atgcagatcccccaggccccctggcccgtggtgtgggccgtgctgcagctgggctggagacccggctggttcctggacagccccgacagaccctggaacccccccaccttcagccccgccctgctggtggtgaccgagggcgacaacgccaccttcacctgcagcttcagcaacaccagcgagagcttcgtgctgaactggtacagaatgagccccagcaaccagaccgacaagctggccgccttccccgaggacagaagccagcccggccaggactgcagattcagagtgacccagctgcccaacggcagagacttccacatgagcgtggtgagagccagaagaaacgacagcggcacctacctgtgcggcgccatcagcctggcccccaaggcccagatcaaggagagcctgagagccgagctgagagtgaccggcaccatcggcgccagaagaaccggccagcccctgaaggaggaccccagcgccgtgcccgtgttcagcgtggactacggcgagctggacttccagtggagatag

SEQ ID NO: 94518 - DNA, 639 bp, synthetic construct
  misc_feature 1..639: note = Description of Artificial Sequence: Synthetic coding sequence
  source 1..639: mol_type = other DNA
atgagaatgaccatggaggagatgaagaacgaggccgagaccaccagcatggtgagcatgcccctgtacgccgtgatgtaccccgtgttcaacgagctggagagagtgaacctgagcgccgcccagaccctgagagccgccttcatcaaggccgagaaggagaaccccggcctgacccaggacatcatcatgaagatcctggagaagaagagcgtggaggtgaacttcaccgagagcctgctgagaatggccgccgacgacgtggaggagtacatgatcgagagacccgagcccgagttccaggacctgaacgagaaggccagagccctgaagcagatcctgagcaagatccccgacgagatcaacgacagagtgagattcctgcagaccatcaaggacatcgccagcgccatcaaggagctgctggacaccgtgaacaacgtgttcaagaagtaccagtaccagaacagaagagccctggagcaccagaagaaggagttcgtgaagtacagcaagagcttcagcgacaccctgaagacctacttcaaggacggcaaggccatcaacgtgttcgtgagcgccaacagactgatccaccagaccaacctgatcctgcagaccttcaagaccgtggcctag

SEQ ID NO: 94519 - DNA, 639 bp, synthetic construct; identical to SEQ ID NO: 94518
  misc_feature 1..639: note = Description of Artificial Sequence: Synthetic coding sequence
  source 1..639: mol_type = other DNA

SEQ ID NO: 94520 - DNA, 441 bp, synthetic construct
  misc_feature 1..441: note = Description of Artificial Sequence: Synthetic coding sequence
  source 1..441: mol_type = other DNA
atgagaatgaccatggaggagatgaagaacgaggccgagaccaccagcatggtgagcatgcccctgtacgccgtgatgtaccccgtgttcaacgagctggagagagtgaacctgagcgccgcccagaccctgagagccgccttcatcaaggccgagaaggagaaccccggcctgacccaggacatcatcatgaagatcctggagaagaagagcgtggaggtgaacttcaccgagagcctgctgagaatggccgccgacgacgtggaggagtacatgatcgagagacccgagcccgagttccaggacctgaacgagaaggccagagccctgaagcagatcctgagcaagatccccgacgagatcaacgacagagtgagattcctgcagaccatcaaggacatcgccagcgccatcaaggagctgctggacaccgtgaactag

SEQ ID NO: 94521 - DNA, 240 bp, synthetic construct
  misc_feature 1..240: note = Description of Artificial Sequence: Synthetic coding sequence
  source 1..240: mol_type = other DNA
atgagaatgaccatggaggagatgaagaacgaggccgagaccaccagcatggtgagcatgcccctgtacgccgtgatgtaccccgtgttcaacgagctggagagagtgaacctgagcgccgcccagaccctgagagccgccttcatcaaggccgagaaggagaaccccggcctgacccaggacatcatcatgaagatcctggagaagaagagcgtggaggtgaacttcaccgagagctag

SEQ ID NO: 94522 - DNA, 639 bp, synthetic construct; identical to SEQ ID NO: 94518
  misc_feature 1..639: note = Description of Artificial Sequence: Synthetic coding sequence
  source 1..639: mol_type = other DNA

SEQ ID NO: 94523 - DNA, 639 bp, synthetic construct; identical to SEQ ID NO: 94518
  misc_feature 1..639: note = Description of Artificial Sequence: Synthetic coding sequence
  source 1..639: mol_type = other DNA

SEQ ID NO: 94524 - DNA, 609 bp, synthetic construct
  misc_feature 1..609: note = Description of Artificial Sequence: Synthetic coding sequence
  source 1..609: mol_type = other DNA
atgagaatgaccatggaggagatgaagaacgaggccgagaccaccagcatggtgagcatgcccctgtacgccgtgatgtaccccgtgttcaacgagctggagagagtgaacctgagcgccgcccagaccctgagagccgccttcatcaaggccgagaaggagaaccccggcctgacccaggacatcatcatgaagatcctggagaagaagagcgtggaggtgaacttcaccgagagcctgctgagaatggccgccgacgacgtggaggagtacatgatcgagagacccgagcccgagttccaggacctgaacgagaaggccagagccctgaagcagatcctgagcaagatccccgacgagatcaacgacagagtgagattcctgcagaccatcaaggacatcgccagcgccatcaaggagctgctggacaccgtgaacaacgtgttcaagaagtaccagtaccagaacagaagagccctggagcaccagaagaaggagttcgtgaagtacagcaagagcttcagcgacaccctgaagacctacttcaaggacggcaaggccatcaacgtgttcgtgagcgccaacagactgatccaccagaccaactag

SEQ ID NO: 94525 - DNA, 561 bp, synthetic construct
  misc_feature 1..561: note = Description of Artificial Sequence: Synthetic coding sequence
  source 1..561: mol_type = other DNA
atgagaatgaccatggaggagatgaagaacgaggccgagaccaccagcatggtgagcatgcccctgtacgccgtgatgtaccccgtgttcaacgagctggagagagtgaacctgagcgccgcccagaccctgagagccgccttcatcaaggccgagaaggagaaccccggcctgacccaggacatcatcatgaagatcctggagaagaagagcgtggaggtgaacttcaccgagagcctgctgagaatggccgccgacgacgtggaggagtacatgatcgagagacccgagcccgagttccaggacctgaacgagaaggccagagccctgaagcagatcctgagcaagatccccgacgagatcaacgacagagtgagattcctgcagaccatcaaggacatcgccagcgccatcaaggagctgctggacaccgtgaacaacgtgttcaagaagtaccagtaccagaacagaagagccctggagcaccagaagaaggagttcgtgaagtacagcaagagcttcagcgacaccctgaagacctacttcaaggacggcaagtag

SEQ ID NO: 94526 - DNA, 405 bp, synthetic construct
  misc_feature 1..405: note = Description of Artificial Sequence: Synthetic coding sequence
  source 1..405: mol_type = other DNA
atgagaatgaccatggaggagatgaagaacgaggccgagaccaccagcatggtgagcatgcccctgtacgccgtgatgtaccccgtgttcaacgagctggagagagtgaacctgagcgccgcccagaccctgagagccgccttcatcaaggccgagaaggagaaccccggcctgacccaggacatcatcatgaagatcctggagaagaagagcgtggaggtgaacttcaccgagagcctgctgagaatggccgccgacgacgtggaggagtacatgatcgagagacccgagcccgagttccaggacctgaacgagaaggccagagccctgaagcagatcctgagcaagatccccgacgagatcaacgacagagtgagattcctgcagaccatcaaggacatctag

SEQ ID NO: 94527 - DNA, 639 bp, synthetic construct; identical to SEQ ID NO: 94518
  misc_feature 1..639: note = Description of Artificial Sequence: Synthetic coding sequence
  source 1..639: mol_type = other DNA

SEQ ID NO: 94528 - DNA, 5616 bp, synthetic construct
  misc_feature 1..5616: note = Description of Artificial Sequence: Synthetic coding sequence
  source 1..5616: mol_type = other DNA
atggccaacctggaggagagcttccccagaggcggcaccagaaagatccacaagcccgagaaggccttccagcagagcgtggagcaggacaacctgttcgacatcagcaccgaggagggcagcaccaagagaaagaagagccagaagggccccgccaagaccaagaagctgaagatcgagaagagagagagcagcaagagcgccagagagaagttcgagatcctgagcgtggagagcctgtgcgagggcatgagaatcctgggctgcgtgaaggaggtgaacgagctggagctggtgatcagcctgcccaacggcctgcagggcttcgtgcaggtgaccgagatctgcgacgcctacaccaagaagctgaacgagcaggtgacccaggagcagcccctgaaggacctgctgcacctgcccgagctgttcagccccggcatgctggtgagatgcgtggtgagcagcctgggcatcaccgacagaggcaagaagagcgtgaagctgagcctgaaccccaagaacgtgaacagagtgctgagcgccgaggccctgaagcccggcatgctgctgaccggcaccgtgagcagcctggaggaccacggctacctggtggacatcggcgtggacggcaccagagccttcctgcccctgctgaaggcccaggagtacatcagacagaagaacaagggcgccaagctgaaggtgggccagtacctgaactgcatcgtggagaaggtgaagggcaacggcggcgtggtgagcctgagcgtgggccacagcgaggtgagcaccgccatcgccaccgagcagcagagctggaacctgaacaacctgctgcccggcctggtggtgaaggcccaggtgcagaaggtgacccccttcggcctgaccctgaacttcctgaccttcttcaccggcgtggtggacttcatgcacctggaccccaagaaggccggcacctacttcagcaaccaggccgtgagagcctgcatcctgtgcgtgcaccccagaaccagagtggtgcacctgagcctgagacccatcttcctgcagcccggcagacccctgaccagactgagctgccagaacctgggcgccgtgctggacgacgtgcccgtgcagggcttcttcaagaaggccggcgccaccttcagactgaaggacggcgtgctggcctacgccagactgagccacctgagcgacagcaagaacgtgttcaaccccgaggccttcaagcccggcaacacccacaagtgcagaatcatcgactacagccagatggacgagctggccctgctgagcctgagaaccagcatcatcgaggcccagtacctgagataccacgacatcgagcccggcgccgtggtgaagggcaccgtgctgaccatcaagagctacggcatgctggtgaaggtgggcgagcagatgagaggcctggtgccccccatgcacctggccgacatcctgatgaagaaccccgagaagaagtaccacatcggcgacgaggtgaagtgcagagtgctgctgtgcgaccccgaggccaagaagctgatgatgaccctgaagaagaccctgatcgagagcaagctgcccgtgatcacctgctacgccgacgccaagcccggcctgcagacccacggcttcatcatcagagtgaaggactacggctgcatcgtgaagttctacaacaacgtgcagggcctggtgcccaagcacgagctgagcaccgagtacatccccgaccccgagagagtgttctacaccggccaggtggtgaaggtggtggtgctgaactgcgagcccagcaaggagagaatgctgctgagcttcaagctgagcagcgaccccgagcccaagaaggagcccgccggccacagccagaagaagggcaaggccatcaacatcggccagctggtggacgtgaaggtgctggagaagaccaaggacggcctggaggtggccgtgctgccccacaacatcagagccttcctgcccaccagccacctgagcgaccacgtggccaacggccccctgctgcaccactggctgcaggccggcgacatcctgcacagagtgctgtgcctgagccagagcgagggcagagtgctgctgtgcagaaagcccgccctggtgagcaccgtggagggcggccaggaccccaagaacttcagcgagatccaccccggcatgctgctgatcggcttcgtgaagagcatcaaggactacggcgtgttcatccagttccccagcggcctgagcggcctggcccccaaggccatcatgagcgacaagttcgtgaccagcaccagcgaccacttcgtggagggccagaccgtggccgccaaggtgaccaacgtggacgaggagaagcagagaatgctgctgagcctgagactgagcgactgcggcctgggcgacctggccatcaccagcctgctgctgctgaaccagtgcctggaggagctgcagggcgtgagaagcctgatgagcaacagagacagcgtgctgatccagaccctggccgagatgacccccggcatgttcctggacctggtggtgcaggaggtgctggaggacggcagcgtggtgttcagcggcggccccgtgcccgacctggtgctgaaggccagcagataccacagagccggccaggaggtggagagcggccagaagaagaaggtggtgatcctgaacgtggacctgctgaagctggaggtgcacgtgagcctgcaccaggacctggtgaacagaaaggccagaaagctgagaaagggcagcgagcaccaggccatcgtgcagcacctggagaagagcttcgccatcgccagcctggtggagaccggccacctggccgccttcagcctgaccagccacctgaacgacaccttcagattcgacagcgagaagctgcaggtgggccagggcgtgagcctgaccctgaagaccaccgagcccggcgtgaccggcctgctgctggccgtggagggccccgccgccaagagaaccatgagacccacccagaaggacagcgagaccgtggacgaggacgaggaggtggaccccgccctgaccgtgggcaccatcaagaagcacaccctgagcatcggcgacatggtgaccggcaccgtgaagagcatcaagcccacccacgtggtggtgaccctggaggacggcatcatcggctgcatccacgccagccacatcctggacgacgtgcccgagggcaccagccccaccaccaagctgaaggtgggcaagaccgtgaccgccagagtgatcggcggcagagacatgaagaccttcaagtacctgcccatcagccaccccagattcgtgagaaccatccccgagctgagcgtgagacccagcgagctggaggacggccacaccgccctgaacacccacagcgtgagccccatggagaagatcaagcagtaccaggccggccagaccgtgacctgcttcctgaagaagtacaacgtggtgaagaagtggctggaggtggagatcgcccccgacatcagaggcagaatccccctgctgctgaccagcctgagcttcaaggtgctgaagcaccccgacaagaagttcagagtgggccaggccctgagagccaccgtggtgggccccgacagcagcaagaccctgctgtgcctgagcctgaccggcccccacaagctggaggagggcgaggtggccatgggcagagtggtgaaggtgacccccaacgagggcctgaccgtgagcttccccttcggcaagatcggcaccgtgagcatcttccacatgagcgacagctacagcgagacccccctggaggacttcgtgccccagaaggtggtgagatgctacatcctgagcaccgccgacaacgtgctgaccctgagcctgagaagcagcagaaccaaccccgagaccaagagcaaggtggaggaccccgagatcaacagcatccaggacatcaaggagggccagctgctgagaggctacgtgggcagcatccagccccacggcgtgttcttcagactgggccccagcgtggtgggcctggccagatacagccacgtgagccagcacagccccagcaagaaggccctgtacaacaagcacctgcccgagggcaagctgctgaccgccagagtgctgagactgaaccaccagaagaacctggtggagctgagcttcctgcccggcgacaccggcaagcccgacgtgctgagcgccagcctggagggccagctgaccaagcaggaggagagaaagaccgaggccgaggagagagaccagaagggcgagaagaagaaccagaagagaaacgagaagaagaaccagaagggccaggaggaggtggagatgcccagcaaggagaagcagcagccccagaagccccaggcccagaagagaggcggcagagagtgcagagagagcggcagcgagcaggagagagtgagcaagaagcccaagaaggccggcctgagcgaggaggacgacagcctggtggacgtgtactacagagagggcaaggaggaggccgaggagaccaacgtgctgcccaaggagaagcagaccaagcccgccgaggcccccagactgcagctgagcagcggcttcgcctggaacgtgggcctggacagcctgacccccgccctgccccccctggccgagagcagcgacagcgaggaggacgagaagccccaccaggccaccatcaagaagagcaagaaggagagagagctggagaagcagaaggccgagaaggagctgagcagaatcgaggaggccctgatggaccccggcagacagcccgagagcgccgacgacttcgacagactggtgctgagcagccccaacagcagcatcctgtggctgcagtacatggccttccacctgcaggccaccgagatcgagaaggccagagccgtggccgagagagccctgaagaccatcagcttcagagaggagcaggagaagctgaacgtgtgggtggccctgctgaacctggagaacatgtacggcagccaggagagcctgaccaaggtgttcgagagagccgtgcagtacaacgagcccctgaaggtgttcctgcacctggccgacatctacgccaagagcgagaagttccaggaggccggcgagctgtacaacagaatgctgaagagattcagacaggagaaggccgtgtggatcaagtacggcgccttcctgctgagaagaagccaggccgccgccagccacagagtgctgcagagagccctggagtgcctgcccagcaaggagcacgtggacgtgatcgccaagttcgcccagctggagttccagctgggcgacgccgagagagccaaggccatcttcgagaacaccctgagcacctaccccaagagaaccgacgtgtggagcgtgtacatcgacatgaccatcaagcacggcagccagaaggacgtgagagacatcttcgagagagtgatccacctgagcctggcccccaagagaatgaagttcttcttcaagagatacctggactacgagaagcagcacggcaccgagaaggacgtgcaggccgtgaaggccaaggccctggagtacgtggaggccaagagcagcgtgctggaggactag

SEQ ID NO: 94529 - DNA, 3705 bp, synthetic construct
  misc_feature 1..3705: note = Description of Artificial Sequence: Synthetic coding sequence
  source 1..3705: mol_type = other DNA
atggccaacctggaggagagcttccccagaggcggcaccagaaagatccacaagcccgagaaggccttccagcagagcgtggagcaggacaacctgttcgacatcagcaccgaggagggcagcaccaagagaaagaagagccagaagggccccgccaagaccaagaagctgaagatcgagaagagagagagcagcaagagcgccagagagaagttcgagatcctgagcgtggagagcctgtgcgagggcatgagaatcctgggctgcgtgaaggaggtgaacgagctggagctggtgatcagcctgcccaacggcctgcagggcttcgtgcaggtgaccgagatctgcgacgcctacaccaagaagctgaacgagcaggtgacccaggagcagcccctgaaggacctgctgcacctgcccgagctgttcagccccggcatgctggtgagatgcgtggtgagcagcctgggcatcaccgacagaggcaagaagagcgtgaagctgagcctgaaccccaagaacgtgaacagagtgctgagcgccgaggccctgaagcccggcatgctgctgaccggcaccgtgagcagcctggaggaccacggctacctggtggacatcggcgtggacggcaccagagccttcctgcccctgctgaaggcccaggagtacatcagacagaagaacaagggcgccaagctgaaggtgggccagtacctgaactgcatcgtggagaaggtgaagggcaacggcggcgtggtgagcctgagcgtgggccacagcgaggtgagcaccgccatcgccaccgagcagcagagctggaacctgaacaacctgctgcccggcctggtggtgaaggcccaggtgcagaaggtgacccccttcggcctgaccctgaacttcctgaccttcttcaccggcgtggtggacttcatgcacctggaccccaagaaggccggcacctacttcagcaaccaggccgtgagagcctgcatcctgtgcgtgcaccccagaaccagagtggtgcacctgagcctgagacccatcttcctgcagcccggcagacccctgaccagactgagctgccagaacctgggcgccgtgctggacgacgtgcccgtgcagggcttcttcaagaaggccggcgccaccttcagactgaaggacggcgtgctggcctacgccagactgagccacctgagcgacagcaagaacgtgttcaaccccgaggccttcaagcccggcaacacccacaagtgcagaatcatcgactacagccagatggacgagctggccctgctgagcctgagaaccagcatcatcgaggcccagtacctgagataccacgacatcgagcccggcgccgtggtgaagggcaccgtgctgaccatcaagagctacggcatgctggtgaaggtgggcgagcagatgagaggcctggtgccccccatgcacctggccgacatcctgatgaagaaccccgagaagaagtaccacatcggcgacgaggtgaagtgcagagtgctgctgtgcgaccccgaggccaagaagctgatgatgaccctgaagaagaccctgatcgagagcaagctgcccgtgatcacctgctacgccgacgccaagcccggcctgcagacccacggcttcatcatcagagtgaaggactacggctgcatcgtgaagttctacaacaacgtgcagggcctggtgcccaagcacgagctgagcaccgagtacatccccgaccccgagagagtgttctacaccggccaggtggtgaaggtggtggtgctgaactgcgagcccagcaaggagagaatgctgctgagcttcaagctgagcagcgaccccgagcccaagaaggagcccgccggccacagccagaagaagggcaaggccatcaacatcggccagctggtggacgtgaaggtgctggagaagaccaaggacggcctggaggtggccgtgctgccccacaacatcagagccttcctgcccaccagccacctgagcgaccacgtggccaacggccccctgctgcaccactggctgcaggccggcgacatcctgcacagagtgctgtgcctgagccagagcgagggcagagtgctgctgtgcagaaagcccgccctggtgagcaccgtggagggcggccaggaccccaagaacttcagcgagatccaccccggcatgctgctgatcggcttcgtgaagagcatcaaggactacggcgtgttcatccagttccccagcggcctgagcggcctggcccccaaggccatcatgagcgacaagttcgtgaccagcaccagcgaccacttcgtggagggccagaccgtggccgccaaggtgaccaacgtggacgaggagaagcagagaatgctgctgagcctgagactgagcgactgcggcctgggcgacctggccatcaccagcctgctgctgctgaaccagtgcctggaggagctgcagggcgtgagaagcctgatgagcaacagagacagcgtgctgatccagaccctggccgagatgacccccggcatgttcctggacctggtggtgcaggaggtgctggaggacggcagcgtggtgttcagcggcggccccgtgcccgacctggtgctgaaggccagcagataccacagagccggccaggaggtggagagcggccagaagaagaaggtggtgatcctgaacgtggacctgctgaagctggaggtgcacgtgagcctgcaccaggacctggtgaacagaaaggccagaaagctgagaaagggcagcgagcaccaggccatcgtgcagcacctggagaagagcttcgccatcgccagcctggtggagaccggccacctggccgccttcagcctgaccagccacctgaacgacaccttcagattcgacagcgagaagctgcaggtgggccagggcgtgagcctgaccctgaagaccaccgagcccggcgtgaccggcctgctgctggccgtggagggccccgccgccaagagaaccatgagacccacccagaaggacagcgagaccgtggacgaggacgaggaggtggaccccgccctgaccgtgggcaccatcaagaagcacaccctgagcatcggcgacatggtgaccggcaccgtgaagagcatcaagcccacccacgtggtggtgaccctggaggacggcatcatcggctgcatccacgccagccacatcctggacgacgtgcccgagggcaccagccccaccaccaagctgaaggtgggcaagaccgtgaccgccagagtgatcggcggcagagacatgaagaccttcaagtacctgcccatcagccaccccagattcgtgagaaccatccccgagctgagcgtgagacccagcgagctggaggacggccacaccgccctgaacacccacagcgtgagccccatggagaagatcaagcagtaccaggccggcctgagcgaggaggacgacagcctggtggacgtgtactacagagagggcaaggaggaggccgaggagaccaacgtgctgcccaaggagaagcagaccaagcccgccgaggcccccagactgcagctgagcagcggcttcgcctggaacgtgggcctggacagcctgacccccgccctgccccccctggccgagagcagcgacagcgaggaggacgagaagccccaccaggccacccagatcaagaagagcaagaagtag

SEQ ID NO: 94530 - DNA, 936 bp, synthetic construct
  misc_feature 1..936: note = Description of Artificial Sequence: Synthetic coding sequence
  source 1..936: mol_type = other DNA
atggccgccgccggcgccagacccgtggagctgggcttcgccgagagcgcccccgcctggagactgagaagcgagcagttccccagcaaggtgtacgcccccctgcccggcagacccgacgccttccacagatgcatcttcctgttctgctgcagagagcagccctgctgcgccggcctgagagtgttcagaaaccagctgcccagaaagaacgacttctacagctacgagccccccagcgagaaccccccccccgagaccggcgagagcgtgtgcctgcagctgaagagcggcgcccacctgtgcagagtgtgcggctgcctgggccccaagacctgcagcagatgccacaaggcctactactgcagcaaggagcaccagaccctggactggagactgggccacaagcaggcctgcgcccagcccgaccacctggaccacatcatccccgaccacaacttcctgttccccgagttcgagatcgtgatcgagaccgaggacgagatcatgcccgaggtggtggagaaggaggactacagcgagatcatcggcagcatgggcgaggccctggaggaggagctggacagcatggccaagcacgagagcagagaggacaagatcttccagaagttcaagacccagatcgccctggagcccgagcagatcctgagatacggcagaggcatcgcccccatctggatcagcggcgagaacatcccccaggagaaggacatccccgactgcccctgcggcgccaagagaatcctggagttccaggtgatgccccagctgctgaactacctgaaggccgacagactgggcaagagcatcgactggggcatcctggccgtgttcacctgcgccgagagctgcagcctgggcaccggctacaccgaggagttcgtgtggaagcaggacgtgaccgacaccccctag

SEQ ID NO: 94531 - DNA, 687 bp, synthetic construct
  misc_feature 1..687: note = Description of Artificial Sequence: Synthetic coding sequence
  source 1..687: mol_type = other DNA
atggccgccgccggcgccagacccgtggagctgggcttcgccgagagcgcccccgcctggagactgagaagcgagcagttccccagcaaggtgggcggcagacccgcctggctgggcgccgccggcctgcccggcccccaggccctggcctgcgagctgtgcggcagacccctgagcttcctgctgcaggtgtacgcccccctgcccggcagacccgacgccttccacagatgcatcttcctgttctgctgcagagagcagccctgctgcgccggcctgagagtgttcagaaaccagctgcccagaaagaacgacttctacagctacgagccccccagcgagaaccccccccccgagaccggcgagagcgtgtgcctgcagctgaagagcggcgcccacctgtgcagagtgtgcggctgcctgggccccaagacctgcagcagatgccacaaggcctactactgcagcaaggagcaccagaccctggactggagactgggccacaagcaggcctgcgcccagcccgaccacctggaccacatcatccccgaccacaacttcctgttccccgagttcgagatcgtgatcgagaccgaggacgagatcatgcccgaggtggtggagaaggaggactacagcgagatcatcggcagcatgggcaagcagttccaggacttcatccactag

SEQ ID NO: 94532 - DNA, 1035 bp, synthetic construct
  misc_feature 1..1035: note = Description of Artificial Sequence: Synthetic coding sequence
  source 1..1035: mol_type = other DNA
atggccgccgccggcgccagacccgtggagctgggcttcgccgagagcgcccccgcctggagactgagaagcgagcagttccccagcaaggtgggcggcagacccgcctggctgggcgccgccggcctgcccggcccccaggccctggcctgcgagctgtgcggcagacccctgagcttcctgctgcaggtgtacgcccccctgcccggcagacccgacgccttccacagatgcatcttcctgttctgctgcagagagcagccctgctgcgccggcctgagagtgttcagaaaccagctgcccagaaagaacgacttctacagctacgagccccccagcgagaaccccccccccgagaccggcgagagcgtgtgcctgcagctgaagagcggcgcccacctgtgcagagtgtgcggctgcctgggccccaagacctgcagcagatgccacaaggcctactactgcagcaaggagcaccagaccctggactggagactgggccacaagcaggcctgcgcccagcccgaccacctggaccacatcatccccgaccacaacttcctgttccccgagttcgagatcgtgatcgagaccgaggacgagatcatgcccgaggtggtggagaaggaggactacagcgagatcatcggcagcatgggcgaggccctggaggaggagctggacagcatggccaagcacgagagcagagaggacaagatcttccagaagttcaagacccagatcgccctggagcccgagcagatcctgagatacggcagaggcatcgcccccatctggatcagcggcgagaacatcccccaggagaaggacatccccgactgcccctgcggcgccaagagaatcctggagttccaggtgatgccccagctgctgaactacctgaaggccgacagactgggcaagagcatcgactggggcatcctggccgtgttcacctgcgccgagagctgcagcctgggcaccggctacaccgaggagttcgtgtggaagcaggacgtgaccgacaccccctag

SEQ ID NO: 94533 - DNA, 588 bp, synthetic construct
  misc_feature 1..588: note = Description of Artificial Sequence: Synthetic coding sequence
  source 1..588: mol_type = other DNA
atggccgccgccggcgccagacccgtggagctgggcttcgccgagagcgcccccgcctggagactgagaagcgagcagttccccagcaaggtgtacgcccccctgcccggcagacccgacgccttccacagatgcatcttcctgttctgctgcagagagcagccctgctgcgccggcctgagagtgttcagaaaccagctgcccagaaagaacgacttctacagctacgagccccccagcgagaaccccccccccgagaccggcgagagcgtgtgcctgcagctgaagagcggcgcccacctgtgcagagtgtgcggctgcctgggccccaagacctgcagcagatgccacaaggcctactactgcagcaaggagcaccagaccctggactggagactgggccacaagcaggcctgcgcccagcccgaccacctggaccacatcatccccgaccacaacttcctgttccccgagttcgagatcgtgatcgagaccgaggacgagatcatgcccgaggtggtggagaaggaggactacagcgagatcatcggcagcatgggcaagcagttccaggacttcatccactag

SEQ ID NO: 94534 - DNA, 567 bp, synthetic construct
  misc_feature 1..567: note = Description of Artificial Sequence: Synthetic coding sequence
  source 1..567: mol_type = other DNA
atggccgccgccggcgccagacccgtggagctgggcttcgccgagagcgcccccgcctggagactgagaagcgagcagttccccagcaaggtgtacgcccccctgcccggcagacccgacgccttccacagatgcatcttcctgttctgctgcagagagcagccctgctgcgccggcctgagagtgttcagaaaccagctgcccagaaagaacgacttctacagctacgagccccccagcgagaaccccccccccgagaccggcgagagcgtgtgcctgcagctgaagagcggcgcccacctgtgcagagtgtgcggctgcctgggccccaagacctgcagcagatgccacaaggcctactactgcagcaaggagcaccagaccctggactggagactgggccacaagcaggcctgcgcccagcccgaccacctggaccacatcatccccgaccacaacttcctgttccccgagttcgagatcgtgatcgagaccgaggacgagatcatgcccgaggtggtggagaaggaggactacagcgagatcatcggcagcatgggcatctag

SEQ ID NO: 94535 - DNA, 2607 bp, synthetic construct
  misc_feature 1..2607: note = Description of Artificial Sequence: Synthetic coding sequence
  source 1..2607: mol_type = other DNA
atggccaccttcatcagcgtgcagctgaagaagaccagcgaggtggacctggccaagcccctggtgaagttcatccagcagacctaccccagcggcggcgaggagcaggcccagtactgcagagccgccgaggagctgagcaagctgagaagagccgccgtgggcagacccctggacaagcacgagggcgccctggagaccctgctgagatactacgaccagatctgcagcatcgagcccaagttccccttcagcgagaaccagatctgcctgaccttcacctggaaggacgccttcgacaagggcagcctgttcggcggcagcgtgaagctggccctggccagcctgggctacgagaagagctgcgtgctgttcaactgcgccgccctggccagccagatcgccgccgagcagaacctggacaacgacgagggcctgaagatcgccgccaagcactaccagttcgccagcggcgccttcctgcacatcaaggagaccgtgctgagcgccctgagcagagagcccaccgtggacatcagccccgacaccgtgggcaccctgagcctgatcatgctggcccaggcccaggaggtgttcttcctgaaggccaccagagacaagatgaaggacgccatcatcgccaagctggccaaccaggccgccgactacttcggcgacgccttcaagcagtgccagtacaaggacaccctgcccaaggaggtgttccccgtgctggccgccaagcactgcatcatgcaggccaacgccgagtaccaccagagcatcctggccaagcagcagaagaagttcggcgaggagatcgccagactgcagcacgccgccgagctgatcaagaccgtggccagcagatacgacgagtacgtgaacgtgaaggacttcagcgacaagatcaacagagccctggccgccgccaagaaggacaacgacttcatctaccacgacagagtgcccgacctgaaggacctggaccccatcggcaaggccaccctggtgaagagcacccccgtgaacgtgcccatcagccagaagttcaccgacctgttcgagaagatggtgcccgtgagcgtgcagcagagcctggccgcctacaaccagagaaaggccgacctggtgaacagaagcatcgcccagatgagagaggccaccaccctggccaacggcgtgctggccagcctgaacctgcccgccgccatcgaggacgtgagcggcgacaccgtgccccagagcatcctgaccaagagcagaagcgtgatcgagcagggcggcatccagaccgtggaccagctgatcaaggagctgcccgagctgctgcagagaaacagagagatcctggacgagagcctgagactgctggacgaggaggaggccaccgacaacgacctgagagccaagttcaaggagagatggcagagaacccccagcaacgagctgtacaagcccctgagagccgagggcaccaacttcagaaccgtgctggacaaggccgtgcaggccgacggccaggtgaaggagtgctaccagagccacagagacaccatcgtgctgctgtgcaagcccgagcccgagctgaacgccgccatccccagcgccaaccccgccaagaccatgcagggcagcgaggtggtgaacgtgctgaagagcctgctgagcaacctggacgaggtgaagaaggagagagagggcctggagaacgacctgaagagcgtgaacttcgacatgaccagcaagttcctgaccgccctggcccaggacggcgtgatcaacgaggaggccctgagcgtgaccgagctggacagagtgtacggcggcctgaccaccaaggtgcaggagagcctgaagaagcaggagggcctgctgaagaacatccaggtgagccaccaggagttcagcaagatgaagcagagcaacaacgaggccaacctgagagaggaggtgctgaagaacctggccaccgcctacgacaacttcgtggagctggtggccaacctgaaggagggcaccaagttctacaacgagctgaccgagatcctggtgagattccagaacaagtgcagcgacatcgtgttcgccagaaagaccgagagagacgagctgctgaaggacctgcagcagagcatcgccagagagcccagcgcccccagcatccccacccccgcctaccagagcagccccgccggcggccacgcccccaccccccccacccccgcccccagaaccatgccccccaccaagccccagccccccgccagaccccccccccccgtgctgcccgccaacagagcccccagcgccaccgcccccagccccgtgggcgccggcaccgccgcccccgcccccagccagacccccggcagcgccccccccccccaggcccagggccccccctaccccacctaccccggctaccccggctactgccagatgcccatgcccatgggctacaacccctacgcctacggccagtacaacatgccctacccccccgtgtaccaccagagccccggccaggccccctaccccggcccccagcagcccagctaccccttcccccagcccccccagcagagctactacccccagcagtag

SEQ ID NO: 94536 - DNA, 2622 bp, synthetic construct
  misc_feature 1..2622: note = Description of Artificial Sequence: Synthetic coding sequence
  source 1..2622: mol_type = other DNA
atggccaccttcatcagcgtgcagctgaagaagaccagcgaggtggacctggccaagcccctggtgaagttcatccagcagacctaccccagcggcggcgaggagcaggcccagtactgcagagccgccgaggagctgagcaagctgagaagagccgccgtgggcagacccctggacaagcacgagggcgccctggagaccctgctgagatactacgaccagatctgcagcatcgagcccaagttccccttcagcgagaaccagatctgcctgaccttcacctggaaggacgccttcgacaagggcagcctgttcggcggcagcgtgaagctggccctggccagcctgggctacgagaagagctgcgtgctgttcaactgcgccgccctggccagccagatcgccgccgagcagaacctggacaacgacgagggcctgaagatcgccgccaagcactaccagttcgccagcggcgccttcctgcacatcaaggagaccgtgctgagcgccctgagcagagagcccaccgtggacatcagccccgacaccgtgggcaccctgagcctgatcatgctggcccaggcccaggaggtgttcttcctgaaggccaccagagacaagatgaaggacgccatcatcgccaagctggccaaccaggccgccgactacttcggcgacgccttcaagcagtgccagtacaaggacaccctgcccaagtacttctacttccaggaggtgttccccgtgctggccgccaagcactgcatcatgcaggccaacgccgagtaccaccagagcatcctggccaagcagcagaagaagttcggcgaggagatcgccagactgcagcacgccgccgagctgatcaagaccgtggccagcagatacgacgagtacgtgaacgtgaaggacttcagcgacaagatcaacagagccctggccgccgccaagaaggacaacgacttcatctaccacgacagagtgcccgacctgaaggacctggaccccatcggcaaggccaccctggtgaagagcacccccgtgaacgtgcccatcagccagaagttcaccgacctgttcgagaagatggtgcccgtgagcgtgcagcagagcctggccgcctacaaccagagaaaggccgacctggtgaacagaagcatcgcccagatgagagaggccaccaccctggccaacggcgtgctggccagcctgaacctgcccgccgccatcgaggacgtgagcggcgacaccgtgccccagagcatcctgaccaagagcagaagcgtgatcgagcagggcggcatccagaccgtggaccagctgatcaaggagctgcccgagctgctgcagagaaacagagagatcctggacgagagcctgagactgctggacgaggaggaggccaccgacaacgacctgagagccaagttcaaggagagatggcagagaacccccagcaacgagctgtacaagcccctgagagccgagggcaccaacttcagaaccgtgctggacaaggccgtgcaggccgacggccaggtgaaggagtgctaccagagccacagagacaccatcgtgctgctgtgcaagcccgagcccgagctgaacgccgccatccccagcgccaaccccgccaagaccatgcagggcagcgaggtggtgaacgtgctgaagagcctgctgagcaacctggacgaggtgaagaaggagagagagggcctggagaacgacctgaagagcgtgaacttcgacatgaccagcaagttcctgaccgccctggcccaggacggcgtgatcaacgaggaggccctgagcgtgaccgagctggacagagtgtacggcggcctgaccaccaaggtgcaggagagcctgaagaagcaggagggcctgctgaagaacatccaggtgagccaccaggagttcagcaagatgaagcagagcaacaacgaggccaacctgagagaggaggtgctgaagaacctggccaccgcctacgacaacttcgtggagctggtggccaacctgaaggagggcaccaagttctacaacgagctgaccgagatcctggtgagattccagaacaagtgcagcgacatcgtgttcgccagaaagaccgagagagacgagctgctgaaggacctgcagcagagcatcgccagagagcccagcgcccccagcatccccacccccgcctaccagagcagccccgccggcggccacgcccccaccccccccacccccgcccccagaaccatgccccccaccaagccccagccccccgccagaccccccccccccgtgctgcccgccaacagagcccccagcgccaccgcccccagccccgtgggcgccggcaccgccgcccccgcccccagccagacccccggcagcgccccccccccccaggcccagggccccccctaccccacctaccccggctaccccggctactgccagatgcccatgcccatgggctacaacccctacgcctacggccagtacaacatgccctacccccccgtgtaccaccagagccccggccaggccccctaccccggcccccagcagcccagctaccccttcccccagcccccccagcagagctactacccccagcagtag

SEQ ID NO: 94537 - DNA, 1458 bp, synthetic construct
  misc_feature 1..1458: note = Description of Artificial Sequence: Synthetic coding sequence
  source 1..1458: mol_type = other DNA
atggccctgccccccttcttcggccagggcagacccggccccccccccccccagccccccccccccgcccccttcggctgcccccccccccccctgcccagccccgccttccccccccccctgccccagagacccggccccttccccggcgccagcgcccccttcctgcagccccccctggccctgcagcccagagccagcgccgaggccagcagaggcggcggcggcgccggcgccttctaccccgtgccccccccccccctgccccccccccccccccagtgcagacccttccccggcaccgacgccggcgagagacccagaccccccccccccggccccggccccccctggagccccagatggcccgaggccccccccccccccgccgacgtgctgggcgacgccgccctgcagagactgagagacagacagtggctggaggccgtgttcggcacccccagaagagccggctgccccgtgccccagagaacccacgccggccccagcctgggcgaggtgagagccagactgctgagagccctgagactggtgagaagactgagaggcctgagccaggccctgagagaggccgaggccgacggcgccgcctgggtgctgctgtacagccagaccgcccccctgagagccgagctggccgagagactgcagcccctgacccaggccgcctacgtgggcgaggccagaagaagactggagagagtgagaagaagaagactgagactgagagagagagccagagagagagaggccgagagagaggccgaggccgccagagccgtggagagagagcaggagatcgacagatggagagtgaagtgcgtgcaggaggtggaggagaagaagagagagcaggagctgaaggccgccgccgacggcgtgctgagcgaggtgagaaagaagcaggccgacaccaagagaatggtggacatcctgagagccctggagaagctgagaaagctgagaaaggaggccgccgccagaaagggcgtgtgcccccccgccagcgccgacgagaccttcacccaccacctgcagagactgagaaagctgatcaagaagagaagcgagctgtacgaggccgaggagagagccctgagagtgatgctggagggcgagcaggaggaggagagaaagagagagctggagaagaagcagagaaaggagaaggagaagatcctgctgcagaagagagagatcgagagcaagctgttcggcgaccccgacgagttccccctggcccacctgctggagcccttcagacagtactacctgcaggccgagcacagcctgcccgccctgatccagatcagacacgactgggaccagtacctggtgcccagcgaccaccccaagggcaacttcgtgccccagggctgggtgctgccccccctgcccagcaacgacatctgggccaccgccgtgaagctgcactag

SEQ ID NO: 94538 - DNA, 840 bp, synthetic construct
  misc_feature 1..840: note = Description of Artificial Sequence: Synthetic coding sequence
  source 1..840: mol_type = other DNA
ctgatgagaagccacagcgacagctgccacttcagcaagcacctgagaagagagcacggccccgccaccatcctgagacccggcagccccagacccccccccccccccagcttcagcctgagaagactgagagagagagccagagagagagaggccgagagagaggccgaggccgccagagccgtggagagagagcaggagatcgacagatggagagtgaagtgcgtgcaggaggtggaggagaagaagagagagcaggagctgaaggccgccgccgacggcgtgctgagcgaggtgagaaagaagcaggccgacaccaagagaatggtggacatcctgagagccctggagaagctgagaaagctgagaaaggaggccgccgccagaaagggcgtgtgcccccccgccagcgccgacgagaccttcacccaccacctgcagagactgagaaagctgatcaagaagagaagcgagctgtacgaggccgaggagagagccctgagagtgatgctggagggcgagcaggaggaggagagaaagagagagctggagaagaagcagagaaaggagaaggagaagatcctgctgcagaagagagagatcgagagcaagctgttcggcgaccccgacgagttccccctggcccacctgctggagcccttcagacagtactacctgcaggccgagcacagcctgcccgccctgatccagatcagacacgactgggaccagtacctggtgcccagcgaccaccccaagggcaacttcgtgccccagggctgggtgctgccccccctgcccagcaacgacatctgggccaccgccgtgaagctgcactag

SEQ ID NO: 94539 - DNA, 813 bp, synthetic construct
  misc_feature 1..813: note = Description of Artificial Sequence: Synthetic coding sequence
  source 1..813: mol_type = other DNA
agccacagcgacagctgccacttcagcaagcacctgagaagagagcacggccccgccaccatcctgagacccggcagccccagaagaagaagactgagactgagagagagagccagagagagagaggccgagagagaggccgaggccgccagagccgtggagagagagcaggagatcgacagatggagagtgaagtgcgtgcaggaggtggaggagaagaagagagagcaggagctgaaggccgccgccgacggcgtgctgagcgaggtgagaaagaagcaggccgacaccaagagaatggtggacatcctgagagccctggagaagctgagaaagctgagaaaggaggccgccgccagaaagggcgtgtgcccccccgccagcgccgacgagaccttcacccaccacctgcagagactgagaaagctgatcaagaagagaagcgagctgtacgaggccgaggagagagccctgagagtgatgctggagggcgagcaggaggaggagagaaagagagagctggagaagaagcagagaaaggagaaggagaagatcctgctgcagaagagagagatcgagagcaagctgttcggcgaccccgacgagttccccctggcccacctgctggagcccttcagacagtactacctgcaggccgagcacagcctgcccgccctgatccagatcagacacgactgggaccagtacctggtgcccagcgaccaccccaagggcaacttcgtgccccagggctgggtgctgccccccctgcccagcaacgacatctgggccaccgccgtgaagctgcactag

SEQ ID NO: 94540 - DNA, 165 bp, synthetic construct
  misc_feature 1..165: note = Description of Artificial Sequence: Synthetic coding sequence
  source 1..165: mol_type = other DNA
atgtgcaccaccctgttcctgctgagcaccctggccatgctgtggagaagaagattcgccaacagagtgcagcccgagcccagcgacgtggacggcgccgccagaggcagcagcctggacgccgacccccagagcagcggcagagagaaggagcccctgaagtag

SEQ ID NO: 94541 - DNA, 246 bp, synthetic construct
  misc_feature 1..246: note = Description of Artificial Sequence: Synthetic coding sequence
  source 1..246: mol_type = other DNA
atgaccagaaccgagagccccgccacctggatgggccagctgggcgccgccgcctggatgagaaccctgagcccccaggccgcccaggtgctggtgagacccctggcccaggaggacgccgtgggcgccgccgccgccgccagaggcagaatgggcggcagcagcaccagagaggtgcccagagcccaccccgtgaccggctgcagcgccgagatcatcaacaagaagtgccagctggacctgtag

SEQ ID NO: 94542 - DNA, 819 bp, synthetic construct
  misc_feature 1..819: note = Description of Artificial Sequence: Synthetic coding sequence
  source 1..819: mol_type = other DNA
atggccgccaaggtgttcgagagcatcggcaagttcggcctggccctggccgtggccggcggcgtggtgaacagcgccctgtacaacgtggacgccggccacagagccgtgatcttcgacagattcagaggcgtgcaggacatcgtggtgggcgagggcacccacttcctgatcccctgggtgcagaagcccatcatcttcgactgcagaagcagacccagaaacgtgcccgtgatcaccggcagcaaggacctgcagaacgtgaacatcaccctgagaatcctgttcagacccgtggccagccagctgcccagaatcttcaccagcatcggcgaggactacgacgagagagtgctgcccagcatcaccaccgagatcctgaagagcgtggtggccagattcgacgccggcgagctgatcacccagagagagctggtgagcagacaggtgagcgacgacctgaccgagagagccgccaccttcggcctgatcctggacgacgtgagcctgacccacctgaccttcggcaaggagttcaccgaggccgtggaggccaagcaggtggcccagcaggaggccgagagagccagattcgtggtggagaaggccgagcagcagaagaaggccgccatcatcagcgccgagggcgacagcaaggccgccgagctgatcgccaacagcctggccaccgccggcgacggcctgatcgagctgagaaagctggaggccgccgaggacatcgcctaccagctgagcagaagcagaaacatcacctacctgcccgccggccagagcgtgctgctgcagctgccccagtag

SEQ ID NO: 94543 - DNA, 741 bp, synthetic construct
  misc_feature 1..741: note = Description of Artificial Sequence: Synthetic coding sequence
  source 1..741: mol_type = other DNA
atggccgccaaggtgttcgagagcatcggcaagttcggcctggccctggccgtggccggcggcgtggtgaacagcgccctgtacaacgtggacgccggccacagagccgtgatcttcgacagattcagaggcgtgcaggacatcgtggtgggcgagggcacccacttcctgatcccctgggtgcagaagcccatcatcttcgactgcagaagcagacccagaaacgtgcccgtgatcaccggcagcaaggacctgcagaacgtgaacatcaccctgagaatcctgttcagacccgtggccagccagctgcccagaatcttcaccagcatcggcgaggactacgacgagagagtgctgcccagcatcaccaccgagatcctgaagagcgtggtggccagattcgacgccggcgagctgatcacccagagagagctggtgagcagacaggtgagcgacgacctgaccgagagagccgccaccttcggcctgatcctggacgacgtgagcctgacccacctgaccttcggcaaggagttcaccgaggccgtggaggccaagcaggtggcccagcaggaggccgagagagccagattcgtggtggagaaggccgagcagcagaagaaggccgccatcatcagcgccgagggcgacagcaaggccgccgagctgatcgccaacagcctggccaccgccggcgacggcctgatcgagctgagaaagctggaggccgccgaggactag

SEQ ID NO: 94544 - DNA, 375 bp, synthetic construct
  misc_feature 1..375: note = Description of Artificial Sequence: Synthetic coding sequence
  source 1..375: mol_type = other DNA
atggccgccaaggtgttcgagagcatcggcaagttcggcctggccctggccgtggccggcggcgtggtgaacagcgccctgtacaacgtggacgccggccacagagccgtgatcttcgacagattcagaggcgtgcaggacatcgtggtgggcgagggcacccacttcctgatcccctgggtgcagaagcccatcatcttcgactgcagaagcagacccagaaacgtgcccgtgatcaccggcagcaaggacctgcagaacgtgaacatcaccctgagaatcctgttcagacccgtggccagccagctgcccagaatcttcaccagcatcggcgaggactacgacgagagagtgctgcccagcatcaccacctag

SEQ ID NO: 94545 - DNA, 606 bp, synthetic construct
  misc_feature 1..606: note = Description of Artificial Sequence: Synthetic coding sequence
  source 1..606: mol_type = other DNA
atggccgccaaggtgttcgagagcatcggcaagttcggcctggccctggccgtggccggcggcgtggtgaacagcgccctgtacaacgtggacgccggccacagagccgtgatcttcgacagattcagaggcgtgcaggacatcgtggtgggcgagggcacccacttcctgatcccctgggtgcagaagcccatcatcttcgactgcagaagcagacccagaaacgtgcccgtgatcaccggcagcaaggacctgcagaacgtgaacatcaccctgagaatcctgttcagacccgtggccagccagctgcccagaatcttcaccagcatcggcgaggactacgacgagagagtgctgcccagcatcaccaccgagatcctgaagagcgtggtggccagattcgacgccggcgagctgatcacccagagagagctggtgagcagacaggtgagcgacgacctgaccgagagagccgccaccttcggcctgatcctggacgacgtgagcctgacccacctgaccttcggcaaggagttcaccgaggccgtggaggccaagcaggtggcccagcaggaggccgagagagccagattcgtggtggagtag

SEQ ID NO: 94546 - DNA, 645 bp, synthetic construct
  misc_feature 1..645: note = Description of Artificial Sequence: Synthetic coding sequence
  source 1..645: mol_type = other DNA
atggccgccaaggtgttcgagagcatcggcaagttcggcctggccctggccgtggccggcggcgtggtgaacagcgccctgtacaacgtggacgccggccacagagccgtgatcttcgacagattcagaggcgtgcaggacatcgtggtgggcgagggcacccacttcctgatcccctgggtgcagaagcccatcatcttcgactgcagaagcagacccagaaacgtgcccgtgatcaccggcagcaaggacctgcagaacgtgaacatcaccctgagaatcctgttcagacccgtggccagccagctgcccagaatcttcaccagcatcggcgaggactacgacgagagagtgctgcccagcatcaccaccgagatcctgaagagcgtggtggccagattcgacgccggcgagctgatcacccagagagagctggtgagcagacaggtgagcgacgacctgaccgagagagccgccaccttcggcctgatcctggacgacgtgagcctgacccacctgaccttcggcaaggagttcaccgaggccgtggaggccaagcaggtggcccagcaggaggccgagagagccagattcgtggtggagaaggccgagcagcagaagaaggccgccatcatcagcgcctag

SEQ ID NO: 94547 - DNA, 468 bp, synthetic construct
  misc_feature 1..468: note = Description of Artificial Sequence: Synthetic coding sequence
  source 1..468: mol_type = other DNA
atggccgccaaggtgttcgagagcatcggcaagttcggcctggccctggccgtggccggcggcgtggtgaacagcgccctgtacaacgtggacgccggccacagagccgtgatcttcgacagattcagaggcgtgcaggacatcgtggtgggcgagggcacccacttcctgatcccctgggtgcagaagcccatcatcttcgactgcagaagcagacccagaaacgtgcccgtgatcaccggcagcaaggacctgcagaacgtgaacatcaccctgagaatcctgttcagacccgtggccagccagctgcccagaatcttcaccagcatcggcgaggactacgacgagagagtgctgcccagcatcaccaccgagatcctgaagagcgtggtggccagattcgacgccggcgagctgatcacctacctgcccgccggccagagcgtgctgctgcagctgccccagtag

SEQ ID NO: 94548 - DNA, 615 bp, synthetic construct
  misc_feature 1..615: note = Description of Artificial Sequence: Synthetic coding sequence
  source 1..615: mol_type = other DNA
atggccgccaaggtgttcgagagcatcggcaagttcggcctggccctggccgtggccggcggcgtggtgaacagcgccctgtacaacgtggacgccggccacagagccgtgatcttcgacagattcagaggcgtgcaggacatcgtggtgggcgagggcacccacttcctgatcccctgggtgcagaagcccatcatcttcgactgcagaagcagacccagaaacgtgcccgtgatcaccggcagcaaggacctgcagaacgtgaacatcaccctgagaatcctgttcagacccgtggccagccagctgcccagaatcttcaccagcatcggcgaggactacgacgagagagtgctgcccagcatcaccaccgagatcctgaagagcgtggtggccagattcgacgccggcgagctgatcacccagagagagctggtgagcagacaggtgagcgacgacctgaccgagagagccgccaccttcggcctgatcctggacgacgtgagcctgacccacctgaccttcggcaaggagttcaccgaggccgtggaggccaagcaggtggcccagcaggaggccgagagagccagattcgtggtggagaaggtgagctag

SEQ ID NO: 94549 - DNA, 900 bp, synthetic construct
  misc_feature 1..900: note = Description of Artificial Sequence: Synthetic coding sequence
  source 1..900: mol_type = other DNA
atggcccagaacctgaaggacctggccggcagactgcccgccggccccagaggcatgggcaccgccctgaagctgctgctgggcgccggcgccgtggcctacggcgtgagagagagcgtgttcaccgtggagggcggccacagagccatcttcttcaacagaatcggcggcgtgcagcaggacaccatcctggccgagggcctgcacttcagaatcccctggttccagtaccccatcatctacgacatcagagccagacccagaaagatcagcagccccaccggcagcaaggacctgcagatggtgaacatcagcctgagagtgctgagcagacccaacgcccaggagctgcccagcatgtaccagagactgggcctggactacgaggagagagtgctgcccagcatcgtgaacgaggtgctgaagagcgtggtggccaagttcaacgccagccagctgatcacccagagagcccaggtgagcctgctgatcagaagagagctgaccgagagagccaaggacttcagcctgatcctggacgacgtggccatcaccgagctgagcttcagcagagagtacaccgccgccgtggaggccaagcaggtggcccagcaggaggcccagagagcccagttcctggtggagaaggccaagcaggagcagagacagaagatcgtgcaggccgagggcgaggccgaggccgccaagatgctgggcgaggccctgagcaagaaccccggctacatcaagctgagaaagatcagagccgcccagaacatcagcaagaccatcgccaccagccagaacagaatctacctgaccgccgacaacctggtgctgaacctgcaggacgagagcttcaccagatacagcgacagcctgatcaagggcaagaagtag

SEQ ID NO: 94550 - DNA, 786 bp, synthetic construct
  misc_feature 1..786: note = Description of Artificial Sequence: Synthetic coding sequence
  source 1..786: mol_type = other DNA
atggcccagaacctgaaggacctggccggcagactgcccgccggccccagaggcatgggcaccgccctgaagctgctgctgggcgccggcgccgtggcctacggcgtgagagagagcgtgttcaccgtggagggcggccacagagccatcttcttcaacagaatcggcggcgtgcagcaggacaccatcctggccgagggcctgcacttcagaatcccctggttccagtaccccatcatctacgacatcagagccagacccagaaagatcagcagccccaccggcagcaaggacctgcagatggtgaacatcagcctgagagtgctgagcagacccaacgcccaggagctgcccagcatgtaccagagactgggcctggactacgaggagagagtgctgcccagcatcgtgaacgaggtgctgaagagcgtggtggccaagttcaacgccagccagctgatcacccagagagcccaggtgagcctgctgatcagaagagagctgaccgagagagccaaggacttcagcctgatcctggacgacgtggccatcaccgagctgagcttcagcagagagtacaccgccgccgtggaggccaagcaggtggccctgagcaagaaccccggctacatcaagctgagaaagatcagagccgcccagaacatcagcaagaccatcgccaccagccagaacagaatctacctgaccgccgacaacctggtgctgaacctgcaggacgagagcttcaccagaggcagcgacagcctgatcaagggcaagaagtag

SEQ ID NO: 94551 - DNA, 900 bp, synthetic construct
  misc_feature 1..900: note = Description of Artificial Sequence: Synthetic coding sequence
  source 1..900: mol_type = other DNA
atggcccagaacctgaaggacctggccggcagactgcccgccggccccagaggcatgggcaccgccctgaagctgctgctgggcgccggcgccgtggcctacggcgtgagagagagcgtgttcaccgtggagggcggccacagagccatcttcttcaacagaatcggcggcgtgcagcaggacaccatcctggccgagggcctgcacttcagaatcccctggttccagtaccccatcatctacgacatcagagccagacccagaaagatcagcagccccaccggcagcaaggacctgcagatggtgaacatcagcctgagagtgctgagcagacccaacgcccaggagctgcccagcatgtaccagagactgggcctggactacgaggagagagtgctgcccagcatcgtgaacgaggtgctgaagagcgtggtggccaagttcaacgccagccagctgatcacccagagagcccaggtgagcctgctgatcagaagagagctgaccgagagagccaaggacttcagcctgatcctggacgacgtggccatcaccgagctgagcttcagcagagagtacaccgccgccgtggaggccaagcaggtggcccagcaggaggcccagagagcccagttcctggtggagaaggccaagcaggagcagagacagaagatcgtgcaggccgagggcgaggccgaggccgccaagatgctgggcgaggccctgagcaagaaccccggctacatcaagctgagaaagatcagagccgcccagaacatcagcaagaccatcgccaccagccagaacagaatctacctgaccgccgacaacctggtgctgaacctgcaggacgagagcttcaccagaggcagcgacagcctgatcaagggcaagaagtag

SEQ ID NO: 94552 - DNA, 642 bp, synthetic construct
  misc_feature 1..642: note = Description of Artificial Sequence: Synthetic coding sequence
  source 1..642: mol_type = other DNA
atggcccagaacctgaaggacctggccggcagactgcccgccggccccagaggcatgggcaccgccctgaagctgctgctgggcgccggcgccgtggcctacggcgtgagagagagcgtgttcaccgtggagggcggccacagagccatcttcttcaacagaatcggcggcgtgcagcaggacaccatcctggccgagggcctgcacttcagaatcccctggttccagtaccccatcatctacgacatcagagccagacccagaaagatcagcagccccaccggcagcaaggacctgcagatggtgaacatcagcctgagagtgctgagcagacccaacgcccaggagctgcccagcatgtaccagagactgggcctggactacgaggagagagtgctgcccagcatcgtgaacgaggtgctgaagagcgtggtggccaagttcaacgccagccagctgatcacccagagagcccaggtgagcctgctgatcagaagagagctgaccgagagagccaaggacttcagcctgatcctggacgacgtggccatcaccgagctgagcttcagcagagagtacaccgccgccgtggaggccaagcaggtgggcgagagccaggagccctggggcgagggcttctag

SEQ ID NO: 94553 - DNA, 318 bp, synthetic construct
  misc_feature 1..318: note = Description of Artificial Sequence: Synthetic coding sequence
  source 1..318: mol_type = other DNA
atgagaggcgccaccagagtgagcatcatgctgctgctggtgaccgtgagcgactgcgccgtgatcaccggcgcctgcgagagagacgtgcagtgcggcgccggcacctgctgcgccatcagcctgtggctgagaggcctgagaatgtgcacccccctgggcagagagggcgaggagtgccaccccggcagccacaaggtgcccttcttcagaaagagaaagcaccacacctgcccctgcctgcccaacctgctgtgcagcagattccccgacggcagatacagatgcagcatggacctgaagaacatcaacttctag

SEQ ID NO: 94554 - DNA, 390 bp, synthetic construct
  misc_feature 1..390: note = Description of Artificial Sequence: Synthetic coding sequence
  source 1..390: mol_type = other DNA
atgagaagcctgtgctgcgcccccctgctgctgctgctgctgctgccccccctgctgctgacccccagagccggcgacgccgccgtgatcaccggcgcctgcgacaaggacagccagtgcggcggcggcatgtgctgcgccgtgagcatctgggtgaagagcatcagaatctgcacccccatgggcaagctgggcgacagctgccaccccctgaccagaaagaacaacttcggcaacggcagacaggagagaagaaagagaaagagaagcaagagaaagaaggaggtgcccttcttcggcagaagaatgcaccacacctgcccctgcctgcccggcctggcctgcctgagaaccagcttcaacagattcatctgcctggcccagaagtag

SEQ ID NO: 94555 - DNA, 327 bp, synthetic construct
  misc_feature 1..327: note = Description of Artificial Sequence: Synthetic coding sequence
  source 1..327: mol_type = other DNA
atgagaagcctgtgctgcgcccccctgctgctgctgctgctgctgccccccctgctgctgacccccagagccggcgacgccgccgtgatcaccggcgcctgcgacaaggacagccagtgcggcggcggcatgtgctgcgccgtgagcatctgggtgaagagcatcagaatctgcacccccatgggcaagctgggcgacagctgccaccccctgaccagaaaggtgcccttcttcggcagaagaatgcaccacacctgcccctgcctgcccggcctggcctgcctgagaaccagcttcaacagattcatctgcctggcccagaagtag

SEQ ID NO: 94556 - DNA, 705 bp, synthetic construct
  misc_feature 1..705: note = Description of Artificial Sequence: Synthetic coding sequence
  source 1..705: mol_type = other DNA
atgagagcccccctgtgcctgctgctgctggtggcccacgccgtggacatgctggccctgaacagaagaaagaagcaggtgggcaccggcctgggcggcaactgcaccggctgcatcatctgcagcgaggagaacggctgcagcacctgccagcagagactgttcctgttcatcagaagagagggcatcagacagtacggcaagtgcctgcacgactgcccccccggctacttcggcatcagaggccaggaggtgaacagatgcaagaagtgcggcgccacctgcgagagctgcttcagccaggacttctgcatcagatgcaagagacagttctacctgtacaagggcaagtgcctgcccacctgcccccccggcaccctggcccaccagaacaccagagagtgccagggcgagtgcgagctgggcccctggggcggctggagcccctgcacccacaacggcaagacctgcggcagcgcctggggcctggagagcagagtgagagaggccggcagagccggccacgaggaggccgccacctgccaggtgctgagcgagagcagaaagtgccccatccagagaccctgccccggcgagagaagccccggccagaagaagggcagaaaggacagaagacccagaaaggacagaaagctggacagaagactggacgtgagacccagacagcccggcctgcagccctag

SEQ ID NO: 94557 - DNA, 1155 bp, synthetic construct
  misc_feature 1..1155: note = Description of Artificial Sequence: Synthetic coding sequence
  source 1..1155: mol_type = other DNA
atggccgcccagaacggcaacaccagcttcacccccaacttcaaccccccccaggaccacgccagcagcctgagcttcaacttcagctacggcgactacgacctgcccatggacgaggacgaggacatgaccaagaccagaaccttcttcgccgccaagatcgtgatcggcatcgccctggccggcatcatgctggtgtgcggcatcggcaacttcgtgttcatcgccgccctgaccagatacaagaagctgagaaacctgaccaacctgctgatcgccaacctggccatcagcgacttcctggtggccatcatctgctgccccttcgagatggactactacgtggtgagacagctgagctgggagcacggccacgtgctgtgcgccagcgtgaactacctgagaaccgtgagcctgtacgtgagcaccaacgccctgctggccatcgccatcgacagatacctggccatcgtgcaccccctgaagcccagaatgaactaccagaccgccagcttcctgatcgccctggtgtggatggtgagcatcctgatcgccatccccagcgcctacttcgccaccgagaccgtgctgttcatcgtgaagagccaggagaagatcttctgcggccagatctggcccgtggaccagcagctgtactacaagagctacttcctgttcatcttcggcgtggagttcgtgggccccgtggtgaccatgaccctgtgctacgccagaatcagcagagagctgtggttcaaggccgtgcccggcttccagaccgagcagatcagaaagagactgagatgcagaagaaagaccgtgctggtgctgatgtgcatcctgaccgcctacgtgctgtgctgggcccccttctacggcttcaccatcgtgagagacttcttccccaccgtgttcgtgaaggagaagcactacctgaccgccttctacgtggtggagtgcatcgccatgagcaacagcatgatcaacaccgtgtgcttcgtgaccgtgaagaacaacaccatgaagtacttcaagaagatgatgctgctgcactggagacccagccagagaggcagcaagagcagcgccgacctggacctgagaaccaacggcgtgcccaccaccgaggaggtggactgcatcagactgaagtag

SEQ ID NO: 94558 - DNA, 684 bp, synthetic construct
  misc_feature 1..684: note = Description of Artificial Sequence: Synthetic coding sequence
  source 1..684: mol_type = other DNA
atgaacatcaagggcagcccctggaagggcagcctgctgctgctgctggtgagcaacctgctgctgtgccagagcgtggcccccctgcccatctgccccggcggcgccgccagatgccaggtgaccctgagagacctgttcgacagagccgtggtgctgagccactacatccacaacctgagcagcgagatgttcagcgagttcgacaagagatacacccacggcagaggcttcatcaccaaggccatcaacagctgccacaccagcagcctggccacccccgaggacaaggagcaggcccagcagatgaaccagaaggacttcctgagcctgatcgtgagcatcctgagaagctggaacgagcccctgtaccacctggtgaccgaggtgagaggcatgcaggaggcccccgaggccatcctgagcaaggccgtggagatcgaggagcagaccaagagactgctggagggcatggagctgatcgtgagccaggtgcaccccgagaccaaggagaacgagatctaccccgtgtggagcggcctgcccagcctgcagatggccgacgaggagagcagactgagcgcctactacaacctgctgcactgcctgagaagagacagccacaagatcgacaactacctgaagctgctgaagtgcagaatcatccacaacaacaactgctag

SEQ ID NO: 94559 - DNA, 591 bp, synthetic construct
  misc_feature 1..591: note = Description of Artificial Sequence: Synthetic coding sequence
  source 1..591: mol_type = other DNA
atgaacatcaagggcagcccctggaagggcagcctgctgctgctgctggtgagcaacctgctgctgagccactacatccacaacctgagcagcgagatgttcagcgagttcgacaagagatacacccacggcagaggcttcatcaccaaggccatcaacagctgccacaccagcagcctggccacccccgaggacaaggagcaggcccagcagatgaaccagaaggacttcctgagcctgatcgtgagcatcctgagaagctggaacgagcccctgtaccacctggtgaccgaggtgagaggcatgcaggaggcccccgaggccatcctgagcaaggccgtggagatcgaggagcagaccaagagactgctggagggcatggagctgatcgtgagccaggtgcaccccgagaccaaggagaacgagatctaccccgtgtggagcggcctgcccagcctgcagatggccgacgaggagagcagactgagcgcctactacaacctgctgcactgcctgagaagagacagccacaagatcgacaactacctgaagctgctgaagtgcagaatcatccacaacaacaactgctag

SEQ ID NO: 94560 - DNA, 1545 bp, synthetic construct
  misc_feature 1..1545: note = Description of Artificial Sequence: Synthetic coding sequence
  source 1..1545: mol_type = other DNA
atgaccctgatctggagacacctgctgagacccctgtgcctggtgaccagcgcccccagaatcctggagatgcaccccttcctgagcctgggcaccagcagaaccagcgtgaccaagctgagcctgcacaccaagcccagaatgcccccctgcgacttcatgcccgagagataccagagcctgggctacaacagagtgctggagatccacaaggagcacctgagccccgtggtgaccgcctacttccagaagcccctgctgctgcaccagggccacatggagtggctgttcgacgccgagggcagcagatacctggacttcttcagcggcatcgtgaccgtgagcgtgggccactgccaccccaaggtgaacgccgtggcccagaagcagctgggcagactgtggcacaccagcaccgtgttcttccacccccccatgcacgagtacgccgagaagctggccgccctgctgcccgagcccctgaaggtgatcttcctggtgaacagcggcagcgaggccaacgagctggccatgctgatggccagagcccacagcaacaacatcgacatcatcagcttcagaggcgcctaccacggctgcagcccctacaccctgggcctgaccaacgtgggcacctacaagatggagctgcccggcggcaccggctgccagcccaccatgtgccccgacgtgttcagaggcccctggggcggcagccactgcagagacagccccgtgcagaccatcagaaagtgcagctgcgcccccgactgctgccaggccaaggaccagtacatcgagcagttcaaggacaccctgagcaccagcgtggccaagagcatcgccggcttcttcgccgagcccatccagggcgtgaacggcgtggtgcagtaccccaagggcttcctgaaggaggccttcgagctggtgagagccagaggcggcgtgtgcatcgccgacgaggtgcagaccggcttcggcagactgggcagccacttctggggcttccagacccacgacgtgctgcccgacatcgtgaccatggccaagggcatcggcaacggcttccccatggccgccgtgatcaccacccccgagatcgccaagagcctggccaagtgcctgcagcacttcaacaccttcggcggcaaccccatggcctgcgccatcggcagcgccgtgctggaggtgatcaaggaggagaacctgcaggagaacagccaggaggtgggcacctacatgctgctgaagttcgccaagctgagagacgagttcgagatcgtgggcgacgtgagaggcaagggcctgatgatcggcatcgagatggtgcaggacaagatcagctgcagacccctgcccagagaggaggtgaaccagatccacgaggactgcaagcacatgggcctgctggtgggcagaggcagcatcttcagccagaccttcagaatcgcccccagcatgtgcatcaccaagcccgaggtggacttcgccgtggaggtgttcagaagcgccctgacccagcacatggagagaagagccaagtag

SEQ ID NO: 94561 - DNA, 1050 bp, synthetic construct
  misc_feature 1..1050: note = Description of Artificial Sequence: Synthetic coding sequence
  source 1..1050: mol_type = other DNA
atgaaggagaacgtggccagcgccaccgtgttcaccctgctgctgttcctgaacacctgcctgctgaacggccagctgccccccggcaagcccgagatcttcaagtgcagaagccccaacaaggagaccttcacctgctggtggagacccggcaccgacggcggcctgcccaccaactacagcctgacctaccacagagagggcgagaccctgatgcacgagtgccccgactacatcaccggcggccccaacagctgccacttcggcaagcagtacaccagcatgtggagaacctacatcatgatggtgaacgccaccaaccagatgggcagcagcttcagcgacgagctgtacgtggacgtgacctacatcgtgcagcccgacccccccctggagctggccgtggaggtgaagcagcccgaggacagaaagccctacctgtggatcaagtggagcccccccaccctgatcgacctgaagaccggctggttcaccctgctgtacgagatcagactgaagcccgagaaggccgccgagtgggagatccacttcgccggccagcagaccgagttcaagatcctgagcctgcaccccggccagaagtacctggtgcaggtgagatgcaagcccgaccacggctactggagcgcctggagccccgccaccttcatccagatccccagcgacttcaccatgaacgacaccaccgtgtggatcagcgtggccgtgctgagcgccgtgatctgcctgatcatcgtgtgggccgtggccctgaagggctacagcatggtgacctgcatcttcccccccgtgcccggccccaagatcaagggcttcgacgcccacctgctggagaagggcaagagcgaggagctgctgagcgccctgggctgccaggacttcccccccaccagcgactacgaggacctgctggtggagtacctggaggtggacgacagcgaggaccagcacctgatgagcgtgcacagcaaggagcaccccagccaggagagagagcagagacaggcccaggaggccagagacagctag

SEQ ID NO: 94562 - DNA, 1566 bp, synthetic construct
  misc_feature 1..1566: note = Description of Artificial Sequence: Synthetic coding sequence
  source 1..1566: mol_type = other DNA
atgaaggagaacgtggccagcgccaccgtgttcaccctgctgctgttcctgaacacctgcctgctgaacgtgcagcccgacccccccctggagctggccgtggaggtgaagcagcccgaggacagaaagccctacctgtggatcaagtggagcccccccaccctgatcgacctgaagaccggctggttcaccctgctgtacgagatcagactgaagcccgagaaggccgccgagtgggagatccacttcgccggccagcagaccgagttcaagatcctgagcctgcaccccggccagaagtacctggtgcaggtgagatgcaagcccgaccacggctactggagcgcctggagccccgccaccttcatccagatccccagcgacttcaccatgaacgacaccaccgtgtggatcagcgtggccgtgctgagcgccgtgatctgcctgatcatcgtgtgggccgtggccctgaagggctacagcatggtgacctgcatcttcccccccgtgcccggccccaagatcaagggcttcgacgcccacctgctggagaagggcaagagcgaggagctgctgagcgccctgggctgccaggacttcccccccaccagcgactacgaggacctgctggtggagtacctggaggtggacgacagcgaggaccagcacctgatgagcgtgcacagcaaggagcaccccagccagggcatgaagcccacctacctggaccccgacaccgacagcggcagaggcagctgcgacagccccagcctgctgagcgagaagtgcgaggagccccaggccaaccccagcaccttctacgaccccgaggtgatcgagaagcccgagaaccccgagaccacccacacctgggacccccagtgcatcagcatggagggcaagatcccctacttccacgccggcggcagcaagtgcagcacctggcccctgccccagcccagccagcacaaccccagaagcagctaccacaacatcaccgacgtgtgcgagctggccgtgggccccgccggcgcccccgccaccctgctgaacgaggccggcaaggacgccctgaagagcagccagaccatcaagagcagagaggagggcaaggccacccagcagagagaggtggagagcttccacagcgagaccgaccaggacaccccctggctgctgccccaggagaagacccccttcggcagcgccaagcccctggactacgtggagatccacaaggtgaacaaggacggcgccctgagcctgctgcccaagcagagagagaacagcggcaagcccaagaagcccggcacccccgagaacaacaaggagtacgccaaggtgagcggcgtgatggacaacaacatcctggtgctggtgcccgacccccacgccaagaacgtggcctgcttcgaggagagcgccaaggaggccccccccagcctggagcagaaccaggccgagaaggccctggccaacttcaccgccaccagcagcaagtgcagactgcagctgggcggcctggactacctggaccccgcctgcttcacccacagcttccactag

SEQ ID NO: 94563 - DNA, 807 bp, synthetic construct
  misc_feature 1..807: note = Description of Artificial Sequence: Synthetic coding sequence
  source 1..807: mol_type = other DNA
atgaaggagaacgtggccagcgccaccgtgttcaccctgctgctgttcctgaacacctgcctgctgaacggccagctgccccccggcaagcccgagatcttcaagtgcagaagccccaacaaggagaccttcacctgctggtggagacccggcaccgacggcggcctgcccaccaactacagcctgacctaccacagagagggcgagaccctgatgcacgagtgccccgactacatcaccggcggccccaacagctgccacttcggcaagcagtacaccagcatgtggagaacctacatcatgatggtgaacgccaccaaccagatgggcagcagcttcagcgacgagctgtacgtggacgtgacctacatcgtgcagcccgacccccccctggagctggccgtggaggtgaagcagcccgaggacagaaagccctacctgtggatcaagtggagcccccccaccctgatcgacctgaagaccggctggttcaccctgctgtacgagatcagactgaagcccgagaaggccgccgagtgggagatccacttcgccggccagcagaccgagttcaagatcctgagcctgcaccccggccagaagtacctggtgcaggtgagatgcaagcccgaccacggctactggagcgcctggagccccgccaccttcatccagatccccagcggcgaccccctgatgctgggcgccagccactacaagaacctgaagagctacagacccagaaagatcagcagccagggcagactggccgtgttcaccaaggccaccctgaccaccgtgcagtag

SEQ ID NO: 94564 - DNA, 1869 bp, synthetic construct
  misc_feature 1..1869: note = Description of Artificial Sequence: Synthetic coding sequence
  source 1..1869: mol_type = other DNA
atgaaggagaacgtggccagcgccaccgtgttcaccctgctgctgttcctgaacacctgcctgctgaacggccagctgccccccggcaagcccgagatcttcaagtgcagaagccccaacaaggagaccttcacctgctggtggagacccggcaccgacggcggcctgcccaccaactacagcctgacctaccacagagagggcgagaccctgatgcacgagtgccccgactacatcaccggcggccccaacagctgccacttcggcaagcagtacaccagcatgtggagaacctacatcatgatggtgaacgccaccaaccagatgggcagcagcttcagcgacgagctgtacgtggacgtgacctacatcgtgcagcccgacccccccctggagctggccgtggaggtgaagcagcccgaggacagaaagccctacctgtggatcaagtggagcccccccaccctgatcgacctgaagaccggctggttcaccctgctgtacgagatcagactgaagcccgagaaggccgccgagtgggagatccacttcgccggccagcagaccgagttcaagatcctgagcctgcaccccggccagaagtacctggtgcaggtgagatgcaagcccgaccacggctactggagcgcctggagccccgccaccttcatccagatccccagcgacttcaccatgaacgacaccaccgtgtggatcagcgtggccgtgctgagcgccgtgatctgcctgatcatcgtgtgggccgtggccctgaagggctacagcatggtgacctgcatcttcccccccgtgcccggccccaagatcaagggcttcgacgcccacctgctggagaagggcaagagcgaggagctgctgagcgccctgggctgccaggacttcccccccaccagcgactacgaggacctgctggtggagtacctggaggtggacgacagcgaggaccagcacctgatgagcgtgcacagcaaggagcaccccagccagggcatgaagcccacctacctggaccccgacaccgacagcggcagaggcagctgcgacagccccagcctgctgagcgagaagtgcgaggagccccaggccaaccccagcaccttctacgaccccgaggtgatcgagaagcccgagaaccccgagaccacccacacctgggacccccagtgcatcagcatggagggcaagatcccctacttccacgccggcggcagcaagtgcagcacctggcccctgccccagcccagccagcacaaccccagaagcagctaccacaacatcaccgacgtgtgcgagctggccgtgggccccgccggcgcccccgccaccctgctgaacgaggccggcaaggacgccctgaagagcagccagaccatcaagagcagagaggagggcaaggccacccagcagagagaggtggagagcttccacagcgagaccgaccaggacaccccctggctgctgccccaggagaagacccccttcggcagcgccaagcccctggactacgtggagatccacaaggtgaacaaggacggcgccctgagcctgctgcccaagcagagagagaacagcggcaagcccaagaagcccggcacccccgagaacaacaaggagtacgccaaggtgagcggcgtgatggacaacaacatcctggtgctggtgcccgacccccacgccaagaacgtggcctgcttcgaggagagcgccaaggaggccccccccagcctggagcagaaccaggccgagaaggccctggccaacttcaccgccaccagcagcaagtgcagactgcagctgggcggcctggactacctggaccccgcctgcttcacccacagcttccactag

SEQ ID NO: 94565 - DNA, 594 bp, synthetic construct
  misc_feature 1..594: note = Description of Artificial Sequence: Synthetic coding sequence
  source 1..594: mol_type = other DNA
atgcacgagtgccccgactacatcaccggcggccccaacagctgccacttcggcaagcagtacaccagcatgtggagaacctacatcatgatggtgaacgccaccaaccagatgggcagcagcttcagcgacgagctgtacgtggacgtgacctacatcgtgcagcccgacccccccctggagctggccgtggaggtgaagcagcccgaggacagaaagccctacctgtggatcaagtggagcccccccaccctgatcgacctgaagaccggctggttcaccctgctgtacgagatcagactgaagcccgagaaggccgccgagtgggagatccacttcgccggccagcagaccgagttcaagatcctgagcctgcaccccggccagaagtacctggtgcaggtgagatgcaagcccgaccacggctactggagcgcctggagccccgccaccttcatccagatccccagcggcgaccccctgatgctgggcgccagccactacaagaacctgaagagctacagacccagaaagatcagcagccagggcagactggccgtgttcaccaaggccaccctgaccaccgtgcagtag

SEQ ID NO: 94566 - DNA, 312 bp, synthetic construct
  misc_feature 1..312: note = Description of Artificial Sequence: Synthetic coding sequence
  source 1..312: mol_type = other DNA
atgaaggagaacgtggccagcgccaccgtgttcaccctgctgctgttcctgaacacctgcctgctgaacggccagctgccccccggcaagcccgagatcttcaagtgcagaagccccaacaaggagaccttcacctgctggtggagacccggcaccgacggcggcctgcccaccaactacagcctgacctaccacagagagggcgagaccctgatgcacgagtgccccgactacatcaccggcggccccaacagctgccacttcggcaagcagtacaccagcatgtggagaacctacatcatgatggtgtag

SEQ ID NO: 94567 - DNA, 189 bp, synthetic construct
  misc_feature 1..189: note = Description of Artificial Sequence: Synthetic coding sequence
  source 1..189: mol_type = other DNA
atgaaggagaacgtggccagcgccaccgtgttcaccctgctgctgttcctgaacacctgcctgctgaacggccagctgccccccggcaagcccgagatcttcaagtgcagaagccccaacaaggagaccttcacctgctggtggagacccggcaccgacggcggcctgcccaccaactacagcctgtag

SEQ ID NO: 94568 - DNA, 336 bp, synthetic construct
  misc_feature 1..336: note = Description of Artificial Sequence: Synthetic coding sequence
  source 1..336: mol_type = other DNA
atgaaggagaacgtggccagcgccaccgtgttcaccctgctgctgttcctgaacacctgcctgctgaacggccagctgccccccggcaagcccgagatcttcaagtgcagaagccccaacaaggagaccttcacctgctggtggagacccggcaccgacggcggcctgcccaccaactacagcctgacctaccacagagagggcgagaccctgatgcacgagtgccccgactacatcaccggcggccccaacagctgccacttcggcaagcagtacaccagcatgtggagaacctacatcatgatggtgaacgccaccaaccagatgggcagctag

SEQ ID NO: 94569 - DNA, 1566 bp, synthetic construct; identical to SEQ ID NO: 94562
  misc_feature 1..1566: note = Description of Artificial Sequence: Synthetic coding sequence
  source 1..1566: mol_type = other DNA

SEQ ID NO: 94570 - DNA, 867 bp, synthetic construct
  misc_feature 1..867: note = Description of Artificial Sequence: Synthetic coding sequence
  source 1..867: mol_type = other DNA
atgaaggagaacgtggccagcgccaccgtgttcaccctgctgctgttcctgaacacctgcctgctgaacggccagctgccccccggcaagcccgagatcttcaagtgcagaagccccaacaaggagaccttcacctgctggtggagacccggcaccgacggcggcctgcccaccaactacagcctgacctaccacagagagggcgagaccctgatgcacgagtgccccgactacatcaccggcggccccaacagctgccacttcggcaagcagtacaccagcatgtggagaacctacatcatgatggtgaacgccaccaaccagatgggcagcagcttcagcgacgagctgtacgtggacgtgacctacatcgtgcagcccgacccccccctggagctggccgtggaggtgaagcagcccgaggacagaaagccctacctgtggatcaagtggagcccccccaccctgatcgacctgaagaccggctggttcaccctgctgtacgagatcagactgaagcccgagaaggccgccgagtgggagatccacttcgccggccagcagaccgagttcaagatcctgagcctgcaccccggccagaagtacctggtgcaggtgagatgcaagcccgaccacggctactggagcgcctggagccccgccaccttcatccagatccccagcgacttcaccatgaacgacaccaccgtgtggatcagcgtggccgtgctgagcgccgtgatctgcctgatcatcgtgtgggccgtggccctgaagggctacagcatggtgacctgcatcttcccccccgtgcccggccccaagatcaagggcttcgacgcccacctgctggaggtgaccccctag

SEQ ID NO: 94571 - DNA, 363 bp, synthetic construct
  misc_feature 1..363: note = Description of Artificial Sequence: Synthetic coding sequence
  source 1..363: mol_type = other DNA
atgaaggagaacgtggccagcgccaccgtgttcaccctgctgctgttcctgaacacctgcctgctgaacggccagctgccccccggcaagcccgagatcttcaagtgcagaagccccaacaaggagaccttcacctgctggtggagacccggcaccgacggcggcctgcccaccaactacagcctgacctaccacagagagggcgagaccctgatgcacgagtgccccgactacatcaccggcggccccaacagctgccacttcggcaagcagtacaccagcatgtggagaacctacatcatgatggtgaacgccaccaaccagatgggcagcagcttcagcgacgagctgtacgtggactag

SEQ ID NO: 94572 - DNA, 105 bp, synthetic construct
  misc_feature 1..105: note = Description of Artificial Sequence: Synthetic coding sequence
  source 1..105: mol_type = other DNA
atgaaggagaacgtggccagcgccaccgtgttcaccctgctgctgttcctgaacacctgcctgctgaacggccagctgccccccggcaagcccgagatcttctag

SEQ ID NO: 94573 - DNA, 930 bp, synthetic construct
  misc_feature 1..930: note = Description of Artificial Sequence: Synthetic coding sequence
  source 1..930: mol_type = other DNA
atgaaggagaacgtggccagcgccaccgtgttcaccctgctgctgttcctgaacacctgcctgctgaacggccagctgccccccggcaagcccgagatcttcaagtgcagaagccccaacaaggagaccttcacctgctggtggagacccggcaccgacggcggcctgcccaccaactacagcctgacctaccacagagagggcgagaccctgatgcacgagtgccccgactacatcaccggcggccccaacagctgccacttcggcaagcagtacaccagcatgtggagaacctacatcatgatggtgaacgccaccaaccagatgggcagcagcttcagcgacgagctgtacgtggacgtgacctacatcgtgcagcccgacccccccctggagctggccgtggaggtgaagcagcccgaggacagaaagccctacctgtggatcaagtggagcccccccaccctgatcgacctgaagaccggctggttcaccctgctgtacgagatcagactgaagcccgagaaggccgccgagtgggagatccacttcgccggccagcagaccgagttcaagatcctgagcctgcaccccggccagaagtacctggtgcaggtgagatgcaagcccgaccacggctactggagcgcctggagccccgccaccttcatccagatccccagcgacttcaccatgaacgacaccaccgtgtggatcagcgtggccgtgctgagcgccgtgatctgcctgatcatcgtgtgggccgtggccctgaagggctacagcatggtgacctgcatcttcccccccgtgcccggccccaagatcaagggcttcgacgcccacctgctggaggacagactgtgcacccccggcagatgctgcgtgagcaccggcctgaccgacctggactacagctgcagcacctag

SEQ ID NO: 94574 - DNA, 1254 bp, synthetic construct
  misc_feature 1..1254: note = Description of Artificial Sequence: Synthetic coding sequence
  source 1..1254: mol_type = other DNA
atgggcagaagaagagcccccgagctgtacagagcccccttccccctgtacgccctgcaggtggaccccagcaccggcctgctgatcgccgccggcggcggcggcgccgccaagaccggcatcaagaacggcgtgcacttcctgcagctggagctgatcaacggcagactgagcgccagcctgctgcacagccacgacaccgagaccagagccaccatgaacctggccctggccggcgacatcctggccgccggccaggacgcccactgccagctgctgagattccaggcccaccagcagcagggcaacaaggccgagaaggccggcagcaaggagcagggccccagacagagaaagggcgccgcccccgccgagaagaagtgcggcgccgagacccagcacgagggcctggagctgagagtggagaacctgcaggccgtgcagaccgacttcagcagcgaccccctgcagaaggtggtgtgcttcaaccacgacaacaccctgctggccaccggcggcaccgacggctacgtgagagtgtggaaggtgcccagcctggagaaggtgctggagttcaaggcccacgagggcgagatcgaggacctggccctgggccccgacggcaagctggtgaccgtgggcagagacctgaaggccagcgtgtggcagaaggaccagctggtgacccagctgcactggcaggagaacggccccaccttcagcagcaccccctacagataccaggcctgcagattcggccaggtgcccgaccagcccgccggcctgagactgttcaccgtgcagatcccccacaagagactgagacagccccccccctgctacctgaccgcctgggacggcagcaacttcctgcccctgagaaccaagagctgcggccacgaggtggtgagctgcctggacgtgagcgagagcggcaccttcctgggcctgggcaccgtgaccggcagcgtggccatctacatcgccttcagcctgcagtgcctgtactacgtgagagaggcccacggcatcgtggtgaccgacgtggccttcctgcccgagaagggcagaggccccgagctgctgggcagccacgagaccgccctgttcagcgtggccgtggacagcagatgccagctgcacctgctgcccagcagaagaagcgtgcccgtgtggctgctgctgctgctgtgcgtgggcctgatcatcgtgaccatcctgctgctgcagagcgccttccccggcttcctgtag

SEQ ID NO: 94575 - DNA, 1254 bp, synthetic construct; identical to SEQ ID NO: 94574
  misc_feature 1..1254: note = Description of Artificial Sequence: Synthetic coding sequence
  source 1..1254: mol_type = other DNA

SEQ ID NO: 94576 - DNA, 441 bp, synthetic construct
  misc_feature 1..441: note = Description of Artificial Sequence: Synthetic coding sequence
  source 1..441: mol_type = other DNA
atgagactgctgcagctgctgttcagagccagccccgccaccctgctgctggtgctgtgcctgcagctgggcgccaacaaggcccaggacaacaccagaaagatcatcatcaagaacttcgacatccccaagagcgtgagacccaacgacgaggtgaccgccgtgctggccgtgcagaccgagctgaaggagtgcatggtggtgaagacctacctgatcagcagcatccccctgcagggcgccttcaactacaagtacaccgcctgcctgtgcgacgacaaccccaagaccttctactgggacttctacaccaacagaaccgtgcagatcgccgccgtggtggacgtgatcagagagctgggcatctgccccgacgacgccgccgtgatccccatcaagaacaacagattctacaccatcgagatcctgaaggtggagtag

SEQ ID NO: 94577 - DNA, 1185 bp, synthetic construct
  misc_feature 1..1185: note = Description of Artificial Sequence: Synthetic coding sequence
  source 1..1185: mol_type = other DNA
atgagcggcgaggacgagcagcaggagcagaccatcgccgaggacctggtggtgaccaagtacaagatgggcggcgacatcgccaacagagtgctgagaagcctggtggaggccagcagcagcggcgtgagcgtgctgagcctgtgcgagaagggcgacgccatgatcatggaggagaccggcaagatcttcaagaaggagaaggagatgaagaagggcatcgccttccccaccagcatcagcgtgaacaactgcgtgtgccacttcagccccctgaagagcgaccaggactacatcctgaaggagggcgacctggtgaagatcgacctgggcgtgcacgtggacggcttcatcgccaacgtggcccacaccttcgtggtggacgtggcccagggcacccaggtgaccggcagaaaggccgacgtgatcaaggccgcccacctgtgcgccgaggccgccctgagactggtgaagcccggcaaccagaacacccaggtgaccgaggcctggaacaaggtggcccacagcttcaactgcacccccatcgagggcatgctgagccaccagctgaagcagcacgtgatcgacggcgagaagaccatcatccagaaccccaccgaccagcagaagaaggaccacgagaaggccgagttcgaggtgcacgaggtgtacgccgtggacgtgctggtgagcagcggcgagggcaaggccaaggacgccggccagagaaccaccatctacaagagagaccccagcaagcagtacggcctgaagatgaagaccagcagagccttcttcagcgaggtggagagaagattcgacgccatgcccttcaccctgagagccttcgaggacgagaagaaggccagaatgggcgtggtggagtgcgccaagcacgagctgctgcagcccttcaacgtgctgtacgagaaggagggcgagttcgtggcccagttcaagttcaccgtgctgctgatgcccaacggccccatgagaatcaccagcggccccttcgagcccgacctgtacaagagcgagatggaggtgcaggacgccgagctgaaggccctgctgcagagcagcgccagcagaaagacccagaagaagaagaagaagaaggccagcaagaccgccgagaacgccaccagcggcgagaccctggaggagaacgaggccggcgactag

SEQ ID NO: 94578 - DNA, 1218 bp, synthetic construct
  misc_feature 1..1218: note = Description of Artificial Sequence: Synthetic coding sequence
  source 1..1218: mol_type = other DNA
gcctgccccgccccccagcccgccagaagccagctgctggccctggcctgcctgcccgcccccctgctggccagagccttcgccagacccctgctggaggacagaggcgacagcgaccacagccccgaggacctggtggtgaccaagtacaagatgggcggcgacatcgccaacagagtgctgagaagcctggtggaggccagcagcagcggcgtgagcgtgctgagcctgtgcgagaagggcgacgccatgatcatggaggagaccggcaagatcttcaagaaggagaaggagatgaagaagggcatcgccttccccaccagcatcagcgtgaacaactgcgtgtgccacttcagccccctgaagagcgaccaggactacatcctgaaggagggcgacctggtgaagatcgacctgggcgtgcacgtggacggcttcatcgccaacgtggcccacaccttcgtggtggacgtggcccagggcacccaggtgaccggcagaaaggccgacgtgatcaaggccgcccacctgtgcgccgaggccgccctgagactggtgaagcccggcaaccagaacacccaggtgaccgaggcctggaacaaggtggcccacagcttcaactgcacccccatcgagggcatgctgagccaccagctgaagcagcacgtgatcgacggcgagaagaccatcatccagaaccccaccgaccagcagaagaaggaccacgagaaggccgagttcgaggtgcacgaggtgtacgccgtggacgtgctggtgagcagcggcgagggcaaggccaaggacgccggccagagaaccaccatctacaagagagaccccagcaagcagtacggcctgaagatgaagaccagcagagccttcttcagcgaggtggagagaagattcgacgccatgcccttcaccctgagagccttcgaggacgagaagaaggccagaatgggcgtggtggagtgcgccaagcacgagctgctgcagcccttcaacgtgctgtacgagaaggagggcgagttcgtggcccagttcaagttcaccgtgctgctgatgcccaacggccccatgagaatcaccagcggccccttcgagcccgacctgtacaagagcgagatggaggtgcaggacgccgagctgaaggccctgctgcagagcagcgccagcagaaagacccagaagaagaagaagaagaagaagaagaagtag

SEQ ID NO: 94579 - DNA, 738 bp, synthetic construct
  misc_feature 1..738: note = Description of Artificial Sequence: Synthetic coding sequence
  source 1..738: mol_type = other DNA
atgaccagaatgctgcagagaatggacgtgctggccaagaaggccaccgagatgggcgtgagactgatggtggacgccgagcagacctacttccagcccgccatcagcagactgaccctggagatgcagagaaagttcaacgtggagaagcccctgatcttcaacacctaccagtgctacctgaaggacgcctacgacaacgtgaccctggacgtggagctggccagaagagagggctggtgcttcggcgccaagctggtgagaggcgcctacctggcccaggagagagccagagccgccgagatcggctacgaggaccccatcaaccccacctacgaggccaccaacgccatgtaccacagatgcctggactacgtgctggaggagctgaagcacaacgccaaggccaaggtgatggtggccagccacaacgaggacaccgtgagattcgccctgagaagaatggaggagctgggcctgcaccccgccgaccacagagtgtacttcggccagctgctgggcatgtgcgaccagatcagcttccccctgggccaggccggctaccccgtgtacaagtacgtgccctacggccccgtgatggaggtgctgccctacctgagcagaagagccctggagaacagcagcctgatgaagggcacccacagagagagacagctgctgtggctggagctgctgagaagactgagaaccggcaacctgttccacagacccgcctag

SEQ ID NO: 94580 - DNA, 1803 bp, synthetic construct
  misc_feature 1..1803: note = Description of Artificial Sequence: Synthetic coding sequence
  source 1..1803: mol_type = other DNA
atggccctgagaagagccctgcccgccctgagaccctgcatccccagattcgtgcccctgagcaccgcccccgccagcagagagcagcccgccgccggccccgccgccgtgcccggcggcggcagcgccaccgccgtgagaccccccgtgcccgccgtggacttcggcaacgcccaggaggcctacagaagcagaagaacctgggagctggccagaagcctgctggtgctgagactgtgcgcctggcccgccctgctggccagacacgagcagctgctgtacgtgagcagaaagctgctgggccagagactgttcaacaagctgatgaagatgaccttctacggccacttcgtggccggcgaggaccaggagagcatccagcccctgctgagacactacagagccttcggcgtgagcgccatcctggactacggcgtggaggaggacctgagccccgaggaggccgagcacaaggagatggagagctgcaccagcgccgccgagagagacggcagcggcaccaacaagagagacaagcagtaccaggcccactgggccttcggcgacagaagaaacggcgtgatcagcgccagaacctacttctacgccaacgaggccaagtgcgacagccacatggagaccttcctgagatgcatcgaggccagcggcagagtgagcgacgacggcttcatcgccatcaagctgaccgccctgggcagaccccagttcctgctgcagttcagcgaggtgctggccaagtggagatgcttcttccaccagatggccgtggagcagggccaggccggcctggccgccatggacaccaagctggaggtggccgtgctgcaggagagcgtggccaagctgggcatcgccagcagagccgagatcgaggactggttcaccgccgagaccctgggcgtgagcggcaccatggacctgctggactggagcagcctgatcgacagcagaaccaagctgagcaagcacctggtggtgcccaacgcccagaccggccagctggagcccctgctgagcagattcaccgaggaggaggagctgcagatgaccagaatgctgcagagaatggacgtgctggccaagaaggccaccgagatgggcgtgagactgatggtggacgccgagcagacctacttccagcccgccatcagcagactgaccctggagatgcagagaaagttcaacgtggagaagcccctgatcttcaacacctaccagtgctacctgaaggacgcctacgacaacgtgaccctggacgtggagctggccagaagagagggctggtgcttcggcgccaagctggtgagaggcgcctacctggcccaggagagagccagagccgccgagatcggctacgaggaccccatcaaccccacctacgaggccaccaacgccatgtaccacagatgcctggactacgtgctggaggagctgaagcacaacgccaaggccaaggtgatggtggccagccacaacgaggacaccgtgagattcgccctgagaagaatggaggagctgggcctgcaccccgccgaccacagagtgtacttcggccagctgctgggcatgtgcgaccagatcagcttccccctgggccaggccggctaccccgtgtacaagtacgtgccctacggccccgtgatggaggtgctgccctacctgagcagaagagccctggagaacagcagcctgatgaagggcacccacagagagagacagctgctgtggctggagctgctgagaagactgagaaccggcaacctgttccacagacccgcctag

SEQ ID NO: 94581 - DNA, 1479 bp, synthetic construct
  misc_feature 1..1479: note = Description of Artificial Sequence: Synthetic coding sequence
  source 1..1479: mol_type = other DNA
atgaagatgaccttctacggccacttcgtggccggcgaggaccaggagagcatccagcccctgctgagacactacagagccttcggcgtgagcgccatcctggactacggcgtggaggaggacctgagccccgaggaggccgagcacaaggagatggagagctgcaccagcgccgccgagagagacggcagcggcaccaacaagagagacaagcagtaccaggcccactgggccttcggcgacagaagaaacggcgtgatcagcgccagaacctacttctacgccaacgaggccaagtgcgacagccacatggagaccttcctgagatgcatcgaggccagcggcagagtgagcgacgacggcttcatcgccatcaagctgaccgccctgggcagaccccagttcctgctgcagttcagcgaggtgctggccaagtggagatgcttcttccaccagatggccgtggagcagggccaggccggcctggccgccatggacaccaagctggaggtggccgtgctgcaggagagcgtggccaagctgggcatcgccagcagagccgagatcgaggactggttcaccgccgagaccctgggcgtgagcggcaccatggacctgctggactggagcagcctgatcgacagcagaaccaagctgagcaagcacctggtggtgcccaacgcccagaccggccagctggagcccctgctgagcagattcaccgaggaggaggagctgcagatgaccagaatgctgcagagaatggacgtgctggccaagaaggccaccgagatgggcgtgagactgatggtggacgccgagcagacctacttccagcccgccatcagcagactgaccctggagatgcagagaaagttcaacgtggagaagcccctgatcttcaacacctaccagtgctacctgaaggacgcctacgacaacgtgaccctggacgtggagctggccagaagagagggctggtgcttcggcgccaagctggtgagaggcgcctacctggcccaggagagagccagagccgccgagatcggctacgaggaccccatcaaccccacctacgaggccaccaacgccatgtaccacagatgcctggactacgtgctggaggagctgaagcacaacgccaaggccaaggtgatggtggccagccacaacgaggacaccgtgagattcgccctgagaagaatggaggagctgggcctgcaccccgccgaccacagagtgtacttcggccagctgctgggcatgtgcgaccagatcagcttccccctgggccaggccggctaccccgtgtacaagtacgtgccctacggccccgtgatggaggtgctgccctacctgagcagaagagccctggagaacagcagcctgatgaagggcacccacagagagagacagctgctgtggctggagctgctgagaagactgagaaccggcaacctgttccacagacccgcctag

SEQ ID NO: 94582 - DNA, 1611 bp, synthetic construct
  misc_feature 1..1611: note = Description of Artificial Sequence: Synthetic coding sequence
  source 1..1611: mol_type = other DNA
atgagccccagagtggtgagcaacagcagcgtgctggccagccagagcgtgggcatcaccaacgtgagaaccgtgttcagcaacgtgttcaacaacaccaccgccttccccatcctgagaggcagcaactgccacaagatcaccgcccccggcctgggcaagggccagctggtgaacctgctgccccccgagaacctgccctggtgcggcggcagccagggccccagaatgctgagaacctgctacgtgctgtgcagccaggccggcccccccagcagaggctggcagagcctgagcttcgacggcggcgccttccacctgaagggcaccggcgagctgaccagagccctgctggtgctgagactgtgcgcctggccccccctggtgacccacggcctgctgctgcaggcctggagcagaagactgctgggcagcagactgagcggcgccttcctgagagccagcgtgtacggccagttcgtggccggcgagaccgccgaggaggtgaagggctgcgtgcagcagctgagaaccctgagcctgagacccctgctggccgtgcccaccgaggaggagcccgacagcgccgccaagagcggcgaggcctggtacgagggcaacctgggcgccatgctgagatgcgtggacctgagcagaggcctgctggagccccccagcctggccgaggccagcctgatgcagctgaaggtgaccgccctgaccagcaccagactgtgcaaggagctggccagctgggtgagaagacccggcgccagcctggagctgagccccgagagactggccgaggccatggacagcggccagaacctgcaggtgagctgcctgaacgccgagcagaaccagcacctgagagccagcctgagcagactgcacagagtggcccagtacgccagagcccagcacgtgagactgctggtggacgccgagtacaccagcctgaaccccgccctgagcctgctggtggccgccctggccgtgagatggaacagccccggcgagggcggcccctgggtgtggaacacctaccaggcctgcctgaaggacaccttcgagagactgggcagagacgccgaggccgcccacagagccggcctggccttcggcgtgaagctggtgagaggcgcctacctggacaaggagagagccgtggcccagctgcacggcatggaggaccccacccagcccgactacgaggccaccagccagagctacagcagatgcctggagctgatgctgacccacgtggccagacacggccccatgtgccacctgatggtggccagccacaacgaggagagcgtgagacaggccaccaagagaatgtgggagctgggcatccccctggacggcaccgtgtgcttcggccagctgctgggcatgtgcgaccacgtgagcctggccctgggccaggccggctacgtggtgtacaagagcatcccctacggcagcctggaggaggtgatcccctacctgatcagaagagcccaggagaacagaagcgtgctgcagggcgccagaagagagcaggagctgctgagccaggagctgtggagaagactgctgcccggctgcagaagaatcccccactag

SEQ ID NO: 94583 - DNA, 762 bp, synthetic construct
  misc_feature 1..762: note = Description of Artificial Sequence: Synthetic coding sequence
  source 1..762: mol_type = other DNA
atgcccggcagaaccgagggcggcagctggctgagaaacgccgccgccgccgacgtgctgagaaacctgcccgaggtggagtggagagagccccagcactgctgcccccccacccccagaaagagaaagcagaaccccagagtgcccctgccccactacccccccaaccccgccgccgccatcgccgccgacaccatgcccaagagaaagaagcagaaccaccaccagccccccacccagcagcagccccccctgcccgagagagaggagaccggcgacgaggaggacggcagccccatcggcccccccagcctgctgggccccccccccatggccaacggcaagcccggcgaccccaagagcgccctgcacagaggcccccccggcagcagaggccccctgatcccccccctgctgagcctgcccccccccccctggggcagaggccccatcagaagaggcctgggccccagaagcagcccctacggcagaggctggtggggcgtgaacgccgagccccccttccccggccccggccacggcggccccaccagaggcagcttccacaaggagcagagaaaccccagaagactgaagagctggagcctgatcaagaacacctgcccccccaaggacgacccccaggtgatggaggacaagagcgacagacccgtgtgcagacacttcgccaagaagggccactgcagatacgaggacctgtgcgccttctaccaccccggcgtgaacggcccccccctgtag

SEQ ID NO: 94584 - DNA, 504 bp, synthetic construct
  misc_feature 1..504: note = Description of Artificial Sequence: Synthetic coding sequence
  source 1..504: mol_type = other DNA
atgcccaagagaaagaagcagaaccaccaccagccccccacccagcagcagccccccctgcccgagagagaggagaccggcgacgaggaggacggcagccccatcgccctgcacagaggcccccccggcagcagaggccccctgatcccccccctgctgagcctgcccccccccccctggggcagaggccccatcagaagaggcctgggccccagaagcagcccctacggcagaggctggtggggcgtgaacgccgagccccccttccccggccccggccacggcggccccaccagaggcagcttccacaaggagcagagaaaccccagaagactgaagagctggagcctgatcaagaacacctgcccccccaaggacgacccccaggtgatggaggacaagagcgacagacccgtgtgcagacacttcgccaagaagggccactgcagatacgaggacctgtgcgccttctaccaccccggcgtgaacggcccccccctgtag

SEQ ID NO: 94585 - DNA, 567 bp, synthetic construct
  misc_feature 1..567: note = Description of Artificial Sequence: Synthetic coding sequence
  source 1..567: mol_type = other DNA
atgcccaagagaaagaagcagaaccaccaccagccccccacccagcagcagccccccctgcccgagagagaggagaccggcgacgaggaggacggcagccccatcggcccccccagcctgctgggccccccccccatggccaacggcaagcccggcgaccccaagagcgccctgcacagaggcccccccggcagcagaggccccctgatcccccccctgctgagcctgcccccccccccctggggcagaggccccatcagaagaggcctgggccccagaagcagcccctacggcagaggctggtggggcgtgaacgccgagccccccttccccggccccggccacggcggccccaccagaggcagcttccacaaggagcagagaaaccccagaagactgaagagctggagcctgatcaagaacacctgcccccccaaggacgacccccaggtgatggaggacaagagcgacagacccgtgtgcagacacttcgccaagaagggccactgcagatacgaggacctgtgcgccttctaccaccccggcgtgaacggcccccccctgtag

SEQ ID NO: 94586 - DNA, 567 bp, synthetic construct; identical to SEQ ID NO: 94585
  misc_feature 1..567: note = Description of Artificial Sequence: Synthetic coding sequence
  source 1..567: mol_type = other DNA

SEQ ID NO: 94587 - DNA, 504 bp, synthetic construct; identical to SEQ ID NO: 94584
  misc_feature 1..504: note = Description of Artificial Sequence: Synthetic coding sequence
  source 1..504: mol_type = other DNA

SEQ ID NO: 94588 - DNA, 504 bp, synthetic construct; identical to SEQ ID NO: 94584
  misc_feature 1..504: note = Description of Artificial Sequence: Synthetic coding sequence
  source 1..504: mol_type = other DNA

SEQ ID NO: 94589 - DNA, 504 bp, synthetic construct; identical to SEQ ID NO: 94584
  misc_feature 1..504: note = Description of Artificial Sequence: Synthetic coding sequence
  source 1..504: mol_type = other DNA

SEQ ID NO: 94590 - DNA, 567 bp, synthetic construct; identical to SEQ ID NO: 94585
  misc_feature 1..567: note = Description of Artificial Sequence: Synthetic coding sequence
  source 1..567: mol_type = other DNA

SEQ ID NO: 94591 - DNA, 567 bp, synthetic construct; identical to SEQ ID NO: 94585
  misc_feature 1..567: note = Description of Artificial Sequence: Synthetic coding sequence
  source 1..567: mol_type = other DNA

SEQ ID NO: 94592 - DNA, 504 bp, synthetic construct; identical to SEQ ID NO: 94584
  misc_feature 1..504: note = Description of Artificial Sequence: Synthetic coding sequence
  source 1..504: mol_type = other DNA

SEQ ID NO: 94593 - DNA, 504 bp, synthetic construct; identical to SEQ ID NO: 94584
  misc_feature 1..504: note = Description of Artificial Sequence: Synthetic coding sequence
  source 1..504: mol_type = other DNA

SEQ ID NO: 94594 - DNA, 504 bp, synthetic construct; identical to SEQ ID NO: 94584
  misc_feature 1..504: note = Description of Artificial Sequence: Synthetic coding sequence
  source 1..504: mol_type = other DNA

SEQ ID NO: 94595 - DNA, 567 bp, synthetic construct; identical to SEQ ID NO: 94585
  misc_feature 1..567: note = Description of Artificial Sequence: Synthetic coding sequence
  source 1..567: mol_type = other DNA

SEQ ID NO: 94596 - DNA, 567 bp, synthetic construct; identical to SEQ ID NO: 94585
  misc_feature 1..567: note = Description of Artificial Sequence: Synthetic coding sequence
  source 1..567: mol_type = other DNA

SEQ ID NO: 94597 - DNA, 567 bp, synthetic construct; identical to SEQ ID NO: 94585
  misc_feature 1..567: note = Description of Artificial Sequence: Synthetic coding sequence
  source 1..567: mol_type = other DNA

SEQ ID NO: 94598 - DNA, 762 bp, synthetic construct; identical to SEQ ID NO: 94583
  misc_feature 1..762: note = Description of Artificial Sequence: Synthetic coding sequence
  source 1..762: mol_type = other DNA

SEQ ID NO: 94599 - DNA, 762 bp, synthetic construct; identical to SEQ ID NO: 94583
  misc_feature 1..762: note = Description of Artificial Sequence: Synthetic coding sequence
  source 1..762: mol_type = other DNA

SEQ ID NO: 94600 - DNA, 762 bp, synthetic construct; identical to SEQ ID NO: 94583
  misc_feature 1..762: note = Description of Artificial Sequence: Synthetic coding sequence
  source 1..762: mol_type = other DNA

SEQ ID NO: 94601 - DNA, 762 bp, synthetic construct; identical to SEQ ID NO: 94583
  misc_feature 1..762: note = Description of Artificial Sequence: Synthetic coding sequence
  source 1..762: mol_type = other DNA

SEQ ID NO: 94602 - DNA, 762 bp, synthetic construct; identical to SEQ ID NO: 94583
  misc_feature 1..762: note = Description of Artificial Sequence: Synthetic coding sequence
  source 1..762: mol_type = other DNA

SEQ ID NO: 94603 - DNA, 762 bp, synthetic construct; identical to SEQ ID NO: 94583
  misc_feature 1..762: note = Description of Artificial Sequence: Synthetic coding sequence
  source 1..762: mol_type = other DNA

SEQ ID NO: 94604 - DNA, 1344 bp, synthetic construct
  misc_feature 1..1344: note = Description of Artificial Sequence: Synthetic coding sequence
  source 1..1344: mol_type = other DNA
atgagaagcgtgagctacgtgcagagagtggccctggagttcagcggcagcctgttcccccacgccatctgcctgggcgacgtggacaacgacaccctgaacgagctggtggtgggcgacaccagcggcaaggtgagcgtgtacaagaacgacgacagcagaccctggctgacctgcagctgccagggcatgctgacctgcgtgggcgtgggcgacgtgtgcaacaagggcaagaacctgctggtggccgtgagcgccgagggctggttccacctgttcgacctgacccccgccaaggtgctggacgccagcggccaccacgagaccctgatcggcgaggagcagagacccgtgttcaagcagcacatccccgccaacaccaaggtgatgctgatcagcgacatcgacggcgacggctgcagagagctggtggtgggctacaccgacagagtggtgagagccttcagatgggaggagctgggcgagggccccgagcacctgaccggccagctggtgagcctgaagaagtggatgctggagggccaggtggacagcctgagcgtgaccctgggccccctgggcctgcccgagctgatggtgagccagcccggctgcgcctacgccatcctgctgtgcacctggaagaaggacaccggcagcccccccgccagcgagggccccaccgacggcagcagagagacccccgccgccagagacgtggtgctgcaccagaccagcggcagaatccacaacaagaacgtgagcacccacctgatcggcaacatcaagcagggccacggcaccgagagcagcggcagcggcctgttcgccctgtgcaccctggacggcaccctgaagctgatggaggagatggaggaggccgacaagctgctgtggagcgtgcaggtggaccaccagctgttcgccctggagaagctggacgtgaccggcaacggccacgaggaggtggtggcctgcgcctgggacggccagacctacatcatcgaccacaacagaaccgtggtgagattccaggtggacgagaacatcagagccttctgcgccggcctgtacgcctgcaaggagggcagaaacagcccctgcctggtgtacgtgaccttcaaccagaagatctacgtgtactgggaggtgcagctggagagaatggagagcaccaacctggtgaagctgctggagaccaagcccgagtaccacagcctgctgcaggagctgggcgtggaccccgacgacctgcccgtgaccagagccctgctgcaccagaccctgtaccaccccgaccagcccccccagtgcgcccccagcagcctgcaggaccccacctag

SEQ ID NO: 94605 - DNA, 381 bp, synthetic construct
  misc_feature 1..381: note = Description of Artificial Sequence: Synthetic coding sequence
  source 1..381: mol_type = other DNA
atgctgctggtgctgctgagcgtggtgctgctggccctgagcagcgcccagagcaccgacaacgacgtgaactacgaggacttcaccttcaccatccccgacgtggaggacagctacctggaccccctggtgatcgtggtgaccaagatgatggtgctgagcagagaccaccagaaccaggaggccatcaccgccatcctgccccacctgctgttcaagatcagcaacgaccaccccgacgaggacaccgtgaacagcctgtaccccgacttcctgctgagcgcctgcagaaagcaccaccacagcagcagaggcaccgaccagcaggacatccccagaagcaaccacagcggcaacctggagttcagcggcagaaagtag

SEQ ID NO: 94606 - DNA, 198 bp, synthetic construct
  misc_feature 1..198: note = Description of Artificial Sequence: Synthetic coding sequence
  source 1..198: mol_type = other DNA
atgctgctggtgctgctgagcgtggtgctgctggccctgagcagcgcccagagcaccgacaacgacgtgaactacgaggacttcaccttcaccatccccgcctgcagaaagcaccaccacagcagcagaggcaccgaccagcaggacatccccagaagcaaccacagcggcaacctggagttcagcggcagaaagtag

SEQ ID NO: 94607 - DNA, 696 bp, synthetic construct
  misc_feature 1..696: note = Description of Artificial Sequence: Synthetic coding sequence
  source 1..696: mol_type = other DNA
atggccgtgttcctggaggccaaggacgcccacagcgtgctgaagagattccccagagccaacgagttcctggaggagctgagacagggcaccatcgagagagagtgcatggaggagatctgcagctacgaggaggtgaaggaggtgttcgagaacaaggagaagaccatggagttctggaagggctaccccaacgccgtgtacagcgtgagagaccccagccagagcagcgacgccatgtacgtggtggtgcccctgctgggcgtggccctgctgatcgtgatcgccctgttcatcatctggagatgccagctgcagaaggccaccagacaccaccccagctacgcccagaacagatacctggccagcagagccggccacaccctgcccagagtgatggtgtacagaggcaccgtgcacagccagggcgagcccagcggccacagagaggccgccaacagcccccaggtggtgctgggccccagcagaggcggcagaaccaccgtgagactggagagcaccctgtacctgcccgagctgagcctgagcagactgagcagcaccacccccccccccagctacgaggaggtgaccgccccccaggagagcagcagcgaggaggccagcgtgagctacagcgaccccccccccaagtacgaggagatcgtggccgccaaccccggcgccgacaagtag

SEQ ID NO: 94608 - DNA, 309 bp, synthetic construct
  misc_feature 1..309: note = Description of Artificial Sequence: Synthetic coding sequence
  source 1..309: mol_type = other DNA
atggccggcctgagcagagccctgagcagcgtgttcctggaggccaaggacgcccacagcgtgctgaagagattccccagagccaacgagttcctggaggagctgagacagggcaccatcgagagagagtgcatggaggagatctgcagctacgaggaggtgaaggaggtgttcgagaacaaggagaagaccgcctgcaccaccctgggcctggtgctgggcgtgggcgtggccagcggcatcgccagaaccggccccggcaacgccgaccagagcgaggccagaaaggacacccagcccaaggcctag

SEQ ID NO: 94609 - DNA, 276 bp, synthetic construct
  misc_feature 1..276: note = Description of Artificial Sequence: Synthetic coding sequence
  source 1..276: mol_type = other DNA
gaccccagccagagcagcgacgccatgtacgtggtggtgcccctgctgggcgtggccctgctgatcgtgatcgccctgttcatcatctggagatgccagctgcagaaggccaccagacaccaccccagctacgcccagaacagaagatgcttcgccgtgagactggccgcccccagcttcgccagcaagtacagcaacgtgggcgccttccccttcagactgtgggccgccagcctgagcctggccagaatctacctgaccaacatccccaagtag

SEQ ID NO: 94610 - DNA, 159 bp, synthetic construct
  misc_feature 1..159: note = Description of Artificial Sequence: Synthetic coding sequence
  source 1..159: mol_type = other DNA
atggccgtgttcctggaggccaaggacgcccacagcgtgctgaagagattccccagagccaacgagttcctggaggagctgagacagggcaccatcgagagagagtgcatggaggagatctgcagctacgaggaggtgaaggaggtgttcgagaactag

SEQ ID NO: 94611 - DNA, 696 bp, synthetic construct; identical to SEQ ID NO: 94607
  misc_feature 1..696: note = Description of Artificial Sequence: Synthetic coding sequence
  source 1..696: mol_type = other DNA

SEQ ID NO: 94612 - DNA, 681 bp, synthetic construct
  misc_feature 1..681: note = Description of Artificial Sequence: Synthetic coding sequence
  source 1..681: mol_type = other DNA
atgttcaccctgctggtgctgctgagccagctgcccaccgtgaccctgggcttcccccactgcgccagaggccccaaggccagcaagcacgccggcgaggaggtgttcaccagcaaggaggaggccaacttcttcatccacagaagactgctgtacaacagattcgacctggagctgttcacccccggcaacctggagagagagtgcaacgaggagctgtgcaactacgaggaggccagagagatcttcgtggacgaggacaagaccatcgccttctggcaggagtacagcgccaagggccccaccaccaagagcgacggcaacagagagaagatcgacgtgatgggcctgctgaccggcctgatcgccgccggcgtgttcctggtgatcttcggcctgctgggctactacctgtgcatcaccaagtgcaacagactgcagcacccctgcagcagcgccgtgtacgagagaggcagacacacccccagcatcatcttcagaagacccgaggaggccgccctgagccccctgccccccagcgtggaggacgccggcctgcccagctacgagcaggccgtggccctgaccagaaagcacagcgtgagccccccccccccctaccccggccacaccaagggcttcagagtgttcaagaagagcatgagcctgcccagccactag

SEQ ID NO: 94613 - DNA, 375 bp, synthetic construct
  misc_feature 1..375: note = Description of Artificial Sequence: Synthetic coding sequence
  source 1..375: mol_type = other DNA
atgctgctgagagacctggtgctgagaagaggctgctgctggagcagcctgctgctgcactgcgccctgcaccccctgtggggcttcgtgcaggtgacccacggcgagccccagaagagctgcagcaaggtgaccgacagctgcagacacgtgtgccagtgcagaccccccccccccctgccccccccccccccccccccccccccccccagactgctgagcgcccccgcccccaacagcaccagctgccccaccgaggagagctggtggagcggcctggtgatcatcatcgccgtgtgctgcgccagcctggtgttcctgaccgtgctggtgatcatctgctacaaggccatcaagagaaaccacgccatctag

SEQ ID NO: 94614 - DNA, 462 bp, synthetic construct
  misc_feature 1..462: note = Description of Artificial Sequence: Synthetic coding sequence
  source 1..462: mol_type = other DNA
atgctgctgagagacctggtgctgagaagaggctgctgctggagcagcctgctgctgcactgcgccctgcaccccctgtggggcttcgtgcaggtgacccacggcgagccccagaagagctgcagcaaggtgaccgacagctgcagacacgtgtgccagtgcagaccccccccccccctgccccccccccccccccccccccccccccccagactgctgagcgcccccgcccccaacagcaccagctgccccaccgaggagagctggtggagcggcctggtgatcatcatcgccgtgtgctgcgccagcctggtgttcctgaccgtgctggtgatcatctgctacaaggccatcaagagaaagcccctgagaaaggacgagaacggcaccagcgtggccgagtaccccatgagcgccagccagagcaacaagggcgtggacgtgaacaacgccgtggtgtag

SEQ ID NO: 94615 - DNA, 462 bp, synthetic construct; identical to SEQ ID NO: 94614
  misc_feature 1..462: note = Description of Artificial Sequence: Synthetic coding sequence
  source 1..462: mol_type = other DNA

SEQ ID NO: 94616 - DNA, 828 bp, synthetic construct
  misc_feature 1..828: note = Description of Artificial Sequence: Synthetic coding sequence
  source 1..828: mol_type = other DNA
atgtggagagccggcagcatgagcgccgagctgggcgtgggctgcgccctgagagccgtgaacgagagagtgcagcaggccgtggccagaagacccagagacctgcccgccatccagcccagactggtggccgtgagcaagaccaagcccgccgacatggtgatcgaggcctacggccacggccagagaaccttcggcgagaactacgtgcaggagctgctggagaaggccagcaaccccaagatcctgagcctgtgccccgagatcaagtggcacttcatcggccacctgcagaagcagaacgtgaacaagctgatggccgtgcccaacctgttcatgctggagaccgtggacagcgtgaagctggccgacaaggtgaacagcagctggcagagaaagggcagccccgagagactgaaggtgatggtgcagatcaacaccagcggcgaggagagcaagcacggcctgccccccagcgagaccatcgccatcgtggagcacatcaacgccaagtgccccaacctggagttcgtgggcctgatgaccatcggcagcttcggccacgacctgagccagggccccaaccccgacttccagctgctgctgagcctgagagaggagctgtgcaagaagctgaacatccccgccgaccaggtggagctgagcatgggcatgagcgccgacttccagcacgccgtggaggtgggcagcaccaacgtgagaatcggcagcaccatcttcggcgagagagactacagcaagaagcccacccccgacaagtgcgccgccgacgtgaaggcccccctggaggtggcccaggagcactag

SEQ ID NO: 94617 - DNA, 1149 bp, synthetic construct
  misc_feature 1..1149: note = Description of Artificial Sequence: Synthetic coding sequence
  source 1..1149: mol_type = other DNA
atgagaagccccctgtgctggctgctgcccctgctgatcctggccagcgtggcccagggccagcccaccagaagacccagacccggcaccggccccggcagaagacccagacccagacccagacccacccccagcttcccccagcccgacgagcccgccgagcccaccgacctgcccccccccctgccccccggcccccccagcatcttccccgactgccccagagagtgctactgcccccccgacttccccagcgccctgtactgcgacagcagaaacctgagaaaggtgcccgtgatcccccccagaatccactacctgtacctgcagaacaacttcatcaccgagctgcccgtggagagcttccagaacgccaccggcctgagatggatcaacctggacaacaacagaatcagaaagatcgaccagagagtgctggagaagctgcccggcctggtgttcctgtacatggagaagaaccagctggaggaggtgcccagcgccctgcccagaaacctggagcagctgagactgagccagaaccacatcagcagaatcccccccggcgtgttcagcaagctggagaacctgctgctgctggacctgcagcacaacagactgagcgacggcgtgttcaagcccgacaccttccacggcctgaagaacctgatgcagctgaacctggcccacaacatcctgagaaagatgccccccagagtgcccaccgccatccaccagctgtacctggacagcaacaagatcgagaccatccccaacggctacttcaagagcttccccaacctggccttcatcagactgaactacaacaagctgaccgacagaggcctgcccaagaacagcttcaacatcagcaacctgctggtgctgcacctgagccacaacagaatcagcagcgtgcccgccatcaacaacagactggagcacctgtacctgaacaacaacagcatcgagaagatcaacggcacccagatctgccccaacgacctggtggccttccacgacttcagcagcgacctggagaacgtgccccacctgagatacctgagactggacggcaactacctgaagccccccatccccctggacctgatgatgtgcttcagactgctgcagagcgtggtgatctag

SEQ ID NO: 94618 - DNA, 1002 bp, synthetic construct
  misc_feature 1..1002: note = Description of Artificial Sequence: Synthetic coding sequence
  source 1..1002: mol_type = other DNA
atggaggacctggaggaggacgtgagattcatcgtggacgagaccctggacttcggcggcctgagccccagcgacagcagagaggaggaggacatcaccgtgctggtgacccccgagaagcccctgagaagaggcctgagccacagaagcgaccccaacgccgtggcccccgccccccagggcgtgagactgagcctgggccccctgagccccgagaagctggaggagatcctggacgaggccaacagactggccgcccagctggagcagtgcgccctgcaggacagagagagcgccggcgagggcctgggccccagaagagtgaagcccagccccagaagagagaccttcgtgctgaaggacagccccgtgagagacctgctgcccaccgtgaacagcctgaccagaagcacccccagccccagcagcctgacccccagactgagaagcaacgacagaaagggcagcgtgagagccctgagagccaccagcggcaagagacccagcaacatgaagagagagagccccacctgcaacctgttccccgccagcaagagccccgccagcagccccctgaccagaagcaccccccccgtgagaggcagagccggccccagcggcagagccgccgccagcccccccacccccatcagaagcgtgctggccccccagcccagcaccagcaacagccagagactgcccagaccccagggcgccgccgccaagagcagcagccagctgcccatccccagcgccatccccagacccgccagcagaatgcccctgaccagcagaagcgtgccccccggcagaggcgccctgccccccgacagcctgagcaccagaaagggcctgcccagacccagcaccgccggccacagagtgagagagagcggccacaaggtgcccgtgagccagagactgaacctgcccgtgatgggcgccaccagaagcaacctgcagccccccagaaaggtggccgtgcccggccccaccagatag

SEQ ID NO: 94619 - DNA, 933 bp, synthetic construct
  misc_feature 1..933: note = Description of Artificial Sequence: Synthetic coding sequence
  source 1..933: mol_type = other DNA
atggaggacctggaggaggacgtgagattcatcgtggacgagaccctggacttcggcggcctgagccccagcgacagcagagaggaggaggacatcaccgtgctggtgacccccgagaagcccctgagaagaggcctgagccacagaagcgaccccaacgccgtggcccccgccccccagggcgtgagactgagcctgggccccctgagccccgagaagctggaggagatcctggacgaggccaacagactggccgcccagctggagcagtgcgccctgcaggacagagagagcgccggcgagggcctgggccccagaagagtgaagcccagccccagaagagagaccttcgtgctgaaggacagccccgtgagagacctgctgcccaccgtgaacagcctgaccagaagcacccccagccccagcagcctgacccccagactgagaagcaacgacagaaagggcagcgtgagagccctgagagccaccagcggcaagagacccagcaacatgaagagagagagccccacctgcaacctgttccccgccagcaagagccccgccagcagccccctgaccagaagcaccccccccgtgagaggcagagccggccccagcggcagagccgccgccagcgaggagaccagagccgccaagctgagagcctgccagcccaacgccacccaccagcccgagtgcgccacctggcagagatgccccaccagcggcttcagcgtgaacagcaagagagccagcaagaccaagcactgcagaacccagagcgccggcaagtggacccagggcagctgcttccccgccaccaagagcagctgccacggctgccacagccagcagagcgccgccccccaggagagcggcagccccagaacctaccaggtgaagagaagcggccagcaggccagactgcagtag

SEQ ID NO: 94620 - DNA, 1002 bp, synthetic construct; identical to SEQ ID NO: 94618
  misc_feature 1..1002: note = Description of Artificial Sequence: Synthetic coding sequence
  source 1..1002: mol_type = other DNA

SEQ ID NO: 94621 - DNA, 1002 bp, synthetic construct; identical to SEQ ID NO: 94618
  misc_feature 1..1002: note = Description of Artificial Sequence: Synthetic coding sequence
  source 1..1002: mol_type = other DNA

SEQ ID NO: 94622 - DNA, 1002 bp, synthetic construct; identical to SEQ ID NO: 94618
  misc_feature 1..1002: note = Description of Artificial Sequence: Synthetic coding sequence
  source 1..1002: mol_type = other DNA

SEQ ID NO: 94623 - DNA, 666 bp, synthetic construct
  misc_feature 1..666: note = Description of Artificial Sequence: Synthetic coding sequence
  source 1..666: mol_type = other DNA
atggaggacctggaggaggacgtgagattcatcgtggacgagaccctggacttcggcggcctgagccccagcgacagcagagaggaggaggacatcaccgtgctggtgacccccgagaagcccctgagaagaggcctgagccacagaagcgaccccaacgccgtggcccccgccccccagggcgtgagactgagcctgggccccctgagccccgagaagctggaggagatcctggacgaggccaacagactggccgcccagctggagcagtgcgccctgcaggacagagagagcgccggcgagggcctgggccccagaagagtgaagcccagccccagaagagagaccttcgtgctgaaggacagccccgtgagagacctgctgcccaccgtgaacagcctgaccagaagcacccccagccccagcagcctgacccccagactgagaagcaacgacagaaagggcagcgtgagagccctgagagccaccagcggcaagagacccagcaacatgaagagagagagccccacctgcaacctgttccccgccagcaagagccccgccagcagccccctgaccagaagcaccccccccgtgagaggcagagccggccccagcggcagagccgccgccagcgaggagaccagagccgccaagctgagatag

SEQ ID NO: 94624 - DNA, 699 bp, synthetic construct
  misc_feature 1..699: note = Description of Artificial Sequence: Synthetic coding sequence
  source 1..699: mol_type = other DNA
atggaggacctggaggaggacgtgagattcatcgtggacgagaccctggacttcggcggcctgagccccagcgacagcagagaggaggaggacatcaccgtgctggtgacccccgagaagcccctgagaagaggcctgagccacagaagcgaccccaacgccgtggcccccgccccccagggcgtgagactgagcctgggccccctgagccccgagaagctggaggagatcctggacgaggccaacagactggccgcccagctggagcagtgcgccctgcaggacagagagagcgccggcgagggcctgggccccagaagagtgaagcccagccccagaagagagaccttcgtgctgaaggacagccccgtgagagacctgctgcccaccgtgaacagcctgaccagaagcacccccagccccagcagcctgacccccagactgagaagcaacgacagaaagggcagcgtgagagccctgagagccaccagcggcaagagacccagcaacatgaagagagagagccccacctgcaacctgttccccgccagcaagagccccgccagcagccccctgaccagaagcaccccccccgtgagaggcagagccggccccagcggcagagccgccgccagcccccccacccccatcagaagcgtgctggccccccagcccagcaccagcaacagccagagatag

SEQ ID NO: 94625 - DNA, 1092 bp, synthetic construct
  misc_feature 1..1092: note = Description of Artificial Sequence: Synthetic coding sequence
  source 1..1092: mol_type = other DNA
atggaggacctggaggaggacgtgagattcatcgtggacgagaccctggacttcggcggcctgagccccagcgacagcagagaggaggaggacatcaccgtgctggtgacccccgagaagcccctgagaagaggcctgagccacagaagcgaccccaacgccgtggcccccgccccccagggcgtgagactgagcctgggccccctgagccccgagaagctggaggagatcctggacgaggccaacagactggccgcccagctggagcagtgcgccctgcaggacagagagagcgccggcgagggcctgggccccagaagagtgaagcccagccccagaagagagaccttcgtgctgaaggacagccccgtgagagacctgctgcccaccgtgaacagcctgaccagaagcacccccagccccagcagcctgacccccagactgagaagcaacgacagaaagggcagcgtgagagccctgagagccaccagcggcaagagacccagcaacatgaagagagagagccccacctgcaacctgttccccgccagcaagagccccgccagcagccccctgaccagaagcaccccccccgtgagaggcagagccggccccagcggcagagccgccgccagcgaggagaccagagccgccaagctgagagtgagcggcagcggcgagttcgtgggcctgaccctgaagttcctgcaccccagcccccccggcccccccacccccatcagaagcgtgctggccccccagcccagcaccagcaacagccagagactgcccagaccccagggcgccgccgccaagagcagcagccagctgcccatccccagcgccatccccagacccgccagcagaatgcccctgaccagcagaagcgtgccccccggcagaggcgccctgccccccgacagcctgagcaccagaaagggcctgcccagacccagcaccgccggccacagagtgagagagagcggccacaaggtgcccgtgagccagagactgaacctgcccgtgatgggcgccaccagaagcaacctgcagccccccagaaaggtggccgtgcccggccccaccagatag

SEQ ID NO: 94626 - DNA, 273 bp, synthetic construct
  misc_feature 1..273: note = Description of Artificial Sequence: Synthetic coding sequence
  source 1..273: mol_type = other DNA
atgagaagactgctgctggtgaccagcctggtggtggtgctgctgtgggaggccggcgccgtgcccgcccccaaggtgcccatcaagatgcaggtgaagcactggcccagcgagcaggaccccgagaaggcctggggcgccagagtggtggagccccccgagaaggacgaccagctggtggtgctgttccccgtgcagaagcccaagctgctgaccaccgaggagaagcccagaggcaccaaggcctggatggagagcagagccagaccctag

SEQ ID NO: 94627 - DNA, 459 bp, synthetic construct
  misc_feature 1..459: note = Description of Artificial Sequence: Synthetic coding sequence
  source 1..459: mol_type = other DNA
atgagaagactgctgctggtgaccagcctggtggtggtgctgctgtgggaggccggcgccgtgcccgcccccaaggtgcccatcaagatgcaggtgaagcactggcccagcgagcaggaccccgagaacagagcctggggcgccagagtggtggagccccccgagaaggacgaccagctggtggtgctgttccccgtgcagaagcccaagctgctgaccaccgaggagaagcccagaggccagggcagaggccccatcctgcccggcaccaaggcctggatggagaccgaggacaccctgggccacgtgctgagccccgagcccgaccacgacagcctgtaccaccccccccccgaggaggaccagggcgaggagagacccagactgtgggtgatgcccaaccaccaggtgctgctgggccccgaggaggaccaggaccacatctaccacccccagtag

SEQ ID NO: 94628 - DNA, 456 bp, synthetic construct
  misc_feature 1..456: note = Description of Artificial Sequence: Synthetic coding sequence
  source 1..456: mol_type = other DNA
atgagaagactgctgctggtgaccagcctggtggtggtgctgctgtgggaggccggcgccgtgcccgcccccaaggtgcccatcaagatgcaggtgaagcactggcccagcgagcaggaccccgagaaggcctggggcgccagagtggtggagccccccgagaaggacgaccagctggtggtgctgttccccgtgcagaagcccaagctgctgaccaccgaggagaagcccagaggccagggcagaggccccatcctgcccggcaccaaggcctggatggagaccgaggacaccctgggccacgtgctgagccccgagcccgaccacgacagcctgtaccaccccccccccgaggaggaccagggcgaggagagacccagactgtgggtgatgcccaaccaccaggtgctgctgggccccgaggaggaccaggaccacatctaccacccccagtag

SEQ ID NO: 94629 - DNA, 429 bp, synthetic construct
  misc_feature 1..429: note = Description of Artificial Sequence: Synthetic coding sequence
  source 1..429: mol_type = other DNA
atgagaagactgctgctggtgaccagcctggtggtggtgctgctgtgggaggccggcgccgtgcccgcccccaaggtgcccatcaagatgcaggtgaagcactggcccagcgagcaggaccccgagaaggcctggggcgccagagtggtggagccccccgagaaggacgaccagctggtggtgctgttccccgtgcagaagcccaagctgctgaccaccgaggagaagcccagaggcaccaaggcctggatggagaccgaggacaccctgggccacgtgctgagccccgagcccgaccacgacagcctgtaccaccccccccccgaggaggaccagggcgaggagagacccagactgtgggtgatgcccaaccaccaggtgctgctgggccccgaggaggaccaggaccacatctaccacccccagtag

SEQ ID NO: 94630 - DNA, 6474 bp, synthetic construct
  misc_feature 1..6474: note = Description of Artificial Sequence: Synthetic coding sequence
  source 1..6474: mol_type = other DNA
atgagcgacagaagcggccccaccgccaagggcaaggacggcaagaagtacagcagcctgaacctgttcgacacctacaagggcaagagcctggagatccagaagcccgccgtggcccccagacacggcctgcagagcctgggcaaggtggccatcgccagaagaatgcccccccccgccaacctgcccagcctgaaggccgagaacaagggcaacgaccccaacgtgagcctggtgcccaaggacggcaccggctgggccagcaagcaggagcagagcgaccccaagagcagcgacgccagcaccgcccagccccccgagagccagcccctgcccgccagccagacccccgccagcaaccagcccaagagaccccccgccgcccccgagaacacccccctggtgcccagcggcgtgaagagctgggcccaggccagcgtgacccacggcgcccacggcgacggcggcagagccagcagcctgctgagcagattcagcagagaggagttccccaccctgcaggccgccggcgaccaggacaaggccgccaaggagagagagagcgccgagcagagcagcggccccggccccagcctgagaccccagaacagcaccacctggagagacggcggcggcagaggccccgacgagctggagggccccgacagcaagctgcaccacggccacgaccccagaggcggcctgcagcccagcggccccccccagttccccccctacagaggcatgatgccccccttcatgtaccccccctacctgcccttcccccccccctacggcccccagggcccctacagataccccacccccgacggccccagcagattccccagagtggccggccccagaggcagcggcccccccatgagactggtggagcccgtgggcagacccagcatcctgaaggaggacaacctgaaggagttcgaccagctggaccaggagaacgacgacggctgggccggcgcccacgaggaggtggactacaccgagaagctgaagttcagcgacgaggaggacggcagagacagcgacgaggagggcgccgagggccacagagacagccagagcgccagcggcgaggagagaccccccgaggccgacggcaagaagggcaacagccccaacagcgagccccccacccccaagaccgcctgggccgagaccagcagaccccccgagaccgagcccggcccccccgcccccaagccccccctgccccccccccacagaggccccgccggcaactggggcccccccggcgactaccccgacagaggcggccccccctgcaagccccccgcccccgaggacgaggacgaggcctggagacagagaagaaagcagagcagcagcgagatcagcctggccgtggagagagccagaagaagaagagaggaggaggagagaagaatgcaggaggagagaagagccgcctgcgccgagaagctgaagagactggacgagaagttcggcgcccccgacaagagactgaaggccgagcccgccgccccccccgccgcccccagcacccccgcccccccccccgccgtgcccaaggagctgcccgccccccccgcccccccccccgccagcgcccccacccccgagaccgagcccgaggagcccgcccaggccccccccgcccagagcacccccacccccggcgtggccgccgcccccaccctggtgagcggcggcggcagcaccagcagcaccagcagcggcagcttcgaggccagccccgtggagccccagctgcccagcaaggagggccccgagccccccgaggaggtgcccccccccaccaccccccccgtgcccaaggtggagcccaagggcgacggcatcggccccaccagacagccccccagccagggcctgggctaccccaagtaccagaagagcctgccccccagattccagagacagcagcaggagcagctgctgaagcagcagcagcagcaccagtggcagcagcaccagcagggcagcgccccccccacccccgtgccccccagccccccccagcccgtgaccctgggcgccgtgcccgccccccaggcccccccccccccccccaaggccctgtaccccggcgccctgggcagacccccccccatgccccccatgaacttcgaccccagatggatgatgatccccccctacgtggaccccagactgctgcagggcagaccccccctggacttctacccccccggcgtgcaccccagcggcctggtgcccagagagagaagcgacagcggcggcagcagcagcgagcccttcgacagacacgcccccgccatgctgagagagagaggcaccccccccgtggaccccaagctggcctgggtgggcgacgtgttcaccgccacccccgccgagcccagacccctgaccagccccctgagacaggccgccgacgaggacgacaagggcatgagaagcgagaccccccccgtgccccccccccccccctacctggccagctaccccggcttccccgagaacggcgcccccggcccccccatcagcagattccccctggaggagcccggccccagacccctgccctggccccccggcagcgacgaggtggccaagatccagacccccccccccaagaaggagccccccaaggaggagaccgcccagctgaccggccccgaggccggcagaaagcccgccagaggcgtgggcagcggcggccagggcccccccccccccagaagagagagcagaaccgagaccagatggggccccagacccggcagcagcagaagaggcatcccccccgaggagcccggcgccccccccagaagagccggccccatcaagaagccccccccccccaccaaggtggaggagctgccccccaagcccctggagcagggcgacgagacccccaagccccccaagcccgaccccctgaagatcaccaagggcaagctgggcggccccaaggagaccccccccaacggcaacctgagccccgcccccagactgagaagagactacagctacgagagagtgggccccaccagctgcagaggcagaggcagaggcgagtacttcgccagaggcagaggcttcagaggcacctacggcggcagaggcagaggcgccagaagcagagagttcagaagctacagagagttcagaggcgacgacggcagaggcggcggcaccggcggccccaaccacccccccgcccccagaggcagaaccgccagcgagaccagaagcgagggcagcgagtacgaggagatccccaagagaagaagacagagaggcagcgagaccggcagcgagacccacgagagcgacctggcccccagcgacaaggaggcccccacccccaaggagggcaccctgacccaggtgcccctggccccccccccccccggcgccccccccagccccgcccccgccagattcaccgccagaggcggcagagtgttcacccccagaggcgtgcccagcagaagaggcagaggcggcggcagaccccccccccaggtgtgccccggctggagcccccccgccaagagcctggcccccaagaagccccccaccggccccctgccccccagcaaggagcccctgaaggagaagctgatccccggccccctgagccccgtggccagaggcggcagcaacggcggcagcaacgtgggcatggaggacggcgagagacccagaagaagaagacacggcagagcccagcagcaggacaagccccccagattcagaagactgaagcaggagagagagaacgccgccagaggcagcgagggcaagcccagcctgaccctgcccgccagcgcccccggccccgaggaggccctgaccaccgtgaccgtggcccccgcccccagaagagccgccgccaagagccccgacctgagcaaccagaacagcgaccaggccaacgaggagtgggagaccgccagcgagagcagcgacttcaccagcgagagaagaggcgacaaggaggcccccccccccgtgctgctgacccccaaggccgtgggcacccccggcggcggcggcggcggcgccgtgcccggcatcagcgccatgagcagaggcgacctgagccagagagccaaggacctgagcaagagaagcttcagcagccagagacccggcatggagagacagaacagaagacccggccccggcggcaaggccggcagcagcggcagcagcagcggcggcggcggcggcggccccggcggcagaaccggccccggcagaggcgacaagagaagctggcccagccccaagaacagaagcagaccccccgaggagagaccccccggcctgcccctgcccccccccccccccagcagcagcgccgtgttcagactggaccaggtgatccacagcaaccccgccggcatccagcaggccctggcccagctgagcagcagacagggcagcgtgaccgcccccggcggccaccccagacacaagcccggcctgccccaggccccccagggccccagccccagaccccccaccagatacgagccccagagagtgaacagcggcctgagcagcgacccccacttcgaggagcccggccccatggtgagaggcgtgggcggcacccccagagacagcgccggcgtgagccccttcccccccaagagaagagagagaccccccagaaagcccgagctgctgcaggaggagagcctgccccccccccacagcagcggcttcctgggcagcaagcccgagggccccggcccccaggccgagagcagagacaccggcaccgaggccctgaccccccacatctggaacagactgcacaccgccaccagcagaaagagctacagacccagcagcatggagccctggatggagcccctgagccccttcgaggacgtggccggcaccgagatgagccagagcgacagcggcgtggacctgagcggcgacagccaggtgagcagcggcccctgcagccagagaagcagccccgacggcggcctgaagggcgccgccgagggcccccccaagagacccggcggcagcagccccctgaacgccgtgccctgcgagggcccccccggcagcgagccccccagaagacccccccccgccccccacgacggcgacagaaaggagctgcccagagagcagcccctgccccccggccccatcggcaccgagagaagccagagaaccgacagaggcaccgagcccggccccatcagacccagccacagacccggcccccccgtgcagttcggcaccagcgacaaggacagcgacctgagactggtggtgggcgacagcctgaaggccgagaaggagctgaccgccagcgtgaccgaggccatccccgtgagcagagactgggagctgctgcccagcgccgccgccagcgccgagccccagagcaagaacctggacagcggccactgcgtgcccgagcccagcagcagcggccagagactgtaccccgaggtgttctacggcagcgccggccccagcagcagccagatcagcggcggcgccatggacagccagctgcaccccaacagcggcggcttcagacccggcacccccagcctgcacccctacagaagccagcccctgtacctgccccccggccccgccccccccagcgccctgctgagcggcctggccctgaagggccagttcctggacttcagcaccatgcaggccaccgagctgggcaagctgcccgccggcggcgtgctgtaccccccccccagcttcctgtacagccccgccttctgccccagccccctgcccgacaccagcctgctgcaggtgagacaggacctgcccagccccagcgacttctacagcacccccctgcagcccggcggccagagcggcttcctgcccagcggcgcccccgcccagcagatgctgctgcccatggtggacagccagctgcccgtggtgaacttcggcagcctgccccccgcccccccccccgcccccccccccctgagcctgctgcccgtgggccccgccctgcagccccccagcctggccgtgagacccccccccgcccccgccaccagagtgctgcccagccccgccagacccttccccgccagcctgggcagagccgagctgcaccccgtggagctgaagcccttccaggactaccagaagctgagcagcaacctgggcggccccggcagcagcagaaccccccccaccggcagaagcttcagcggcctgaacagcagactgaaggccacccccagcacctacagcggcgtgttcagaacccagagagtggacctgtaccagcaggccagcccccccgacgccctgagatggatccccaagccctgggagagaaccggccccccccccagagagggccccagcagaagagccgaggagcccggcagcagaggcgacaaggagcccggcctgcccccccccagatag

SEQ ID NO: 94631 - DNA, 4149 bp, synthetic construct
  misc_feature 1..4149: note = Description of Artificial Sequence: Synthetic coding sequence
  source 1..4149: mol_type = other DNA
atgctgagagagagaggcaccccccccgtggaccccaagctggcctgggtgggcgacgtgttcaccgccacccccgccgagcccagacccctgaccagccccctgagacaggccgccgacgaggacgacaagggcatgagaagcgagaccccccccgtgccccccccccccccctacctggccagctaccccggcttccccgagaacggcgcccccggcccccccatcagcagattccccctggaggagcccggccccagacccctgccctggccccccggcagcgacgaggtggccaagatccagacccccccccccaagaaggagccccccaaggaggagaccgcccagctgaccggccccgaggccggcagaaagcccgccagaggcgtgggcagcggcggccagggcccccccccccccagaagagagagcagaaccgagaccagatggggccccagacccggcagcagcagaagaggcatcccccccgaggagcccggcgccccccccagaagagccggccccatcaagaagccccccccccccaccaaggtggaggagctgccccccaagcccctggagcagggcgacgagacccccaagccccccaagcccgaccccctgaagatcaccaagggcaagctgggcggccccaaggagaccccccccaacggcaacctgagccccgcccccagactgagaagagactacagctacgagagagtgggccccaccagctgcagaggcagaggcagaggcgagtacttcgccagaggcagaggcttcagaggcacctacggcggcagaggcagaggcgccagaagcagagagttcagaagctacagagagttcagaggcgacgacggcagaggcggcggcaccggcggccccaaccacccccccgcccccagaggcagaaccgccagcgagaccagaagcgagggcagcgagtacgaggagatccccaagagaagaagacagagaggcagcgagaccggcagcgagacccacgagagcgacctggcccccagcgacaaggaggcccccacccccaaggagggcaccctgacccaggtgcccctggccccccccccccccggcgccccccccagccccgcccccgccagattcaccgccagaggcggcagagtgttcacccccagaggcgtgcccagcagaagaggcagaggcggcggcagaccccccccccaggtgtgccccggctggagcccccccgccaagagcctggcccccaagaagccccccaccggccccctgccccccagcaaggagcccctgaaggagaagctgatccccggccccctgagccccgtggccagaggcggcagcaacggcggcagcaacgtgggcatggaggacggcgagagacccagaagaagaagacacggcagagcccagcagcaggacaagccccccagattcagaagactgaagcaggagagagagaacgccgccagaggcagcgagggcaagcccagcctgaccctgcccgccagcgcccccggccccgaggaggccctgaccaccgtgaccgtggcccccgcccccagaagagccgccgccaagagccccgacctgagcaaccagaacagcgaccaggccaacgaggagtgggagaccgccagcgagagcagcgacttcaccagcgagagaagaggcgacaaggaggcccccccccccgtgctgctgacccccaaggccgtgggcacccccggcggcggcggcggcggcgccgtgcccggcatcagcgccatgagcagaggcgacctgagccagagagccaaggacctgagcaagagaagcttcagcagccagagacccggcatggagagacagaacagaagacccggccccggcggcaaggccggcagcagcggcagcagcagcggcggcggcggcggcggccccggcggcagaaccggccccggcagaggcgacaagagaagctggcccagccccaagaacagaagcagaccccccgaggagagaccccccggcctgcccctgcccccccccccccccagcagcagcgccgtgttcagactggaccaggtgatccacagcaaccccgccggcatccagcaggccctggcccagctgagcagcagacagggcagcgtgaccgcccccggcggccaccccagacacaagcccggcctgccccaggccccccagggccccagccccagaccccccaccagatacgagccccagagagtgaacagcggcctgagcagcgacccccacttcgaggagcccggccccatggtgagaggcgtgggcggcacccccagagacagcgccggcgtgagccccttcccccccaagagaagagagagaccccccagaaagcccgagctgctgcaggaggagagcctgccccccccccacagcagcggcttcctgggcagcaagcccgagggccccggcccccaggccgagagcagagacaccggcaccgaggccctgaccccccacatctggaacagactgcacaccgccaccagcagaaagagctacagacccagcagcatggagccctggatggagcccctgagccccttcgaggacgtggccggcaccgagatgagccagagcgacagcggcgtggacctgagcggcgacagccaggtgagcagcggcccctgcagccagagaagcagccccgacggcggcctgaagggcgccgccgagggcccccccaagagacccggcggcagcagccccctgaacgccgtgccctgcgagggcccccccggcagcgagccccccagaagacccccccccgccccccacgacggcgacagaaaggagctgcccagagagcagcccctgccccccggccccatcggcaccgagagaagccagagaaccgacagaggcaccgagcccggccccatcagacccagccacagacccggcccccccgtgcagttcggcaccagcgacaaggacagcgacctgagactggtggtgggcgacagcctgaaggccgagaaggagctgaccgccagcgtgaccgaggccatccccgtgagcagagactgggagctgctgcccagcgccgccgccagcgccgagccccagagcaagaacctggacagcggccactgcgtgcccgagcccagcagcagcggccagagactgtaccccgaggtgttctacggcagcgccggccccagcagcagccagatcagcggcggcgccatggacagccagctgcaccccaacagcggcggcttcagacccggcacccccagcctgcacccctacagaagccagcccctgtacctgccccccggccccgccccccccagcgccctgctgagcggcctggccctgaagggccagttcctggacttcagcaccatgcaggccaccgagctgggcaagctgcccgccggcggcgtgctgtaccccccccccagcttcctgtacagccccgccttctgccccagccccctgcccgacaccagcctgctgcaggtgagacaggacctgcccagccccagcgacttctacagcacccccctgcagcccggcggccagagcggcttcctgcccagcggcgcccccgcccagcagatgctgctgcccatggtggacagccagctgcccgtggtgaacttcggcagcctgccccccgcccccccccccgcccccccccccctgagcctgctgcccgtgggccccgccctgcagccccccagcctggccgtgagacccccccccgcccccgccaccagagtgctgcccagccccgccagacccttccccgccagcctgggcagagccgagctgcaccccgtggagctgaagcccttccaggactaccagaagctgagcagcaacctgggcggccccggcagcagcagaaccccccccaccggcagaagcttcagcggcctgaacagcagactgaaggccacccccagcacctacagcggcgtgttcagaacccagagagtggacctgtaccagcaggccagcccccccgacgccctgagatggatccccaagccctgggagagaaccggccccccccccagagagggccccagcagaagagccgaggagcccggcagcagaggcgacaaggagcccggcctgcccccccccagatag

SEQ ID NO: 94632 - DNA, 6474 bp, synthetic construct; identical to SEQ ID NO: 94630
  misc_feature 1..6474: note = Description of Artificial Sequence: Synthetic coding sequence
  source 1..6474: mol_type = other DNA

SEQ ID NO: 94633 - DNA, 6474 bp, synthetic construct
  misc_feature 1..6474: note = Description of Artificial Sequence: Synthetic coding sequence
  source 1..6474: mol_type = other DNA
atgagcgacagaagcggccccaccgccaagggcaaggacggcaagaagtacagcagcctgaacctgttcgacacctacaagggcaagagcctggagatccagaagcccgccgtggcccccagacacggcctgcagagcctgggcaaggtggccatcgccagaagaatgcccccccccgccaacctgcccagcctgaaggccgagaacaagggcaacgaccccaacgtgagcctggtgcccaaggacggcaccggctgggccagcaagcaggagcagagcgaccccaagagcagcgacgccagcaccgcccagccccccgagagccagcccctgcccgccagccagacccccgccagcaaccagcccaagagaccccccgccgcccccgagaacacccccctggtgcccagcggcgtgaagagctgggcccaggccagcgtgacccacggcgcccacggcgacggcggcagagccagcagcctgctgagcagattcagcagagaggagttccccaccctgcaggccgccggcgaccaggacaaggccgccaaggagagagagagcgccgagcagagcagcggccccggccccagcctgagaccccagaacagcaccacctggagagacggcggcggcagaggccccgacgagctggagggccccgacagcaagctgcaccacggccacgaccccagaggcggcctgcagcccagcggccccccccagttccccccctacagaggcatgatgccccccttcatgtaccccccctacctgcccttcccccccccctacggcccccagggcccctacagataccccacccccgacggccccagcagattccccagagtggccggccccagaggcagcggcccccccatgagactggtggagcccgtgggcagacccagcatcctgaaggaggacaacctgaaggagttcgaccagctggaccaggagaacgacgacggctgggccggcgcccacgaggaggtggactacaccgagaagctgaagttcagcgacgaggaggacggcagagacagcgacgaggagggcgccgagggccacagagacagccagagcgccagcggcgaggagagaccccccgaggccgacggcaagaagggcaacagccccaacagcgagccccccacccccaagaccgcctgggccgagaccagcagaccccccgagaccgagcccggcccccccgcccccaagccccccctgccccccccccacagaggccccgccggcaactggggcccccccggcgactaccccgacagaggcggccccccctgcaagccccccgcccccgaggacgaggacgaggcctggagacagagaagaaagcagagcagcagcgagatcagcctggccgtggagagagccagaagaagaagagaggaggaggagagaagaatgcaggaggagagaagagccgcctgcgccgagaagctgaagagactggacgagaagttcggcgcccccgacaagagactgaaggccgagcccgccgccccccccgccgcccccagcacccccgcccccccccccgccgtgcccaaggagctgcccgccccccccgcccccccccccgccagcgcccccacccccgagaaggagcccgaggagcccgcccaggccccccccgcccagagcacccccacccccggcgtggccgccgcccccaccctggtgagcggcggcggcagcaccagcagcaccagcagcggcagcttcgaggccagccccgtggagccccagctgcccagcaaggagggccccgagccccccgaggaggtgcccccccccaccaccccccccgtgcccaaggtggagcccaagggcgacggcatcggccccaccagacagccccccagccagggcctgggctaccccaagtaccagaagagcctgccccccagattccagagacagcagcaggagcagctgctgaagcagcagcagcagcaccagtggcagcagcaccagcagggcagcgccccccccacccccgtgccccccagccccccccagcccgtgaccctgggcgccgtgcccgccccccaggcccccccccccccccccaaggccctgtaccccggcgccctgggcagacccccccccatgccccccatgaacttcgaccccagatggatgatgatccccccctacgtggaccccagactgctgcagggcagaccccccctggacttctacccccccggcgtgcaccccagcggcctggtgcccagagagagaagcgacagcggcggcagcagcagcgagcccttcgacagacacgcccccgccatgctgagagagagaggcaccccccccgtggaccccaagctggcctgggtgggcgacgtgttcaccgccacccccgccgagcccagacccctgaccagccccctgagacaggccgccgacgaggacgacaagggcatgagaagcgagaccccccccgtgccccccccccccccctacctggccagctaccccggcttccccgagaacggcgcccccggcccccccatcagcagattccccctggaggagcccggccccagacccctgccctggccccccggcagcgacgaggtggccaagatccagacccccccccccaagaaggagccccccaaggaggagaccgcccagctgaccggccccgaggccggcagaaagcccgccagaggcgtgggcagcggcggccagggcccccccccccccagaagagagagcagaaccgagaccagatggggccccagacccggcagcagcagaagaggcatcccccccgaggagcccggcgccccccccagaagagccggccccatcaagaagccccccccccccaccaaggtggaggagctgccccccaagcccctggagcagggcgacgagacccccaagccccccaagcccgaccccctgaagatcaccaagggcaagctgggcggccccaaggagaccccccccaacggcaacctgagccccgcccccagactgagaagagactacagctacgagagagtgggccccaccagctgcagaggcagaggcagaggcgagtacttcgccagaggcagaggcttcagaggcacctacggcggcagaggcagaggcgccagaagcagagagttcagaagctacagagagttcagaggcgacgacggcagaggcggcggcaccggcggccccaaccacccccccgcccccagaggcagaaccgccagcgagaccagaagcgagggcagcgagtacgaggagatccccaagagaagaagacagagaggcagcgagaccggcagcgagacccacgagagcgacctggcccccagcgacaaggaggcccccacccccaaggagggcaccctgacccaggtgcccctggccccccccccccccggcgccccccccagccccgcccccgccagattcaccgccagaggcggcagagtgttcacccccagaggcgtgcccagcagaagaggcagaggcggcggcagaccccccccccaggtgtgccccggctggagcccccccgccaagagcctggcccccaagaagccccccaccggccccctgccccccagcaaggagcccctgaaggagaagctgatccccggccccctgagccccgtggccagaggcggcagcaacggcggcagcaacgtgggcatggaggacggcgagagacccagaagaagaagacacggcagagcccagcagcaggacaagccccccagattcagaagactgaagcaggagagagagaacgccgccagaggcagcgagggcaagcccagcctgaccctgcccgccagcgcccccggccccgaggaggccctgaccaccgtgaccgtggcccccgcccccagaagagccgccgccaagagccccgacctgagcaaccagaacagcgaccaggccaacgaggagtgggagaccgccagcgagagcagcgacttcaccagcgagagaagaggcgacaaggaggcccccccccccgtgctgctgacccccaaggccgtgggcacccccggcggcggcggcggcggcgccgtgcccggcatcagcgccatgagcagaggcgacctgagccagagagccaaggacctgagcaagagaagcttcagcagccagagacccggcatggagagacagaacagaagacccggccccggcggcaaggccggcagcagcggcagcagcagcggcggcggcggcggcggccccggcggcagaaccggccccggcagaggcgacaagagaagctggcccagccccaagaacagaagcagaccccccgaggagagaccccccggcctgcccctgcccccccccccccccagcagcagcgccgtgttcagactggaccaggtgatccacagcaaccccgccggcatccagcaggccctggcccagctgagcagcagacagggcagcgtgaccgcccccggcggccaccccagacacaagcccggccccccccaggccccccagggccccagccccagaccccccaccagatacgagccccagagagtgaacagcggcctgagcagcgacccccacttcgaggagcccggccccatggtgagaggcgtgggcggcacccccagagacagcgccggcgtgagccccttcccccccaagagaagagagagaccccccagaaagcccgagctgctgcaggaggagagcctgccccccccccacagcagcggcttcctgggcagcaagcccgagggccccggcccccaggccgagagcagagacaccggcaccgaggccctgaccccccacatctggaacagactgcacaccgccaccagcagaaagagctacagacccagcagcatggagccctggatggagcccctgagccccttcgaggacgtggccggcaccgagatgagccagagcgacagcggcgtggacctgagcggcgacagccaggtgagcagcggcccctgcagccagagaagcagccccgacggcggcctgaagggcgccgccgagggcccccccaagagacccggcggcagcagccccctgaacgccgtgccctgcgagggcccccccggcagcgagccccccagaagacccccccccgccccccacgacggcgacagaaaggagctgcccagagagcagcccctgccccccggccccatcggcaccgagagaagccagcacaccgacagaggcaccgagcccggccccatcagacccagccacagacccggcccccccgtgcagttcggcaccagcgacaaggacagcgacctgagactggtggtgggcgacagcctgaaggccgagaaggagctgaccgccagcgtgaccgaggccatccccgtgagcagagactgggagctgctgcccagcgccgccgccagcgccgagccccagagcaagaacctggacagcggccactgcgtgcccgagcccagcagcagcggccagagactgtaccccgaggtgttctacggcagcgccggccccagcagcagccagatcagcggcggcgccatggacagccagctgcaccccaacagcggcggcttcagacccggcacccccagcctgcacccctacagaagccagcccctgtacctgccccccggccccgccccccccagcgccctgctgagcggcgtggccctgaagggccagttcctggacttcagcaccatgcaggccaccgagctgggcaagctgcccgccggcggcgtgctgtaccccccccccagcttcctgtacagccccgccttctgccccagccccctgcccgacaccagcctgctgcaggtgagacaggacctgcccagccccagcgacttctacagcacccccctgcagcccggcggccagagcggcttcctgcccagcggcgcccccgcccagcagatgctgctgcccatggtggacagccagctgcccgtggtgaacttcggcagcctgccccccgcccccccccccgccccccccagcctgagcctgctgcccgtgggccccgccctgcagccccccagcctggccgtgagacccccccccgcccccgccaccagagtgctgcccagccccgccagacccttccccgccagcctgggcagagccgagctgcaccccgtggagctgaagcccttccaggactaccagaagctgagcagcaacctgggcggccccggcagcagcagaaccccccccaccggcagaagcttcagcggcctgaacagcagactgaaggccacccccagcacctacagcggcgtgttcagaacccagagagtggacctgtaccagcaggccagcccccccgacgccctgagatggatccccaagccctgggagagaaccggccccccccccagagagggccccagcagaagagccgaggagcccggcagcagaggcgacaaggagcccggcctgcccccccccagatag

SEQ ID NO: 94634 - DNA, 6474 bp, synthetic construct; identical to SEQ ID NO: 94633
  misc_feature 1..6474: note = Description of Artificial Sequence: Synthetic coding sequence
  source 1..6474: mol_type = other DNA

SEQ ID NO: 94635 - DNA, 6474 bp, synthetic construct
  misc_feature 1..6474: note = Description of Artificial Sequence: Synthetic coding sequence
  source 1..6474: mol_type = other DNA
atgagcgacagaagcggccccaccgccaagggcaaggacggcaagaagtacagcagcctgaacctgttcgacacctacaagggcaagagcctggagatccagaagcccgccgtggcccccagacacggcctgcagagcctgggcaaggtggccatcgccagaagaatgcccccccccgccaacctgcccagcctgaaggccgagaacaagggcaacgaccccaacgtgagcctggtgcccaaggacggcaccggctgggccagcaagcaggagcagagcgaccccaagagcagcgacgccagcaccgcccagccccccgagagccagcccctgcccgccagccagacccccgccagcaaccagcccaagagaccccccgccgcccccgagaacacccccctggtgcccagcggcgtgaagagctgggcccaggccagcgtgacccacggcgcccacggcgacggcggcagagccagcagcctgctgagcagattcagcagagaggagttccccaccctgcaggccgccggcgaccaggacaaggccgccaaggagagagagagcgccgagcagagcagcggccccggccccagcctgagaccccagaacagcaccacctggagagacggcggcggcagaggccccgacgagctggagggccccgacagcaagctgcaccacggccacgaccccagaggcggcctgcagcccagcggccccccccagttccccccctacagaggcatgatgccccccttcatgtaccccccctacctgcccttcccccccccctacggcccccagggcccctacagataccccacccccgacggccccagcagattccccagagtggccggccccagaggcagcggcccccccatgagactggtggagcccgtgggcagacccagcatcctgaaggaggacaacctgaaggagttcgaccagctggaccaggagaacgacgacggctgggccggcgcccacgaggaggtggactacaccgagaagctgaagttcagcgacgaggaggacggcagagacagcgacgaggagggcgccgagggccacagagacagccagagcgccagcggcgaggagagaccccccgaggccgacggcaagaagggcaacagccccaacagcgagccccccacccccaagaccgcctgggccgagaccagcagaccccccgagaccgagcccggcccccccgcccccaagccccccctgccccccccccacagaggccccgccggcaactggggcccccccggcgactaccccgacagaggcggccccccctgcaagccccccgcccccgaggacgaggacgaggcctggagacagagaagaaagcagagcagcagcgagatcagcctggccgtggagagagccagaagaagaagagaggaggaggagagaagaatgcaggaggagagaagagccgcctgcgccgagaagctgaagagactggacgagaagttcggcgcccccgacaagagactgaaggccgagcccgccgccccccccgccgcccccagcacccccgcccccccccccgccgtgcccaaggagctgcccgccccccccgcccccccccccgccagcgcccccacccccgagaccgagcccgaggagcccgcccaggccccccccgcccagagcacccccacccccggcgtggccgccgcccccaccctggtgagcggcggcggcagcaccagcagcaccagcagcggcagcttcgaggccagccccgtggagccccagctgcccagcaaggagggccccgagccccccgaggaggtgcccccccccaccaccccccccgtgcccaaggtggagcccaagggcgacggcatcggccccaccagacagccccccagccagggcctgggctaccccaagtaccagaagagcctgccccccagattccagagacagcagcaggagcagctgctgaagcagcagcagcagcaccagtggcagcagcaccagcagggcagcgccccccccacccccgtgccccccagccccccccagcccgtgaccctgggcgccgtgcccgccccccaggcccccccccccccccccaaggccctgtaccccggcgccctgggcagacccccccccatgccccccatgaacttcgaccccagatggatgatgatccccccctacgtggaccccagactgctgcagggcagaccccccctggacttctacccccccggcgtgcaccccagcggcctggtgcccagagagagaagcgacagcggcggcagcagcagcgagcccttcgacagacacgcccccgccatgctgagagagagaggcaccccccccgtggaccccaagctggcctgggtgggcgacgtgttcaccgccacccccgccgagcccagacccctgaccagccccctgagacaggccgccgacgaggacgacaagggcatgagaagcgagaccccccccgtgccccccccccccccctacctggccagctaccccggcttccccgagaacggcgcccccggcccccccatcagcagattccccctggaggagcccggccccagacccctgccctggccccccggcagcgacgaggtggccaagatccagacccccccccccaagaaggagccccccaaggaggagaccgcccagctgaccggccccgaggccggcagaaagcccgccagaggcgtgggcagcggcggccagggcccccccccccccagaagagagagcagaaccgagaccagatggggccccagacccggcagcagcagaagaggcatcccccccgaggagcccggcgccccccccagaagagccggccccatcaagaagccccccccccccaccaaggtggaggagctgccccccaagcccctggagcagggcgacgagacccccaagccccccaagcccgaccccctgaagatcaccaagggcaagctgggcggccccaaggagaccccccccaacggcaacctgagccccgcccccagactgagaagagactacagctacgagagagtgggccccaccagctgcagaggcagaggcagaggcgagtacttcgccagaggcagaggcttcagaggcacctacggcggcagaggcagaggcgccagaagcagagagttcagaagctacagagagttcagaggcgacgacggcagaggcggcggcaccggcggccccaaccacccccccgcccccagaggcagaaccgccagcgagaccagaagcgagggcagcgagtacgaggagatccccaagagaagaagacagagaggcagcgagaccggcagcgagacccacgagagcgacctggcccccagcgacaaggaggcccccacccccaaggagggcaccctgacccaggtgcccctggccccccccccccccggcgccccccccagccccgcccccgccagattcaccgccagaggcggcagagtgttcacccccagaggcgtgcccagcagaagaggcagaggcggcggcagaccccccccccaggtgtgccccggctggagcccccccgccaagagcctggcccccaagaagccccccaccggccccctgccccccagcaaggagcccctgaaggagaagctgatccccggccccctgagccccgtggccagaggcggcagcaacggcggcagcaacgtgggcatggaggacggcgagagacccagaagaagaagacacggcagagcccagcagcaggacaagccccccagattcagaagactgaagcaggagagagagaacgccgccagaggcagcgagggcaagcccagcctgaccctgcccgccagcgcccccggccccgaggaggccctgaccaccgtgaccgtggcccccgcccccagaagagccgccgccaagagccccgacctgagcaaccagaacagcgaccaggccaacgaggagtgggagaccgccagcgagagcagcgacttcaccagcgagagaagaggcgacaaggaggcccccccccccgtgctgctgacccccaaggccgtgggcacccccggcggcggcggcggcggcgccgtgcccggcatcagcgccatgagcagaggcgacctgagccagagagccaaggacctgagcaagagaagcttcagcagccagagacccggcatggagagacagaacagaagacccggccccggcggcaaggccggcagcagcggcagcagcagcggcggcggcggcggcggccccggcggcagaaccggccccggcagaggcgacaagagaagctggcccagccccaagaacagaagcagaccccccgaggagagaccccccggcctgcccctgcccccccccccccccagcagcagcgccgtgttcagactggaccaggtgatccacagcaaccccgccggcatccagcaggccctggcccagctgagcagcagacagggcagcgtgaccgcccccggcggccaccccagacacaagcccggcctgccccaggccccccagggccccagccccagaccccccaccagatacgagccccagagagtgaacagcggcctgagcagcgacccccacttcgaggagcccggccccatggtgagaggcgtgggcggcacccccagagacagcgccggcgtgagccccttcccccccaagagaagagagagaccccccagaaagcccgagctgctgcaggaggagagcctgccccccccccacagcagcggcttcctgggcagcaagcccgagggccccggcccccaggccgagagcagagacaccggcaccgaggccctgaccccccacatctggaacagactgcacaccgccaccagcagaaagagctacagacccagcagcatggagccctggatggagcccctgagccccttcgaggacgtggccggcaccgagatgagccagagcgacagcggcgtggacctgagcggcgacagccaggtgagcagcggcccctgcagccagagaagcagccccgacggcggcctgaagggcgccgccgagggcccccccaagagacccggcggcagcagccccctgaacgccgtgccctgcgagggcccccccggcagcgagccccccagaagacccccccccgccccccacgacggcgacagaaaggagctgcccagagagcagcccctgccccccggccccatcggcaccgagagaagccagagaaccgacagaggcaccgagcccggccccatcagacccagccacagacccggcccccccgtgcagttcggcaccagcgacaaggacagcgacctgagactggtggtgggcgacagcctgaaggccgagaaggagctgaccgccagcgtgaccgaggccatccccgtgagcagagactgggagctgctgcccagcgccgccgccagcgccgagccccagagcaagaacctggacagcggccactgcgtgcccgagcccagcagcagcggccagagactgtaccccgaggtgttctacggcagcgccggccccagcagcagccagatcagcggcggcgccatggacagccagctgcaccccaacagcggcggcttcagacccggcacccccagcctgcacccctacagaagccagcccctgtacctgccccccggccccgccccccccagcgccctgctgagcggcgtggccctgaagggccagttcctggacttcagcaccatgcaggccaccgagctgggcaagctgcccgccggcggcgtgctgtaccccccccccagcttcctgtacagccccgccttctgccccagccccctgcccgacaccagcctgctgcaggtgagacaggacctgcccagccccagcgacttctacagcacccccctgcagcccggcggccagagcggcttcctgcccagcggcgcccccgcccagcagatgctgctgcccatggtggacagccagctgcccgtggtgaacttcggcagcctgccccccgcccccccccccgcccccccccccctgagcctgctgcccgtgggccccgccctgcagccccccagcctggccgtgagacccccccccgcccccgccaccagagtgctgcccagccccgccagacccttccccgccagcctgggcagagccgagctgcaccccgtggagctgaagcccttccaggactaccagaagctgagcagcaacctgggcggccccggcagcagcagaaccccccccaccggcagaagcttcagcggcctgaacagcagactgaaggccacccccagcacctacagcggcgtgttcagaacccagagagtggacctgtaccagcaggccagcccccccgacgccctgagatggatccccaagccctgggagagaaccggccccccccccagagagggccccagcagaagagccgaggagcccggcagcagaggcgacaaggagcccggcctgcccccccccagatag

SEQ ID NO: 94636 - DNA, 6474 bp, synthetic construct
  misc_feature 1..6474: note = Description of Artificial Sequence: Synthetic coding sequence
  source 1..6474: mol_type = other DNA
atgagcgacagaagcggccccaccgccaagggcaaggacggcaagaagtacagcagcctgaacctgttcgacacctacaagggcaagagcctggagatccagaagcccgccgtggcccccagacacggcctgcagagcctgggcaaggtggccatcgccagaagaatgcccccccccgccaacctgcccagcctgaaggccgagaacaagggcaacgaccccaacgtgagcctggtgcccaaggacggcaccggctgggccagcaagcaggagcagagcgaccccaagagcagcgacgccagcaccgcccagcccctggagagccagcccctgcccgccagccagacccccgccagcaaccagcccaagagaccccccgccgcccccgagaacacccccctggtgcccagcggcgtgaagagctgggcccaggccagcgtgacccacggcgcccacggcgacggcggcagagccagcagcctgctgagcagattcagcagagaggagttccccaccctgcaggccgccggcgaccaggacaaggccgccaaggagagagagagcgccgagcagagcagcggccccggccccagcctgagaccccagaacagcaccacctggagagacggcggcggcagaggccccgacgagctggagggccccgacagcaagctgcaccacggccacgaccccagaggcggcctgcagcccagcggccccccccagttccccccctacagaggcatgatgccccccttcatgtaccccccctacctgcccttcccccccccctacggcccccagggcccctacagataccccacccccgacggccccagcagattccccagagtggccggccccagaggcagcggcccccccatgagactggtggagcccgtgggcagacccagcatcctgaaggaggacaacctgaaggagttcgaccagctggaccaggagaacgacgacggctgggccggcgcccacgaggaggtggactacaccgagaagctgaagttcagcgacgaggaggacggcagagacagcgacgaggagggcgccgagggccacagagacagccagagcgccagcggcgaggagagaccccccgaggccgacggcaagaagggcaacagccccaacagcgagccccccacccccaagaccgcctgggccgagaccagcagaccccccgagaccgagcccggcccccccgcccccaagccccccctgccccccccccacagaggccccgccggcaactggggcccccccggcgactaccccgacagaggcggccccccctgcaagccccccgcccccgaggacgaggacgaggcctggagacagagaagaaagcagagcagcagcgagatcagcctggccgtggagagagccagaagaagaagagaggaggaggagagaagaatgcaggaggagagaagagccgcctgcgccgagaagctgaagagactggacgagaagttcggcgcccccgacaagagactgaaggccgagcccgccgccccccccgccgcccccagcacccccgcccccccccccgccgtgcccaaggagctgcccgccccccccgcccccccccccgccagcgcccccacccccgagaaggagcccgaggagcccgcccaggccccccccgcccagagcacccccacccccggcgtggccgccgcccccaccctggtgagcggcggcggcagcaccagcagcaccagcagcggcagcttcgaggccagccccgtggagccccagctgcccagcaaggagggccccgagccccccgaggaggtgcccccccccaccaccccccccgtgcccaaggtggagcccaagggcgacggcatcggccccaccagacagccccccagccagggcctgggctaccccaagtaccagaagagcctgccccccagattccagagacagcagcaggagcagctgctgaagcagcagcagcagcaccagtggcagcagcaccagcagggcagcgccccccccacccccgtgccccccagccccccccagcccgtgaccctgggcgccgtgcccgccccccaggcccccccccccccccccaaggccctgtaccccggcgccctgggcagacccccccccatgccccccatgaacttcgaccccagatggatgatgatccccccctacgtggaccccagactgctgcagggcagaccccccctggacttctacccccccggcgtgcaccccagcggcctggtgcccagagagagaagcgacagcggcggcagcagcagcgagcccttcgacagacacgcccccgccatgctgagagagagaggcaccccccccgtggaccccaagctggcctgggtgggcgacgtgttcaccgccacccccgccgagcccagacccctgaccagccccctgagacaggccgccgacgaggacgacaagggcatgagaagcgagaccccccccgtgccccccccccccccctacctggccagctaccccggcttccccgagaacggcgcccccggcccccccatcagcagattccccctggaggagcccggccccagacccctgccctggccccccggcagcgacgaggtggccaagatccagacccccccccccaagaaggagccccccaaggaggagaccgcccagctgaccggccccgaggccggcagaaagcccgccagaggcgtgggcagcggcggccagggcccccccccccccagaagagagagcagaaccgagaccagatggggccccagacccggcagcagcagaagaggcatcccccccgaggagcccggcgccccccccagaagagccggccccatcaagaagccccccccccccaccaaggtggaggagctgccccccaagcccctggagcagggcgacgagacccccaagccccccaagcccgaccccctgaagatcaccaagggcaagctgggcggccccaaggagaccccccccaacggcaacctgagccccgcccccagactgagaagagactacagctacgagagagtgggccccaccagctgcagaggcagaggcagaggcgagtacttcgccagaggcagaggcttcagaggcacctacggcggcagaggcagaggcgccagaagcagagagttcagaagctacagagagttcagaggcgacgacggcagaggcggcggcaccggcggccccaaccacccccccgcccccagaggcagaaccgccagcgagaccagaagcgagggcagcgagtacgaggagatccccaagagaagaagacagagaggcagcgagaccggcagcgagacccacgagagcgacctggcccccagcgacaaggaggcccccacccccaaggagggcaccctgacccaggtgcccctggccccccccccccccggcgccccccccagccccgcccccgccagattcaccgccagaggcggcagagtgttcacccccagaggcgtgcccagcagaagaggcagaggcggcggcagaccccccccccaggtgtgccccggctggagcccccccgccaagagcctggcccccaagaagccccccaccggccccctgccccccagcaaggagcccctgaaggagaagctgatccccggccccctgagccccgtggccagaggcggcagcaacggcggcagcaacgtgggcatggaggacggcgagagacccagaagaagaagacacggcagagcccagcagcaggacaagccccccagattcagaagactgaagcaggagagagagaacgccgccagaggcagcgagggcaagcccagcctgaccctgcccgccagcgcccccggccccgaggaggccctgaccaccgtgaccgtggcccccgcccccagaagagccgccgccaagagccccgacctgagcaaccagaacagcgaccaggccaacgaggagtgggagaccgccagcgagagcagcgacttcaccagcgagagaagaggcgacaaggaggcccccccccccgtgctgctgacccccaaggccgtgggcacccccggcggcggcggcggcggcgccgtgcccggcatcagcgccatgagcagaggcgacctgagccagagagccaaggacctgagcaagagaagcttcagcagccagagacccggcatggagagacagaacagaagacccggccccggcggcaaggccggcagcagcggcagcagcagcggcggcggcggcggcggccccggcggcagaaccggccccggcagaggcgacaagagaagctggcccagccccaagaacagaagcagaccccccgaggagagaccccccggcctgcccctgcccccccccccccccagcagcagcgccgtgttcagactggaccaggtgatccacagcaaccccgccggcatccagcaggccctggcccagctgagcagcagacagggcagcgtgaccgcccccggcggccaccccagacacaagcccggccccccccaggccccccagggccccagccccagaccccccaccagatacgagccccagagagtgaacagcggcctgagcagcgacccccacttcgaggagcccggccccatggtgagaggcgtgggcggcacccccagagacagcgccggcgtgagccccttcccccccaagagaagagagagaccccccagaaagcccgagctgctgcaggaggagagcctgccccccccccacagcagcggcttcctgggcagcaagcccgagggccccggcccccaggccgagagcagagacaccggcaccgaggccctgaccccccacatctggaacagactgcacaccgccaccagcagaaagagctacagacccagcagcatggagccctggatggagcccctgagccccttcgaggacgtggccggcaccgagatgagccagagcgacagcggcgtggacctgagcggcgacagccaggtgagcagcggcccctgcagccagagaagcagccccgacggcggcctgaagggcgccgccgagggcccccccaagagacccggcggcagcagccccctgaacgccgtgccctgcgagggcccccccggcagcgagccccccagaagacccccccccgccccccacgacggcgacagaaaggagctgcccagagagcagcccctgccccccggccccatcggcaccgagagaagccagagaaccgacagaggcaccgagcccggccccatcagacccagccacagacccggcccccccgtgcagttcggcaccagcgacaaggacagcgacctgagactggtggtgggcgacagcctgaaggccgagaaggagctgaccgccagcgtgaccgaggccatccccgtgagcagagactgggagctgctgcccagcgccgccgccagcgccgagccccagagcaagaacctggacagcggccactgcgtgcccgagcccagcagcagcggccagagactgtaccccgaggtgttctacggcagcgccggccccagcagcagccagatcagcggcggcgccatggacagccagctgcaccccaacagcggcggcttcagacccggcacccccagcctgcacccctacagaagccagcccctgtacctgccccccggccccgccccccccagcgccctgctgagcggcgtggccctgaagggccagttcctggacttcagcaccatgcaggccaccgagctgggcaagctgcccgccggcggcgtgctgtaccccccccccagcttcctgtacagccccgccttctgccccagccccctgcccgacaccagcctgctgcaggtgagacaggacctgcccagccccagcgacttctacagcacccccctgcagcccggcggccagagcggcttcctgcccagcggcgcccccgcccagcagatgctgctgcccatggtggacagccagctgcccgtggtgaacttcggcagcctgccccccgcccccccccccgcccccccccccctgagcctgctgcccgtgggccccgccctgcagccccccagcctggccgtgagacccccccccgcccccgccaccagagtgctgcccagccccgccagacccttccccgccagcctgggcagagccgagctgcaccccgtggagctgaagcccttccaggactaccagaagctgagcagcaacctgggcggccccggcagcagcagaaccccccccaccggcagaagcttcagcggcctgaacagcagactgaaggccacccccagcacctacagcggcgtgttcagaacccagagagtggacctgtaccagcaggccagcccccccgacgccctgagatggatccccaagccctgggagagaaccggccccccccccagagagggccccagcagaagagccgaggagcccggcagcagaggcgacaaggagcccggcctgcccccccccagatag

SEQ ID NO: 94637 - DNA, 6474 bp, synthetic construct; identical to SEQ ID NO: 94633
  misc_feature 1..6474: note = Description of Artificial Sequence: Synthetic coding sequence
  source 1..6474: mol_type = other DNA

SEQ ID NO: 94638 - DNA, 6450 bp, synthetic construct
  misc_feature 1..6450: note = Description of Artificial Sequence: Synthetic coding sequence
  source 1..6450: mol_type = other DNA
atgagcgacagaagcggccccaccgccaagggcaaggacggcaagaagtacagcagcctgaacctgttcgacacctacaagggcaagagcctggagatccagaagcccgccgtggcccccagacacggcctgcagagcctgggcaaggtggccatcgccagaagaatgcccccccccgccaacctgcccagcctgaaggccgagaacaagggcaacgaccccaacgtgagcctggtgcccaaggacggcaccggctgggccagcaagcaggagcagagcgaccccaagagcagcgacgccagcaccgcccagccccccgagagccagcccctgcccgccagccagacccccgccagcaaccagcccaagagaccccccgccgcccccgagaacacccccctggtgcccagcggcgtgaagagctgggcccaggccagcgtgacccacggcgcccacggcgacggcggcagagccagcagcctgctgagcagattcagcagagaggagttccccaccctgcaggccgccggcgaccaggacaaggccgccaaggagagagagagcgccgagcagagcagcggccccggccccagcctgagaccccagaacagcaccacctggagagacggcggcggcagaggccccgacgagctggagggccccgacagcaagctgcaccacggccacgaccccagaggcggcctgcagcccagcggccccccccagttccccccctacagaggcatgatgccccccttcatgtaccccccctacctgcccttcccccccccctacggcccccagggcccctacagataccccacccccgacggccccagcagattccccagagtggccggccccagaggcagcggcccccccatgagactggtggagcccgtgggcagacccagcatcctgaaggaggacaacctgaaggagttcgaccagctggaccaggagaacgacgacggctgggccggcgcccacgaggaggtggactacaccgagaagctgaagttcagcgacgaggaggacggcagagacagcgacgaggagggcgccgagggccacagagacagccagagcgccagcggcgaggagagaccccccgaggccgacggcaagaagggcaacagccccaacagcgagccccccacccccaagaccgcctgggccgagaccagcagaccccccgagaccgagcccggcccccccgcccccaagccccccctgccccccccccacagaggccccgccggcaactggggcccccccggcgactaccccgacagaggcggccccccctgcaagccccccgcccccgaggacgaggacgaggcctggagacagagaagaaagcagagcagcagcgagatcagcctggccgtggagagagccagaagaagaagagaggaggaggagagaagaatgcaggaggagagaagagccgcctgcgccgagaagctgaagagactggacgagaagttcggcgcccccgacaagagactgaaggccgagcccgccgccccccccgccgcccccagcacccccgcccccccccccgccgtgcccaaggagctgcccgccccccccgcccccccccccgccagcgcccccacccccgagaccgagcccgaggagcccgcccaggccccccccgcccagagcacccccacccccggcgtggccgccgcccccaccctggtgagcggcggcggcagcaccagcagcaccagcagcggcagcttcgaggccagccccgtggagccccagctgcccagcaaggagggccccgagccccccgaggaggtgcccccccccaccaccccccccgtgcccaaggtggagcccaagggcgacggcatcggccccaccagacagccccccagccagggcctgggctaccccaagtaccagaagagcctgccccccagattccagagacagcagcaggagcagctgctgaagcagcagcagcagcaccagtggcagcagcaccagcagggcagcgccccccccacccccgtgccccccagccccccccagcccgtgaccctgggcgccgtgcccgccccccaggcccccccccccccccccaaggccctgtaccccggcgccctgggcagacccccccccatgccccccatgaacttcgaccccagatggatgatgatccccccctacgtggaccccagactgctgcagggcagaccccccctggacttctacccccccggcgtgcaccccagcggcctggtgcccagagagagaagcgacagcggcggcagcagcagcgagcccttcgacagacacgcccccgccatgctgagagagagaggcaccccccccgtggaccccaagctggcctgggtgggcgacgtgttcaccgccacccccgccgagcccagacccctgaccagccccctgagacaggccgccgacgaggacgacaagggcatgagaagcgagaccccccccgtgccccccccccccccctacctggccagctaccccggcttccccgagaacggcgcccccggcccccccatcagcagattccccctggaggagcccggccccagacccctgccctggccccccggcagcgacgaggtggccaagatccagacccccccccccaagaaggagccccccaaggaggagaccgcccagctgaccggccccgaggccggcagaaagcccgccagaggcgtgggcagcggcggccagggcccccccccccccagaagagagagcagaaccgagaccagatggggccccagacccggcagcagcagaagaggcatcccccccgaggagcccggcgccccccccagaagagccggccccatcaagaagccccccccccccaccaaggtggaggagctgccccccaagcccctggagcagggcgacgagacccccaagccccccaagcccgaccccctgaagatcaccaagggcaagctgggcggccccaaggagaccccccccaacggcaacctgagccccgcccccagactgagaagagactacagctacgagagagtgggccccaccagctgcagaggcagaggcagaggcgagtacttcgccagaggcagaggcttcagaggcacctacggcggcagaggcagaggcgccgccggcaacagcgccgtgaccgagagcttcgaggagatgatgggcgtggaggtgggccagggcgaccagaccaccctgctgctgcccgaggccgccctgcccgccagacacggcgccagagtgcagagcatgagaaagagccccagcggcgccggcagcggcgcccagaagcaggccgccagacccatgagagtgatctggctgctgcagaccagaagactgccccaccccagaagagagcacagccccagaagcagaagccccaccaccagaagccccaccttccccgcccccgccagattcacccccggcgtgggcgagagcagcctgcccgagggcatcagccccggccccagaagaagagagcccccccaggtgtgccccggctggagcccccccgccaagagcctggcccccaagaagccccccaccggccccctgccccccagcaaggagcccctgaaggagaagctgatccccggccccctgagccccgtggccagaggcggcagcaacggcggcagcaacgtgggcatggaggacggcgagagacccagaagaagaagacacggcagagcccagcagcaggacaagccccccagattcagaagactgaagcaggagagagagaacgccgccagaggcagcgagggcaagcccagcctgaccctgcccgccagcgcccccggccccgaggaggccctgaccaccgtgaccgtggcccccgcccccagaagagccgccgccaagagccccgacctgagcaaccagaacagcgaccaggccaacgaggagtgggagaccgccagcgagagcagcgacttcaccagcgagagaagaggcgacaaggaggcccccccccccgtgctgctgacccccaaggccgtgggcacccccggcggcggcggcggcggcgccgtgcccggcatcagcgccatgagcagaggcgacctgagccagagagccaaggacctgagcaagagaagcttcagcagccagagacccggcatggagagacagaacagaagacccggccccggcggcaaggccggcagcagcggcagcagcagcggcggcggcggcggcggccccggcggcagaaccggccccggcagaggcgacaagagaagctggcccagccccaagaacagaagcagaccccccgaggagagaccccccggcctgcccctgcccccccccccccccagcagcagcgccgtgttcagactggaccaggtgatccacagcaaccccgccggcatccagcaggccctggcccagctgagcagcagacagggcagcgtgaccgcccccggcggccaccccagacacaagcccggcctgccccaggccccccagggccccagccccagaccccccaccagatacgagccccagagagtgaacagcggcctgagcagcgacccccacttcgaggagcccggccccatggtgagaggcgtgggcggcacccccagagacagcgccggcgtgagccccttcccccccaagagaagagagagaccccccagaaagcccgagctgctgcaggaggagagcctgccccccccccacagcagcggcttcctgggcagcaagcccgagggccccggcccccaggccgagagcagagacaccggcaccgaggccctgaccccccacatctggaacagactgcacaccgccaccagcagaaagagctacagacccagcagcatggagccctggatggagcccctgagccccttcgaggacgtggccggcaccgagatgagccagagcgacagcggcgtggacctgagcggcgacagccaggtgagcagcggcccctgcagccagagaagcagccccgacggcggcctgaagggcgccgccgagggcccccccaagagacccggcggcagcagccccctgaacgccgtgccctgcgagggcccccccggcagcgagccccccagaagacccccccccgccccccacgacggcgacagaaaggagctgcccagagagcagcccctgccccccggccccatcggcaccgagagaagccagagaaccgacagaggcaccgagcccggccccatcagacccagccacagacccggcccccccgtgcagttcggcaccagcgacaaggacagcgacctgagactggtggtgggcgacagcctgaaggccgagaaggagctgaccgccagcgtgaccgaggccatccccgtgagcagagactgggagctgctgcccagcgccgccgccagcgccgagccccagagcaagaacctggacagcggccactgcgtgcccgagcccagcagcagcggccagagactgtaccccgaggtgttctacggcagcgccggccccagcagcagccagatcagcggcggccacggcctgagcatcaccagcaagcagtggagaagacccggcacccccagcctgcacccctacagaagccagcccctgtacctgccccccggccccgccccccccagcgccctgctgagcggcctggccctgaagggccagttcctggacttcagcaccatgcaggccaccgagctgggcaagctgcccgccggcggcgtgctgtaccccccccccagcttcctgtacagccccgccttctgccccagccccctgcccgacaccagcctgctgcaggtgagacaggacctgcccagccccagcgacttctacagcacccccctgcagcccggcggccagagcggcttcctgcccagcggcgcccccgcccagcagatgctgctgcccatggtggacagccagctgcccgtggtgaacttcggcagcctgccccccgcccccccccccgcccccccccccctgagcctgctgcccgtgggccccgccctgcagccccccagcctggccgtgagacccccccccgcccccgccaccagagtgctgcccagccccgccagacccttccccgccagcctgggcagagccgagctgcaccccgtggagctgaagcccttccaggactaccagaagctgagcagcaacctgggcggccccggcagcagcagaaccccccccaccggcagaagcttcagcggcctgaacagcagactgaaggccacccccagcacctacagcggcgtgttcagaacccagagagtggacctgtaccagcaggccagcccccccgacgccctgagatggatccccaagccctgggagagaaccggccccccccccagagagggccccagcagaagagccgaggagcccggcagcagaggcgacaaggagcccggcctgcccccccccagatag

SEQ ID NO: 94639 - DNA, 6474 bp, synthetic construct; identical to SEQ ID NO: 94633
  misc_feature 1..6474: note = Description of Artificial Sequence: Synthetic coding sequence
  source 1..6474: mol_type = other DNA

SEQ ID NO: 94640 - DNA, 6474 bp, synthetic construct; identical to SEQ ID NO: 94633
  misc_feature 1..6474: note = Description of Artificial Sequence: Synthetic coding sequence
  source 1..6474: mol_type = other DNA

SEQ ID NO: 94641 - DNA, 6474 bp, synthetic construct
  misc_feature 1..6474: note = Description of Artificial Sequence: Synthetic coding sequence
  source 1..6474: mol_type = other DNA
atgagcgacagaagcggccccaccgccaagggcaaggacggcaagaagtacagcagcctgaacctgttcgacacctacaagggcaagagcctggagatccagaagcccgccgtggcccccagacacggcctgcagagcctgggcaaggtggccatcgccagaagaatgcccccccccgccaacctgcccagcctgaaggccgagaacaagggcaacgaccccaacgtgagcctggtgcccaaggacggcaccggctgggccagcaagcaggagcagagcgaccccaagagcagcgacgccagcaccgcccagccccccgagagccagcccctgcccgccagccagacccccgccagcaaccagcccaagagaccccccgccgcccccgagaacacccccctggtgcccagcggcgtgaagagctgggcccaggccagcgtgacccacggcgcccacggcgacggcggcagagccagcagcctgctgagcagattcagcagagaggagttccccaccctgcaggccgccggcgaccaggacaaggccgccaaggagagagagagcgccgagcagagcagcggccccggccccagcctgagaccccagaacagcaccacctggagagacggcggcggcagaggccccgacgagctggagggccccgacagcaagctgcaccacggccacgaccccagaggcggcctgcagcccagcggccccccccagttccccccctacagaggcatgatgccccccttcatgtaccccccctacctgcccttcccccccccctacggcccccagggcccctacagataccccacccccgacggccccagcagattccccagagtggccggccccagaggcagcggcccccccatgagactggtggagcccgtgggcagacccagcatcctgaaggaggacaacctgaaggagttcgaccagctggaccaggagaacgacgacggctgggccggcgcccacgaggaggtggactacaccgagaagctgaagttcagcgacgaggaggacggcagagacagcgacgaggagggcgccgagggccacagagacagccagagcgccagcggcgaggagagaccccccgaggccgacggcaagaagggcaacagccccaacagcgagccccccacccccaagaccgcctgggccgagaccagcagaccccccgagaccgagcccggcccccccgcccccaagccccccctgccccccccccacagaggccccgccggcaactggggcccccccggcgactaccccgacagaggcggccccccctgcaagccccccgcccccgaggacgaggacgaggcctggagacagagaagaaagcagagcagcagcgagatcagcctggccgtggagagagccagaagaagaagagaggaggaggagagaagaatgcaggaggagagaagagccgcctgcgccgagaagctgaagagactggacgagaagttcggcgcccccgacaagagactgaaggccgagcccgccgccccccccgccgcccccagcacccccgcccccccccccgccgtgcccaaggagctgcccgccccccccgcccccccccccgccagcgcccccacccccgagaaggagcccgaggagcccgcccaggccccccccgcccagagcacccccacccccggcgtggccgccgcccccaccctggtgagcggcggcggcagcaccagcagcaccagcagcggcagcttcgaggccagccccgtggagccccagctgcccagcaaggagggccccgagccccccgaggaggtgcccccccccaccaccccccccgtgcccaaggtggagcccaagggcgacggcatcggccccaccagacagccccccagccagggcctgggctaccccaagtaccagaagagcctgccccccagattccagagacagcagcaggagcagctgctgaagcagcagcagcagcaccagtggcagcagcaccagcagggcagcgccccccccacccccgtgccccccagccccccccagcccgtgaccctgggcgccgtgcccgccccccaggcccccccccccccccccaaggccctgtaccccggcgccctgggcagacccccccccatgccccccatgaacttcgaccccagatggatgatgatccccccctacgtggaccccagactgctgcagggcagaccccccctggacttctacccccccggcgtgcaccccagcggcctggtgcccagagagagaagcgacagcggcggcagcagcagcgagcccttcgacagacacgcccccgccatgctgagagagagaggcaccccccccgtggaccccaagctggcctgggtgggcgacgtgttcaccgccacccccgccgagcccagacccctgaccagccccctgagacaggccgccgacgaggacgacaagggcatgagaagcgagaccccccccgtgccccccccccccccctacctggccagctaccccggcttccccgagaacggcgcccccggcccccccatcagcagattccccctggaggagcccggccccagacccctgccctggccccccggcagcgacgaggtggccaagatccagacccccccccccaagaaggagccccccaaggaggagaccgcccagctgaccggccccgaggccggcagaaagcccgccagaggcgtgggcagcggcggccagggcccccccccccccagaagagagagcagaaccgagaccagatggggccccagacccggcagcagcagaagaggcatcccccccgaggagcccggcgccccccccagaagagccggccccatcaagaagccccccccccccaccaaggtggaggagctgccccccaagcccctggagcagggcgacgagacccccaagccccccaagcccgaccccctgaagatcaccaagggcaagctgggcggccccaaggagaccccccccaacggcaacctgagccccgcccccagactgagaagagactacagctacgagagagtgggccccaccagctgcagaggcagaggcagaggcgagtacttcgccagaggcagaggcttcagaggcacctacggcggcagaggcagaggcgccagaagcagagagttcagaagctacagagagttcagaggcgacgacggcagaggcggcggcaccggcggccccaaccacccccccgcccccagaggcagaaccgccagcgagaccagaagcgagggcagcgagtacgaggagatccccaagagaagaagacagagaggcagcgagaccggcagcgagacccacgagagcgacctggcccccagcgacaaggaggcccccacccccaaggagggcaccctgacccaggtgcccctggccccccccccccccggcgccccccccagccccgcccccgccagattcaccgccagaggcggcagagtgttcacccccagaggcgtgcccagcagaagaggcagaggcggcggcagaccccccccccaggtgtgccccggctggagcccccccgccaagagcctggcccccaagaagccccccaccggccccctgccccccagcaaggagcccctgaaggagaagctgatccccggccccctgagccccgtggccagaggcggcagcaacggcggcagcaacgtgggcatggaggacggcgagagacccagaagaagaagacacggcagagcccagcagcaggacaagccccccagattcagaagactgaagcaggagagagagaacgccgccagaggcagcgagggcaagcccagcctgaccctgcccgccagcgcccccggccccgaggaggccctgaccaccgtgaccgtggcccccgcccccagaagagccgccgccaagagccccgacctgagcaaccagaacagcgaccaggccaacgaggagtgggagaccgccagcgagagcagcgacttcaccagcgagagaagaggcgacaaggaggcccccccccccgtgctgctgacccccaaggccgtgggcacccccggcggcggcggcggcggcgccgtgcccggcatcagcgccatgagcagaggcgacctgagccagagagccaaggacctgagcaagagaagcttcagcagccagagacccggcatggagagacagaacagaagacccggccccggcggcaaggccggcagcagcggcagcagcagcggcggcggcggcggcggccccggcggcagaaccggccccggcagaggcgacaagagaagctggcccagccccaagaacagaagcagaccccccgaggagagaccccccggcctgcccctgcccccccccccccccagcagcagcgccgtgttcagactggaccaggtgatccacagcaaccccgccggcatccagcaggccctggcccagctgagcagcagacagggcagcgtgaccgcccccggcggccaccccagacacaagcccggccccccccaggccccccagggccccagccccagaccccccaccagatacgagccccagagagtgaacagcggcctgagcagcgacccccacttcgaggagcccggccccatggtgagaggcgtgggcggcacccccagagacagcgccggcgtgagccccttcccccccaagagaagagagagaccccccagaaagcccgagctgctgcaggaggagagcctgccccccccccacagcagcggcttcctgggcagcaagcccgagggccccggcccccaggccgagagcagagacaccggcaccgaggccctgaccccccacatctggaacagactgcacaccgccaccagcagaaagagctacagacccagcagcatggagccctggatggagcccctgagccccttcgaggacgtggccggcaccgagatgagccagagcgacagcggcgtggacctgagcggcgacagccaggtgagcagcggcccctgcagccagagaagcagccccgacggcggcctgaagggcgccgccgagggcccccccaagagacccggcggcagcagccccctgaacgccgtgccctgcgagggcccccccggcagcgagccccccagaagacccccccccgccccccacgacggcgacagaaaggagctgcccagagagcagcccctgccccccggccccatcggcaccgagagaagccagagaaccgacagaggcaccgagcccggccccatcagacccagccacagacccggcccccccgtgcagttcggcaccagcgacaaggacagcgacctgagactggtggtgggcgacagcctgaaggccgagaaggagctgaccgccagcgtgaccgaggccatccccgtgagcagagactgggagctgctgcccagcgccgccgccagcgccgagccccagagcaagaacctggacagcggccactgcgtgcccgagcccagcagcagcggccagagactgtaccccgaggtgttctacggcagcgccggccccagcagcagccagatcagcggcggcgccatggacagccagctgcaccccaacagcggcggcttcagacccggcacccccagcctgcacccctacagaagccagcccctgtacctgccccccggccccgccccccccagcgccctgctgagcggcgtggccctgaagggccagttcctggacttcagcaccatgcaggccaccgagctgggcaagctgcccgccggcggcgtgctgtaccccccccccagcttcctgtacagccccgccttctgccccagccccctgcccgacaccagcctgctgcaggtgagacaggacctgcccagccccagcgacttctacagcacccccctgcagcccggcggccagagcggcttcctgcccagcggcgcccccgcccagcagatgctgctgcccatggtggacagccagctgcccgtggtgaacttcggcagcctgccccccgcccccccccccgcccccccccccctgagcctgctgcccgtgggccccgccctgcagccccccagcctggccgtgagacccccccccgcccccgccaccagagtgctgcccagccccgccagacccttccccgccagcctgggcagagccgagctgcaccccgtggagctgaagcccttccaggactaccagaagctgagcagcaacctgggcggccccggcagcagcagaaccccccccaccggcagaagcttcagcggcctgaacagcagactgaaggccacccccagcacctacagcggcgtgttcagaacccagagagtggacctgtaccagcaggccagcccccccgacgccctgagatggatccccaagccctgggagagaaccggccccccccccagagagggccccagcagaagagccgaggagcccggcagcagaggcgacaaggagcccggcctgcccccccccagatag

SEQ ID NO: 94642 - DNA, 6417 bp, synthetic construct
  misc_feature 1..6417: note = Description of Artificial Sequence: Synthetic coding sequence
  source 1..6417: mol_type = other DNA
atgagcgacagaagcggccccaccgccaagggcaaggacggcaagaagtacagcagcctgaacctgttcgacacctacaagggcaagagcctggagatccagaagcccgccgtggcccccagacacggcctgcagagcctgggcaaggtggccatcgccagaagaatgcccccccccgccaacctgcccagcctgaaggccgagaacaagggcaacgaccccaacgtgagcctggtgcccaaggacggcaccggctgggccagcaagcaggagcagagcgaccccaagagcagcgacgccagcaccgcccagccccccgagagccagcccctgcccgccagccagacccccgccagcaaccagcccaagagaccccccgccgcccccgagaacacccccctggtgcccagcggcgtgaagagctgggcccaggccagcgtgacccacggcgcccacggcgacggcggcagagccagcagcctgctgagcagattcagcagagaggagttccccaccctgcaggccgccggcgaccaggacaaggccgccaaggagagagagagcgccgagcagagcagcggccccggccccagcctgagaccccagaacagcaccacctggagagacggcggcggcagaggccccgacgagctggagggccccgacagcaagctgcaccacggccacgaccccagaggcggcctgcagcccagcggccccccccagttccccccctacagaggcatgatgccccccttcatgtaccccccctacctgcccttcccccccccctacggcccccagggcccctacagataccccacccccgacggccccagcagattccccagagtggccggccccagaggcagcggcccccccatgagactggtggagcccgtgggcagacccagcatcctgaaggaggacaacctgaaggagttcgaccagctggaccaggagaacgacgacggctgggccggcgcccacgaggaggtggactacaccgagaagctgaagttcagcgacgaggaggacggcagagacagcgacgaggagggcgccgagggccacagagacagccagagcgccagcggcgaggagagaccccccgaggccgacggcaagaagggcaacagccccaacagcgagccccccacccccaagaccgcctgggccgagaccagcagaccccccgagaccgagcccggcccccccgcccccaagccccccctgcccccccccggcgactaccccgacagaggcggccccccctgcaagccccccgcccccgaggacgaggacgaggcctggagacagagaagaaagcagagcagcagcgagatcagcctggccgtggagagagccagaagaagaagagaggaggaggagagaagaatgcaggaggagagaagagccgcctgcgccgagaagctgaagagactggacgagaagttcggcgcccccgacaagagactgaaggccgagcccgccgccccccccgccgcccccagcacccccgcccccccccccgccgtgcccaaggagctgcccgccccccccgcccccccccccgccagcgcccccacccccgagaccgagcccgaggagcccgcccaggccccccccgcccagagcacccccacccccggcgtggccgccgcccccaccctggtgagcggcggcggcagcaccagcagcaccagcagcggcagcttcgaggccagccccgtggagccccagctgcccagcaaggagggccccgagccccccgaggaggtgcccccccccaccaccccccccgtgcccaaggtggagcccaagggcgacggcatcggccccaccagacagccccccagccagggcctgggctaccccaagtaccagaagagcctgccccccagattccagagacagcagcaggagcagctgctgaagcagcagcagcagcaccagtggcagcagcaccagcagggcagcgccccccccacccccgtgccccccagccccccccagcccgtgaccctgggcgccgtgcccgccccccaggcccccccccccccccccaaggccctgtaccccggcgccctgggcagacccccccccatgccccccatgaacttcgaccccagatggatgatgatccccccctacgtggaccccagactgctgcagggcagaccccccctggacttctacccccccggcgtgcaccccagcggcctggtgcccagagagagaagcgacagcggcggcagcagcagcgagcccttcgacagacacgcccccgccatgctgagagagagaggcaccccccccgtggaccccaagctggcctgggtgggcgacgtgttcaccgccacccccgccgagcccagacccctgaccagccccctgagacaggccgccgacgaggacgacaagggcatgagaagcgagaccccccccgtgccccccccccccccctacctggccagctaccccggcttccccgagaacggcgcccccggcccccccatcagcagattccccctggaggagcccggccccagacccctgccctggccccccggcagcgacgaggtggccaagatccagacccccccccccaagaaggagccccccaaggaggagaccgcccagctgaccggccccgaggccggcagaaagcccgccagaggcgtgggcagcggcggccagggcccccccccccccagaagagagagcagaaccgagaccagatggggccccagacccggcagcagcagaagaggcatcccccccgaggagcccggcgccccccccagaagagccggccccatcaagaagccccccccccccaccaaggtggaggagctgccccccaagcccctggagcagggcgacgagacccccaagccccccaagcccgaccccctgaagatcaccaagggcaagctgggcggccccaaggagaccccccccaacggcaacctgagccccgcccccagactgagaagagactacagctacgagagagtgggccccaccagctgcagaggcagaggcagaggcgagtacttcgccagaggcagaggcttcagaggcacctacggcggcagaggcagaggcgccgccggcaacagcgccgtgaccgagagcttcgaggagatgatgggcgtggaggtgggccagggcgaccagaccaccctgctgctgcccgaggccgccctgcccgccagacacggcgccagagtgcagagcatgagaaagagccccagcggcgccggcagcggcgcccagaagcaggccgccagacccatgagagtgatctggctgctgcagaccagaagactgccccaccccagaagagagcacagccccagaagcagaagccccaccaccagaagccccaccttccccgcccccgccagattcacccccggcgtgggcgagagcagcctgcccgagggcatcagccccggccccagaagaagagagcccccccaggtgtgccccggctggagcccccccgccaagagcctggcccccaagaagccccccaccggccccctgccccccagcaaggagcccctgaaggagaagctgatccccggccccctgagccccgtggccagaggcggcagcaacggcggcagcaacgtgggcatggaggacggcgagagacccagaagaagaagacacggcagagcccagcagcaggacaagccccccagattcagaagactgaagcaggagagagagaacgccgccagaggcagcgagggcaagcccagcctgaccctgcccgccagcgcccccggccccgaggaggccctgaccaccgtgaccgtggcccccgcccccagaagagccgccgccaagagccccgacctgagcaaccagaacagcgaccaggccaacgaggagtgggagaccgccagcgagagcagcgacttcaccagcgagagaagaggcgacaaggaggcccccccccccgtgctgctgacccccaaggccgtgggcacccccggcggcggcggcggcggcgccgtgcccggcatcagcgccatgagcagaggcgacctgagccagagagccaaggacctgagcaagagaagcttcagcagccagagacccggcatggagagacagaacagaagacccggccccggcggcaaggccggcagcagcggcagcagcagcggcggcggcggcggcggccccggcggcagaaccggccccggcagaggcgacaagagaagctggcccagccccaagaacagaagcagaccccccgaggagagaccccccggcctgcccctgcccccccccccccccagcagcagcgccgtgttcagactggaccaggtgatccacagcaaccccgccggcatccagcaggccctggcccagctgagcagcagacagggcagcgtgaccgcccccggcggccaccccagacacaagcccggcctgccccaggccccccagggccccagccccagaccccccaccagatacgagccccagagagtgaacagcggcctgagcagcgacccccacttcgaggagcccggccccatggtgagaggcgtgggcggcacccccagagacagcgccggcgtgagccccttcccccccaagagaagagagagaccccccagaaagcccgagctgctgcaggaggagagcctgccccccccccacagcagcggcttcctgggcagcaagcccgagggccccggcccccaggccgagagcagagacaccggcaccgaggccctgaccccccacatctggaacagactgcacaccgccaccagcagaaagagctacagacccagcagcatggagccctggatggagcccctgagccccttcgaggacgtggccggcaccgagatgagccagagcgacagcggcgtggacctgagcggcgacagccaggtgagcagcggcccctgcagccagagaagcagccccgacggcggcctgaagggcgccgccgagggcccccccaagagacccggcggcagcagccccctgaacgccgtgccctgcgagggcccccccggcagcgagccccccagaagacccccccccgccccccacgacggcgacagaaaggagctgcccagagagcagcccctgccccccggccccatcggcaccgagagaagccagagaaccgacagaggcaccgagcccggccccatcagacccagccacagacccggcccccccgtgcagttcggcaccagcgacaaggacagcgacctgagactggtggtgggcgacagcctgaaggccgagaaggagctgaccgccagcgtgaccgaggccatccccgtgagcagagactgggagctgctgcccagcgccgccgccagcgccgagccccagagcaagaacctggacagcggccactgcgtgcccgagcccagcagcagcggccagagactgtaccccgaggtgttctacggcagcgccggccccagcagcagccagatcagcggcggccacggcctgagcatcaccagcaagcagtggagaagacccggcacccccagcctgcacccctacagaagccagcccctgtacctgccccccggccccgccccccccagcgccctgctgagcggcctggccctgaagggccagttcctggacttcagcaccatgcaggccaccgagctgggcaagctgcccgccggcggcgtgctgtaccccccccccagcttcctgtacagccccgccttctgccccagccccctgcccgacaccagcctgctgcaggtgagacaggacctgcccagccccagcgacttctacagcacccccctgcagcccggcggccagagcggcttcctgcccagcggcgcccccgcccagcagatgctgctgcccatggtggacagccagctgcccgtggtgaacttcggcagcctgccccccgcccccccccccgcccccccccccctgagcctgctgcccgtgggccccgccctgcagccccccagcctggccgtgagacccccccccgcccccgccaccagagtgctgcccagccccgccagacccttccccgccagcctgggcagagccgagctgcaccccgtggagctgaagcccttccaggactaccagaagctgagcagcaacctgggcggccccggcagcagcagaaccccccccaccggcagaagcttcagcggcctgaacagcagactgaaggccacccccagcacctacagcggcgtgttcagaacccagagagtggacctgtaccagcaggccagcccccccgacgccctgagatggatccccaagccctgggagagaaccggccccccccccagagagggccccagcagaagagccgaggagcccggcagcagaggcgacaaggagcccggcctgcccccccccagatag

SEQ ID NO: 94643 - DNA, 6474 bp, synthetic construct; identical to SEQ ID NO: 94633
  misc_feature 1..6474: note = Description of Artificial Sequence: Synthetic coding sequence
  source 1..6474: mol_type = other DNA

SEQ ID NO: 94644 - DNA, 6474 bp, synthetic construct; identical to SEQ ID NO: 94636
  misc_feature 1..6474: note = Description of Artificial Sequence: Synthetic coding sequence
  source 1..6474: mol_type = other DNA

SEQ ID NO: 94645 - DNA, 6474 bp, synthetic construct; identical to SEQ ID NO: 94641
  misc_feature 1..6474: note = Description of Artificial Sequence: Synthetic coding sequence
  source 1..6474: mol_type = other DNA

SEQ ID NO: 94646 - DNA, 6474 bp, synthetic construct; identical to SEQ ID NO: 94635
  misc_feature 1..6474: note = Description of Artificial Sequence: Synthetic coding sequence
  source 1..6474: mol_type = other DNA

SEQ ID NO: 94647 - DNA, 6450 bp, synthetic construct
  misc_feature 1..6450: note = Description of Artificial Sequence: Synthetic coding sequence
  source 1..6450: mol_type = other DNA
atgagcgacagaagcggccccaccgccaagggcaaggacggcaagaagtacagcagcctgaacctgttcgacacctacaagggcaagagcctggagatccagaagcccgccgtggcccccagacacggcctgcagagcctgggcaaggtggccatcgccagaagaatgcccccccccgccaacctgcccagcctgaaggccgagaacaagggcaacgaccccaacgtgagcctggtgcccaaggacggcaccggctgggccagcaagcaggagcagagcgaccccaagagcagcgacgccagcaccgcccagccccccgagagccagcccctgcccgccagccagacccccgccagcaaccagcccaagagaccccccgccgcccccgagaacacccccctggtgcccagcggcgtgaagagctgggcccaggccagcgtgacccacggcgcccacggcgacggcggcagagccagcagcctgctgagcagattcagcagagaggagttccccaccctgcaggccgccggcgaccaggacaaggccgccaaggagagagagagcgccgagcagagcagcggccccggccccagcctgagaccccagaacagcaccacctggagagacggcggcggcagaggccccgacgagctggagggccccgacagcaagctgcaccacggccacgaccccagaggcggcctgcagcccagcggccccccccagttccccccctacagaggcatgatgccccccttcatgtaccccccctacctgcccttcccccccccctacggcccccagggcccctacagataccccacccccgacggccccagcagattccccagagtggccggccccagaggcagcggcccccccatgagactggtggagcccgtgggcagacccagcatcctgaaggaggacaacctgaaggagttcgaccagctggaccaggagaacgacgacggctgggccggcgcccacgaggaggtggactacaccgagaagctgaagttcagcgacgaggaggacggcagagacagcgacgaggagggcgccgagggccacagagacagccagagcgccagcggcgaggagagaccccccgaggccgacggcaagaagggcaacagccccaacagcgagccccccacccccaagaccgcctgggccgagaccagcagaccccccgagaccgagcccggcccccccgcccccaagccccccctgccccccccccacagaggccccgccggcaactggggcccccccggcgactaccccgacagaggcggccccccctgcaagccccccgcccccgaggacgaggacgaggcctggagacagagaagaaagcagagcagcagcgagatcagcctggccgtggagagagccagaagaagaagagaggaggaggagagaagaatgcaggaggagagaagagccgcctgcgccgagaagctgaagagactggacgagaagttcggcgcccccgacaagagactgaaggccgagcccgccgccccccccgccgcccccagcacccccgcccccccccccgccgtgcccaaggagctgcccgccccccccgcccccccccccgccagcgcccccacccccgagaccgagcccgaggagcccgcccaggccccccccgcccagagcacccccacccccggcgtggccgccgcccccaccctggtgagcggcggcggcagcaccagcagcaccagcagcggcagcttcgaggccagccccgtggagccccagctgcccagcaaggagggccccgagccccccgaggaggtgcccccccccaccaccccccccgtgcccaaggtggagcccaagggcgacggcatcggccccaccagacagccccccagccagggcctgggctaccccaagtaccagaagagcctgccccccagattccagagacagcagcaggagcagctgctgaagcagcagcagcagcaccagtggcagcagcaccagcagggcagcgccccccccacccccgtgccccccagccccccccagcccgtgaccctgggcgccgtgcccgccccccaggcccccccccccccccccaaggccctgtaccccggcgccctgggcagacccccccccatgccccccatgaacttcgaccccagatggatgatgatccccccctacgtggaccccagactgctgcagggcagaccccccctggacttctacccccccggcgtgcaccccagcggcctggtgcccagagagagaagcgacagcggcggcagcagcagcgagcccttcgacagacacgcccccgccatgctgagagagagaggcaccccccccgtggaccccaagctggcctgggtgggcgacgtgttcaccgccacccccgccgagcccagacccctgaccagccccctgagacaggccgccgacgaggacgacaagggcatgagaagcgagaccccccccgtgccccccccccccccctacctggccagctaccccggcttccccgagaacggcgcccccggcccccccatcagcagattccccctggaggagcccggccccagacccctgccctggccccccggcagcgacgaggtggccaagatccagacccccccccccaagaaggagccccccaaggaggagaccgcccagctgaccggccccgaggccggcagaaagcccgccagaggcgtgggcagcggcggccagggcccccccccccccagaagagagagcagaaccgagaccagatggggccccagacccggcagcagcagaagaggcatcccccccgaggagcccggcgccccccccagaagagccggccccatcaagaagccccccccccccaccaaggtggaggagctgccccccaagcccctggagcagggcgacgagacccccaagccccccaagcccgaccccctgaagatcaccaagggcaagctgggcggccccaaggagaccccccccaacggcaacctgagccccgcccccagactgagaagagactacagctacgagagagtgggccccaccagctgcagaggcagaggcagaggcgagtacttcgccagaggcagaggcttcagaggcacctacggcggcagaggcagaggcgccgccggcaacagcgccgtgaccgagagcttcgaggagatgatgggcgtggaggtgggccagggcgaccagaccaccctgctgctgcccgaggccgccctgcccgccagacacggcgccagagtgcagagcatgagaaagagccccagcggcgccggcagcggcgcccagaagcaggccgccagacccatgagagtgatctggctgctgcagaccagaagactgccccaccccagaagagagcacagccccagaagcagaagccccaccaccagaagccccaccttccccgcccccgccagattcacccccggcgtgggcgagagcagcctgcccgagggcatcagccccggccccagaagaagagagcccccccaggtgtgccccggctggagcccccccgccaagagcctggcccccaagaagccccccaccggccccctgccccccagcaaggagcccctgaaggagaagctgatccccggccccctgagccccgtggccagaggcggcagcaacggcggcagcaacgtgggcatggaggacggcgagagacccagaagaagaagacacggcagagcccagcagcaggacaagccccccagattcagaagactgaagcaggagagagagaacgccgccagaggcagcgagggcaagcccagcctgaccctgcccgccagcgcccccggccccgaggaggccctgaccaccgtgaccgtggcccccgcccccagaagagccgccgccaagagccccgacctgagcaaccagaacagcgaccaggccaacgaggagtgggagaccgccagcgagagcagcgacttcaccagcgagagaagaggcgacaaggaggcccccccccccgtgctgctgacccccaaggccgtgggcacccccggcggcggcggcggcggcgccgtgcccggcatcagcgccatgagcagaggcgacctgagccagagagccaaggacctgagcaagagaagcttcagcagccagagacccggcatggagagacagaacagaagacccggccccggcggcaaggccggcagcagcggcagcagcagcggcggcggcggcggcggccccggcggcagaaccggccccggcagaggcgacaagagaagctggcccagccccaagaacagaagcagaccccccgaggagagaccccccggcctgcccctgcccccccccccccccagcagcagcgccgtgttcagactggaccaggtgatccacagcaaccccgccggcatccagcaggccctggcccagctgagcagcagacagggcagcgtgaccgcccccggcggccaccccagacacaagcccggcctgccccaggccccccagggccccagccccagaccccccaccagatacgagccccagagagtgaacagcggcctgagcagcgacccccacttcgaggagcccggccccatggtgagaggcgtgggcggcacccccagagacagcgccggcgtgagccccttcccccccaagagaagagagagaccccccagaaagcccgagctgctgcaggaggagagcctgccccccccccacagcagcggcttcctgggcagcaagcccgagggccccggcccccaggccgagagcagagacaccggcaccgaggccctgaccccccacatctggaacagactgcacaccgccaccagcagaaagagctacagacccagcagcatggagccctggatggagcccctgagccccttcgaggacgtggccggcaccgagatgagccagagcgacagcggcgtggacctgagcggcgacagccaggtgagcagcggcccctgcagccagagaagcagccccgacggcggcctgaagggcgccgccgagggcccccccaagagacccggcggcagcagccccctgaacgccgtgccctgcgagggcccccccggcagcgagccccccagaagacccccccccgccccccacgacggcgacagaaaggagctgcccagagagcagcccctgccccccggccccatcggcaccgagagaagccagagaaccgacagaggcaccgagcccggccccatcagacccagccacagacccggcccccccgtgcagttcggcaccagcgacaaggacagcgacctgagactggtggtgggcgacagcctgaaggccgagaaggagctgaccgccagcgtgaccgaggccatccccgtgagcagagactgggagctgctgcccagcgccgccgccagcgccgagccccagagcaagaacctggacagcggccactgcgtgcccgagcccagcagcagcggccagagactgtaccccgaggtgttctacggcagcgccggccccagcagcagccagatcagcggcggccacggcctgagcatcaccagcaagcagtggagaagacccggcacccccagcctgcacccctacagaagccagcccctgtacctgccccccggccccgccccccccagcgccctgctgagcggcgtggccctgaagggccagttcctggacttcagcaccatgcaggccaccgagctgggcaagctgcccgccggcggcgtgctgtaccccccccccagcttcctgtacagccccgccttctgccccagccccctgcccgacaccagcctgctgcaggtgagacaggacctgcccagccccagcgacttctacagcacccccctgcagcccggcggccagagcggcttcctgcccagcggcgcccccgcccagcagatgctgctgcccatggtggacagccagctgcccgtggtgaacttcggcagcctgccccccgcccccccccccgcccccccccccctgagcctgctgcccgtgggccccgccctgcagccccccagcctggccgtgagacccccccccgcccccgccaccagagtgctgcccagccccgccagacccttccccgccagcctgggcagagccgagctgcaccccgtggagctgaagcccttccaggactaccagaagctgagcagcaacctgggcggccccggcagcagcagaaccccccccaccggcagaagcttcagcggcctgaacagcagactgaaggccacccccagcacctacagcggcgtgttcagaacccagagagtggacctgtaccagcaggccagcccccccgacgccctgagatggatccccaagccctgggagagaaccggccccccccccagagagggccccagcagaagagccgaggagcccggcagcagaggcgacaaggagcccggcctgcccccccccagatag

SEQ ID NO: 94648 - DNA, 1650 bp, synthetic construct
  misc_feature 1..1650: note = Description of Artificial Sequence: Synthetic coding sequence
  source 1..1650: mol_type = other DNA
atgagcgacagaagcggccccaccgccaagggcaaggacggcaagaagtacagcagcctgaacctgttcgacacctacaagggcaagagcctggagatccagaagcccgccgtggcccccagacacggcctgcagagcctgggcaaggtggccatcgccagaagaatgcccccccccgccaacctgcccagcctgaaggccgagaacaagggcaacgaccccaacgtgagcctggtgcccaaggacggcaccggctgggccagcaagcaggagcagagcgaccccaagagcagcgacgccagcaccgcccagccccccgagagccagcccctgcccgccagccagacccccgccagcaaccagcccaagagaccccccgccgcccccgagaacacccccctggtgcccagcggcgtgaagagctgggcccaggccagcgtgacccacggcgcccacggcgacggcggcagagccagcagcctgctgagcagattcagcagagaggagttccccaccctgcaggccgccggcgaccaggacaaggccgccaaggagagagagagcgccgagcagagcagcggccccggccccagcctgagaccccagaacagcaccacctggagagacggcggcggcagaggccccgacgagctggagggccccgacagcaagctgcaccacggccacgaccccagaggcggcctgcagcccagcggccccccccagttccccccctacagaggcatgatgccccccttcatgtaccccccctacctgcccttcccccccccctacggcccccagggcccctacagataccccacccccgacggccccagcagattccccagagtggccggccccagaggcagcggcccccccatgagactggtggagcccgtgggcagacccagcatcctgaaggaggacaacctgaaggagttcgaccagctggaccaggagaacgacgacggctgggccggcgcccacgaggaggtggactacaccgagaagctgaagttcagcgacgaggaggacggcagagacagcgacgaggagggcgccgagggccacagagacagccagagcgccagcggcgaggagagaccccccgaggccgacggcaagaagggcaacagccccaacagcgagccccccacccccaagaccgcctgggccgagaccagcagaccccccgagaccgagcccggcccccccgcccccaagccccccctgccccccccccacagaggccccgccggcaactggggcccccccggcgactaccccgacagaggcggccccccctgcaagccccccgcccccgaggacgaggacgaggcctggagacagagaagaaagcagagcagcagcgagatcagcctggccgtggagagagccagaagaagaagagaggaggaggagagaagaatgcaggaggagagaagagccgcctgcgccgagaagctgaagagactggacgagaagttcggcgcccccgacaagagactgaaggccgagcccgccgccccccccgccgcccccagcacccccgcccccccccccgccgccagcgaggtgcccctgatggaggacagcagaggccagcagagagacccccccagaggcctggaggccccccacccctag

SEQ ID NO: 94649 - DNA, 6417 bp, synthetic construct
  misc_feature 1..6417: note = Description of Artificial Sequence: Synthetic coding sequence
  source 1..6417: mol_type = other DNA
atgagcgacagaagcggccccaccgccaagggcaaggacggcaagaagtacagcagcctgaacctgttcgacacctacaagggcaagagcctggagatccagaagcccgccgtggcccccagacacggcctgcagagcctgggcaaggtggccatcgccagaagaatgcccccccccgccaacctgcccagcctgaaggccgagaacaagggcaacgaccccaacgtgagcctggtgcccaaggacggcaccggctgggccagcaagcaggagcagagcgaccccaagagcagcgacgccagcaccgcccagccccccgagagccagcccctgcccgccagccagacccccgccagcaaccagcccaagagaccccccgccgcccccgagaacacccccctggtgcccagcggcgtgaagagctgggcccaggccagcgtgacccacggcgcccacggcgacggcggcagagccagcagcctgctgagcagattcagcagagaggagttccccaccctgcaggccgccggcgaccaggacaaggccgccaaggagagagagagcgccgagcagagcagcggccccggccccagcctgagaccccagaacagcaccacctggagagacggcggcggcagaggccccgacgagctggagggccccgacagcaagctgcaccacggccacgaccccagaggcggcctgcagcccagcggccccccccagttccccccctacagaggcatgatgccccccttcatgtaccccccctacctgcccttcccccccccctacggcccccagggcccctacagataccccacccccgacggccccagcagattccccagagtggccggccccagaggcagcggcccccccatgagactggtggagcccgtgggcagacccagcatcctgaaggaggacaacctgaaggagttcgaccagctggaccaggagaacgacgacggctgggccggcgcccacgaggaggtggactacaccgagaagctgaagttcagcgacgaggaggacggcagagacagcgacgaggagggcgccgagggccacagagacagccagagcgccagcggcgaggagagaccccccgaggccgacggcaagaagggcaacagccccaacagcgagccccccacccccaagaccgcctgggccgagaccagcagaccccccgagaccgagcccggcccccccgcccccaagccccccctgcccccccccggcgactaccccgacagaggcggccccccctgcaagccccccgcccccgaggacgaggacgaggcctggagacagagaagaaagcagagcagcagcgagatcagcctggccgtggagagagccagaagaagaagagaggaggaggagagaagaatgcaggaggagagaagagccgcctgcgccgagaagctgaagagactggacgagaagttcggcgcccccgacaagagactgaaggccgagcccgccgccccccccgccgcccccagcacccccgcccccccccccgccgtgcccaaggagctgcccgccccccccgcccccccccccgccagcgcccccacccccgagaaggagcccgaggagcccgcccaggccccccccgcccagagcacccccacccccggcgtggccgccgcccccaccctggtgagcggcggcggcagcaccagcagcaccagcagcggcagcttcgaggccagccccgtggagccccagctgcccagcaaggagggccccgagccccccgaggaggtgcccccccccaccaccccccccgtgcccaaggtggagcccaagggcgacggcatcggccccaccagacagccccccagccagggcctgggctaccccaagtaccagaagagcctgccccccagattccagagacagcagcaggagcagctgctgaagcagcagcagcagcaccagtggcagcagcaccagcagggcagcgccccccccacccccgtgccccccagccccccccagcccgtgaccctgggcgccgtgcccgccccccaggcccccccccccccccccaaggccctgtaccccggcgccctgggcagacccccccccatgccccccatgaacttcgaccccagatggatgatgatccccccctacgtggaccccagactgctgcagggcagaccccccctggacttctacccccccggcgtgcaccccagcggcctggtgcccagagagagaagcgacagcggcggcagcagcagcgagcccttcgacagacacgcccccgccatgctgagagagagaggcaccccccccgtggaccccaagctggcctgggtgggcgacgtgttcaccgccacccccgccgagcccagacccctgaccagccccctgagacaggccgccgacgaggacgacaagggcatgagaagcgagaccccccccgtgccccccccccccccctacctggccagctaccccggcttccccgagaacggcgcccccggcccccccatcagcagattccccctggaggagcccggccccagacccctgccctggccccccggcagcgacgaggtggccaagatccagacccccccccccaagaaggagccccccaaggaggagaccgcccagctgaccggccccgaggccggcagaaagcccgccagaggcgtgggcagcggcggccagggcccccccccccccagaagagagagcagaaccgagaccagatggggccccagacccggcagcagcagaagaggcatcccccccgaggagcccggcgccccccccagaagagccggccccatcaagaagccccccccccccaccaaggtggaggagctgccccccaagcccctggagcagggcgacgagacccccaagccccccaagcccgaccccctgaagatcaccaagggcaagctgggcggccccaaggagaccccccccaacggcaacctgagccccgcccccagactgagaagagactacagctacgagagagtgggccccaccagctgcagaggcagaggcagaggcgagtacttcgccagaggcagaggcttcagaggcacctacggcggcagaggcagaggcgccgccggcaacagcgccgtgaccgagagcttcgaggagatgatgggcgtggaggtgggccagggcgaccagaccaccctgctgctgcccgaggccgccctgcccgccagacacggcgccagagtgcagagcatgagaaagagccccagcggcgccggcagcggcgcccagaagcaggccgccagacccatgagagtgatctggctgctgcagaccagaagactgccccaccccagaagagagcacagccccagaagcagaagccccaccaccagaagccccaccttccccgcccccgccagattcacccccggcgtgggcgagagcagcctgcccgagggcatcagccccggccccagaagaagagagcccccccaggtgtgccccggctggagcccccccgccaagagcctggcccccaagaagccccccaccggccccctgccccccagcaaggagcccctgaaggagaagctgatccccggccccctgagccccgtggccagaggcggcagcaacggcggcagcaacgtgggcatggaggacggcgagagacccagaagaagaagacacggcagagcccagcagcaggacaagccccccagattcagaagactgaagcaggagagagagaacgccgccagaggcagcgagggcaagcccagcctgaccctgcccgccagcgcccccggccccgaggaggccctgaccaccgtgaccgtggcccccgcccccagaagagccgccgccaagagccccgacctgagcaaccagaacagcgaccaggccaacgaggagtgggagaccgccagcgagagcagcgacttcaccagcgagagaagaggcgacaaggaggcccccccccccgtgctgctgacccccaaggccgtgggcacccccggcggcggcggcggcggcgccgtgcccggcatcagcgccatgagcagaggcgacctgagccagagagccaaggacctgagcaagagaagcttcagcagccagagacccggcatggagagacagaacagaagacccggccccggcggcaaggccggcagcagcggcagcagcagcggcggcggcggcggcggccccggcggcagaaccggccccggcagaggcgacaagagaagctggcccagccccaagaacagaagcagaccccccgaggagagaccccccggcctgcccctgcccccccccccccccagcagcagcgccgtgttcagactggaccaggtgatccacagcaaccccgccggcatccagcaggccctggcccagctgagcagcagacagggcagcgtgaccgcccccggcggccaccccagacacaagcccggccccccccaggccccccagggccccagccccagaccccccaccagatacgagccccagagagtgaacagcggcctgagcagcgacccccacttcgaggagcccggccccatggtgagaggcgtgggcggcacccccagagacagcgccggcgtgagccccttcccccccaagagaagagagagaccccccagaaagcccgagctgctgcaggaggagagcctgccccccccccacagcagcggcttcctgggcagcaagcccgagggccccggcccccaggccgagagcagagacaccggcaccgaggccctgaccccccacatctggaacagactgcacaccgccaccagcagaaagagctacagacccagcagcatggagccctggatggagcccctgagccccttcgaggacgtggccggcaccgagatgagccagagcgacagcggcgtggacctgagcggcgacagccaggtgagcagcggcccctgcagccagagaagcagccccgacggcggcctgaagggcgccgccgagggcccccccaagagacccggcggcagcagccccctgaacgccgtgccctgcgagggcccccccggcagcgagccccccagaagacccccccccgccccccacgacggcgacagaaaggagctgcccagagagcagcccctgccccccggccccatcggcaccgagagaagccagcacaccgacagaggcaccgagcccggccccatcagacccagccacagacccggcccccccgtgcagttcggcaccagcgacaaggacagcgacctgagactggtggtgggcgacagcctgaaggccgagaaggagctgaccgccagcgtgaccgaggccatccccgtgagcagagactgggagctgctgcccagcgccgccgccagcgccgagccccagagcaagaacctggacagcggccactgcgtgcccgagcccagcagcagcggccagagactgtaccccgaggtgttctacggcagcgccggccccagcagcagccagatcagcggcggccacggcctgagcgtgaccagcaagcagtggagaagacccggcacccccagcctgcacccctacagaagccagcccctgtacctgccccccggccccgccccccccagcgccctgctgagcggcgtggccctgaagggccagttcctggacttcagcaccatgcaggccaccgagctgggcaagctgcccgccggcggcgtgctgtaccccccccccagcttcctgtacagccccgccttctgccccagccccctgcccgacaccagcctgctgcaggtgagacaggacctgcccagccccagcgacttctacagcacccccctgcagcccggcggccagagcggcttcctgcccagcggcgcccccgcccagcagatgctgctgcccatggtggacagccagctgcccgtggtgaacttcggcagcctgccccccgcccccccccccgccccccccagcctgagcctgctgcccgtgggccccgccctgcagccccccagcctggccgtgagacccccccccgcccccgccaccagagtgctgcccagccccgccagacccttccccgccagcctgggcagagccgagctgcaccccgtggagctgaagcccttccaggactaccagaagctgagcagcaacctgggcggccccggcagcagcagaaccccccccaccggcagaagcttcagcggcctgaacagcagactgaaggccacccccagcacctacagcggcgtgttcagaacccagagagtggacctgtaccagcaggccagcccccccgacgccctgagatggatccccaagccctgggagagaaccggccccccccccagagagggccccagcagaagagccgaggagcccggcagcagaggcgacaaggagcccggcctgcccccccccagatag

SEQ ID NO: 94650 - DNA, 6450 bp, synthetic construct
  misc_feature 1..6450: note = Description of Artificial Sequence: Synthetic coding sequence
  source 1..6450: mol_type = other DNA
atgagcgacagaagcggccccaccgccaagggcaaggacggcaagaagtacagcagcctgaacctgttcgacacctacaagggcaagagcctggagatccagaagcccgccgtggcccccagacacggcctgcagagcctgggcaaggtggccatcgccagaagaatgcccccccccgccaacctgcccagcctgaaggccgagaacaagggcaacgaccccaacgtgagcctggtgcccaaggacggcaccggctgggccagcaagcaggagcagagcgaccccaagagcagcgacgccagcaccgcccagccccccgagagccagcccctgcccgccagccagacccccgccagcaaccagcccaagagaccccccgccgcccccgagaacacccccctggtgcccagcggcgtgaagagctgggcccaggccagcgtgacccacggcgcccacggcgacggcggcagagccagcagcctgctgagcagattcagcagagaggagttccccaccctgcaggccgccggcgaccaggacaaggccgccaaggagagagagagcgccgagcagagcagcggccccggccccagcctgagaccccagaacagcaccacctggagagacggcggcggcagaggccccgacgagctggagggccccgacagcaagctgcaccacggccacgaccccagaggcggcctgcagcccagcggccccccccagttccccccctacagaggcatgatgccccccttcatgtaccccccctacctgcccttcccccccccctacggcccccagggcccctacagataccccacccccgacggccccagcagattccccagagtggccggccccagaggcagcggcccccccatgagactggtggagcccgtgggcagacccagcatcctgaaggaggacaacctgaaggagttcgaccagctggaccaggagaacgacgacggctgggccggcgcccacgaggaggtggactacaccgagaagctgaagttcagcgacgaggaggacggcagagacagcgacgaggagggcgccgagggccacagagacagccagagcgccagcggcgaggagagaccccccgaggccgacggcaagaagggcaacagccccaacagcgagccccccacccccaagaccgcctgggccgagaccagcagaccccccgagaccgagcccggcccccccgcccccaagccccccctgccccccccccacagaggccccgccggcaactggggcccccccggcgactaccccgacagaggcggccccccctgcaagccccccgcccccgaggacgaggacgaggcctggagacagagaagaaagcagagcagcagcgagatcagcctggccgtggagagagccagaagaagaagagaggaggaggagagaagaatgcaggaggagagaagagccgcctgcgccgagaagctgaagagactggacgagaagttcggcgcccccgacaagagactgaaggccgagcccgccgccccccccgccgcccccagcacccccgcccccccccccgccgtgcccaaggagctgcccgccccccccgcccccccccccgccagcgcccccacccccgagaaggagcccgaggagcccgcccaggccccccccgcccagagcacccccacccccggcgtggccgccgcccccaccctggtgagcggcggcggcagcaccagcagcaccagcagcggcagcttcgaggccagccccgtggagccccagctgcccagcaaggagggccccgagccccccgaggaggtgcccccccccaccaccccccccgtgcccaaggtggagcccaagggcgacggcatcggccccaccagacagccccccagccagggcctgggctaccccaagtaccagaagagcctgccccccagattccagagacagcagcaggagcagctgctgaagcagcagcagcagcaccagtggcagcagcaccagcagggcagcgccccccccacccccgtgccccccagccccccccagcccgtgaccctgggcgccgtgcccgccccccaggcccccccccccccccccaaggccctgtaccccggcgccctgggcagacccccccccatgccccccatgaacttcgaccccagatggatgatgatccccccctacgtggaccccagactgctgcagggcagaccccccctggacttctacccccccggcgtgcaccccagcggcctggtgcccagagagagaagcgacagcggcggcagcagcagcgagcccttcgacagacacgcccccgccatgctgagagagagaggcaccccccccgtggaccccaagctggcctgggtgggcgacgtgttcaccgccacccccgccgagcccagacccctgaccagccccctgagacaggccgccgacgaggacgacaagggcatgagaagcgagaccccccccgtgccccccccccccccctacctggccagctaccccggcttccccgagaacggcgcccccggcccccccatcagcagattccccctggaggagcccggccccagacccctgccctggccccccggcagcgacgaggtggccaagatccagacccccccccccaagaaggagccccccaaggaggagaccgcccagctgaccggccccgaggccggcagaaagcccgccagaggcgtgggcagcggcggccagggcccccccccccccagaagagagagcagaaccgagaccagatggggccccagacccggcagcagcagaagaggcatcccccccgaggagcccggcgccccccccagaagagccggccccatcaagaagccccccccccccaccaaggtggaggagctgccccccaagcccctggagcagggcgacgagacccccaagccccccaagcccgaccccctgaagatcaccaagggcaagctgggcggccccaaggagaccccccccaacggcaacctgagccccgcccccagactgagaagagactacagctacgagagagtgggccccaccagctgcagaggcagaggcagaggcgagtacttcgccagaggcagaggcttcagaggcacctacggcggcagaggcagaggcgccgccggcaacagcgccgtgaccgagagcttcgaggagatgatgggcgtggaggtgggccagggcgaccagaccaccctgctgctgcccgaggccgccctgcccgccagacacggcgccagagtgcagagcatgagaaagagccccagcggcgccggcagcggcgcccagaagcaggccgccagacccatgagagtgatctggctgctgcagaccagaagactgccccaccccagaagagagcacagccccagaagcagaagccccaccaccagaagccccaccttccccgcccccgccagattcacccccggcgtgggcgagagcagcctgcccgagggcatcagccccggccccagaagaagagagcccccccaggtgtgccccggctggagcccccccgccaagagcctggcccccaagaagccccccaccggccccctgccccccagcaaggagcccctgaaggagaagctgatccccggccccctgagccccgtggccagaggcggcagcaacggcggcagcaacgtgggcatggaggacggcgagagacccagaagaagaagacacggcagagcccagcagcaggacaagccccccagattcagaagactgaagcaggagagagagaacgccgccagaggcagcgagggcaagcccagcctgaccctgcccgccagcgcccccggccccgaggaggccctgaccaccgtgaccgtggcccccgcccccagaagagccgccgccaagagccccgacctgagcaaccagaacagcgaccaggccaacgaggagtgggagaccgccagcgagagcagcgacttcaccagcgagagaagaggcgacaaggaggcccccccccccgtgctgctgacccccaaggccgtgggcacccccggcggcggcggcggcggcgccgtgcccggcatcagcgccatgagcagaggcgacctgagccagagagccaaggacctgagcaagagaagcttcagcagccagagacccggcatggagagacagaacagaagacccggccccggcggcaaggccggcagcagcggcagcagcagcggcggcggcggcggcggccccggcggcagaaccggccccggcagaggcgacaagagaagctggcccagccccaagaacagaagcagaccccccgaggagagaccccccggcctgcccctgcccccccccccccccagcagcagcgccgtgttcagactggaccaggtgatccacagcaaccccgccggcatccagcaggccctggcccagctgagcagcagacagggcagcgtgaccgcccccggcggccaccccagacacaagcccggccccccccaggccccccagggccccagccccagaccccccaccagatacgagccccagagagtgaacagcggcctgagcagcgacccccacttcgaggagcccggccccatggtgagaggcgtgggcggcacccccagagacagcgccggcgtgagccccttcccccccaagagaagagagagaccccccagaaagcccgagctgctgcaggaggagagcctgccccccccccacagcagcggcttcctgggcagcaagcccgagggccccggcccccaggccgagagcagagacaccggcaccgaggccctgaccccccacatctggaacagactgcacaccgccaccagcagaaagagctacagacccagcagcatggagccctggatggagcccctgagccccttcgaggacgtggccggcaccgagatgagccagagcgacagcggcgtggacctgagcggcgacagccaggtgagcagcggcccctgcagccagagaagcagccccgacggcggcctgaagggcgccgccgagggcccccccaagagacccggcggcagcagccccctgaacgccgtgccctgcgagggcccccccggcagcgagccccccagaagacccccccccgccccccacgacggcgacagaaaggagctgcccagagagcagcccctgccccccggccccatcggcaccgagagaagccagcacaccgacagaggcaccgagcccggccccatcagacccagccacagacccggcccccccgtgcagttcggcaccagcgacaaggacagcgacctgagactggtggtgggcgacagcctgaaggccgagaaggagctgaccgccagcgtgaccgaggccatccccgtgagcagagactgggagctgctgcccagcgccgccgccagcgccgagccccagagcaagaacctggacagcggccactgcgtgcccgagcccagcagcagcggccagagactgtaccccgaggtgttctacggcagcgccggccccagcagcagccagatcagcggcggccacggcctgagcgtgaccagcaagcagtggagaagacccggcacccccagcctgcacccctacagaagccagcccctgtacctgccccccggccccgccccccccagcgccctgctgagcggcgtggccctgaagggccagttcctggacttcagcaccatgcaggccaccgagctgggcaagctgcccgccggcggcgtgctgtaccccccccccagcttcctgtacagccccgccttctgccccagccccctgcccgacaccagcctgctgcaggtgagacaggacctgcccagccccagcgacttctacagcacccccctgcagcccggcggccagagcggcttcctgcccagcggcgcccccgcccagcagatgctgctgcccatggtggacagccagctgcccgtggtgaacttcggcagcctgccccccgcccccccccccgccccccccagcctgagcctgctgcccgtgggccccgccctgcagccccccagcctggccgtgagacccccccccgcccccgccaccagagtgctgcccagccccgccagacccttccccgccagcctgggcagagccgagctgcaccccgtggagctgaagcccttccaggactaccagaagctgagcagcaacctgggcggccccggcagcagcagaaccccccccaccggcagaagcttcagcggcctgaacagcagactgaaggccacccccagcacctacagcggcgtgttcagaacccagagagtggacctgtaccagcaggccagcccccccgacgccctgagatggatccccaagccctgggagagaaccggccccccccccagagagggccccagcagaagagccgaggagcccggcagcagaggcgacaaggagcccggcctgcccccccccagatag

SEQ ID NO: 94651 - DNA, 1650 bp, synthetic construct; identical to SEQ ID NO: 94648
  misc_feature 1..1650: note = Description of Artificial Sequence: Synthetic coding sequence
  source 1..1650: mol_type = other DNA

SEQ ID NO: 94652 - DNA, 1650 bp, synthetic construct; identical to SEQ ID NO: 94648
  misc_feature 1..1650: note = Description of Artificial Sequence: Synthetic coding sequence
  source 1..1650: mol_type = other DNA

SEQ ID NO: 94653 - DNA, 4149 bp, synthetic construct
  misc_feature 1..4149: note = Description of Artificial Sequence: Synthetic coding sequence
  source 1..4149: mol_type = other DNA
atgctgagagagagaggcaccccccccgtggaccccaagctggcctgggtgggcgacgtgttcaccgccacccccgccgagcccagacccctgaccagccccctgagacaggccgccgacgaggacgacaagggcatgagaagcgagaccccccccgtgccccccccccccccctacctggccagctaccccggcttccccgagaacggcgcccccggcccccccatcagcagattccccctggaggagcccggccccagacccctgccctggccccccggcagcgacgaggtggccaagatccagacccccccccccaagaaggagccccccaaggaggagaccgcccagctgaccggccccgaggccggcagaaagcccgccagaggcgtgggcagcggcggccagggcccccccccccccagaagagagagcagaaccgagaccagatggggccccagacccggcagcagcagaagaggcatcccccccgaggagcccggcgccccccccagaagagccggccccatcaagaagccccccccccccaccaaggtggaggagctgccccccaagcccctggagcagggcgacgagacccccaagccccccaagcccgaccccctgaagatcaccaagggcaagctgggcggccccaaggagaccccccccaacggcaacctgagccccgcccccagactgagaagagactacagctacgagagagtgggccccaccagctgcagaggcagaggcagaggcgagtacttcgccagaggcagaggcttcagaggcacctacggcggcagaggcagaggcgccagaagcagagagttcagaagctacagagagttcagaggcgacgacggcagaggcggcggcaccggcggccccaaccacccccccgcccccagaggcagaaccgccagcgagaccagaagcgagggcagcgagtacgaggagatccccaagagaagaagacagagaggcagcgagaccggcagcgagacccacgagagcgacctggcccccagcgacaaggaggcccccacccccaaggagggcaccctgacccaggtgcccctggccccccccccccccggcgccccccccagccccgcccccgccagattcaccgccagaggcggcagagtgttcacccccagaggcgtgcccagcagaagaggcagaggcggcggcagaccccccccccaggtgtgccccggctggagcccccccgccaagagcctggcccccaagaagccccccaccggccccctgccccccagcaaggagcccctgaaggagaagctgatccccggccccctgagccccgtggccagaggcggcagcaacggcggcagcaacgtgggcatggaggacggcgagagacccagaagaagaagacacggcagagcccagcagcaggacaagccccccagattcagaagactgaagcaggagagagagaacgccgccagaggcagcgagggcaagcccagcctgaccctgcccgccagcgcccccggccccgaggaggccctgaccaccgtgaccgtggcccccgcccccagaagagccgccgccaagagccccgacctgagcaaccagaacagcgaccaggccaacgaggagtgggagaccgccagcgagagcagcgacttcaccagcgagagaagaggcgacaaggaggcccccccccccgtgctgctgacccccaaggccgtgggcacccccggcggcggcggcggcggcgccgtgcccggcatcagcgccatgagcagaggcgacctgagccagagagccaaggacctgagcaagagaagcttcagcagccagagacccggcatggagagacagaacagaagacccggccccggcggcaaggccggcagcagcggcagcagcagcggcggcggcggcggcggccccggcggcagaaccggccccggcagaggcgacaagagaagctggcccagccccaagaacagaagcagaccccccgaggagagaccccccggcctgcccctgcccccccccccccccagcagcagcgccgtgttcagactggaccaggtgatccacagcaaccccgccggcatccagcaggccctggcccagctgagcagcagacagggcagcgtgaccgcccccggcggccaccccagacacaagcccggccccccccaggccccccagggccccagccccagaccccccaccagatacgagccccagagagtgaacagcggcctgagcagcgacccccacttcgaggagcccggccccatggtgagaggcgtgggcggcacccccagagacagcgccggcgtgagccccttcccccccaagagaagagagagaccccccagaaagcccgagctgctgcaggaggagagcctgccccccccccacagcagcggcttcctgggcagcaagcccgagggccccggcccccaggccgagagcagagacaccggcaccgaggccctgaccccccacatctggaacagactgcacaccgccaccagcagaaagagctacagacccagcagcatggagccctggatggagcccctgagccccttcgaggacgtggccggcaccgagatgagccagagcgacagcggcgtggacctgagcggcgacagccaggtgagcagcggcccctgcagccagagaagcagccccgacggcggcctgaagggcgccgccgagggcccccccaagagacccggcggcagcagccccctgaacgccgtgccctgcgagggcccccccggcagcgagccccccagaagacccccccccgccccccacgacggcgacagaaaggagctgcccagagagcagcccctgccccccggccccatcggcaccgagagaagccagcacaccgacagaggcaccgagcccggccccatcagacccagccacagacccggcccccccgtgcagttcggcaccagcgacaaggacagcgacctgagactggtggtgggcgacagcctgaaggccgagaaggagctgaccgccagcgtgaccgaggccatccccgtgagcagagactgggagctgctgcccagcgccgccgccagcgccgagccccagagcaagaacctggacagcggccactgcgtgcccgagcccagcagcagcggccagagactgtaccccgaggtgttctacggcagcgccggccccagcagcagccagatcagcggcggcgccatggacagccagctgcaccccaacagcggcggcttcagacccggcacccccagcctgcacccctacagaagccagcccctgtacctgccccccggccccgccccccccagcgccctgctgagcggcgtggccctgaagggccagttcctggacttcagcaccatgcaggccaccgagctgggcaagctgcccgccggcggcgtgctgtaccccccccccagcttcctgtacagccccgccttctgccccagccccctgcccgacaccagcctgctgcaggtgagacaggacctgcccagccccagcgacttctacagcacccccctgcagcccggcggccagagcggcttcctgcccagcggcgcccccgcccagcagatgctgctgcccatggtggacagccagctgcccgtggtgaacttcggcagcctgccccccgcccccccccccgccccccccagcctgagcctgctgcccgtgggccccgccctgcagccccccagcctggccgtgagacccccccccgcccccgccaccagagtgctgcccagccccgccagacccttccccgccagcctgggcagagccgagctgcaccccgtggagctgaagcccttccaggactaccagaagctgagcagcaacctgggcggccccggcagcagcagaaccccccccaccggcagaagcttcagcggcctgaacagcagactgaaggccacccccagcacctacagcggcgtgttcagaacccagagagtggacctgtaccagcaggccagcccccccgacgccctgagatggatccccaagccctgggagagaaccggccccccccccagagagggccccagcagaagagccgaggagcccggcagcagaggcgacaaggagcccggcctgcccccccccagatag

SEQ ID NO: 94654 - DNA, 6417 bp, synthetic construct
  misc_feature 1..6417: note = Description of Artificial Sequence: Synthetic coding sequence
  source 1..6417: mol_type = other DNA
atgagcgacagaagcggccccaccgccaagggcaaggacggcaagaagtacagcagcctgaacctgttcgacacctacaagggcaagagcctggagatccagaagcccgccgtggcccccagacacggcctgcagagcctgggcaaggtggccatcgccagaagaatgcccccccccgccaacctgcccagcctgaaggccgagaacaagggcaacgaccccaacgtgagcctggtgcccaaggacggcaccggctgggccagcaagcaggagcagagcgaccccaagagcagcgacgccagcaccgcccagcccctggagagccagcccctgcccgccagccagacccccgccagcaaccagcccaagagaccccccgccgcccccgagaacacccccctggtgcccagcggcgtgaagagctgggcccaggccagcgtgacccacggcgcccacggcgacggcggcagagccagcagcctgctgagcagattcagcagagaggagttccccaccctgcaggccgccggcgaccaggacaaggccgccaaggagagagagagcgccgagcagagcagcggccccggccccagcctgagaccccagaacagcaccacctggagagacggcggcggcagaggccccgacgagctggagggccccgacagcaagctgcaccacggccacgaccccagaggcggcctgcagcccagcggccccccccagttccccccctacagaggcatgatgccccccttcatgtaccccccctacctgcccttcccccccccctacggcccccagggcccctacagataccccacccccgacggccccagcagattccccagagtggccggccccagaggcagcggcccccccatgagactggtggagcccgtgggcagacccagcatcctgaaggaggacaacctgaaggagttcgaccagctggaccaggagaacgacgacggctgggccggcgcccacgaggaggtggactacaccgagaagctgaagttcagcgacgaggaggacggcagagacagcgacgaggagggcgccgagggccacagagacagccagagcgccagcggcgaggagagaccccccgaggccgacggcaagaagggcaacagccccaacagcgagccccccacccccaagaccgcctgggccgagaccagcagaccccccgagaccgagcccggcccccccgcccccaagccccccctgcccccccccggcgactaccccgacagaggcggccccccctgcaagccccccgcccccgaggacgaggacgaggcctggagacagagaagaaagcagagcagcagcgagatcagcctggccgtggagagagccagaagaagaagagaggaggaggagagaagaatgcaggaggagagaagagccgcctgcgccgagaagctgaagagactggacgagaagttcggcgcccccgacaagagactgaaggccgagcccgccgccccccccgccgcccccagcacccccgcccccccccccgccgtgcccaaggagctgcccgccccccccgcccccccccccgccagcgcccccacccccgagaaggagcccgaggagcccgcccaggccccccccgcccagagcacccccacccccggcgtggccgccgcccccaccctggtgagcggcggcggcagcaccagcagcaccagcagcggcagcttcgaggccagccccgtggagccccagctgcccagcaaggagggccccgagccccccgaggaggtgcccccccccaccaccccccccgtgcccaaggtggagcccaagggcgacggcatcggccccaccagacagccccccagccagggcctgggctaccccaagtaccagaagagcctgccccccagattccagagacagcagcaggagcagctgctgaagcagcagcagcagcaccagtggcagcagcaccagcagggcagcgccccccccacccccgtgccccccagccccccccagcccgtgaccctgggcgccgtgcccgccccccaggcccccccccccccccccaaggccctgtaccccggcgccctgggcagacccccccccatgccccccatgaacttcgaccccagatggatgatgatccccccctacgtggaccccagactgctgcagggcagaccccccctggacttctacccccccggcgtgcaccccagcggcctggtgcccagagagagaagcgacagcggcggcagcagcagcgagcccttcgacagacacgcccccgccatgctgagagagagaggcaccccccccgtggaccccaagctggcctgggtgggcgacgtgttcaccgccacccccgccgagcccagacccctgaccagccccctgagacaggccgccgacgaggacgacaagggcatgagaagcgagaccccccccgtgccccccccccccccctacctggccagctaccccggcttccccgagaacggcgcccccggcccccccatcagcagattccccctggaggagcccggccccagacccctgccctggccccccggcagcgacgaggtggccaagatccagacccccccccccaagaaggagccccccaaggaggagaccgcccagctgaccggccccgaggccggcagaaagcccgccagaggcgtgggcagcggcggccagggcccccccccccccagaagagagagcagaaccgagaccagatggggccccagacccggcagcagcagaagaggcatcccccccgaggagcccggcgccccccccagaagagccggccccatcaagaagccccccccccccaccaaggtggaggagctgccccccaagcccctggagcagggcgacgagacccccaagccccccaagcccgaccccctgaagatcaccaagggcaagctgggcggccccaaggagaccccccccaacggcaacctgagccccgcccccagactgagaagagactacagctacgagagagtgggccccaccagctgcagaggcagaggcagaggcgagtacttcgccagaggcagaggcttcagaggcacctacggcggcagaggcagaggcgccgccggcaacagcgccgtgaccgagagcttcgaggagatgatgggcgtggaggtgggccagggcgaccagaccaccctgctgctgcccgaggccgccctgcccgccagacacggcgccagagtgcagagcatgagaaagagccccagcggcgccggcagcggcgcccagaagcaggccgccagacccatgagagtgatctggctgctgcagaccagaagactgccccaccccagaagagagcacagccccagaagcagaagccccaccaccagaagccccaccttccccgcccccgccagattcacccccggcgtgggcgagagcagcctgcccgagggcatcagccccggccccagaagaagagagcccccccaggtgtgccccggctggagcccccccgccaagagcctggcccccaagaagccccccaccggccccctgccccccagcaaggagcccctgaaggagaagctgatccccggccccctgagccccgtggccagaggcggcagcaacggcggcagcaacgtgggcatggaggacggcgagagacccagaagaagaagacacggcagagcccagcagcaggacaagccccccagattcagaagactgaagcaggagagagagaacgccgccagaggcagcgagggcaagcccagcctgaccctgcccgccagcgcccccggccccgaggaggccctgaccaccgtgaccgtggcccccgcccccagaagagccgccgccaagagccccgacctgagcaaccagaacagcgaccaggccaacgaggagtgggagaccgccagcgagagcagcgacttcaccagcgagagaagaggcgacaaggaggcccccccccccgtgctgctgacccccaaggccgtgggcacccccggcggcggcggcggcggcgccgtgcccggcatcagcgccatgagcagaggcgacctgagccagagagccaaggacctgagcaagagaagcttcagcagccagagacccggcatggagagacagaacagaagacccggccccggcggcaaggccggcagcagcggcagcagcagcggcggcggcggcggcggccccggcggcagaaccggccccggcagaggcgacaagagaagctggcccagccccaagaacagaagcagaccccccgaggagagaccccccggcctgcccctgcccccccccccccccagcagcagcgccgtgttcagactggaccaggtgatccacagcaaccccgccggcatccagcaggccctggcccagctgagcagcagacagggcagcgtgaccgcccccggcggccaccccagacacaagcccggccccccccaggccccccagggccccagccccagaccccccaccagatacgagccccagagagtgaacagcggcctgagcagcgacccccacttcgaggagcccggccccatggtgagaggcgtgggcggcacccccagagacagcgccggcgtgagccccttcccccccaagagaagagagagaccccccagaaagcccgagctgctgcaggaggagagcctgccccccccccacagcagcggcttcctgggcagcaagcccgagggccccggcccccaggccgagagcagagacaccggcaccgaggccctgaccccccacatctggaacagactgcacaccgccaccagcagaaagagctacagacccagcagcatggagccctggatggagcccctgagccccttcgaggacgtggccggcaccgagatgagccagagcgacagcggcgtggacctgagcggcgacagccaggtgagcagcggcccctgcagccagagaagcagccccgacggcggcctgaagggcgccgccgagggcccccccaagagacccggcggcagcagccccctgaacgccgtgccctgcgagggcccccccggcagcgagccccccagaagacccccccccgccccccacgacggcgacagaaaggagctgcccagagagcagcccctgccccccggccccatcggcaccgagagaagccagagaaccgacagaggcaccgagcccggccccatcagacccagccacagacccggcccccccgtgcagttcggcaccagcgacaaggacagcgacctgagactggtggtgggcgacagcctgaaggccgagaaggagctgaccgccagcgtgaccgaggccatccccgtgagcagagactgggagctgctgcccagcgccgccgccagcgccgagccccagagcaagaacctggacagcggccactgcgtgcccgagcccagcagcagcggccagagactgtaccccgaggtgttctacggcagcgccggccccagcagcagccagatcagcggcggccacggcctgagcatcaccagcaagcagtggagaagacccggcacccccagcctgcacccctacagaagccagcccctgtacctgccccccggccccgccccccccagcgccctgctgagcggcgtggccctgaagggccagttcctggacttcagcaccatgcaggccaccgagctgggcaagctgcccgccggcggcgtgctgtaccccccccccagcttcctgtacagccccgccttctgccccagccccctgcccgacaccagcctgctgcaggtgagacaggacctgcccagccccagcgacttctacagcacccccctgcagcccggcggccagagcggcttcctgcccagcggcgcccccgcccagcagatgctgctgcccatggtggacagccagctgcccgtggtgaacttcggcagcctgccccccgcccccccccccgcccccccccccctgagcctgctgcccgtgggccccgccctgcagccccccagcctggccgtgagacccccccccgcccccgccaccagagtgctgcccagccccgccagacccttccccgccagcctgggcagagccgagctgcaccccgtggagctgaagcccttccaggactaccagaagctgagcagcaacctgggcggccccggcagcagcagaaccccccccaccggcagaagcttcagcggcctgaacagcagactgaaggccacccccagcacctacagcggcgtgttcagaacccagagagtggacctgtaccagcaggccagcccccccgacgccctgagatggatccccaagccctgggagagaaccggccccccccccagagagggccccagcagaagagccgaggagcccggcagcagaggcgacaaggagcccggcctgcccccccccagatag

SEQ ID NO: 94655 - DNA, 6417 bp, synthetic construct; identical to SEQ ID NO: 94649
  misc_feature 1..6417: note = Description of Artificial Sequence: Synthetic coding sequence
  source 1..6417: mol_type = other DNA

SEQ ID NO: 94656 - DNA, 6417 bp, synthetic construct
  misc_feature 1..6417: note = Description of Artificial Sequence: Synthetic coding sequence
  source 1..6417: mol_type = other DNA
atgagcgacagaagcggccccaccgccaagggcaaggacggcaagaagtacagcagcctgaacctgttcgacacctacaagggcaagagcctggagatccagaagcccgccgtggcccccagacacggcctgcagagcctgggcaaggtggccatcgccagaagaatgcccccccccgccaacctgcccagcctgaaggccgagaacaagggcaacgaccccaacgtgagcctggtgcccaaggacggcaccggctgggccagcaagcaggagcagagcgaccccaagagcagcgacgccagcaccgcccagccccccgagagccagcccctgcccgccagccagacccccgccagcaaccagcccaagagaccccccgccgcccccgagaacacccccctggtgcccagcggcgtgaagagctgggcccaggccagcgtgacccacggcgcccacggcgacggcggcagagccagcagcctgctgagcagattcagcagagaggagttccccaccctgcaggccgccggcgaccaggacaaggccgccaaggagagagagagcgccgagcagagcagcggccccggccccagcctgagaccccagaacagcaccacctggagagacggcggcggcagaggccccgacgagctggagggccccgacagcaagctgcaccacggccacgaccccagaggcggcctgcagcccagcggccccccccagttccccccctacagaggcatgatgccccccttcatgtaccccccctacctgcccttcccccccccctacggcccccagggcccctacagataccccacccccgacggccccagcagattccccagagtggccggccccagaggcagcggcccccccatgagactggtggagcccgtgggcagacccagcatcctgaaggaggacaacctgaaggagttcgaccagctggaccaggagaacgacgacggctgggccggcgcccacgaggaggtggactacaccgagaagctgaagttcagcgacgaggaggacggcagagacagcgacgaggagggcgccgagggccacagagacagccagagcgccagcggcgaggagagaccccccgaggccgacggcaagaagggcaacagccccaacagcgagccccccacccccaagaccgcctgggccgagaccagcagaccccccgagaccgagcccggcccccccgcccccaagccccccctgcccccccccggcgactaccccgacagaggcggccccccctgcaagccccccgcccccgaggacgaggacgaggcctggagacagagaagaaagcagagcagcagcgagatcagcctggccgtggagagagccagaagaagaagagaggaggaggagagaagaatgcaggaggagagaagagccgcctgcgccgagaagctgaagagactggacgagaagttcggcgcccccgacaagagactgaaggccgagcccgccgccccccccgccgcccccagcacccccgcccccccccccgccgtgcccaaggagctgcccgccccccccgcccccccccccgccagcgcccccacccccgagaccgagcccgaggagcccgcccaggccccccccgcccagagcacccccacccccggcgtggccgccgcccccaccctggtgagcggcggcggcagcaccagcagcaccagcagcggcagcttcgaggccagccccgtggagccccagctgcccagcaaggagggccccgagccccccgaggaggtgcccccccccaccaccccccccgtgcccaaggtggagcccaagggcgacggcatcggccccaccagacagccccccagccagggcctgggctaccccaagtaccagaagagcctgccccccagattccagagacagcagcaggagcagctgctgaagcagcagcagcagcaccagtggcagcagcaccagcagggcagcgccccccccacccccgtgccccccagccccccccagcccgtgaccctgggcgccgtgcccgccccccaggcccccccccccccccccaaggccctgtaccccggcgccctgggcagacccccccccatgccccccatgaacttcgaccccagatggatgatgatccccccctacgtggaccccagactgctgcagggcagaccccccctggacttctacccccccggcgtgcaccccagcggcctggtgcccagagagagaagcgacagcggcggcagcagcagcgagcccttcgacagacacgcccccgccatgctgagagagagaggcaccccccccgtggaccccaagctggcctgggtgggcgacgtgttcaccgccacccccgccgagcccagacccctgaccagccccctgagacaggccgccgacgaggacgacaagggcatgagaagcgagaccccccccgtgccccccccccccccctacctggccagctaccccggcttccccgagaacggcgcccccggcccccccatcagcagattccccctggaggagcccggccccagacccctgccctggccccccggcagcgacgaggtggccaagatccagacccccccccccaagaaggagccccccaaggaggagaccgcccagctgaccggccccgaggccggcagaaagcccgccagaggcgtgggcagcggcggccagggcccccccccccccagaagagagagcagaaccgagaccagatggggccccagacccggcagcagcagaagaggcatcccccccgaggagcccggcgccccccccagaagagccggccccatcaagaagccccccccccccaccaaggtggaggagctgccccccaagcccctggagcagggcgacgagacccccaagccccccaagcccgaccccctgaagatcaccaagggcaagctgggcggccccaaggagaccccccccaacggcaacctgagccccgcccccagactgagaagagactacagctacgagagagtgggccccaccagctgcagaggcagaggcagaggcgagtacttcgccagaggcagaggcttcagaggcacctacggcggcagaggcagaggcgccgccggcaacagcgccgtgaccgagagcttcgaggagatgatgggcgtggaggtgggccagggcgaccagaccaccctgctgctgcccgaggccgccctgcccgccagacacggcgccagagtgcagagcatgagaaagagccccagcggcgccggcagcggcgcccagaagcaggccgccagacccatgagagtgatctggctgctgcagaccagaagactgccccaccccagaagagagcacagccccagaagcagaagccccaccaccagaagccccaccttccccgcccccgccagattcacccccggcgtgggcgagagcagcctgcccgagggcatcagccccggccccagaagaagagagcccccccaggtgtgccccggctggagcccccccgccaagagcctggcccccaagaagccccccaccggccccctgccccccagcaaggagcccctgaaggagaagctgatccccggccccctgagccccgtggccagaggcggcagcaacggcggcagcaacgtgggcatggaggacggcgagagacccagaagaagaagacacggcagagcccagcagcaggacaagccccccagattcagaagactgaagcaggagagagagaacgccgccagaggcagcgagggcaagcccagcctgaccctgcccgccagcgcccccggccccgaggaggccctgaccaccgtgaccgtggcccccgcccccagaagagccgccgccaagagccccgacctgagcaaccagaacagcgaccaggccaacgaggagtgggagaccgccagcgagagcagcgacttcaccagcgagagaagaggcgacaaggaggcccccccccccgtgctgctgacccccaaggccgtgggcacccccggcggcggcggcggcggcgccgtgcccggcatcagcgccatgagcagaggcgacctgagccagagagccaaggacctgagcaagagaagcttcagcagccagagacccggcatggagagacagaacagaagacccggccccggcggcaaggccggcagcagcggcagcagcagcggcggcggcggcggcggccccggcggcagaaccggccccggcagaggcgacaagagaagctggcccagccccaagaacagaagcagaccccccgaggagagaccccccggcctgcccctgcccccccccccccccagcagcagcgccgtgttcagactggaccaggtgatccacagcaaccccgccggcatccagcaggccctggcccagctgagcagcagacagggcagcgtgaccgcccccggcggccaccccagacacaagcccggcctgccccaggccccccagggccccagccccagaccccccaccagatacgagccccagagagtgaacagcggcctgagcagcgacccccacttcgaggagcccggccccatggtgagaggcgtgggcggcacccccagagacagcgccggcgtgagccccttcccccccaagagaagagagagaccccccagaaagcccgagctgctgcaggaggagagcctgccccccccccacagcagcggcttcctgggcagcaagcccgagggccccggcccccaggccgagagcagagacaccggcaccgaggccctgaccccccacatctggaacagactgcacaccgccaccagcagaaagagctacagacccagcagcatggagccctggatggagcccctgagccccttcgaggacgtggccggcaccgagatgagccagagcgacagcggcgtggacctgagcggcgacagccaggtgagcagcggcccctgcagccagagaagcagccccgacggcggcctgaagggcgccgccgagggcccccccaagagacccggcggcagcagccccctgaacgccgtgccctgcgagggcccccccggcagcgagccccccagaagacccccccccgccccccacgacggcgacagaaaggagctgcccagagagcagcccctgccccccggccccatcggcaccgagagaagccagagaaccgacagaggcaccgagcccggccccatcagacccagccacagacccggcccccccgtgcagttcggcaccagcgacaaggacagcgacctgagactggtggtgggcgacagcctgaaggccgagaaggagctgaccgccagcgtgaccgaggccatccccgtgagcagagactgggagctgctgcccagcgccgccgccagcgccgagccccagagcaagaacctggacagcggccactgcgtgcccgagcccagcagcagcggccagagactgtaccccgaggtgttctacggcagcgccggccccagcagcagccagatcagcggcggccacggcctgagcatcaccagcaagcagtggagaagacccggcacccccagcctgcacccctacagaagccagcccctgtacctgccccccggccccgccccccccagcgccctgctgagcggcgtggccctgaagggccagttcctggacttcagcaccatgcaggccaccgagctgggcaagctgcccgccggcggcgtgctgtaccccccccccagcttcctgtacagccccgccttctgccccagccccctgcccgacaccagcctgctgcaggtgagacaggacctgcccagccccagcgacttctacagcacccccctgcagcccggcggccagagcggcttcctgcccagcggcgcccccgcccagcagatgctgctgcccatggtggacagccagctgcccgtggtgaacttcggcagcctgccccccgcccccccccccgcccccccccccctgagcctgctgcccgtgggccccgccctgcagccccccagcctggccgtgagacccccccccgcccccgccaccagagtgctgcccagccccgccagacccttccccgccagcctgggcagagccgagctgcaccccgtggagctgaagcccttccaggactaccagaagctgagcagcaacctgggcggccccggcagcagcagaaccccccccaccggcagaagcttcagcggcctgaacagcagactgaaggccacccccagcacctacagcggcgtgttcagaacccagagagtggacctgtaccagcaggccagcccccccgacgccctgagatggatccccaagccctgggagagaaccggccccccccccagagagggccccagcagaagagccgaggagcccggcagcagaggcgacaaggagcccggcctgcccccccccagatag

SEQ ID NO: 94657 - DNA, 6417 bp, synthetic construct; identical to SEQ ID NO: 94649
  misc_feature 1..6417: note = Description of Artificial Sequence: Synthetic coding sequence
  source 1..6417: mol_type = other DNA

SEQ ID NO: 94658 - DNA, 6417 bp, synthetic construct
  misc_feature 1..6417: note = Description of Artificial Sequence: Synthetic coding sequence
  source 1..6417: mol_type = other DNA
atgagcgacagaagcggccccaccgccaagggcaaggacggcaagaagtacagcagcctgaacctgttcgacacctacaagggcaagagcctggagatccagaagcccgccgtggcccccagacacggcctgcagagcctgggcaaggtggccatcgccagaagaatgcccccccccgccaacctgcccagcctgaaggccgagaacaagggcaacgaccccaacgtgagcctggtgcccaaggacggcaccggctgggccagcaagcaggagcagagcgaccccaagagcagcgacgccagcaccgcccagccccccgagagccagcccctgcccgccagccagacccccgccagcaaccagcccaagagaccccccgccgcccccgagaacacccccctggtgcccagcggcgtgaagagctgggcccaggccagcgtgacccacggcgcccacggcgacggcggcagagccagcagcctgctgagcagattcagcagagaggagttccccaccctgcaggccgccggcgaccaggacaaggccgccaaggagagagagagcgccgagcagagcagcggccccggccccagcctgagaccccagaacagcaccacctggagagacggcggcggcagaggccccgacgagctggagggccccgacagcaagctgcaccacggccacgaccccagaggcggcctgcagcccagcggccccccccagttccccccctacagaggcatgatgccccccttcatgtaccccccctacctgcccttcccccccccctacggcccccagggcccctacagataccccacccccgacggccccagcagattccccagagtggccggccccagaggcagcggcccccccatgagactggtggagcccgtgggcagacccagcatcctgaaggaggacaacctgaaggagttcgaccagctggaccaggagaacgacgacggctgggccggcgcccacgaggaggtggactacaccgagaagctgaagttcagcgacgaggaggacggcagagacagcgacgaggagggcgccgagggccacagagacagccagagcgccagcggcgaggagagaccccccgaggccgacggcaagaagggcaacagccccaacagcgagccccccacccccaagaccgcctgggccgagaccagcagaccccccgagaccgagcccggcccccccgcccccaagccccccctgcccccccccggcgactaccccgacagaggcggccccccctgcaagccccccgcccccgaggacgaggacgaggcctggagacagagaagaaagcagagcagcagcgagatcagcctggccgtggagagagccagaagaagaagagaggaggaggagagaagaatgcaggaggagagaagagccgcctgcgccgagaagctgaagagactggacgagaagttcggcgcccccgacaagagactgaaggccgagcccgccgccccccccgccgcccccagcacccccgcccccccccccgccgtgcccaaggagctgcccgccccccccgcccccccccccgccagcgcccccacccccgagaaggagcccgaggagcccgcccaggccccccccgcccagagcacccccacccccggcgtggccgccgcccccaccctggtgagcggcggcggcagcaccagcagcaccagcagcggcagcttcgaggccagccccgtggagccccagctgcccagcaaggagggccccgagccccccgaggaggtgcccccccccaccaccccccccgtgcccaaggtggagcccaagggcgacggcatcggccccaccagacagccccccagccagggcctgggctaccccaagtaccagaagagcctgccccccagattccagagacagcagcaggagcagctgctgaagcagcagcagcagcaccagtggcagcagcaccagcagggcagcgccccccccacccccgtgccccccagccccccccagcccgtgaccctgggcgccgtgcccgccccccaggcccccccccccccccccaaggccctgtaccccggcgccctgggcagacccccccccatgccccccatgaacttcgaccccagatggatgatgatccccccctacgtggaccccagactgctgcagggcagaccccccctggacttctacccccccggcgtgcaccccagcggcctggtgcccagagagagaagcgacagcggcggcagcagcagcgagcccttcgacagacacgcccccgccatgctgagagagagaggcaccccccccgtggaccccaagctggcctgggtgggcgacgtgttcaccgccacccccgccgagcccagacccctgaccagccccctgagacaggccgccgacgaggacgacaagggcatgagaagcgagaccccccccgtgccccccccccccccctacctggccagctaccccggcttccccgagaacggcgcccccggcccccccatcagcagattccccctggaggagcccggccccagacccctgccctggccccccggcagcgacgaggtggccaagatccagacccccccccccaagaaggagccccccaaggaggagaccgcccagctgaccggccccgaggccggcagaaagcccgccagaggcgtgggcagcggcggccagggcccccccccccccagaagagagagcagaaccgagaccagatggggccccagacccggcagcagcagaagaggcatcccccccgaggagcccggcgccccccccagaagagccggccccatcaagaagccccccccccccaccaaggtggaggagctgccccccaagcccctggagcagggcgacgagacccccaagccccccaagcccgaccccctgaagatcaccaagggcaagctgggcggccccaaggagaccccccccaacggcaacctgagccccgcccccagactgagaagagactacagctacgagagagtgggccccaccagctgcagaggcagaggcagaggcgagtacttcgccagaggcagaggcttcagaggcacctacggcggcagaggcagaggcgccgccggcaacagcgccgtgaccgagagcttcgaggagatgatgggcgtggaggtgggccagggcgaccagaccaccctgctgctgcccgaggccgccctgcccgccagacacggcgccagagtgcagagcatgagaaagagccccagcggcgccggcagcggcgcccagaagcaggccgccagacccatgagagtgatctggctgctgcagaccagaagactgccccaccccagaagagagcacagccccagaagcagaagccccaccaccagaagccccaccttccccgcccccgccagattcacccccggcgtgggcgagagcagcctgcccgagggcatcagccccggccccagaagaagagagcccccccaggtgtgccccggctggagcccccccgccaagagcctggcccccaagaagccccccaccggccccctgccccccagcaaggagcccctgaaggagaagctgatccccggccccctgagccccgtggccagaggcggcagcaacggcggcagcaacgtgggcatggaggacggcgagagacccagaagaagaagacacggcagagcccagcagcaggacaagccccccagattcagaagactgaagcaggagagagagaacgccgccagaggcagcgagggcaagcccagcctgaccctgcccgccagcgcccccggccccgaggaggccctgaccaccgtgaccgtggcccccgcccccagaagagccgccgccaagagccccgacctgagcaaccagaacagcgaccaggccaacgaggagtgggagaccgccagcgagagcagcgacttcaccagcgagagaagaggcgacaaggaggcccccccccccgtgctgctgacccccaaggccgtgggcacccccggcggcggcggcggcggcgccgtgcccggcatcagcgccatgagcagaggcgacctgagccagagagccaaggacctgagcaagagaagcttcagcagccagagacccggcatggagagacagaacagaagacccggccccggcggcaaggccggcagcagcggcagcagcagcggcggcggcggcggcggccccggcggcagaaccggccccggcagaggcgacaagagaagctggcccagccccaagaacagaagcagaccccccgaggagagaccccccggcctgcccctgcccccccccccccccagcagcagcgccgtgttcagactggaccaggtgatccacagcaaccccgccggcatccagcaggccctggcccagctgagcagcagacagggcagcgtgaccgcccccggcggccaccccagacacaagcccggccccccccaggccccccagggccccagccccagaccccccaccagatacgagccccagagagtgaacagcggcctgagcagcgacccccacttcgaggagcccggccccatggtgagaggcgtgggcggcacccccagagacagcgccggcgtgagccccttcccccccaagagaagagagagaccccccagaaagcccgagctgctgcaggaggagagcctgccccccccccacagcagcggcttcctgggcagcaagcccgagggccccggcccccaggccgagagcagagacaccggcaccgaggccctgaccccccacatctggaacagactgcacaccgccaccagcagaaagagctacagacccagcagcatggagccctggatggagcccctgagccccttcgaggacgtggccggcaccgagatgagccagagcgacagcggcgtggacctgagcggcgacagccaggtgagcagcggcccctgcagccagagaagcagccccgacggcggcctgaagggcgccgccgagggcccccccaagagacccggcggcagcagccccctgaacgccgtgccctgcgagggcccccccggcagcgagccccccagaagacccccccccgccccccacgacggcgacagaaaggagctgcccagagagcagcccctgccccccggccccatcggcaccgagagaagccagagaaccgacagaggcaccgagcccggccccatcagacccagccacagacccggcccccccgtgcagttcggcaccagcgacaaggacagcgacctgagactggtggtgggcgacagcctgaaggccgagaaggagctgaccgccagcgtgaccgaggccatccccgtgagcagagactgggagctgctgcccagcgccgccgccagcgccgagccccagagcaagaacctggacagcggccactgcgtgcccgagcccagcagcagcggccagagactgtaccccgaggtgttctacggcagcgccggccccagcagcagccagatcagcggcggccacggcctgagcatcaccagcaagcagtggagaagacccggcacccccagcctgcacccctacagaagccagcccctgtacctgccccccggccccgccccccccagcgccctgctgagcggcgtggccctgaagggccagttcctggacttcagcaccatgcaggccaccgagctgggcaagctgcccgccggcggcgtgctgtaccccccccccagcttcctgtacagccccgccttctgccccagccccctgcccgacaccagcctgctgcaggtgagacaggacctgcccagccccagcgacttctacagcacccccctgcagcccggcggccagagcggcttcctgcccagcggcgcccccgcccagcagatgctgctgcccatggtggacagccagctgcccgtggtgaacttcggcagcctgccccccgcccccccccccgcccccccccccctgagcctgctgcccgtgggccccgccctgcagccccccagcctggccgtgagacccccccccgcccccgccaccagagtgctgcccagccccgccagacccttccccgccagcctgggcagagccgagctgcaccccgtggagctgaagcccttccaggactaccagaagctgagcagcaacctgggcggccccggcagcagcagaaccccccccaccggcagaagcttcagcggcctgaacagcagactgaaggccacccccagcacctacagcggcgtgttcagaacccagagagtggacctgtaccagcaggccagcccccccgacgccctgagatggatccccaagccctgggagagaaccggccccccccccagagagggccccagcagaagagccgaggagcccggcagcagaggcgacaaggagcccggcctgcccccccccagatag

SEQ ID NO: 94659 - DNA, 4149 bp, synthetic construct
  misc_feature 1..4149: note = Description of Artificial Sequence: Synthetic coding sequence
  source 1..4149: mol_type = other DNA
atgctgagagagagaggcaccccccccgtggaccccaagctggcctgggtgggcgacgtgttcaccgccacccccgccgagcccagacccctgaccagccccctgagacaggccgccgacgaggacgacaagggcatgagaagcgagaccccccccgtgccccccccccccccctacctggccagctaccccggcttccccgagaacggcgcccccggcccccccatcagcagattccccctggaggagcccggccccagacccctgccctggccccccggcagcgacgaggtggccaagatccagacccccccccccaagaaggagccccccaaggaggagaccgcccagctgaccggccccgaggccggcagaaagcccgccagaggcgtgggcagcggcggccagggcccccccccccccagaagagagagcagaaccgagaccagatggggccccagacccggcagcagcagaagaggcatcccccccgaggagcccggcgccccccccagaagagccggccccatcaagaagccccccccccccaccaaggtggaggagctgccccccaagcccctggagcagggcgacgagacccccaagccccccaagcccgaccccctgaagatcaccaagggcaagctgggcggccccaaggagaccccccccaacggcaacctgagccccgcccccagactgagaagagactacagctacgagagagtgggccccaccagctgcagaggcagaggcagaggcgagtacttcgccagaggcagaggcttcagaggcacctacggcggcagaggcagaggcgccagaagcagagagttcagaagctacagagagttcagaggcgacgacggcagaggcggcggcaccggcggccccaaccacccccccgcccccagaggcagaaccgccagcgagaccagaagcgagggcagcgagtacgaggagatccccaagagaagaagacagagaggcagcgagaccggcagcgagacccacgagagcgacctggcccccagcgacaaggaggcccccacccccaaggagggcaccctgacccaggtgcccctggccccccccccccccggcgccccccccagccccgcccccgccagattcaccgccagaggcggcagagtgttcacccccagaggcgtgcccagcagaagaggcagaggcggcggcagaccccccccccaggtgtgccccggctggagcccccccgccaagagcctggcccccaagaagccccccaccggccccctgccccccagcaaggagcccctgaaggagaagctgatccccggccccctgagccccgtggccagaggcggcagcaacggcggcagcaacgtgggcatggaggacggcgagagacccagaagaagaagacacggcagagcccagcagcaggacaagccccccagattcagaagactgaagcaggagagagagaacgccgccagaggcagcgagggcaagcccagcctgaccctgcccgccagcgcccccggccccgaggaggccctgaccaccgtgaccgtggcccccgcccccagaagagccgccgccaagagccccgacctgagcaaccagaacagcgaccaggccaacgaggagtgggagaccgccagcgagagcagcgacttcaccagcgagagaagaggcgacaaggaggcccccccccccgtgctgctgacccccaaggccgtgggcacccccggcggcggcggcggcggcgccgtgcccggcatcagcgccatgagcagaggcgacctgagccagagagccaaggacctgagcaagagaagcttcagcagccagagacccggcatggagagacagaacagaagacccggccccggcggcaaggccggcagcagcggcagcagcagcggcggcggcggcggcggccccggcggcagaaccggccccggcagaggcgacaagagaagctggcccagccccaagaacagaagcagaccccccgaggagagaccccccggcctgcccctgcccccccccccccccagcagcagcgccgtgttcagactggaccaggtgatccacagcaaccccgccggcatccagcaggccctggcccagctgagcagcagacagggcagcgtgaccgcccccggcggccaccccagacacaagcccggcctgccccaggccccccagggccccagccccagaccccccaccagatacgagccccagagagtgaacagcggcctgagcagcgacccccacttcgaggagcccggccccatggtgagaggcgtgggcggcacccccagagacagcgccggcgtgagccccttcccccccaagagaagagagagaccccccagaaagcccgagctgctgcaggaggagagcctgccccccccccacagcagcggcttcctgggcagcaagcccgagggccccggcccccaggccgagagcagagacaccggcaccgaggccctgaccccccacatctggaacagactgcacaccgccaccagcagaaagagctacagacccagcagcatggagccctggatggagcccctgagccccttcgaggacgtggccggcaccgagatgagccagagcgacagcggcgtggacctgagcggcgacagccaggtgagcagcggcccctgcagccagagaagcagccccgacggcggcctgaagggcgccgccgagggcccccccaagagacccggcggcagcagccccctgaacgccgtgccctgcgagggcccccccggcagcgagccccccagaagacccccccccgccccccacgacggcgacagaaaggagctgcccagagagcagcccctgccccccggccccatcggcaccgagagaagccagagaaccgacagaggcaccgagcccggccccatcagacccagccacagacccggcccccccgtgcagttcggcaccagcgacaaggacagcgacctgagactggtggtgggcgacagcctgaaggccgagaaggagctgaccgccagcgtgaccgaggccatccccgtgagcagagactgggagctgctgcccagcgccgccgccagcgccgagccccagagcaagaacctggacagcggccactgcgtgcccgagcccagcagcagcggccagagactgtaccccgaggtgttctacggcagcgccggccccagcagcagccagatcagcggcggcgccatggacagccagctgcaccccaacagcggcggcttcagacccggcacccccagcctgcacccctacagaagccagcccctgtacctgccccccggccccgccccccccagcgccctgctgagcggcgtggccctgaagggccagttcctggacttcagcaccatgcaggccaccgagctgggcaagctgcccgccggcggcgtgctgtaccccccccccagcttcctgtacagccccgccttctgccccagccccctgcccgacaccagcctgctgcaggtgagacaggacctgcccagccccagcgacttctacagcacccccctgcagcccggcggccagagcggcttcctgcccagcggcgcccccgcccagcagatgctgctgcccatggtggacagccagctgcccgtggtgaacttcggcagcctgccccccgcccccccccccgcccccccccccctgagcctgctgcccgtgggccccgccctgcagccccccagcctggccgtgagacccccccccgcccccgccaccagagtgctgcccagccccgccagacccttccccgccagcctgggcagagccgagctgcaccccgtggagctgaagcccttccaggactaccagaagctgagcagcaacctgggcggccccggcagcagcagaaccccccccaccggcagaagcttcagcggcctgaacagcagactgaaggccacccccagcacctacagcggcgtgttcagaacccagagagtggacctgtaccagcaggccagcccccccgacgccctgagatggatccccaagccctgggagagaaccggccccccccccagagagggccccagcagaagagccgaggagcccggcagcagaggcgacaaggagcccggcctgcccccccccagatag

SEQ ID NO: 94660 - DNA, 6450 bp, synthetic construct
  misc_feature 1..6450: note = Description of Artificial Sequence: Synthetic coding sequence
  source 1..6450: mol_type = other DNA
atgagcgacagaagcggccccaccgccaagggcaaggacggcaagaagtacagcagcctgaacctgttcgacacctacaagggcaagagcctggagatccagaagcccgccgtggcccccagacacggcctgcagagcctgggcaaggtggccatcgccagaagaatgcccccccccgccaacctgcccagcctgaaggccgagaacaagggcaacgaccccaacgtgagcctggtgcccaaggacggcaccggctgggccagcaagcaggagcagagcgaccccaagagcagcgacgccagcaccgcccagccccccgagagccagcccctgcccgccagccagacccccgccagcaaccagcccaagagaccccccgccgcccccgagaacacccccctggtgcccagcggcgtgaagagctgggcccaggccagcgtgacccacggcgcccacggcgacggcggcagagccagcagcctgctgagcagattcagcagagaggagttccccaccctgcaggccgccggcgaccaggacaaggccgccaaggagagagagagcgccgagcagagcagcggccccggccccagcctgagaccccagaacagcaccacctggagagacggcggcggcagaggccccgacgagctggagggccccgacagcaagctgcaccacggccacgaccccagaggcggcctgcagcccagcggccccccccagttccccccctacagaggcatgatgccccccttcatgtaccccccctacctgcccttcccccccccctacggcccccagggcccctacagataccccacccccgacggccccagcagattccccagagtggccggccccagaggcagcggcccccccatgagactggtggagcccgtgggcagacccagcatcctgaaggaggacaacctgaaggagttcgaccagctggaccaggagaacgacgacggctgggccggcgcccacgaggaggtggactacaccgagaagctgaagttcagcgacgaggaggacggcagagacagcgacgaggagggcgccgagggccacagagacagccagagcgccagcggcgaggagagaccccccgaggccgacggcaagaagggcaacagccccaacagcgagccccccacccccaagaccgcctgggccgagaccagcagaccccccgagaccgagcccggcccccccgcccccaagccccccctgccccccccccacagaggccccgccggcaactggggcccccccggcgactaccccgacagaggcggccccccctgcaagccccccgcccccgaggacgaggacgaggcctggagacagagaagaaagcagagcagcagcgagatcagcctggccgtggagagagccagaagaagaagagaggaggaggagagaagaatgcaggaggagagaagagccgcctgcgccgagaagctgaagagactggacgagaagttcggcgcccccgacaagagactgaaggccgagcccgccgccccccccgccgcccccagcacccccgcccccccccccgccgtgcccaaggagctgcccgccccccccgcccccccccccgccagcgcccccacccccgagaaggagcccgaggagcccgcccaggccccccccgcccagagcacccccacccccggcgtggccgccgcccccaccctggtgagcggcggcggcagcaccagcagcaccagcagcggcagcttcgaggccagccccgtggagccccagctgcccagcaaggagggccccgagccccccgaggaggtgcccccccccaccaccccccccgtgcccaaggtggagcccaagggcgacggcatcggccccaccagacagccccccagccagggcctgggctaccccaagtaccagaagagcctgccccccagattccagagacagcagcaggagcagctgctgaagcagcagcagcagcaccagtggcagcagcaccagcagggcagcgccccccccacccccgtgccccccagccccccccagcccgtgaccctgggcgccgtgcccgccccccaggcccccccccccccccccaaggccctgtaccccggcgccctgggcagacccccccccatgccccccatgaacttcgaccccagatggatgatgatccccccctacgtggaccccagactgctgcagggcagaccccccctggacttctacccccccggcgtgcaccccagcggcctggtgcccagagagagaagcgacagcggcggcagcagcagcgagcccttcgacagacacgcccccgccatgctgagagagagaggcaccccccccgtggaccccaagctggcctgggtgggcgacgtgttcaccgccacccccgccgagcccagacccctgaccagccccctgagacaggccgccgacgaggacgacaagggcatgagaagcgagaccccccccgtgccccccccccccccctacctggccagctaccccggcttccccgagaacggcgcccccggcccccccatcagcagattccccctggaggagcccggccccagacccctgccctggccccccggcagcgacgaggtggccaagatccagacccccccccccaagaaggagccccccaaggaggagaccgcccagctgaccggccccgaggccggcagaaagcccgccagaggcgtgggcagcggcggccagggcccccccccccccagaagagagagcagaaccgagaccagatggggccccagacccggcagcagcagaagaggcatcccccccgaggagcccggcgccccccccagaagagccggccccatcaagaagccccccccccccaccaaggtggaggagctgccccccaagcccctggagcagggcgacgagacccccaagccccccaagcccgaccccctgaagatcaccaagggcaagctgggcggccccaaggagaccccccccaacggcaacctgagccccgcccccagactgagaagagactacagctacgagagagtgggccccaccagctgcagaggcagaggcagaggcgagtacttcgccagaggcagaggcttcagaggcacctacggcggcagaggcagaggcgccgccggcaacagcgccgtgaccgagagcttcgaggagatgatgggcgtggaggtgggccagggcgaccagaccaccctgctgctgcccgaggccgccctgcccgccagacacggcgccagagtgcagagcatgagaaagagccccagcggcgccggcagcggcgcccagaagcaggccgccagacccatgagagtgatctggctgctgcagaccagaagactgccccaccccagaagagagcacagccccagaagcagaagccccaccaccagaagccccaccttccccgcccccgccagattcacccccggcgtgggcgagagcagcctgcccgagggcatcagccccggccccagaagaagagagcccccccaggtgtgccccggctggagcccccccgccaagagcctggcccccaagaagccccccaccggccccctgccccccagcaaggagcccctgaaggagaagctgatccccggccccctgagccccgtggccagaggcggcagcaacggcggcagcaacgtgggcatggaggacggcgagagacccagaagaagaagacacggcagagcccagcagcaggacaagccccccagattcagaagactgaagcaggagagagagaacgccgccagaggcagcgagggcaagcccagcctgaccctgcccgccagcgcccccggccccgaggaggccctgaccaccgtgaccgtggcccccgcccccagaagagccgccgccaagagccccgacctgagcaaccagaacagcgaccaggccaacgaggagtgggagaccgccagcgagagcagcgacttcaccagcgagagaagaggcgacaaggaggcccccccccccgtgctgctgacccccaaggccgtgggcacccccggcggcggcggcggcggcgccgtgcccggcatcagcgccatgagcagaggcgacctgagccagagagccaaggacctgagcaagagaagcttcagcagccagagacccggcatggagagacagaacagaagacccggccccggcggcaaggccggcagcagcggcagcagcagcggcggcggcggcggcggccccggcggcagaaccggccccggcagaggcgacaagagaagctggcccagccccaagaacagaagcagaccccccgaggagagaccccccggcctgcccctgcccccccccccccccagcagcagcgccgtgttcagactggaccaggtgatccacagcaaccccgccggcatccagcaggccctggcccagctgagcagcagacagggcagcgtgaccgcccccggcggccaccccagacacaagcccggccccccccaggccccccagggccccagccccagaccccccaccagatacgagccccagagagtgaacagcggcctgagcagcgacccccacttcgaggagcccggccccatggtgagaggcgtgggcggcacccccagagacagcgccggcgtgagccccttcccccccaagagaagagagagaccccccagaaagcccgagctgctgcaggaggagagcctgccccccccccacagcagcggcttcctgggcagcaagcccgagggccccggcccccaggccgagagcagagacaccggcaccgaggccctgaccccccacatctggaacagactgcacaccgccaccagcagaaagagctacagacccagcagcatggagccctggatggagcccctgagccccttcgaggacgtggccggcaccgagatgagccagagcgacagcggcgtggacctgagcggcgacagccaggtgagcagcggcccctgcagccagagaagcagccccgacggcggcctgaagggcgccgccgagggcccccccaagagacccggcggcagcagccccctgaacgccgtgccctgcgagggcccccccggcagcgagccccccagaagacccccccccgccccccacgacggcgacagaaaggagctgcccagagagcagcccctgccccccggccccatcggcaccgagagaagccagagaaccgacagaggcaccgagcccggccccatcagacccagccacagacccggcccccccgtgcagttcggcaccagcgacaaggacagcgacctgagactggtggtgggcgacagcctgaaggccgagaaggagctgaccgccagcgtgaccgaggccatccccgtgagcagagactgggagctgctgcccagcgccgccgccagcgccgagccccagagcaagaacctggacagcggccactgcgtgcccgagcccagcagcagcggccagagactgtaccccgaggtgttctacggcagcgccggccccagcagcagccagatcagcggcggccacggcctgagcatcaccagcaagcagtggagaagacccggcacccccagcctgcacccctacagaagccagcccctgtacctgccccccggccccgccccccccagcgccctgctgagcggcgtggccctgaagggccagttcctggacttcagcaccatgcaggccaccgagctgggcaagctgcccgccggcggcgtgctgtaccccccccccagcttcctgtacagccccgccttctgccccagccccctgcccgacaccagcctgctgcaggtgagacaggacctgcccagccccagcgacttctacagcacccccctgcagcccggcggccagagcggcttcctgcccagcggcgcccccgcccagcagatgctgctgcccatggtggacagccagctgcccgtggtgaacttcggcagcctgccccccgcccccccccccgcccccccccccctgagcctgctgcccgtgggccccgccctgcagccccccagcctggccgtgagacccccccccgcccccgccaccagagtgctgcccagccccgccagacccttccccgccagcctgggcagagccgagctgcaccccgtggagctgaagcccttccaggactaccagaagctgagcagcaacctgggcggccccggcagcagcagaaccccccccaccggcagaagcttcagcggcctgaacagcagactgaaggccacccccagcacctacagcggcgtgttcagaacccagagagtggacctgtaccagcaggccagcccccccgacgccctgagatggatccccaagccctgggagagaaccggccccccccccagagagggccccagcagaagagccgaggagcccggcagcagaggcgacaaggagcccggcctgcccccccccagatag

SEQ ID NO: 94661 - DNA, 6450 bp, synthetic construct
  misc_feature 1..6450: note = Description of Artificial Sequence: Synthetic coding sequence
  source 1..6450: mol_type = other DNA
atgagcgacagaagcggccccaccgccaagggcaaggacggcaagaagtacagcagcctgaacctgttcgacacctacaagggcaagagcctggagatccagaagcccgccgtggcccccagacacggcctgcagagcctgggcaaggtggccatcgccagaagaatgcccccccccgccaacctgcccagcctgaaggccgagaacaagggcaacgaccccaacgtgagcctggtgcccaaggacggcaccggctgggccagcaagcaggagcagagcgaccccaagagcagcgacgccagcaccgcccagcccctggagagccagcccctgcccgccagccagacccccgccagcaaccagcccaagagaccccccgccgcccccgagaacacccccctggtgcccagcggcgtgaagagctgggcccaggccagcgtgacccacggcgcccacggcgacggcggcagagccagcagcctgctgagcagattcagcagagaggagttccccaccctgcaggccgccggcgaccaggacaaggccgccaaggagagagagagcgccgagcagagcagcggccccggccccagcctgagaccccagaacagcaccacctggagagacggcggcggcagaggccccgacgagctggagggccccgacagcaagctgcaccacggccacgaccccagaggcggcctgcagcccagcggccccccccagttccccccctacagaggcatgatgccccccttcatgtaccccccctacctgcccttcccccccccctacggcccccagggcccctacagataccccacccccgacggccccagcagattccccagagtggccggccccagaggcagcggcccccccatgagactggtggagcccgtgggcagacccagcatcctgaaggaggacaacctgaaggagttcgaccagctggaccaggagaacgacgacggctgggccggcgcccacgaggaggtggactacaccgagaagctgaagttcagcgacgaggaggacggcagagacagcgacgaggagggcgccgagggccacagagacagccagagcgccagcggcgaggagagaccccccgaggccgacggcaagaagggcaacagccccaacagcgagccccccacccccaagaccgcctgggccgagaccagcagaccccccgagaccgagcccggcccccccgcccccaagccccccctgccccccccccacagaggccccgccggcaactggggcccccccggcgactaccccgacagaggcggccccccctgcaagccccccgcccccgaggacgaggacgaggcctggagacagagaagaaagcagagcagcagcgagatcagcctggccgtggagagagccagaagaagaagagaggaggaggagagaagaatgcaggaggagagaagagccgcctgcgccgagaagctgaagagactggacgagaagttcggcgcccccgacaagagactgaaggccgagcccgccgccccccccgccgcccccagcacccccgcccccccccccgccgtgcccaaggagctgcccgccccccccgcccccccccccgccagcgcccccacccccgagaaggagcccgaggagcccgcccaggccccccccgcccagagcacccccacccccggcgtggccgccgcccccaccctggtgagcggcggcggcagcaccagcagcaccagcagcggcagcttcgaggccagccccgtggagccccagctgcccagcaaggagggccccgagccccccgaggaggtgcccccccccaccaccccccccgtgcccaaggtggagcccaagggcgacggcatcggccccaccagacagccccccagccagggcctgggctaccccaagtaccagaagagcctgccccccagattccagagacagcagcaggagcagctgctgaagcagcagcagcagcaccagtggcagcagcaccagcagggcagcgccccccccacccccgtgccccccagccccccccagcccgtgaccctgggcgccgtgcccgccccccaggcccccccccccccccccaaggccctgtaccccggcgccctgggcagacccccccccatgccccccatgaacttcgaccccagatggatgatgatccccccctacgtggaccccagactgctgcagggcagaccccccctggacttctacccccccggcgtgcaccccagcggcctggtgcccagagagagaagcgacagcggcggcagcagcagcgagcccttcgacagacacgcccccgccatgctgagagagagaggcaccccccccgtggaccccaagctggcctgggtgggcgacgtgttcaccgccacccccgccgagcccagacccctgaccagccccctgagacaggccgccgacgaggacgacaagggcatgagaagcgagaccccccccgtgccccccccccccccctacctggccagctaccccggcttccccgagaacggcgcccccggcccccccatcagcagattccccctggaggagcccggccccagacccctgccctggccccccggcagcgacgaggtggccaagatccagacccccccccccaagaaggagccccccaaggaggagaccgcccagctgaccggccccgaggccggcagaaagcccgccagaggcgtgggcagcggcggccagggcccccccccccccagaagagagagcagaaccgagaccagatggggccccagacccggcagcagcagaagaggcatcccccccgaggagcccggcgccccccccagaagagccggccccatcaagaagccccccccccccaccaaggtggaggagctgccccccaagcccctggagcagggcgacgagacccccaagccccccaagcccgaccccctgaagatcaccaagggcaagctgggcggccccaaggagaccccccccaacggcaacctgagccccgcccccagactgagaagagactacagctacgagagagtgggccccaccagctgcagaggcagaggcagaggcgagtacttcgccagaggcagaggcttcagaggcacctacggcggcagaggcagaggcgccgccggcaacagcgccgtgaccgagagcttcgaggagatgatgggcgtggaggtgggccagggcgaccagaccaccctgctgctgcccgaggccgccctgcccgccagacacggcgccagagtgcagagcatgagaaagagccccagcggcgccggcagcggcgcccagaagcaggccgccagacccatgagagtgatctggctgctgcagaccagaagactgccccaccccagaagagagcacagccccagaagcagaagccccaccaccagaagccccaccttccccgcccccgccagattcacccccggcgtgggcgagagcagcctgcccgagggcatcagccccggccccagaagaagagagcccccccaggtgtgccccggctggagcccccccgccaagagcctggcccccaagaagccccccaccggccccctgccccccagcaaggagcccctgaaggagaagctgatccccggccccctgagccccgtggccagaggcggcagcaacggcggcagcaacgtgggcatggaggacggcgagagacccagaagaagaagacacggcagagcccagcagcaggacaagccccccagattcagaagactgaagcaggagagagagaacgccgccagaggcagcgagggcaagcccagcctgaccctgcccgccagcgcccccggccccgaggaggccctgaccaccgtgaccgtggcccccgcccccagaagagccgccgccaagagccccgacctgagcaaccagaacagcgaccaggccaacgaggagtgggagaccgccagcgagagcagcgacttcaccagcgagagaagaggcgacaaggaggcccccccccccgtgctgctgacccccaaggccgtgggcacccccggcggcggcggcggcggcgccgtgcccggcatcagcgccatgagcagaggcgacctgagccagagagccaaggacctgagcaagagaagcttcagcagccagagacccggcatggagagacagaacagaagacccggccccggcggcaaggccggcagcagcggcagcagcagcggcggcggcggcggcggccccggcggcagaaccggccccggcagaggcgacaagagaagctggcccagccccaagaacagaagcagaccccccgaggagagaccccccggcctgcccctgcccccccccccccccagcagcagcgccgtgttcagactggaccaggtgatccacagcaaccccgccggcatccagcaggccctggcccagctgagcagcagacagggcagcgtgaccgcccccggcggccaccccagacacaagcccggccccccccaggccccccagggccccagccccagaccccccaccagatacgagccccagagagtgaacagcggcctgagcagcgacccccacttcgaggagcccggccccatggtgagaggcgtgggcggcacccccagagacagcgccggcgtgagccccttcccccccaagagaagagagagaccccccagaaagcccgagctgctgcaggaggagagcctgccccccccccacagcagcggcttcctgggcagcaagcccgagggccccggcccccaggccgagagcagagacaccggcaccgaggccctgaccccccacatctggaacagactgcacaccgccaccagcagaaagagctacagacccagcagcatggagccctggatggagcccctgagccccttcgaggacgtggccggcaccgagatgagccagagcgacagcggcgtggacctgagcggcgacagccaggtgagcagcggcccctgcagccagagaagcagccccgacggcggcctgaagggcgccgccgagggcccccccaagagacccggcggcagcagccccctgaacgccgtgccctgcgagggcccccccggcagcgagccccccagaagacccccccccgccccccacgacggcgacagaaaggagctgcccagagagcagcccctgccccccggccccatcggcaccgagagaagccagagaaccgacagaggcaccgagcccggccccatcagacccagccacagacccggcccccccgtgcagttcggcaccagcgacaaggacagcgacctgagactggtggtgggcgacagcctgaaggccgagaaggagctgaccgccagcgtgaccgaggccatccccgtgagcagagactgggagctgctgcccagcgccgccgccagcgccgagccccagagcaagaacctggacagcggccactgcgtgcccgagcccagcagcagcggccagagactgtaccccgaggtgttctacggcagcgccggccccagcagcagccagatcagcggcggccacggcctgagcatcaccagcaagcagtggagaagacccggcacccccagcctgcacccctacagaagccagcccctgtacctgccccccggccccgccccccccagcgccctgctgagcggcgtggccctgaagggccagttcctggacttcagcaccatgcaggccaccgagctgggcaagctgcccgccggcggcgtgctgtaccccccccccagcttcctgtacagccccgccttctgccccagccccctgcccgacaccagcctgctgcaggtgagacaggacctgcccagccccagcgacttctacagcacccccctgcagcccggcggccagagcggcttcctgcccagcggcgcccccgcccagcagatgctgctgcccatggtggacagccagctgcccgtggtgaacttcggcagcctgccccccgcccccccccccgcccccccccccctgagcctgctgcccgtgggccccgccctgcagccccccagcctggccgtgagacccccccccgcccccgccaccagagtgctgcccagccccgccagacccttccccgccagcctgggcagagccgagctgcaccccgtggagctgaagcccttccaggactaccagaagctgagcagcaacctgggcggccccggcagcagcagaaccccccccaccggcagaagcttcagcggcctgaacagcagactgaaggccacccccagcacctacagcggcgtgttcagaacccagagagtggacctgtaccagcaggccagcccccccgacgccctgagatggatccccaagccctgggagagaaccggccccccccccagagagggccccagcagaagagccgaggagcccggcagcagaggcgacaaggagcccggcctgcccccccccagatag

SEQ ID NO: 94662 - DNA, 4149 bp, synthetic construct
  misc_feature 1..4149: note = Description of Artificial Sequence: Synthetic coding sequence
  source 1..4149: mol_type = other DNA
atgctgagagagagaggcaccccccccgtggaccccaagctggcctgggtgggcgacgtgttcaccgccacccccgccgagcccagacccctgaccagccccctgagacaggccgccgacgaggacgacaagggcatgagaagcgagaccccccccgtgccccccccccccccctacctggccagctaccccggcttccccgagaacggcgcccccggcccccccatcagcagattccccctggaggagcccggccccagacccctgccctggccccccggcagcgacgaggtggccaagatccagacccccccccccaagaaggagccccccaaggaggagaccgcccagctgaccggccccgaggccggcagaaagcccgccagaggcgtgggcagcggcggccagggcccccccccccccagaagagagagcagaaccgagaccagatggggccccagacccggcagcagcagaagaggcatcccccccgaggagcccggcgccccccccagaagagccggccccatcaagaagccccccccccccaccaaggtggaggagctgccccccaagcccctggagcagggcgacgagacccccaagccccccaagcccgaccccctgaagatcaccaagggcaagctgggcggccccaaggagaccccccccaacggcaacctgagccccgcccccagactgagaagagactacagctacgagagagtgggccccaccagctgcagaggcagaggcagaggcgagtacttcgccagaggcagaggcttcagaggcacctacggcggcagaggcagaggcgccagaagcagagagttcagaagctacagagagttcagaggcgacgacggcagaggcggcggcaccggcggccccaaccacccccccgcccccagaggcagaaccgccagcgagaccagaagcgagggcagcgagtacgaggagatccccaagagaagaagacagagaggcagcgagaccggcagcgagacccacgagagcgacctggcccccagcgacaaggaggcccccacccccaaggagggcaccctgacccaggtgcccctggccccccccccccccggcgccccccccagccccgcccccgccagattcaccgccagaggcggcagagtgttcacccccagaggcgtgcccagcagaagaggcagaggcggcggcagaccccccccccaggtgtgccccggctggagcccccccgccaagagcctggcccccaagaagccccccaccggccccctgccccccagcaaggagcccctgaaggagaagctgatccccggccccctgagccccgtggccagaggcggcagcaacggcggcagcaacgtgggcatggaggacggcgagagacccagaagaagaagacacggcagagcccagcagcaggacaagccccccagattcagaagactgaagcaggagagagagaacgccgccagaggcagcgagggcaagcccagcctgaccctgcccgccagcgcccccggccccgaggaggccctgaccaccgtgaccgtggcccccgcccccagaagagccgccgccaagagccccgacctgagcaaccagaacagcgaccaggccaacgaggagtgggagaccgccagcgagagcagcgacttcaccagcgagagaagaggcgacaaggaggcccccccccccgtgctgctgacccccaaggccgtgggcacccccggcggcggcggcggcggcgccgtgcccggcatcagcgccatgagcagaggcgacctgagccagagagccaaggacctgagcaagagaagcttcagcagccagagacccggcatggagagacagaacagaagacccggccccggcggcaaggccggcagcagcggcagcagcagcggcggcggcggcggcggccccggcggcagaaccggccccggcagaggcgacaagagaagctggcccagccccaagaacagaagcagaccccccgaggagagaccccccggcctgcccctgcccccccccccccccagcagcagcgccgtgttcagactggaccaggtgatccacagcaaccccgccggcatccagcaggccctggcccagctgagcagcagacagggcagcgtgaccgcccccggcggccaccccagacacaagcccggccccccccaggccccccagggccccagccccagaccccccaccagatacgagccccagagagtgaacagcggcctgagcagcgacccccacttcgaggagcccggccccatggtgagaggcgtgggcggcacccccagagacagcgccggcgtgagccccttcccccccaagagaagagagagaccccccagaaagcccgagctgctgcaggaggagagcctgccccccccccacagcagcggcttcctgggcagcaagcccgagggccccggcccccaggccgagagcagagacaccggcaccgaggccctgaccccccacatctggaacagactgcacaccgccaccagcagaaagagctacagacccagcagcatggagccctggatggagcccctgagccccttcgaggacgtggccggcaccgagatgagccagagcgacagcggcgtggacctgagcggcgacagccaggtgagcagcggcccctgcagccagagaagcagccccgacggcggcctgaagggcgccgccgagggcccccccaagagacccggcggcagcagccccctgaacgccgtgccctgcgagggcccccccggcagcgagccccccagaagacccccccccgccccccacgacggcgacagaaaggagctgcccagagagcagcccctgccccccggccccatcggcaccgagagaagccagagaaccgacagaggcaccgagcccggccccatcagacccagccacagacccggcccccccgtgcagttcggcaccagcgacaaggacagcgacctgagactggtggtgggcgacagcctgaaggccgagaaggagctgaccgccagcgtgaccgaggccatccccgtgagcagagactgggagctgctgcccagcgccgccgccagcgccgagccccagagcaagaacctggacagcggccactgcgtgcccgagcccagcagcagcggccagagactgtaccccgaggtgttctacggcagcgccggccccagcagcagccagatcagcggcggcgccatggacagccagctgcaccccaacagcggcggcttcagacccggcacccccagcctgcacccctacagaagccagcccctgtacctgccccccggccccgccccccccagcgccctgctgagcggcgtggccctgaagggccagttcctggacttcagcaccatgcaggccaccgagctgggcaagctgcccgccggcggcgtgctgtaccccccccccagcttcctgtacagccccgccttctgccccagccccctgcccgacaccagcctgctgcaggtgagacaggacctgcccagccccagcgacttctacagcacccccctgcagcccggcggccagagcggcttcctgcccagcggcgcccccgcccagcagatgctgctgcccatggtggacagccagctgcccgtggtgaacttcggcagcctgccccccgcccccccccccgcccccccccccctgagcctgctgcccgtgggccccgccctgcagccccccagcctggccgtgagacccccccccgcccccgccaccagagtgctgcccagccccgccagacccttccccgccagcctgggcagagccgagctgcaccccgtggagctgaagcccttccaggactaccagaagctgagcagcaacctgggcggccccggcagcagcagaaccccccccaccggcagaagcttcagcggcctgaacagcagactgaaggccacccccagcacctacagcggcgtgttcagaacccagagagtggacctgtaccagcaggccagcccccccgacgccctgagatggatccccaagccctgggagagaaccggccccccccccagagagggccccagcagaagagccgaggagcccggcagcagaggcgacaaggagcccggcctgcccccccccagatag

SEQ ID NO: 94663 - DNA, 4149 bp, synthetic construct; identical to SEQ ID NO: 94662
  misc_feature 1..4149: note = Description of Artificial Sequence: Synthetic coding sequence
  source 1..4149: mol_type = other DNA

SEQ ID NO: 94664 - DNA, 6450 bp, synthetic construct; identical to SEQ ID NO: 94650
  misc_feature 1..6450: note = Description of Artificial Sequence: Synthetic coding sequence
  source 1..6450: mol_type = other DNA

SEQ ID NO: 94665 - DNA, 4149 bp, synthetic construct; identical to SEQ ID NO: 94653
  misc_feature 1..4149: note = Description of Artificial Sequence: Synthetic coding sequence
  source 1..4149: mol_type = other DNA

SEQ ID NO: 94666 - DNA, 6450 bp, synthetic construct; identical to SEQ ID NO: 94650
  misc_feature 1..6450: note = Description of Artificial Sequence: Synthetic coding sequence
  source 1..6450: mol_type = other DNA

SEQ ID NO: 94667 - DNA, 1650 bp, synthetic construct; identical to SEQ ID NO: 94648
  misc_feature 1..1650: note = Description of Artificial Sequence: Synthetic coding sequence
  source 1..1650: mol_type = other DNA

SEQ ID NO: 94668 - DNA, 1650 bp, synthetic construct; identical to SEQ ID NO: 94648
  misc_feature 1..1650: note = Description of Artificial Sequence: Synthetic coding sequence
  source 1..1650: mol_type = other DNA

SEQ ID NO: 94669 - DNA, 4149 bp, synthetic construct; identical to SEQ ID NO: 94653
  misc_feature 1..4149: note = Description of Artificial Sequence: Synthetic coding sequence
  source 1..4149: mol_type = other DNA

SEQ ID NO: 94670 - DNA, 984 bp, synthetic construct
  misc_feature 1..984: note = Description of Artificial Sequence: Synthetic coding sequence
  source 1..984: mol_type = other DNA
atgaccgtggtgagcgtgccccagagagagcccctggtgctgggcggcagactggcccccctgggcttcagcagcagaggctacttcggcgccctgcccatggtgaccaccgcccccccccccctgcccagaatccccgaccccagagccctgccccccaccctgttcctgccccacttcctgggcggcgacggcccctgcctgaccccccagcccagagcccccgccgccctgcccaacagaagcctggccgtggccggcggcacccccagagccgcccccaagaagagaagaaagaagaaggtgagagccagccccgccggccagctgcccagcagattccaccagtaccagcagcacagacccagcctggagggcggcagaagccccgccaccggccccagcggcgcccaggaggtgcccggccccgccgccgccctggcccccagccccgccgccgccgccggcaccgagggcgccagccccgacctggcccccctgagacccgccgcccccggccagacccccctgagaaaggaggtgctgaagagcaagatgggcaagagcgagaagatcgccctgccccacggccagctggtgcacggcatccacctgtacgagcagcccaagatcaacagacagaagagcaagtacaacctgcccctgaccaagatcaccagcgccaagagaaacgagaacaacttctggcaggacagcgtgagcagcgacagaatccagaagcaggagaagaagcccttcaagaacaccgagaacatcaagaacagccacctgaagaagagcgccttcctgaccgaggtgagccagaaggagaactacgccggcgccaagttcagcgacccccccagccccagcgtgctgcccaagccccccagccactggatgggcagcaccgtggagaacagcaaccagaacagagagctgatggccgtgcacctgaagaccctgctgaaggtgcagacctag

SEQ ID NO: 94671 - DNA, 429 bp, synthetic construct
  misc_feature 1..429: note = Description of Artificial Sequence: Synthetic coding sequence
  source 1..429: mol_type = other DNA
atgggcaagagcgagaagatcgccctgccccacggccagctggtgcacggcatccacctgtacgagcagcccaagatcaacagacagaagagcaagtacaacctgcccctgaccaagatcaccagcgccaagagaaacgagaacaacttctggcaggacagcgtgagcagcgacagaatccagaagcaggagaagaagcccttcaagaacaccgagaacatcaagaacagccacctgaagaagagcgccttcctgaccgaggtgagccagaaggagaactacgccggcgccaagttcagcgacccccccagccccagcgtgctgcccaagccccccagccactggatgggcagcaccgtggagaacagcaaccagaacagagagctgatggccgtgcacctgaagaccctgctgaaggtgcagacctag

SEQ ID NO: 94672 - DNA, 429 bp, synthetic construct; identical to SEQ ID NO: 94671
  misc_feature 1..429: note = Description of Artificial Sequence: Synthetic coding sequence
  source 1..429: mol_type = other DNA

SEQ ID NO: 94673 - DNA, 420 bp, synthetic construct
  misc_feature 1..420: note = Description of Artificial Sequence: Synthetic coding sequence
  source 1..420: mol_type = other DNA
atgggcggcggcgagagatacaacatccccgccccccagagcagaaacgtgagcaagaaccagcagcagctgaacagacagaagaccaaggagcagaacagccagatgaagatcgtgcacaagaagaaggagagaggccacggctacaacagcagcgccgccgcctggcaggccatgcagaacggcggcaagaacaagaacttccccaacaaccagagctggaacagcagcctgagcggccccagactgctgttcaagagccaggccaaccagaactacgccggcgccaagttcagcgagccccccagccccagcgtgctgcccaagccccccagccactgggtgcccgtgagcttcaaccccagcgacaaggagatcatgaccttccagctgaagaccctgctgaaggtgcaggtgtag

SEQ ID NO: 94674 - DNA, 420 bp, synthetic construct; identical to SEQ ID NO: 94673
  misc_feature 1..420: note = Description of Artificial Sequence: Synthetic coding sequence
  source 1..420: mol_type = other DNA

SEQ ID NO: 94675 - DNA, 597 bp, synthetic construct
  misc_feature 1..597: note = Description of Artificial Sequence: Synthetic coding sequence
  source 1..597: mol_type = other DNA
atgctgctgatcctgctgagcgtggccctgctggccctgagcagcgcccagaacctgaacgaggacgtgagccaggaggagagccccagcctgatcgccggcaacccccagggccccagcccccagggcggcaacaagccccagggccccccccccccccccggcaagccccagggcccccccccccagggcggcaacaagccccagggcccccccccccccggcaagccccagggcccccccccccagggcgacaagagcagaagccccagaagcccccccggcaagccccagggcccccccccccagggcggcaagccccagggcccccccccccagggcggcaacaagccccagggcccccccccccccggcaagccccagggcccccccgcccagggcggcagcaagagccagagcgccagaagcccccccggcaagccccagggccccccccagcaggagggcaacaacccccagggcccccccccccccgccggcggcaacccccagcagccccaggccccccccgccggccagccccagggcccccccagacccccccagggcggcagacccagcagacccccccagtag

SEQ ID NO: 94676 - DNA, 537 bp, synthetic construct
  misc_feature 1..537: note = Description of Artificial Sequence: Synthetic coding sequence
  source 1..537: mol_type = other DNA
atgctgctgatcctgctgagcgtggccctgctggccctgagcagcgcccagaacctgaacgaggacgtgagccaggaggagagccccagcctgatcgccggcaacccccagggccccagcccccagggcggcaacaagccccagggccccccccccccccccggcaagccccagggcccccccccccagggcggcaacaagccccagggcccccccccccccggcaagccccagggcccccccccccagggcgacaagagcagaagccccagaagcccccccggcaagccccagggcccccccccccagggcggcaagccccagggcccccccgcccagggcggcagcaagagccagagcgccagaagcccccccggcaagccccagggccccccccagcaggagggcaacaacccccagggcccccccccccccgccggcggcaacccccagcagccccaggccccccccgccggccagccccagggcccccccagacccccccagggcggcagacccagcagacccccccagtag

SEQ ID NO: 94677 - DNA, 597 bp, synthetic construct; identical to SEQ ID NO: 94675
  misc_feature 1..597: note = Description of Artificial Sequence: Synthetic coding sequence
  source 1..597: mol_type = other DNA

SEQ ID NO: 94678 - DNA, 1251 bp, synthetic construct
  misc_feature 1..1251: note = Description of Artificial Sequence: Synthetic coding sequence
  source 1..1251: mol_type = other DNA
atgctgctgatcctgctgagcgtggccctgctggccctgagcagcgcccagaacctgaacgaggacgtgagccaggaggagagccccagcctgatcgccggcaacccccagggcgcccccccccagggcggcaacaagccccagggcccccccagcccccccggcaagccccagggcccccccccccagggcggcaaccagccccagggccccccccccccccccggcaagccccagggcccccccccccagggcggcaacaagccccagggcccccccccccccggcaagccccagggcccccccccccagggcgacaagagcagaagccccagaagcccccccggcaagccccagggcccccccccccagggcggcaaccagccccagggccccccccccccccccggcaagccccagggcccccccccccagggcggcaacaagccccagggcccccccccccccggcaagccccagggcccccccccccagggcgacaacaagagcagaagcagcagaagcccccccggcaagccccagggcccccccccccagggcggcaaccagccccagggccccccccccccccccggcaagccccagggcccccccccccagggcggcaacaagccccagggcccccccccccccggcaagccccagggcccccccccccagggcgacaacaagagccagagcgccagaagcccccccggcaagccccagggcccccccccccagggcggcaaccagccccagggccccccccccccccccggcaagccccagggcccccccccccagggcggcaacaagccccagggcccccccccccccggcaagccccagggcccccccccccagggcggcagcaagagcagaagcagcagaagcccccccggcaagccccagggcccccccccccagggcggcaaccagccccagggccccccccccccccccggcaagccccagggcccccccccccagggcggcaacaagccccagggcccccccccccccggcaagccccagggcccccccccccagggcggcagcaagagcagaagcgccagaagcccccccggcaagccccagggccccccccagcaggagggcaacaacccccagggcccccccccccccgccggcggcaacccccagcagccccaggccccccccgccggccagccccagggcccccccagacccccccagggcggcagacccagcagacccccccagtag

SEQ ID NO: 94679 - DNA, 744 bp, synthetic construct
  misc_feature 1..744: note = Description of Artificial Sequence: Synthetic coding sequence
  source 1..744: mol_type = other DNA
atgctgctgatcctgctgagcgtggccctgctggccctgagcagcgccgagagcagcagcgaggacgtgagccaggaggagagcctgttcctgatcagcggcaagcccgagggcagaagaccccagggcggcaaccagccccagagacccccccccccccccggcaagccccagggcccccccccccagggcggcaaccagagccagggccccccccccccccccggcaagcccgagggcagacccccccagggcggcaaccagagccagggcccccccccccaccccggcaagcccgagagaccccccccccagggcggcaaccagagccagggcaccccccccccccccggcaagcccgagagaccccccccccagggcggcaaccagagccacagacccccccccccccccggcaagcccgagagaccccccccccagggcggcaaccagagccagggcccccccccccaccccggcaagcccgagggcccccccccccaggagggcaacaagagcagaagcgccagaagcccccccggcaagccccagggccccccccagcaggagggcaacaagccccagggcccccccccccccggcaagccccagggccccccccccgccggcggcaacccccagcagccccaggccccccccgccggcaagccccagggcccccccccccccccccagggcggcagaccccccagacccgcccagggccagcagcccccccagtag

SEQ ID NO: 94680 - DNA, 744 bp, synthetic construct; identical to SEQ ID NO: 94679
  misc_feature 1..744: note = Description of Artificial Sequence: Synthetic coding sequence
  source 1..744: mol_type = other DNA

SEQ ID NO: 94681 - DNA, 537 bp, synthetic construct
  misc_feature 1..537: note = Description of Artificial Sequence: Synthetic coding sequence
  source 1..537: mol_type = other DNA
atgctgctgatcctgctgagcgtggccctgctggccctgagcagcgccgagagcagcagcgaggacgtgagccaggaggagagcctgttcctgatcagcggcaagcccgagggcagaagaccccagggcggcaaccagccccagagacccccccccccccccggcaagccccagggcccccccccccagggcggcaaccagagccagggccccccccccccccccggcaagcccgagggcagacccccccagggcggcaaccagagccagggcccccccccccaccccggcaagcccgagagaccccccccccagggcggcaaccagagccagggcaagccccagggccccccccagcaggagggcaacaagccccagggcccccccccccccggcaagccccagggccccccccccgccggcggcaacccccagcagccccaggccccccccgccggcaagccccagggcccccccccccccccccagggcggcagaccccccagacccgcccagggccagcagcccccccagtag

SEQ ID NO: 94682 - DNA, 501 bp, synthetic construct
  misc_feature 1..501: note = Description of Artificial Sequence: Synthetic coding sequence
  source 1..501: mol_type = other DNA
atgctgctgatcctgctgagcgtggccctgctggccttcagcagcgcccaggacctgaacgaggacgtgagccaggaggacgtgcccctggtgatcagcgacggcggcgacagcgagcagttcctggacgaggagagacagggcccccccctgggcggccagcagagccagcccagcgccggcgacggcaaccaggacgacggcccccagcagggccccccccagcagggcggccagcagcagcagggccccccccccccccagggcaagccccagggccccccccagcagggcggccaccccccccccccccagggcagaccccagggccccccccagcagggcggccaccccagaccccccagaggcagaccccagggccccccccagcagggcggccaccagcagggcccccccccccccccccccggcaagccccagggcccccccccccagggcggcagaccccagggccccccccagggccagagcccccagtag

SEQ ID NO: 94683 - DNA, 291 bp, synthetic construct
  misc_feature 1..291: note = Description of Artificial Sequence: Synthetic coding sequence
  source 1..291: mol_type = other DNA
atgctgctgatcctgctgagcgtggccctgctggccttcagcagcgcccaggacctggacgaggacgtgagccaggaggacgtgcccctggtgatcagcgacggcggcgacagcgagcagttcatcgacgaggagggccacaaggaccaccccaacagagaggccatcagcaaggtgctgccccacctgctgctggagagccccagagaccacctgcccaagggcgccgcccacaaggacctgcacagaggcagcctgctgagcaacctgggcttcaacgacagaaagtag

SEQ ID NO: 94684 - DNA, 501 bp, synthetic construct
  misc_feature 1..501: note = Description of Artificial Sequence: Synthetic coding sequence
  source 1..501: mol_type = other DNA
atgctgctgatcctgctgagcgtggccctgctggccttcagcagcgcccaggacctggacgaggacgtgagccaggaggacgtgcccctggtgatcagcgacggcggcgacagcgagcagttcatcgacgaggagagacagggcccccccctgggcggccagcagagccagcccagcgccggcgacggcaaccagaacgacggcccccagcagggccccccccagcagggcggccagcagcagcagggccccccccccccccagggcaagccccagggccccccccagcagggcggccaccccccccccccccagggcagaccccagggccccccccagcagggcggccaccccagaccccccagaggcagaccccagggccccccccagcagggcggccaccagcagggcccccccccccccccccccggcaagccccagggcccccccccccagggcggcagaccccagggccccccccagggccagagcccccagtag

SEQ ID NO: 94685 - DNA, 501 bp, synthetic construct; identical to SEQ ID NO: 94684
  misc_feature 1..501: note = Description of Artificial Sequence: Synthetic coding sequence
  source 1..501: mol_type = other DNA

SEQ ID NO: 94686 - DNA, 900 bp, synthetic construct
  misc_feature 1..900: note = Description of Artificial Sequence: Synthetic coding sequence
  source 1..900: mol_type = other DNA
atggccgccagcagcagcgagatcagcgagatgaagggcgtggaggagagccccaaggtgcccggcgagggccccggccacagcgaggccgagaccggccccccccaggtgctggccggcgtgcccgaccagcccgaggccccccagcccggccccaacaccaccgccgcccccgtggacagcggccccaaggccggcctggcccccgagaccaccgagacccccgccggcgccagcgagaccgcccaggccaccgacctgagcctgagccccggcggcgagagcaaggccaactgcagccccgaggacccctgccaggagaccgtgagcaagcccgaggtgagcaaggaggccaccgccgaccagggcagcagactggagagcgccgccccccccgagcccgcccccgagcccgccccccagcccgaccccagacccgacagccagcccacccccaagcccgccctgcagcccgagctgcccacccaggaggaccccacccccgagatcctgagcgagagcgtgggcgagaagcaggagaacggcgccgtggtgcccctgcaggccggcgacggcgaggagggccccgcccccgagccccacagcccccccagcaagaagagcccccccgccaacggcgccccccccagagtgctgcagcagctggtggaggaggacagaatgagaagagcccacagcggccaccccggcagccccagaggcagcctgagcagacaccccagcagccagctggccggccccggcgtggagggcggcgagggcacccagaagcccagagactacatcatcctggccatcctgagctgcttctgccccatgtggcccgtgaacatcgtggccttcgcctacgccgtgatggtgagccccatgggcccctag

SEQ ID NO: 94687 - DNA, 1023 bp, synthetic construct
  misc_feature 1..1023: note = Description of Artificial Sequence: Synthetic coding sequence
  source 1..1023: mol_type = other DNA
atggccgccagcagcagcgagatcagcgagatgaagggcgtggaggagagccccaaggtgcccggcgagggccccggccacagcgaggccgagaccggccccccccaggtgctggccggcgtgcccgaccagcccgaggccccccagcccggccccaacaccaccgccgcccccgtggacagcggccccaaggccggcctggcccccgagaccaccgagacccccgccggcgccagcgagaccgcccaggccaccgacctgagcctgagccccggcggcgagagcaaggccaactgcagccccgaggacccctgccaggagaccgtgagcaagcccgaggtgagcaaggaggccaccgccgaccagggcagcagactggagagcgccgccccccccgagcccgcccccgagcccgccccccagcccgaccccagacccgacagccagcccacccccaagcccgccctgcagcccgagctgcccacccaggaggaccccacccccgagatcctgagcgagagcgtgggcgagaagcaggagaacggcgccgtggtgcccctgcaggccggcgacggcgaggagggccccgcccccgagccccacagcccccccagcaagaagagcccccccgccaacggcgccccccccagagtgctgcagcagctggtggaggaggacagaatgagaagagcccacagcggccaccccggcagccccagaggcagcctgagcagacaccccagcagccagctggccggccccggcgtggagggcggcgagggcacccagaagcccagagactacatcatcctggccatcctgagctgcttctgccccatgtggcccgtgaacatcgtggccttcgcctacgccgtgatgagcagaaacagcctgcagcagggcgacgtggacggcgcccagagactgggcagagtggccaagctgctgagcatcgtggccctggtgggcggcgtgctgatcatcatcgccagctgcgtgatcaacctgggcgtgtacaagtag

SEQ ID NO: 94688 - DNA, 1191 bp, synthetic construct
  misc_feature 1..1191: note = Description of Artificial Sequence: Synthetic coding sequence
  source 1..1191: mol_type = other DNA
atgccccagctgcagttcaaggacgccttctggtgcagagacttcaccgcccacaccggctacgaggtgctgctgcagagactgctggacggcagaaagatgtgcaaggacatggaggagctgctgagacagagagcccaggccgaggagagatacggcaaggagctggtgcagatcgccagaaaggccggcggccagaccgagatcaacagcctgagagccagcttcgacagcctgaagcagcagatggagaacgtgggcagcagccacatccagctggccctgaccctgagagaggagctgagaagcctggaggagttcagagagagacagaaggagcagagaaagaagtacgaggccgtgatggacagagtgcagaagagcaagctgagcctgtacaagaaggccatggagagcaagaagacctacgagcagaagtgcagagacgccgacgacgccgagcaggccttcgagagaatcagcgccaacggccaccagaagcaggtggagaagagccagaacaaggccagacagtgcaaggacagcgccaccgaggccgagagagtgtacagacagagcatcgcccagctggagaaggtgagagccgagtgggagcaggagcacagaaccacctgcgaggccttccagctgcaggagttcgacagactgaccatcctgagaaacgccctgtgggtgcacagcaaccagctgagcatgcagtgcgtgaaggacgacgagctgtacgaggaggtgagactgaccctggagggctgcagcatcgacgccgacatcgacagcttcatccaggccaagagcaccggcaccgagccccccggcgaggtgagactggccgacagcgccgccagcagattcagcggcctgctgcacggcagccccaagaccaccagcctggccgccagcgccgccagcaccgagaccctgacccccacccccgagagaaacgagggcgtgtacaccgccatcgccgtgcaggagatccagggcaaccccgccagccccgcccaggagtacagagccctgtacgactacaccgcccagaaccccgacgagctggacctgagcgccggcgacatcctggaggtgatcctggagggcgaggacggctggtggaccgtggagagaaacggccagagaggcttcgtgcccggcagctacctggagaagctgtag

SEQ ID NO: 94689 - DNA, 1251 bp, synthetic construct
  misc_feature 1..1251: note = Description of Artificial Sequence: Synthetic coding sequence
  source 1..1251: mol_type = other DNA
atgatgccccagctgcagttcaaggacgccttctggtgcagagacttcaccgcccacaccggctacgaggtgctgctgcagagactgctggacggcagaaagatgtgcaaggacatggaggagctgctgagacagagagcccaggccgaggagagatacggcaaggagctggtgcagatcgccagaaaggccggcggccagaccgagatcaacagcctgagagccagcttcgacagcctgaagcagcagatggagaacgtgggcagcagccacatccagctggccctgaccctgagagaggagctgagaagcctggaggagttcagagagagacagaaggagcagagaaagaagtacgaggccgtgatggacagagtgcagaagagcaagctgagcctgtacaagaaggccatggagagcaagaagacctacgagcagaagtgcagagacgccgacgacgccgagcaggccttcgagagaatcagcgccaacggccaccagaagcaggtggagaagagccagaacaaggccagacagtgcaaggacagcgccaccgaggccgagagagtgtacagacagagcatcgcccagctggagaaggtgagagccgagtgggagcaggagcacagaaccacctgcgaggccttccagctgcaggagttcgacagactgaccatcctgagaaacgccctgtgggtgcacagcaaccagctgagcatgcagtgcgtgaaggacgacgagctgtacgaggaggtgagactgaccctggagggctgcagcatcgacgccgacatcgacagcttcatccaggccaagagcaccggcaccgagccccccgcccccgtgccctaccagaactactacgacagagaggtgacccccctgaccagcagccccggcatccagcccagctgcggcatgatcaagagattcagcggcctgctgcacggcagccccaagaccaccagcctggccgccagcgccgccagcaccgagaccctgacccccacccccgagagaaacgagggcgtgtacaccgccatcgccgtgcaggagatccagggcaaccccgccagccccgcccaggagtacagagccctgtacgactacaccgcccagaaccccgacgagctggacctgagcgccggcgacatcctggaggtgatcctggagggcgaggacggctggtggaccgtggagagaaacggccagagaggcttcgtgcccggcagctacctggagaagctgtag

SEQ ID NO: 94690 - DNA, 1605 bp, synthetic construct
  misc_feature 1..1605: note = Description of Artificial Sequence: Synthetic coding sequence
  source 1..1605: mol_type = other DNA
atgatctggtacatcctgatcatcggcatcctgctgccccagagcctggcccaccccggcttcttcaccagcatcggccagatgaccgacctgatccacaccgagaaggacctggtgaccagcctgaaggactacatcaaggccgaggaggacaagctggagcagatcaagaagtgggccgagaagctggacagactgaccagcaccgccaccaaggaccccgagggcttcgtgggccaccccgtgaacgccttcaagctgatgaagagactgaacaccgagtggagcgagctggagaacctggtgctgaaggacatgagcgacggcttcatcagcaacctgaccatccagagacagtacttccccaacgacgaggaccaggtgggcgccgccaaggccctgctgagactgcaggacacctacaacctggacaccgacaccatcagcaagggcaacctgcccggcgtgaagcacaagagcttcctgaccgccgaggactgcttcgagctgggcaaggtggcctacaccgaggccgactactaccacaccgagctgtggatggagcaggccctgagacagctggacgagggcgagatcagcaccatcgacaaggtgagcgtgctggactacctgagctacgccgtgtaccagcagggcgacctggacaaggccctgctgctgaccaagaagctgctggagctggaccccgagcaccagagagccaacggcaacctgaagtacttcgagtacatcatggccaaggagaaggacgtgaacaagagcgccagcgacgaccagagcgaccagaagaccacccccaagaagaagggcgtggccgtggactacctgcccgagagacagaagtacgagatgctgtgcagaggcgagggcatcaagatgacccccagaagacagaagaagctgttctgcagataccacgacggcaacagaaaccccaagttcatcctggcccccgccaagcaggaggacgagtgggacaagcccagaatcatcagattccacgacatcatcagcgacgccgagatcgagatcgtgaaggacctggccaagcccagactgagcagagccaccgtgcacgaccccgagaccggcaagctgaccaccgcccagtacagagtgagcaagagcgcctggctgagcggctacgagaaccccgtggtgagcagaatcaacatgagaatccaggacctgaccggcctggacgtgagcaccgccgaggagctgcaggtggccaactacggcgtgggcggccagtacgagccccacttcgacttcgccagaaaggacgagcccgacgccttcaaggagctgggcaccggcaacagaatcgccacctggctgttctacatgagcgacgtgagcgccggcggcgccaccgtgttccccgaggtgggcgccagcgtgtggcccaagaagggcaccgccgtgttctggtacaacctgttcgccagcggcgagggcgactacagcaccagacacgccgcctgccccgtgctggtgggcaacaagtgggtgagcaacaagtggctgcacgagagaggccaggagttcagaagaccctgcaccctgagcgagctggagtag

SEQ ID NO: 94691 - DNA, 1605 bp, synthetic construct
  misc_feature 1..1605: note = Description of Artificial Sequence: Synthetic coding sequence
  source 1..1605: mol_type = other DNA
atgatctggtacatcctgatcatcggcatcctgctgccccagagcctggcccaccccggcttcttcaccagcatcggccagatgaccgacctgatccacaccgagaaggacctggtgaccagcctgaaggactacatcaaggccgaggaggacaagctggagcagatcaagaagtgggccgagaagctggacagactgaccagcaccgccaccaaggaccccgagggcttcgtgggccaccccgtgaacgccttcaagctgatgaagagactgaacaccgagtggagcgagctggagaacctggtgctgaaggacatgagcgacggcttcatcagcaacctgaccatccagagacagtacttccccaacgacgaggaccaggtgggcgccgccaaggccctgctgagactgcaggacacctacaacctggacaccgacaccatcagcaagggcaacctgcccggcgtgaagcacaagagcttcctgaccgccgaggactgcttcgagctgggcaaggtggcctacaccgaggccgactactaccacaccgagctgtggatggagcaggccctgagacagctggacgagggcgagatcagcaccatcgacaaggtgagcgtgctggactacctgagctacgccgtgtaccagcagggcgacctggacaaggccctgctgctgaccaagaagctgctggagctggaccccgagcaccagagagccaacggcaacctgaagtacttcgagtacatcatggccaaggagaaggacgtgaacaagagcgccagcgacgaccagagcgaccagaagaccacccccaagaagaagggcgtggccgtggactacctgcccgagagacagaagtacgagatgctgtgcagaggcgagggcatcaagatgacccccagaagacagaagaagctgttctgcagataccacgacggcaacagaaaccccaagttcatcctggcccccgccaagcaggaggacgagtgggacaagcccagaatcatcagattccacgacatcatcagcgacgccgagatcgagatcgtgaaggacctggccaagcccagactgagaagagccaccatcagcaaccccatcaccggcgacctggagaccgtgcactacagaatcagcaagagcgcctggctgagcggctacgagaaccccgtggtgagcagaatcaacatgagaatccaggacctgaccggcctggacgtgagcaccgccgaggagctgcaggtggccaactacggcgtgggcggccagtacgagccccacttcgacttcgccagaaaggacgagcccgacgccttcaaggagctgggcaccggcaacagaatcgccacctggctgttctacatgagcgacgtgagcgccggcggcgccaccgtgttccccgaggtgggcgccagcgtgtggcccaagaagggcaccgccgtgttctggtacaacctgttcgccagcggcgagggcgactacagcaccagacacgccgcctgccccgtgctggtgggcaacaagtgggtgagcaacaagtggctgcacgagagaggccaggagttcagaagaccctgcaccctgagcgagctggagtag

SEQ ID NO: 94692 - DNA, 1605 bp, synthetic construct; identical to SEQ ID NO: 94690
  misc_feature 1..1605: note = Description of Artificial Sequence: Synthetic coding sequence
  source 1..1605: mol_type = other DNA

SEQ ID NO: 94693 - DNA, 1605 bp, synthetic construct; identical to SEQ ID NO: 94691
  misc_feature 1..1605: note = Description of Artificial Sequence: Synthetic coding sequence
  source 1..1605: mol_type = other DNA

SEQ ID NO: 94694 - DNA, 1605 bp, synthetic construct; identical to SEQ ID NO: 94691
  misc_feature 1..1605: note = Description of Artificial Sequence: Synthetic coding sequence
  source 1..1605: mol_type = other DNA

SEQ ID NO: 94695 - DNA, 1551 bp, synthetic construct
  misc_feature 1..1551: note = Description of Artificial Sequence: Synthetic coding sequence
  source 1..1551: mol_type = other DNA
atgatctggtacatcctgatcatcggcatcctgctgccccagagcctggcccaccccggcttcttcaccagcatcggccagatgaccgacctgatccacaccgagaaggacctggtgaccagcctgaaggactacatcaaggccgaggaggacaagctggagcagatcaagaagtgggccgagaagctggacagactgaccagcaccgccaccaaggaccccgagggcttcgtgggccaccccgtgaacgccttcaagctgatgaagagactgaacaccgagtggagcgagctggagaacctggtgctgaaggacatgagcgacggcttcatcagcaacctgaccatccagagacagtacttccccaacgacgaggaccaggtgggcgccgccaaggccctgctgagactgcaggacacctacaacctggacaccgacaccatcagcaagggcaacctgcccggcgtgaagcacaagagcttcctgaccgccgaggactgcttcgagctgggcaaggtggcctacaccgaggccgactactaccacaccgagctgtggatggagcaggccctgagacagctggacgagggcgagatcagcaccatcgacaaggtgagcgtgctggactacctgagctacgccgtgtaccagcagggcgacctggacaaggccctgctgctgaccaagaagctgctggagctggaccccgagcaccagagagccaacggcaacctgaagtacttcgagtacatcatggccaaggagaaggacgtgaacaagagcgccagcgacgaccagagcgaccagaagaccacccccaagaagaagggcgtggccgtggactacctgcccgagagacagaagtacgagatgctgtgcagaggcgagggcatcaagatgacccccagaagacagaagaagctgttctgcagataccacgacggcaacagaaaccccaagttcatcctggcccccgccaagcaggaggacgagtgggacaagcccagaatcatcagattccacgacatcatcagcgacgccgagatcgagatcgtgaaggacctggccaagcccagactgagcagagccaccgtgcacgaccccgagaccggcaagctgaccaccgcccagtacagagtgagcaagagcgcctggctgagcggctacgagaaccccgtggtgagcagaatcaacatgagaatccaggacctgaccggcctggacgtgagcaccgccgaggagctgcagaaggacgagcccgacgccttcaaggagctgggcaccggcaacagaatcgccacctggctgttctacatgagcgacgtgagcgccggcggcgccaccgtgttccccgaggtgggcgccagcgtgtggcccaagaagggcaccgccgtgttctggtacaacctgttcgccagcggcgagggcgactacagcaccagacacgccgcctgccccgtgctggtgggcaacaagtgggtgagcaacaagtggctgcacgagagaggccaggagttcagaagaccctgcaccctgagcgagctggagtag

SEQ ID NO: 94696 - DNA, 1608 bp, synthetic construct
  misc_feature 1..1608: note = Description of Artificial Sequence: Synthetic coding sequence
  source 1..1608: mol_type = other DNA
atgaagctgtgggtgagcgccctgctgatggcctggttcggcgtgctgagctgcgtgcaggccgagttcttcaccagcatcggccacatgaccgacctgatctacgccgagaaggagctggtgcagagcctgaaggagtacatcctggtggaggaggccaagctgagcaagatcaagagctgggccaacaagatggaggccctgaccagcaagagcgccgccgacgccgagggctacctggcccaccccgtgaacgcctacaagctggtgaagagactgaacaccgactggcccgccctggaggacctggtgctgcaggacagcgccgccggcttcatcgccaacctgagcgtgcagagacagttcttccccaccgacgaggacgagatcggcgccgccaaggccctgatgagactgcaggacacctacagactggaccccggcaccatcagcagaggcgagctgcccggcaccaagtaccaggccatgctgagcgtggacgactgcttcggcatgggcagaagcgcctacaacgagggcgactactaccacaccgtgctgtggatggagcaggtgctgaagcagctggacgccggcgaggaggccaccaccaccaagagccaggtgctggactacctgagctacgccgtgttccagctgggcgacctgcacagagccctggagctgaccagaagactgctgagcctggaccccagccacgagagagccggcggcaacctgagatacttcgagcagctgctggaggaggagagagagaagaccctgaccaaccagaccgaggccgagctggccacccccgagggcatctacgagagacccgtggactacctgcccgagagagacgtgtacgagagcctgtgcagaggcgagggcgtgaagctgacccccagaagacagaagagactgttctgcagataccaccacggcaacagagccccccagctgctgatcgcccccttcaaggaggaggacgagtgggacagcccccacatcgtgagatactacgacgtgatgagcgacgaggagatcgagagaatcaaggagatcgccaagcccaagctggccagagccaccgtgagagaccccaagaccggcgtgctgaccgtggccagctacagagtgagcaagagcagctggctggaggaggacgacgaccccgtggtggccagagtgaacagaagaatgcagcacatcaccggcctgaccgtgaagaccgccgagctgctgcaggtggccaactacggcgtgggcggccagtacgagccccacttcgacttcagcagaaacgacgagagagacaccttcaagcacctgggcaccggcaacagagtggccaccttcctgaactacatgagcgacgtggaggccggcggcgccaccgtgttccccgacctgggcgccgccatctggcccaagaagggcaccgccgtgttctggtacaacctgctgagaagcggcgagggcgactacagaaccagacacgccgcctgccccgtgctggtgggctgcaagtgggtgagcaacaagtggttccacgagagaggccaggagttcctgagaccctgcggcagcaccgaggtggactag

SEQ ID NO: 94697 - DNA, 1602 bp, synthetic construct
  misc_feature 1..1602: note = Description of Artificial Sequence: Synthetic coding sequence
  source 1..1602: mol_type = other DNA
atgaagctgtgggtgagcgccctgctgatggcctggttcggcgtgctgagctgcgtgcaggccgagttcttcaccagcatcggccacatgaccgacctgatctacgccgagaaggagctggtgcagagcctgaaggagtacatcctggtggaggaggccaagctgagcaagatcaagagctgggccaacaagatggaggccctgaccagcaagagcgccgccgacgccgagggctacctggcccaccccgtgaacgcctacaagctggtgaagagactgaacaccgactggcccgccctggaggacctggtgctgcaggacagcgccgccggcttcatcgccaacctgagcgtgcagagacagttcttccccaccgacgaggacgagatcggcgccgccaaggccctgatgagactgcaggacacctacagactggaccccggcaccatcagcagaggcgagctgcccggcaccaagtaccaggccatgctgagcgtggacgactgcttcggcatgggcagaagcgcctacaacgagggcgactactaccacaccgtgctgtggatggagcaggtgctgaagcagctggacgccggcgaggaggccaccaccaccaagagccaggtgctggactacctgagctacgccgtgttccagctgggcgacctgcacagagccctggagctgaccagaagactgctgagcctggaccccagccacgagagagccggcggcaacctgagatacttcgagcagctgctggaggaggagagagagaagaccctgaccaaccagaccgaggccgagctggccacccccgagggcatctacgagagacccgtggactacctgcccgagagagacgtgtacgagagcctgtgcagaggcgagggcgtgaagctgacccccagaagacagaagagactgttctgcagataccaccacggcaacagagccccccagctgctgatcgcccccttcaaggaggaggacgagtgggacagcccccacatcgtgagatactacgacgtgatgagcgacgaggagatcgagagaatcaaggagatcgccaagcccaagctggccagagccaccgtgagagaccccaagaccggcgtgctgaccgtggccagctacagagtgagcaagagcagctggctggaggaggacgacgaccccgtggtggccagagtgaacagaagaatgcagcacatcaccggcctgaccgtgaagaccgccgagctgctgcaggtggccaactacggcgtgggcggccagtacgagccccacttcgacttcagcagaagacccttcgacagcggcctgaagaccgagggcaacagactggccaccttcctgaactacatgagcgacgtggaggccggcggcgccaccgtgttccccgacctgggcgccgccatctggcccaagaagggcaccgccgtgttctggtacaacctgctgagaagcggcgagggcgactacagaaccagacacgccgcctgccccgtgctggtgggctgcaagtgggtgagcaacaagtggttccacgagagaggccaggagttcctgagaccctgcggcagcaccgaggtggactag

SEQ ID NO: 94698 - DNA, 1602 bp, synthetic construct; identical to SEQ ID NO: 94697
  misc_feature 1..1602: note = Description of Artificial Sequence: Synthetic coding sequence
  source 1..1602: mol_type = other DNA

SEQ ID NO: 94699 - DNA, 1602 bp, synthetic construct; identical to SEQ ID NO: 94697
  misc_feature 1..1602: note = Description of Artificial Sequence: Synthetic coding sequence
  source 1..1602: mol_type = other DNA

SEQ ID NO: 94700 - DNA, 1608 bp, synthetic construct; identical to SEQ ID NO: 94696
  misc_feature 1..1608: note = Description of Artificial Sequence: Synthetic coding sequence
  source 1..1608: mol_type = other DNA

SEQ ID NO: 94701 - DNA, 504 bp, synthetic construct
  misc_feature 1..504: note = Description of Artificial Sequence: Synthetic coding sequence
  source 1..504: mol_type = other DNA
atgaagctgtgggtgagcgccctgctgatggcctggttcggcgtgctgagctgcgtgcaggccgagttcttcaccagcatcggccacatgaccgacctgatctacgccgagaaggagctggtgcagagcctgaaggagtacatcctggtggaggaggccaagctgagcaagatcaagagctgggccaacaagatggaggccctgaccagcaagagcgccgccgacgccgagggctacctggcccaccccgtgaacgcctacaagctggtgaagagactgaacaccgactggcccgccctggaggacctggtgctgcaggacagcgccgccggcttcatcgccaacctgagcgtgcagagacagttcttccccaccgacgaggacgagatcggcgccgccaaggccctgatgagactgcaggacacctacagactggaccccggcaccatcagcagaggcgagctgcccggcaccaagtaccaggccatgctgagcgtggactag

SEQ ID NO: 94702 - DNA, 1608 bp, synthetic construct; identical to SEQ ID NO: 94696
  misc_feature 1..1608: note = Description of Artificial Sequence: Synthetic coding sequence
  source 1..1608: mol_type = other DNA

SEQ ID NO: 94703 - DNA, 306 bp, synthetic construct
  misc_feature 1..306: note = Description of Artificial Sequence: Synthetic coding sequence
  source 1..306: mol_type = other DNA
atgaagctgtgggtgagcgccctgctgatggcctggttcggcgtgctgagctgcgtgcaggccgagttcttcaccagcatcggccacatgaccgacctgatctacgccgagaaggagctggtgcagagcctgaaggagtacatcctggtggaggaggccaagctgagcaagatcaagagctgggccaacaagatggaggccctgaccagcaagagcgccgccgacgccgagggctacctggcccaccccgtgaacgcctacaagctggtgaagagactgaacaccgactggcccgccctggagtag

SEQ ID NO: 94704 - DNA, 615 bp, synthetic construct
  misc_feature 1..615: note = Description of Artificial Sequence: Synthetic coding sequence
  source 1..615: mol_type = other DNA
atgaagctgtgggtgagcgccctgctgatggcctggttcggcgtgctgagctgcgtgcaggccgagttcttcaccagcatcggccacatgaccgacctgatctacgccgagaaggagctggtgcagagcctgaaggagtacatcctggtggaggaggccaagctgagcaagatcaagagctgggccaacaagatggaggccctgaccagcaagagcgccgccgacgccgagggctacctggcccaccccgtgaacgcctacaagctggtgaagagactgaacaccgactggcccgccctggaggacctggtgctgcaggacagcgccgccggcttcatcgccaacctgagcgtgcagagacagttcttccccaccgacgaggacgagatcggcgccgccaaggccctgatgagactgcaggacacctacagactggaccccggcaccatcagcagaggcgagctgcccggcaccaagtaccaggccatgctgagcgtggacgactgcttcggcatgggcagaagcgcctacaacgagggcgactactaccacaccgtgctgtggatggagcaggtgctgaagcagctggacgccggcgaggaggccaccacctag

SEQ ID NO: 94705 - DNA, 345 bp, synthetic construct
  misc_feature 1..345: note = Description of Artificial Sequence: Synthetic coding sequence
  source 1..345: mol_type = other DNA
atgaagctgtgggtgagcgccctgctgatggcctggttcggcgtgctgagctgcgtgcaggccgagttcttcaccagcatcggccacatgaccgacctgatctacgccgagaaggagctggtgcagagcctgaaggagtacatcctggtggaggaggccaagctgagcaagatcaagagctgggccaacaagatggaggccctgaccagcaagagcgccgccgacgccgagggctacctggcccaccccgtgaacgcctacaagctggtgaagagactgaacaccgactggcccgccctggaggacctggtgctgcaggacagcgccgccggcttcatcgcctag

SEQ ID NO: 94706 - DNA, 444 bp, synthetic construct
  misc_feature 1..444: note = Description of Artificial Sequence: Synthetic coding sequence
  source 1..444: mol_type = other DNA
atgaagctgtgggtgagcgccctgctgatggcctggttcggcgtgctgagctgcgtgcaggccgagttcttcaccagcatcggccacatgaccgacctgatctacgccgagaaggagctggtgcagagcctgaaggagtacatcctggtggaggaggccaagctgagcaagatcaagagctgggccaacaagatggaggccctgaccagcaagagcgccgccgacgccgagggctacctggcccaccccgtgaacgcctacaagctggtgaagagactgaacaccgactggcccgccctggaggacctggtgctgcaggacagcgccgccggcttcatcgccaacctgagcgtgcagagacagttcttccccaccgacgaggacgagatcggcgccgccaaggccctgatgagactgcaggacacctacagactggacccctag

SEQ ID NO: 94707 - DNA, 153 bp, synthetic construct
  misc_feature 1..153: note = Description of Artificial Sequence: Synthetic coding sequence
  source 1..153: mol_type = other DNA
atgaagctgtgggtgagcgccctgctgatggcctggttcggcgtgctgagctgcgtgcaggccgagttcttcaccagcatcggccacatgaccgacctgatctacgccgagaaggagctggtgcagagcctgaaggagtacatcctggtgtag

SEQ ID NO: 94708 - DNA, 555 bp, synthetic construct
  misc_feature 1..555: note = Description of Artificial Sequence: Synthetic coding sequence
  source 1..555: mol_type = other DNA
atgaagctgtgggtgagcgccctgctgatggcctggttcggcgtgctgagctgcgtgcaggccgagttcttcaccagcatcggccacatgaccgacctgatctacgccgagaaggagctggtgcagagcctgaaggagtacatcctggtggaggaggccaagctgagcaagatcaagagctgggccaacaagatggaggccctgaccagcaagagcgccgccgacgccgagggctacctggcccaccccgtgaacgcctacaagctggtgaagagactgaacaccgactggcccgccctggaggacctggtgctgcaggacagcgccgccggcttcatcgccaacctgagcgtgcagagacagttcttccccaccgacgaggacgagatcggcgccgccaaggccctgatgagactgcaggacacctacagactggaccccggcaccatcagcagaggcgagctgcccggcaccaagtaccaggccatgctgagcgtggacgactgcttcggcatgggcagaagcgcctacaacgagggcgactactaccactag

SEQ ID NO: 94709 - DNA, 462 bp, synthetic construct
  misc_feature 1..462: note = Description of Artificial Sequence: Synthetic coding sequence
  source 1..462: mol_type = other DNA
atgaagctgtgggtgagcgccctgctgatggcctggttcggcgtgctgagctgcgtgcaggccgagttcttcaccagcatcggccacatgaccgacctgatctacgccgagaaggagctggtgcagagcctgaaggagtacatcctggtggaggaggccaagctgagcaagatcaagagctgggccaacaagatggaggccctgaccagcaagagcgccgccgacgccgagggctacctggcccaccccgtgaacgcctacaagctggtgaagagactgaacaccgactggcccgccctggaggacctggtgctgcaggacagcgccgccggcttcatcgccaacctgagcgtgcagagacagttcttccccaccgacgaggacgagatcggcgccgccaaggccctgatgagactgcaggacacctacagactggaccccggcaccatcagcagaggctag

SEQ ID NO: 94710 - DNA, 1635 bp, synthetic construct
  misc_feature 1..1635: note = Description of Artificial Sequence: Synthetic coding sequence
  source 1..1635: mol_type = other DNA
atgggccccggcgccagactggccgccctgctggccgtgctggccctgggcaccggcgaccccgagagagccgccgccagaggcgacaccttcagcgccctgaccagcgtggccagagccctggcccccgagagaagactgctgggcctgctgagaagatacctgagaggcgaggaggccagactgagagacctgaccagattctacgacaaggtgctgagcctgcacgaggacagcaccacccccgtggccaaccccctgctggccttcaccctgatcaagagactgcagagcgactggagaaacgtggtgcacagcctggaggccagcgagaacatcagagccctgaaggacggctacgagaaggtggagcaggacctgcccgccttcgaggacctggagggcgccgccagagccctgatgagactgcaggacgtgtacatgctgaacgtgaagggcctggccagaggcgtgttccagagagtgaccggcagcgccatcaccgacctgtacagccccaagagactgttcagcctgaccggcgacgactgcttccaggtgggcaaggtggcctacgacatgggcgactactaccacgccatcccctggctggaggaggccgtgagcctgttcagaggcagctacggcgagtggaagaccgaggacgaggccagcctggaggacgccctggaccacctggccttcgcctacttcagagccggcaacgtgagctgcgccctgagcctgagcagagagttcctgctgtacagccccgacaacaagagaatggccagaaacgtgctgaagtacgagagactgctggccgagagccccaaccacgtggtggccgaggccgtgatccagagacccaacatcccccacctgcagaccagagacacctacgagggcctgtgccagaccctgggcagccagcccaccctgtaccagatccccagcctgtactgcagctacgagaccaacagcaacgcctacctgctgctgcagcccatcagaaaggaggtgatccacctggagccctacatcgccctgtaccacgacttcgtgagcgacagcgaggcccagaagatcagagagctggccgagccctggctgcagagaagcgtggtggccagcggcgagaagcagctgcaggtggagtacagaatcagcaagagcgcctggctgaaggacaccgtggaccccaagctggtgaccctgaaccacagaatcgccgccctgaccggcctggacgtgagacccccctacgccgagtacctgcaggtggtgaactacggcatcggcggccactacgagccccacttcgaccacgccaccagccccagcagccccctgtacagaatgaagagcggcaacagagtggccaccttcatgatctacctgagcagcgtggaggccggcggcgccaccgccttcatctacgccaacctgagcgtgcccgtggtgagaaacgccgccctgttctggtggaacctgcacagaagcggcgagggcgacagcgacaccctgcacgccggctgccccgtgctggtgggcgacaagtgggtggccaacaagtggatccacgagtacggccaggagttcagaagaccctgcagcagcagccccgaggactag

SEQ ID NO: 94711 - DNA, 1815 bp, synthetic construct
  misc_feature 1..1815: note = Description of Artificial Sequence: Synthetic coding sequence
  source 1..1815: mol_type = other DNA
atgggccccggcgccagactggccgccctgctggccgtgctggccctgggcaccggcgaccccgagagagccgccgccagaggcgacaccttcagcgccctgaccagcgtggccagagccctggcccccgagagaagactgctgggcctgctgagaagatacctgagaggcgaggaggccagactgagagacctgaccagattctacgacaaggtgctgagcctgcacgaggacagcaccacccccgtggccaaccccctgctggccttcaccctgatcaagagactgcagagcgactggagaaacgtggtgcacagcctggaggccagcgagaacatcagagccctgaaggacggctacgagaaggtggagcaggacctgcccgccttcgaggacctggagggcgccgccagagccctgatgagactgcaggacgtgtacatgctgaacgtgaagggcctggccagaggcgtgttccagagagtgaccggcagcgccatcaccgacctgtacagccccaagagactgttcagcctgaccggcgacgactgcttccaggtgggcaaggtggcctacgacatgggcgactactaccacgccatcccctggctggaggaggccgtgagcctgttcagaggcagctacggcgagtggaagaccgaggacgaggccagcctggaggacgccctggaccacctggccttcgcctacttcagagccggcaacgtgagctgcgccctgagcctgagcagagagttcctgctgtacagccccgacaacaagagaatggccagaaacgtgctgaagtacgagagactgctggccgagagccccaaccacgtggtggccgaggccgtgatccagagacccaacatcccccacctgcagaccagagacacctacgagggcctgtgccagaccctgggcagccagcccaccctgtaccagatccccagcctgtactgcagctacgagaccaacagcaacgcctacctgctgctgcagcccatcagaaaggaggtgatccacctggagccctacatcgccctgtaccacgacttcgtgagcgacagcgaggcccagaagatcagagagctggccgagccctggctgcagagaagcgtggtggccagcggcgagaagcagctgcaggtggagtacagaatcagcaagagcgcctggctgaaggacaccgtggaccccaagctggtgaccctgaaccacagaatcgccgccctgaccggcctggacgtgagacccccctacgccgagtacctgcaggtggtgaactacggcatcggcggccactacgagccccacttcgaccacgccaccagccccagcagccccctgtacagaatgaagagcggcaacagagtggccaccttcatgatctacctgagcagcgtggaggccggcggcgccaccgccttcatctacgccaacctgagcgtgcccgtggtgagacactgcttcggcggcacctgcaccggcgtggtgaagggcaccgtgacccacttcatgctggccgtgctgagctggtgggagatcagcggctggcccaccagcggctacatgagcatggacagaaacagcgccgaccccgccgcccccgccctgaagaccgagctgctggccgagagaagctggtggagccccgtggccttccagagaagccaggagcccaaggccggcgtgggcgaggagaaggccgagcagccccccggcagaagaccctgccagctgtgcctgtgcctggccaaccagagacagggcagaggctgctaccagggcaccctgagaatgtacatctag

SEQ ID NO: 94712 - DNA, 1527 bp, synthetic construct
  misc_feature 1..1527: note = Description of Artificial Sequence: Synthetic coding sequence
  source 1..1527: mol_type = other DNA
atgctgagaagagccctgctgtgcctggccgtggccgccctggtgagagccgacgcccccgaggaggaggaccacgtgctggtgctgagaaagagcaacttcgccgaggccctggccgcccacaagtacctgctggtggagttctacgccccctggtgcggccactgcaaggccctggcccccgagtacgccaaggccgccggcaagctgaaggccgagggcagcgagatcagactggccaaggtggacgccaccgaggagagcgacctggcccagcagtacggcgtgagaggctaccccaccatcaagttcttcagaaacggcgacaccgccagccccaaggagtacaccgccggcagagaggccgacgacatcgtgaactggctgaagaagagaaccggccccgccgccaccaccctgcccgacggcgccgccgccgagagcctggtggagagcagcgaggtggccgtgatcggcttcttcaaggacgtggagagcgacagcgccaagcagttcctgcaggccgccgaggccatcgacgacatccccttcggcatcaccagcaacagcgacgtgttcagcaagtaccagctggacaaggacggcgtggtgctgttcaagaagttcgacgagggcagaaacaacttcgagggcgaggtgaccaaggagaacctgctggacttcatcaagcacaaccagctgcccctggtgatcgagttcaccgagcagaccgcccccaagatcttcggcggcgagatcaagacccacatcctgctgttcctgcccaagagcgtgagcgactacgacggcaagctgagcaacttcaagaccgccgccgagagcttcaagggcaagatcctgttcatcttcatcgacagcgaccacaccgacaaccagagaatcctggagttcttcggcctgaagaaggaggagtgccccgccgtgagactgatcaccctggaggaggagatgaccaagtacaagcccgagagcgaggagctgaccgccgagagaatcaccgagttctgccacagattcctggagggcaagatcaagccccacctgatgagccaggagctgcccgaggactgggacaagcagcccgtgaaggtgctggtgggcaagaacttcgaggacgtggccttcgacgagaagaagaacgtgttcgtggagttctacgccccctggtgcggccactgcaagcagctggcccccatctgggacaagctgggcgagacctacaaggaccacgagaacatcgtgatcgccaagatggacagcaccgccaacgaggtggaggccgtgaaggtgcacagcttccccaccctgaagttcttccccgccagcgccgacagaaccgtgatcgactacaacggcgagagaaccctggacggcttcaagaagttcctggagagcggcggccaggacggcgccggcgacgacgacgacctggaggacctggaggaggccgaggagcccgacatggaggaggacgacgaccagaaggccgtgaaggacgagctgtag

SEQ ID NO: 94713 - DNA, 1479 bp, synthetic construct
  misc_feature 1..1479: note = Description of Artificial Sequence: Synthetic coding sequence
  source 1..1479: mol_type = other DNA
atgctgagaagagccctgctgtgcctggccgtggccgccctggtgagagccgacgcccccgaggaggaggaccacaagtacctgctggtggagttctacgccccctggtgcggccactgcaaggccctggcccccgagtacgccaaggccgccggcaagctgaaggccgagggcagcgagatcagactggccaaggtggacgccaccgaggagagcgacctggcccagcagtacggcgtgagaggctaccccaccatcaagttcttcagaaacggcgacaccgccagccccaaggagtacaccgccggcagagaggccgacgacatcgtgaactggctgaagaagagaaccggccccgccgccaccaccctgcccgacggcgccgccgccgagagcctggtggagagcagcgaggtggccgtgatcggcttcttcaaggacgtggagagcgacagcgccaagcagttcctgcaggccgccgaggccatcgacgacatccccttcggcatcaccagcaacagcgacgtgttcagcaagtaccagctggacaaggacggcgtggtgctgttcaagaagttcgacgagggcagaaacaacttcgagggcgaggtgaccaaggagaacctgctggacttcatcaagcacaaccagctgcccctggtgatcgagttcaccgagcagaccgcccccaagatcttcggcggcgagatcaagacccacatcctgctgttcctgcccaagagcgtgagcgactacgacggcaagctgagcaacttcaagaccgccgccgagagcttcaagggcaagatcctgttcatcttcatcgacagcgaccacaccgacaaccagagaatcctggagttcttcggcctgaagaaggaggagtgccccgccgtgagactgatcaccctggaggaggagatgaccaagtacaagcccgagagcgaggagctgaccgccgagagaatcaccgagttctgccacagattcctggagggcaagatcaagccccacctgatgagccaggagctgcccgaggactgggacaagcagcccgtgaaggtgctggtgggcaagaacttcgaggacgtggccttcgacgagaagaagaacgtgttcgtggagttctacgccccctggtgcggccactgcaagcagctggcccccatctgggacaagctgggcgagacctacaaggaccacgagaacatcgtgatcgccaagatggacagcaccgccaacgaggtggaggccgtgaaggtgcacagcttccccaccctgaagttcttccccgccagcgccgacagaaccgtgatcgactacaacggcgagagaaccctggacggcttcaagaagttcctggagagcggcggccaggacggcgccggcgacgacgacgacctggaggacctggaggaggccgaggagcccgacatggaggaggacgacgaccagaaggccgtgaaggacgagctgtag

SEQ ID NO: 94714 - DNA, 1356 bp, synthetic construct
  misc_feature 1..1356: note = Description of Artificial Sequence: Synthetic coding sequence
  source 1..1356: mol_type = other DNA
atgctgagaagagccctgctgtgcctggccgtggccgccctggtgagagccgacgcccccgaggaggaggaccacgtgctggtgctgagaaagagcaacttcgccgaggccctggccgcccacaagtacctgctggtggagttctacgccccctggtgcggccactgcaaggccctggcccccgagtacgccaaggccgccggcaagctgaaggccgagggcagcgagatcagactggccaaggtggacgccaccgaggagagcgacctggcccagcagtacggcgtgagaggctaccccaccatcaagttcttcagaaacggcgacaccgccagccccaaggagtacaccgccggcagagaggccgacgacatccccttcggcatcaccagcaacagcgacgtgttcagcaagtaccagctggacaaggacggcgtggtgctgttcaagaagttcgacgagggcagaaacaacttcgagggcgaggtgaccaaggagaacctgctggacttcatcaagcacaaccagctgcccctggtgatcgagttcaccgagcagaccgcccccaagatcttcggcggcgagatcaagacccacatcctgctgttcctgcccaagagcgtgagcgactacgacggcaagctgagcaacttcaagaccgccgccgagagcttcaagggcaagatcctgttcatcttcatcgacagcgaccacaccgacaaccagagaatcctggagttcttcggcctgaagaaggaggagtgccccgccgtgagactgatcaccctggaggaggagatgaccaagtacaagcccgagagcgaggagctgaccgccgagagaatcaccgagttctgccacagattcctggagggcaagatcaagccccacctgatgagccaggagctgcccgaggactgggacaagcagcccgtgaaggtgctggtgggcaagaacttcgaggacgtggccttcgacgagaagaagaacgtgttcgtggagttctacgccccctggtgcggccactgcaagcagctggcccccatctgggacaagctgggcgagacctacaaggaccacgagaacatcgtgatcgccaagatggacagcaccgccaacgaggtggaggccgtgaaggtgcacagcttccccaccctgaagttcttccccgccagcgccgacagaaccgtgatcgactacaacggcgagagaaccctggacggcttcaagaagttcctggagagcggcggccaggacggcgccggcgacgacgacgacctggaggacctggaggaggccgaggagcccgacatggaggaggacgacgaccagaaggccgtgaaggacgagctgtag

SEQ ID NO: 94715 - DNA, 2133 bp, synthetic construct
  misc_feature 1..2133: note = Description of Artificial Sequence: Synthetic coding sequence
  source 1..2133: mol_type = other DNA
atgctgagcctgcagtaccccgacgtgtacagagacgagaccgccgtgcaggactaccacggccacaagatctgcgacccctacgcctggctggaggaccccgacagcgagcagaccaaggccttcgtggaggcccagaacaagatcaccgtgcccttcctggagcagtgccccatcagaggcctgtacaaggagagaatgaccgagctgtacgactaccccaagtacagctgccacttcaagaagggcaagagatacttctacttctacaacaccggcctgcagaaccagagagtgctgtacgtgcaggacagcctggagggcgaggccagagtgttcctggaccccaacatcctgagcgacgacggcaccgtggccctgagaggctacgccttcagcgaggacggcgagtacttcgcctacggcctgagcgccagcggcagcgactgggtgaccatcaagttcatgaaggtggacggcgccaaggagctgcccgacgtgctggagagagtgaagttcagctgcatggcctggacccacgacggcaagggcatgttctacaacagctacccccagcaggacggcaagagcgacggcaccgagaccagcaccaacctgcaccagaagctgtactaccacgtgctgggcaccgaccagagcgaggacatcctgtgcgccgagttccccgacgagcccaagtggatgggcggcgccgagctgagcgacgacggcagatacgtgctgctgagcatcagagagggctgcgaccccgtgaacagactgtggtactgcgacctgcagcaggagagcagcggcatcgccggcatcctgaagtgggtgaagctgatcgacaacttcgagggcgagtacgactacgtgaccaacgagggcaccgtgttcaccttcaagaccaacagacagagccccaactacagagtgatcaacatcgacttcagagaccccgaggagagcaagtggaaggtgctggtgcccgagcacgagaaggacgtgctggagtggatcgcctgcgtgagaagcaacttcctggtgctgtgctacctgcacgacgtgaagaacatcctgcagctgcacgacctgaccaccggcgccctgctgaagaccttccccctggacgtgggcagcatcgtgggctacagcggccagaagaaggacaccgagatcttctaccagttcaccagcttcctgagccccggcatcatctaccactgcgacctgaccaaggaggagctggagcccagagtgttcagagaggtgaccgtgaagggcatcgacgccagcgactaccagaccgtgcagatcttctaccccagcaaggacggcaccaagatccccatgttcatcgtgcacaagaagggcatcaagctggacggcagccaccccgccttcctgtacggctacggcggcttcaacatcagcatcacccccaactacagcgtgagcagactgatcttcgtgagacacatgggcggcatcctggccgtggccaacatcagaggcggcggcgagtacggcgagacctggcacaagggcggcatcctggccaacaagcagaactgcttcgacgacttccagtgcgccgccgagtacctgatcaaggagggctacaccagccccaagagactgaccatcaacggcggcagcaacggcggcctgctggtggccgcctgcgccaaccagagacccgacctgttcggctgcgtgatcgcccaggtgggcgtgatggacatgctgaagttccacaagtacaccatcggccacgcctggaccaccgactacggctgcagcgacagcaagcagcacttcgagtggctggtgaagtacagccccctgcacaacgtgaagctgcccgaggccgacgacatccagtaccccagcatgctgctgctgaccgccgaccacgacgacagagtggtgcccctgcacagcctgaagttcatcgccaccctgcagtacatcgtgggcagaagcagaaagcagagcaaccccctgctgatccacgtggacaccaaggccggccacggcgccggcaagcccaccgccaaggtgatcgaggaggtgagcgacatgttcgccttcatcgccagatgcctgaacgtggactggatcccctag

SEQ ID NO: 94716 - DNA, 138 bp, synthetic construct
  misc_feature 1..138: note = Description of Artificial Sequence: Synthetic coding sequence
  source 1..138: mol_type = other DNA
tgaatcatctaccactgcgacctgaccaaggaggagctggagcccagagtgttcagagaggtgaccgtgaagggcatcgacgccagcgactaccagaccgtgcagctgcccaagggcaccgagagcagcagaaactag

SEQ ID NO: 94717 - DNA, 135 bp, synthetic construct
  misc_feature 1..135: note = Description of Artificial Sequence: Synthetic coding sequence
  source 1..135: mol_type = other DNA
atcatctaccactgcgacctgaccaaggaggagctggagcccagagtgttcagagaggtgaccgtgaagggcatcgacgccagcgactaccagaccgtgcagctgcccaagggcaccgagagcagcagaaactag

SEQ ID NO: 94718 - DNA, 2184 bp, synthetic construct
  misc_feature 1..2184: note = Description of Artificial Sequence: Synthetic coding sequence
  source 1..2184: mol_type = other DNA
atgcagcagaagaccaagctgttcctgcaggccctgaagtacagcatcccccacctgggcaagtgcatgcagaagcagcacctgaaccactacaacttcgccgaccactgctacaacagaatcaagctgaagaagtaccacctgaccaagtgcctgcagaacaagcccaagatcagcgagctggccagaaacatccccagcagaagcttcagctgcaaggacctgcagcccgtgaagcaggagaacgagaagcccctgcccgagaacatggacgccttcgagaaggtgagaaccaagctggagacccagccccaggaggagtacgagatcatcaacgtggaggtgaagcacggcggcttcgtgtactaccaggagggctgctgcctggtgagaagcaaggacgaggaggccgacaacgacaactacgaggtgctgttcaacctggaggagctgaagctggaccagcccttcatcgactgcatcagagtggcccccgacgagaagtacgtggccgccaagatcagaaccgaggacagcgaggccagcacctgcgtgatcatcaagctgagcgaccagcccgtgatggaggccagcttccccaacgtgagcagcttcgagtgggtgaaggacgaggaggacgaggacgtgctgttctacaccttccagagaaacctgagatgccacgacgtgtacagagccaccttcggcgacaacaagagaaacgagagattctacaccgagaaggaccccagctacttcgtgttcctgtacctgaccaaggacagcagattcctgaccatcaacatcatgaacaagaccaccagcgaggtgtggctgatcgacggcctgagcccctgggacccccccgtgctgatccagaagagaatccacggcgtgctgtactacgtggagcacagagacgacgagctgtacatcctgaccaacgtgggcgagcccaccgagttcaagctgatgagaaccgccgccgacacccccgccatcatgaactgggacctgttcttcaccatgaagagaaacaccaaggtgatcgacctggacatgttcaaggaccactgcgtgctgttcctgaagcacagcaacctgctgtacgtgaacgtgatcggcctggccgacgacagcgtgagaagcctgaagctgcccccctgggcctgcggcttcatcatggacaccaacagcgaccccaagaactgccccttccagctgtgcagccccatcagaccccccaagtactacacctacaagttcgccgagggcaagctgttcgaggagaccggccacgaggaccccatcaccaagaccagcagagtgctgagactggaggccaagagcaaggacggcaagctggtgcccatgaccgtgttccacaagaccgacagcgaggacctgcagaagaagcccctgctggtgcacgtgtacggcgcctacggcatggacctgaagatgaacttcagacccgagagaagagtgctggtggacgacggctggatcctggcctactgccacgtgagaggcggcggcgagctgggcctgcagtggcacgccgacggcagactgaccaagaagctgaacggcctggccgacctggaggcctgcatcaagaccctgcacggccagggcttcagccagcccagcctgaccaccctgaccgccttcagcgccggcggcgtgctggccggcgccctgtgcaacagcaaccccgagctggtgagagccgtgaccctggaggcccccttcctggacgtgctgaacaccatgatggacaccaccctgcccctgaccctggaggagctggaggagtggggcaaccccagcagcgacgagaagcacaagaactacatcaagagatactgcccctaccagaacatcaagccccagcactaccccagcatccacatcaccgcctacgagaacgacgagagagtgcccctgaagggcatcgtgagctacaccgagaagctgaaggaggccatcgccgagcacgccaaggacaccggcgagggctaccagacccccaacatcatcctggacatccagcccggcggcaaccacgtgatcgaggacagccacaagaagatcaccgcccagatcaagttcctgtacgaggagctgggcctggacagcaccagcgtgttcgaggacctgaagaagtacctgaagttctag

SEQ ID NO: 94719 - DNA, 1998 bp, synthetic construct
  misc_feature 1..1998: note = Description of Artificial Sequence: Synthetic coding sequence
  source 1..1998: mol_type = other DNA
atgcagcagaagaccaagctgttcctgcaggccctgaagtacagcatcccccacctgggcaagtgcatgcagaagcagcacctgaaccactacaacttcgccgaccactgctacaacagaatcaagctgaagaagtaccacctgaccaagtgcctgcagaacaagcccaagatcagcgagctggccagaaacatccccagcagaagcttcagctgcaaggacctgcagcccgtgaagcaggagaacgagaagcccctgcccgagaacatggacgccttcgagaaggtgagaaccaagctggagacccagccccaggaggagtacgagatcatcaacgtggaggtgaagcacggcggcttcgtgtactaccaggagggctgctgcctggtgagaagcaaggacgaggaggccgacaacgacaactacgaggtgctgttcaacctggaggagctgaagctggaccagcccttcatcgactgcatcagagtggcccccgacgagaagtacgtggccgccaagatcagaaccgaggacagcgaggccagcacctgcgtgatcatcaagctgagcgaccagcccgtgatggaggccagcttccccaacgtgagcagcttcgagtgggtgaaggacgaggaggacgaggacgtgctgttctacaccttccagagaaacctgagatgccacgacgtgtacagagccaccttcggcgacaacaagagaaacgagagattctacaccgagaaggaccccagctacttcgtgttcctgtacctgaccaaggacagcagattcctgaccatcaacatcatgaacaagaccaccagcgaggtgtggctgatcgacggcctgagcccctgggacccccccgtgctgatccagaagagaatccacggcgtgctgtactacgtggagcacagagacgacgagctgtacatcctgaccaacgtgggcgagcccaccgagttcaagctgcccccctgggcctgcggcttcatcatggacaccaacagcgaccccaagaactgccccttccagctgtgcagccccatcagaccccccaagtactacacctacaagttcgccgagggcaagctgttcgaggagaccggccacgaggaccccatcaccaagaccagcagagtgctgagactggaggccaagagcaaggacggcaagctggtgcccatgaccgtgttccacaagaccgacagcgaggacctgcagaagaagcccctgctggtgcacgtgtacggcgcctacggcatggacctgaagatgaacttcagacccgagagaagagtgctggtggacgacggctggatcctggcctactgccacgtgagaggcggcggcgagctgggcctgcagtggcacgccgacggcagactgaccaagaagctgaacggcctggccgacctggaggcctgcatcaagaccctgcacggccagggcttcagccagcccagcctgaccaccctgaccgccttcagcgccggcggcgtgctggccggcgccctgtgcaacagcaaccccgagctggtgagagccgtgaccctggaggcccccttcctggacgtgctgaacaccatgatggacaccaccctgcccctgaccctggaggagctggaggagtggggcaaccccagcagcgacgagaagcacaagaactacatcaagagatactgcccctaccagaacatcaagccccagcactaccccagcatccacatcaccgcctacgagaacgacgagagagtgcccctgaagggcatcgtgagctacaccgagaagctgaaggaggccatcgccgagcacgccaaggacaccggcgagggctaccagacccccaacatcatcctggacatccagcccggcggcaaccacgtgatcgaggacagccacaagaagatcaccgcccagatcaagttcctgtacgaggagctgggcctggacagcaccagcgtgttcgaggacctgaagaagtacctgaagttctag

SEQ ID NO: 94720 - DNA, 1986 bp, synthetic construct
  misc_feature 1..1986: note = Description of Artificial Sequence: Synthetic coding sequence
  source 1..1986: mol_type = other DNA
atgcagcagaagaccaagctgttcctgcaggccctgaagtacagcatcccccacctgggcaagtgcatgcagaagcagcacctgaaccactacaacttcgccgaccactgctacaacagaatcaagctgaagaagtaccacctgaccaagtgcctgcagaacaagcccaagatcagcgagctggccagaaacatccccagcagaagcttcagctgcaaggacctgcagcccgtgaagcaggagaacgagaagcccctgcccgagaacatggacgccttcgagaaggtgagaaccaagctggagacccagccccaggaggagtacgagatcatcaacgtggaggtgaagcacggcggcttcgtgtactaccaggagggctgctgcctggtgagaagcaaggacgaggaggccgacaacgacaactacgaggtgctgttcaacctggaggagctgaagctggaccagcccttcatcgactgcatcagagtggcccccgacgagaagtacgtggccgccaagatcagaaccgaggacagcgaggccagcacctgcgtgatcatcaagctgagcgaccagcccgtgatggaggccagcttccccaacgtgagcagcttcgagtgggtgaaggacgaggaggacgaggacgtgctgttctacaccttccagagaaacctgagatgccacgacgtgtacagagccaccttcggcgacaacaagagaaacgagagattctacaccgagaaggaccccagctacttcgtgttcctgtacctgaccaaggacagcagattcctgaccatcaacatcatgaacaagaccaccagcgaggtgtggctgatcgacggcctgagcccctgggacccccccgtgctgatccagaagagaatccacggcgtgctgtactacgtggagcacagagacgacgagctgtacatcctgaccaacgtgggcgagcccaccgagttcaagctgatgagaaccgccgccgacacccccgccatcatgaactgggacctgttcttcaccatgaagagaaacaccaaggtgatcgacctggacatgttcaaggaccactgcgtgctgttcctgaagcacagcaacctgctgtacgtgaacgtgatcggcctggccgacgacagcgtgagaagcctgaaggacggcaagctggtgcccatgaccgtgttccacaagaccgacagcgaggacctgcagaagaagcccctgctggtgcacgtgtacggcgcctacggcatggacctgaagatgaacttcagacccgagagaagagtgctggtggacgacggctggatcctggcctactgccacgtgagaggcggcggcgagctgggcctgcagtggcacgccgacggcagactgaccaagaagctgaacggcctggccgacctggaggcctgcatcaagaccctgcacggccagggcttcagccagcccagcctgaccaccctgaccgccttcagcgccggcggcgtgctggccggcgccctgtgcaacagcaaccccgagctggtgagagccgtgaccctggaggcccccttcctggacgtgctgaacaccatgatggacaccaccctgcccctgaccctggaggagctggaggagtggggcaaccccagcagcgacgagaagcacaagaactacatcaagagatactgcccctaccagaacatcaagccccagcactaccccagcatccacatcaccgcctacgagaacgacgagagagtgcccctgaagggcatcgtgagctacaccgagaagctgaaggaggccatcgccgagcacgccaaggacaccggcgagggctaccagacccccaacatcatcctggacatccagcccggcggcaaccacgtgatcgaggacagccacaagaagatcaccgcccagatcaagttcctgtacgaggagctgggcctggacagcaccagcgtgttcgaggacctgaagaagtacctgaagttctag

SEQ ID NO: 94721 - DNA, 2184 bp, synthetic construct; identical to SEQ ID NO: 94718
  misc_feature 1..2184: note = Description of Artificial Sequence: Synthetic coding sequence
  source 1..2184: mol_type = other DNA

SEQ ID NO: 94722 - DNA, 2184 bp, synthetic construct; identical to SEQ ID NO: 94718
  misc_feature 1..2184: note = Description of Artificial Sequence: Synthetic coding sequence
  source 1..2184: mol_type = other DNA

SEQ ID NO: 94723 - DNA, 2184 bp, synthetic construct; identical to SEQ ID NO: 94718
  misc_feature 1..2184: note = Description of Artificial Sequence: Synthetic coding sequence
  source 1..2184: mol_type = other DNA

SEQ ID NO: 94724 - DNA, 2184 bp, synthetic construct; identical to SEQ ID NO: 94718
  misc_feature 1..2184: note = Description of Artificial Sequence: Synthetic coding sequence
  source 1..2184: mol_type = other DNA

SEQ ID NO: 94725 - DNA, 2184 bp, synthetic construct; identical to SEQ ID NO: 94718
  misc_feature 1..2184: note = Description of Artificial Sequence: Synthetic coding sequence
  source 1..2184: mol_type = other DNA

SEQ ID NO: 94726 - DNA, 456 bp, synthetic construct
  misc_feature 1..456: note = Description of Artificial Sequence: Synthetic coding sequence
  source 1..456: mol_type = other DNA
atgcagcagaagaccaagctgttcctgcaggccctgaagtacagcatcccccacctgggcaagtgcatgcagaagcagcacctgaaccactacaacttcgccgaccactgctacaacagaatcaagctgaagaagtaccacctgaccaagtgcctgcagaacaagcccaagatcagcgagctggccagaaacatccccagcagaagcttcagctgcaaggacctgcagcccgtgaagcaggagaacgagaagcccctgcccgagaacatggacgccttcgagaaggtgagaaccaagctggagacccagccccaggaggagtacgagatcatcaacgtggaggtgaagcacggcggcttcgtgtactaccaggagggctgctgcctggtgagaagcaaggacgaggaggccgacaacgacaactacgaggtgctgttcaacctggaggagctgtag

SEQ ID NO: 94727 - DNA, 1917 bp, synthetic construct
  misc_feature 1..1917: note = Description of Artificial Sequence: Synthetic coding sequence
  source 1..1917: mol_type = other DNA
atggacgccttcgagaaggtgagaaccaagctggagacccagccccaggaggagtacgagatcatcaacgtggaggtgaagcacggcggcttcgtgtactaccaggagggctgctgcctggtgagaagcaaggacgaggaggccgacaacgacaactacgaggtgctgttcaacctggaggagctgaagctggaccagcccttcatcgactgcatcagagtggcccccgacgagaagtacgtggccgccaagatcagaaccgaggacagcgaggccagcacctgcgtgatcatcaagctgagcgaccagcccgtgatggaggccagcttccccaacgtgagcagcttcgagtgggtgaaggacgaggaggacgaggacgtgctgttctacaccttccagagaaacctgagatgccacgacgtgtacagagccaccttcggcgacaacaagagaaacgagagattctacaccgagaaggaccccagctacttcgtgttcctgtacctgaccaaggacagcagattcctgaccatcaacatcatgaacaagaccaccagcgaggtgtggctgatcgacggcctgagcccctgggacccccccgtgctgatccagaagagaatccacggcgtgctgtactacgtggagcacagagacgacgagctgtacatcctgaccaacgtgggcgagcccaccgagttcaagctgatgagaaccgccgccgacacccccgccatcatgaactgggacctgttcttcaccatgaagagaaacaccaaggtgatcgacctggacatgttcaaggaccactgcgtgctgttcctgaagcacagcaacctgctgtacgtgaacgtgatcggcctggccgacgacagcgtgagaagcctgaagctgcccccctgggcctgcggcttcatcatggacaccaacagcgaccccaagaactgccccttccagctgtgcagccccatcagaccccccaagtactacacctacaagttcgccgagggcaagctgttcgaggagaccggccacgaggaccccatcaccaagaccagcagagtgctgagactggaggccaagagcaaggacggcaagctggtgcccatgaccgtgttccacaagaccgacagcgaggacctgcagaagaagcccctgctggtgcacgtgtacggcgcctacggcatggacctgaagatgaacttcagacccgagagaagagtgctggtggacgacggctggatcctggcctactgccacgtgagaggcggcggcgagctgggcctgcagtggcacgccgacggcagactgaccaagaagctgaacggcctggccgacctggaggcctgcatcaagaccctgcacggccagggcttcagccagcccagcctgaccaccctgaccgccttcagcgccggcggcgtgctggccggcgccctgtgcaacagcaaccccgagctggtgagagccgtgaccctggaggcccccttcctggacgtgctgaacaccatgatggacaccaccctgcccctgaccctggaggagctggaggagtggggcaaccccagcagcgacgagaagcacaagaactacatcaagagatactgcccctaccagaacatcaagccccagcactaccccagcatccacatcaccgcctacgagaacgacgagagagtgcccctgaagggcatcgtgagctacaccgagaagctgaaggaggccatcgccgagcacgccaaggacaccggcgagggctaccagacccccaacatcatcctggacatccagcccggcggcaaccacgtgatcgaggacagccacaagaagatcaccgcccagatcaagttcctgtacgaggagctgggcctggacagcaccagcgtgttcgaggacctgaagaagtacctgaagttctag

SEQ ID NO: 94728 - DNA, 1491 bp, synthetic construct
  misc_feature 1..1491: note = Description of Artificial Sequence: Synthetic coding sequence
  source 1..1491: mol_type = other DNA
atgggcagaagagccctgctgctgctgctgctgagcttcctggccccctgggccaccatcgccctgagacccgccctgagagccctgggcagcctgcacctgcccaccaaccccaccagcctgcccgccgtggccaagaactacagcgtgctgtacttccagcagaaggtggaccacttcggcttcaacaccgtgaagaccttcaaccagagatacctggtggccgacaagtactggaagaagaacggcggcagcatcctgttctacaccggcaacgagggcgacatcatctggttctgcaacaacaccggcttcatgtgggacgtggccgaggagctgaaggccatgctggtgttcgccgagcacagatactacggcgagagcctgcccttcggcgacaacagcttcaaggacagcagacacctgaacttcctgaccagcgagcaggccctggccgacttcgccgagctgatcaagcacctgaagagaaccatccccggcgccgagaaccagcccgtgatcgccatcggcggcagctacggcggcatgctggccgcctggttcagaatgaagtacccccacatggtggtgggcgccctggccgccagcgcccccatctggcagttcgaggacctggtgccctgcggcgtgttcatgaagatcgtgaccaccgacttcagaaagagcggcccccactgcagcgagagcatccacagaagctgggacgccatcaacagactgagcaacaccggcagcggcctgcagtggctgaccggcgccctgcacctgtgcagccccctgaccagccaggacatccagcacctgaaggactggatcagcgagacctgggtgaacctggccatggtggactacccctacgccagcaacttcctgcagcccctgcccgcctggcccatcaaggtggtgtgccagtacctgaagaaccccaacgtgagcgacagcctgctgctgcagaacatcttccaggccctgaacgtgtactacaactacagcggccaggtgaagtgcctgaacatcagcgagaccgccaccagcagcctgggcaccctgggctggagctaccaggcctgcaccgaggtggtgatgcccttctgcaccaacggcgtggacgacatgttcgagccccacagctggaacctgaaggagctgagcgacgactgcttccagcagtggggcgtgagacccagacccagctggatcaccaccatgtacggcggcaagaacatcagcagccacaccaacatcgtgttcagcaacggcgagctggacccctggagcggcggcggcgtgaccaaggacatcaccgacaccctggtggccgtgaccatcagcgagggcgcccaccacctggacctgagaaccaagaacgccctggaccccatgagcgtgctgctggccagaagcctggaggtgagacacatgaagaactggatcagagacttctacgacagcgccggcaagcagcactag

SEQ ID NO: 94729 - DNA, 1554 bp, synthetic construct
  misc_feature 1..1554: note = Description of Artificial Sequence: Synthetic coding sequence
  source 1..1554: mol_type = other DNA
atgggcagaagagccctgctgctgctgctgctgagcttcctggccccctgggccaccatcgccctgagacccgccctgagagccctgggcagcctgcacctgcccaccaaccccaccagcctgcccgccgtggccaagaactacagcgtgctgtacttccagcagaaggccctggccgccggccagctgcacatctgcatcatccagctgaaccactacaagacccccctggtggaccacttcggcttcaacaccgtgaagaccttcaaccagagatacctggtggccgacaagtactggaagaagaacggcggcagcatcctgttctacaccggcaacgagggcgacatcatctggttctgcaacaacaccggcttcatgtgggacgtggccgaggagctgaaggccatgctggtgttcgccgagcacagatactacggcgagagcctgcccttcggcgacaacagcttcaaggacagcagacacctgaacttcctgaccagcgagcaggccctggccgacttcgccgagctgatcaagcacctgaagagaaccatccccggcgccgagaaccagcccgtgatcgccatcggcggcagctacggcggcatgctggccgcctggttcagaatgaagtacccccacatggtggtgggcgccctggccgccagcgcccccatctggcagttcgaggacctggtgccctgcggcgtgttcatgaagatcgtgaccaccgacttcagaaagagcggcccccactgcagcgagagcatccacagaagctgggacgccatcaacagactgagcaacaccggcagcggcctgcagtggctgaccggcgccctgcacctgtgcagccccctgaccagccaggacatccagcacctgaaggactggatcagcgagacctgggtgaacctggccatggtggactacccctacgccagcaacttcctgcagcccctgcccgcctggcccatcaaggtggtgtgccagtacctgaagaaccccaacgtgagcgacagcctgctgctgcagaacatcttccaggccctgaacgtgtactacaactacagcggccaggtgaagtgcctgaacatcagcgagaccgccaccagcagcctgggcaccctgggctggagctaccaggcctgcaccgaggtggtgatgcccttctgcaccaacggcgtggacgacatgttcgagccccacagctggaacctgaaggagctgagcgacgactgcttccagcagtggggcgtgagacccagacccagctggatcaccaccatgtacggcggcaagaacatcagcagccacaccaacatcgtgttcagcaacggcgagctggacccctggagcggcggcggcgtgaccaaggacatcaccgacaccctggtggccgtgaccatcagcgagggcgcccaccacctggacctgagaaccaagaacgccctggaccccatgagcgtgctgctggccagaagcctggaggtgagacacatgaagaactggatcagagacttctacgacagcgccggcaagcagcactag

SEQ ID NO: 94730 - DNA, 1176 bp, synthetic construct
  misc_feature 1..1176: note = Description of Artificial Sequence: Synthetic coding sequence
  source 1..1176: mol_type = other DNA
atgtgggacgtggccgaggagctgaaggccatgctggtgttcgccgagcacagatactacggcgagagcctgcccttcggcgacaacagcttcaaggacagcagacacctgaacttcctgaccagcgagcaggccctggccgacttcgccgagctgatcaagcacctgaagagaaccatccccggcgccgagaaccagcccgtgatcgccatcggcggcagctacggcggcatgctggccgcctggttcagaatgaagtacccccacatggtggtgggcgccctggccgccagcgcccccatctggcagttcgaggacctggtgccctgcggcgtgttcatgaagatcgtgaccaccgacttcagaaagagcggcccccactgcagcgagagcatccacagaagctgggacgccatcaacagactgagcaacaccggcagcggcctgcagtggctgaccggcgccctgcacctgtgcagccccctgaccagccaggacatccagcacctgaaggactggatcagcgagacctgggtgaacctggccatggtggactacccctacgccagcaacttcctgcagcccctgcccgcctggcccatcaaggtggtgtgccagtacctgaagaaccccaacgtgagcgacagcctgctgctgcagaacatcttccaggccctgaacgtgtactacaactacagcggccaggtgaagtgcctgaacatcagcgagaccgccaccagcagcctgggcaccctgggctggagctaccaggcctgcaccgaggtggtgatgcccttctgcaccaacggcgtggacgacatgttcgagccccacagctggaacctgaaggagctgagcgacgactgcttccagcagtggggcgtgagacccagacccagctggatcaccaccatgtacggcggcaagaacatcagcagccacaccaacatcgtgttcagcaacggcgagctggacccctggagcggcggcggcgtgaccaaggacatcaccgacaccctggtggccgtgaccatcagcgagggcgcccaccacctggacctgagaaccaagaacgccctggaccccatgagcgtgctgctggccagaagcctggaggtgagacacatgaagaactggatcagagacttctacgacagcgccggcaagcagcactag

SEQ ID NO: 94731 - DNA, 1428 bp, synthetic construct
  misc_feature 1..1428: note = Description of Artificial Sequence: Synthetic coding sequence
  source 1..1428: mol_type = other DNA
atggagggcctgctgaccagatgcagagccctgcccgccctggccacctgcagcagacagctgagcggctacgtgccctgcagattccaccactgcgcccccagaagaggcagaagactgctgctgagcagagtgttccagccccagaacctgagagaggacagagtgctgagcctgcaggacaagagcgacgacctgacctgcaagagccagagactgatgctgcaggtgggcctgatctaccccgccagccccggctgctaccacctgctgccctacaccgtgagagccatggagaagctggtgagagtgatcgaccaggagatgcaggccatcggcggccagaaggtgaacatgcccagcctgagccccgccgagctgtggcaggccaccaacagatgggacctgatgggcaaggagctgctgagactgagagacagacacggcaaggagtactgcctgggccccacccacgaggaggccatcaccgccctgatcgccagccagaagaagctgagctacaagcagctgcccttcctgctgtaccaggtgaccagaaagttcagagacgagcccagacccagattcggcctgctgagaggcagagagttctacatgaaggacatgtacaccttcgacagcagccccgaggccgcccagcagacctacagcctggtgtgcgacgcctactgcagcctgttcaacaagctgggcctgcccttcgtgaaggtgcaggccgacgtgggcaccatcggcggcaccgtgagccacgagttccagctgcccgtggacatcggcgaggacagactggccatctgccccagatgcagcttcagcgccaacatggagaccctggacctgagccagatgaactgccccgcctgccagggccccctgaccaagaccaagggcatcgaggtgggccacaccttctacctgggcaccaagtacagcagcatcttcaacgcccagttcaccaacgtgtgcggcaagcccaccctggccgagatgggctgctacggcctgggcgtgaccagaatcctggccgccgccatcgaggtgctgagcaccgaggactgcgtgagatggcccagcctgctggccccctaccaggcctgcctgatcccccccaagaagggcagcaaggagcaggccgccagcgagctgatcggccagctgtacgaccacatcaccgaggccgtgccccagctgcacggcgaggtgctgctggacgacagaacccacctgaccatcggcaacagactgaaggacgccaacaagttcggctaccccttcgtgatcatcgccggcaagagagccctggaggaccccgcccacttcgaggtgtggtgccagaacaccggcgaggtggccttcctgaccaaggacggcgtgatggacctgctgacccccgtgcagaccgtgtag

SEQ ID NO: 94732 - DNA, 498 bp, synthetic construct
  misc_feature 1..498: note = Description of Artificial Sequence: Synthetic coding sequence
  source 1..498: mol_type = other DNA
atggccaagatgaacctgagcagctacatcctgatcctgaccttcagcctgttcagccagggcatcctgctgagcgccagcaagagcatcagaaacctggacgacgacatggtgttcaacaccttcagactgggcaagggcttccagaaggaggacaccgccgagaagagcgtgatcgcccccagcctggagcagtacaagaacgacgagagcagcttcatgaacgaggaggagaacaaggtgagcaagaacaccggcagcaagcacaacttcctgaaccacggcctgcccctgaacctggccatcaagccctacctggccctgaagggcagcgtggccttccccgccgagaacggcgtgcagaacaccgagagcacccaggagaagagagagatcggcgacgaggagaacagcgccaagttccccatcggcagaagagacttcgacatgctgagatgcatgctgggcagagtgtacagaccctgctggcaggtgtag

SEQ ID NO: 94733 - DNA, 2598 bp, synthetic construct
  misc_feature 1..2598: note = Description of Artificial Sequence: Synthetic coding sequence
  source 1..2598: mol_type = other DNA
atggccctggtgctgggcagcctgctgctgctgggcctgtgcggcaacagcttcagcggcggccagcccagcagcaccgacgcccccaaggcctggaactacgagctgcccgccaccaactacgagacccaggacagccacaaggccggccccatcggcatcctgttcgagctggtgcacatcttcctgtacgtggtgcagcccagagacttccccgaggacaccctgagaaagttcctgcagaaggcctacgagagcaagatcgactacgacaagcccgagaccgtgatcctgggcctgaagatcgtgtactacgaggccggcatcatcctgtgctgcgtgctgggcctgctgttcatcatcctgatgcccctggtgggctacttcttctgcatgtgcagatgctgcaacaagtgcggcggcgagatgcaccagagacagaaggagaacggccccttcctgagaaagtgcttcgccatcagcctgctggtgatctgcatcatcatcagcatcggcatcttctacggcttcgtggccaaccaccaggtgagaaccagaatcaagagaagcagaaagctggccgacagcaacttcaaggacctgagaaccctgctgaacgagacccccgagcagatcaagtacatcctggcccagtacaacaccaccaaggacaaggccttcaccgacctgaacagcatcaacagcgtgctgggcggcggcatcctggacagactgagacccaacatcatccccgtgctggacgagatcaagagcatggccaccgccatcaaggagaccaaggaggccctggagaacatgaacagcaccctgaagagcctgcaccagcagagcacccagctgagcagcagcctgaccagcgtgaagaccagcctgagaagcagcctgaacgaccccctgtgcctggtgcaccccagcagcgagacctgcaacagcatcagactgagcctgagccagctgaacagcaaccccgagctgagacagctgccccccgtggacgccgagctggacaacgtgaacaacgtgctgagaaccgacctggacggcctggtgcagcagggctaccagagcctgaacgacatccccgacagagtgcagagacagaccaccaccgtggtggccggcatcaagagagtgctgaacagcatcggcagcgacatcgacaacgtgacccagagactgcccatccaggacatcctgagcgccttcagcgtgtacgtgaacaacaccgagagctacatccacagaaacctgcccaccctggaggagtacgacagctactggtggctgggcggcctggtgatctgcagcctgctgaccctgatcgtgatcttctactacctgggcctgctgtgcggcgtgtgcggctacgacagacacgccacccccaccaccagaggctgcgtgagcaacaccggcggcgtgttcctgatggtgggcgtgggcctgagcttcctgttctgctggatcctgatgatcatcgtggtgctgaccttcgtgttcggcgccaacgtggagaagctgatctgcgagccctacaccagcaaggagctgttcagagtgctggacaccccctacctgctgaacgaggactgggagtactacctgagcggcaagctgttcaacaagagcaagatgaagctgaccttcgagcaggtgtacagcgactgcaagaagaacagaggcacctacggcaccctgcacctgcagaacagcttcaacatcagcgagcacctgaacatcaacgagcacaccggcagcatcagcagcgagctggagagcctgaaggtgaacctgaacatcttcctgctgggcgccgccggcagaaagaacctgcaggacttcgccgcctgcggcatcgacagaatgaactacgacagctacctggcccagaccggcaagagccccgccggcgtgaacctgctgagcttcgcctacgacctggaggccaaggccaacagcctgccccccggcaacctgagaaacagcctgaagagagacgcccagaccatcaagaccatccaccagcagagagtgctgcccatcgagcagagcctgagcaccctgtaccagagcgtgaagatcctgcagagaaccggcaacggcctgctggagagagtgaccagaatcctggccagcctggacttcgcccagaacttcatcaccaacaacaccagcagcgtgatcatcgaggagaccaagaagtacggcagaaccatcatcggctacttcgagcactacctgcagtggatcgagttcagcatcagcgagaaggtggccagctgcaagcccgtggccaccgccctggacaccgccgtggacgtgttcctgtgcagctacatcatcgaccccctgaacctgttctggttcggcatcggcaaggccaccgtgttcctgctgcccgccctgatcttcgccgtgaagctggccaagtactacagaagaatggacagcgaggacgtgtacgacgacgtggagaccatccccatgaagaacatggagaacggcaacaacggctaccacaaggaccacgtgtacggcatccacaaccccgtgatgaccagccccagccagcactag

SEQ ID NO: 94734 - DNA, 2571 bp, synthetic construct
  misc_feature 1..2571: note = Description of Artificial Sequence: Synthetic coding sequence
  source 1..2571: mol_type = other DNA
atggccctggtgctgggcagcctgctgctgctgggcctgtgcggcaacagcttcagcggcggccagcccagcagcaccgacgcccccaaggcctggaactacgagctgcccgccaccaactacgagacccaggacagccacaaggccggccccatcggcatcctgttcgagctggtgcacatcttcctgtacgtggtgcagcccagagacttccccgaggacaccctgagaaagttcctgcagaaggcctacgagagcaagatcgactacgacaagatcgtgtactacgaggccggcatcatcctgtgctgcgtgctgggcctgctgttcatcatcctgatgcccctggtgggctacttcttctgcatgtgcagatgctgcaacaagtgcggcggcgagatgcaccagagacagaaggagaacggccccttcctgagaaagtgcttcgccatcagcctgctggtgatctgcatcatcatcagcatcggcatcttctacggcttcgtggccaaccaccaggtgagaaccagaatcaagagaagcagaaagctggccgacagcaacttcaaggacctgagaaccctgctgaacgagacccccgagcagatcaagtacatcctggcccagtacaacaccaccaaggacaaggccttcaccgacctgaacagcatcaacagcgtgctgggcggcggcatcctggacagactgagacccaacatcatccccgtgctggacgagatcaagagcatggccaccgccatcaaggagaccaaggaggccctggagaacatgaacagcaccctgaagagcctgcaccagcagagcacccagctgagcagcagcctgaccagcgtgaagaccagcctgagaagcagcctgaacgaccccctgtgcctggtgcaccccagcagcgagacctgcaacagcatcagactgagcctgagccagctgaacagcaaccccgagctgagacagctgccccccgtggacgccgagctggacaacgtgaacaacgtgctgagaaccgacctggacggcctggtgcagcagggctaccagagcctgaacgacatccccgacagagtgcagagacagaccaccaccgtggtggccggcatcaagagagtgctgaacagcatcggcagcgacatcgacaacgtgacccagagactgcccatccaggacatcctgagcgccttcagcgtgtacgtgaacaacaccgagagctacatccacagaaacctgcccaccctggaggagtacgacagctactggtggctgggcggcctggtgatctgcagcctgctgaccctgatcgtgatcttctactacctgggcctgctgtgcggcgtgtgcggctacgacagacacgccacccccaccaccagaggctgcgtgagcaacaccggcggcgtgttcctgatggtgggcgtgggcctgagcttcctgttctgctggatcctgatgatcatcgtggtgctgaccttcgtgttcggcgccaacgtggagaagctgatctgcgagccctacaccagcaaggagctgttcagagtgctggacaccccctacctgctgaacgaggactgggagtactacctgagcggcaagctgttcaacaagagcaagatgaagctgaccttcgagcaggtgtacagcgactgcaagaagaacagaggcacctacggcaccctgcacctgcagaacagcttcaacatcagcgagcacctgaacatcaacgagcacaccggcagcatcagcagcgagctggagagcctgaaggtgaacctgaacatcttcctgctgggcgccgccggcagaaagaacctgcaggacttcgccgcctgcggcatcgacagaatgaactacgacagctacctggcccagaccggcaagagccccgccggcgtgaacctgctgagcttcgcctacgacctggaggccaaggccaacagcctgccccccggcaacctgagaaacagcctgaagagagacgcccagaccatcaagaccatccaccagcagagagtgctgcccatcgagcagagcctgagcaccctgtaccagagcgtgaagatcctgcagagaaccggcaacggcctgctggagagagtgaccagaatcctggccagcctggacttcgcccagaacttcatcaccaacaacaccagcagcgtgatcatcgaggagaccaagaagtacggcagaaccatcatcggctacttcgagcactacctgcagtggatcgagttcagcatcagcgagaaggtggccagctgcaagcccgtggccaccgccctggacaccgccgtggacgtgttcctgtgcagctacatcatcgaccccctgaacctgttctggttcggcatcggcaaggccaccgtgttcctgctgcccgccctgatcttcgccgtgaagctggccaagtactacagaagaatggacagcgaggacgtgtacgacgacgtggagaccatccccatgaagaacatggagaacggcaacaacggctaccacaaggaccacgtgtacggcatccacaaccccgtgatgaccagccccagccagcactag

SEQ ID NO: 94735 - DNA, 2571 bp, synthetic construct; identical to SEQ ID NO: 94734
  misc_feature 1..2571: note = Description of Artificial Sequence: Synthetic coding sequence
  source 1..2571: mol_type = other DNA

SEQ ID NO: 94736 - DNA, 177 bp, synthetic construct
  misc_feature 1..177: note = Description of Artificial Sequence: Synthetic coding sequence
  source 1..177: mol_type = other DNA
atggccctggtgctgggcagcctgctgctgctgggcctgtgcggcaacagcttcagcggcggccagcccagcagcaccgacgcccccaaggcctggaactacgagctgcccgccaccaactacgagacccaggacagccacaaggccggccccatcggcatcctgttcgagctgtag

SEQ ID NO: 94737 - DNA, 123 bp, synthetic construct
  misc_feature 1..123: note = Description of Artificial Sequence: Synthetic coding sequence
  source 1..123: mol_type = other DNA
atggccctggtgctgggcagcctgctgctgctgggcctgtgcggcaacagcttcagcggcggccagcccagcagcaccgacgcccccaaggcctggaactacgagctgcccgccaccaactag

SEQ ID NO: 94738 - DNA, 2598 bp, synthetic construct; identical to SEQ ID NO: 94733
  misc_feature 1..2598: note = Description of Artificial Sequence: Synthetic coding sequence
  source 1..2598: mol_type = other DNA

SEQ ID NO: 94739 - DNA, 45 bp, synthetic construct
  misc_feature 1..45: note = Description of Artificial Sequence: Synthetic coding sequence
  source 1..45: mol_type = other DNA
atggccctggtgctgggcagcctgctgctgctgggcctgtgctag

SEQ ID NO: 94740 - DNA, 2505 bp, synthetic construct
  misc_feature 1..2505: note = Description of Artificial Sequence: Synthetic coding sequence
  source 1..2505: mol_type = other DNA
atggccctggtgctgggcagcctgctgctgctgggcctgtgcggcaacagcttcagcggcggccagcccagcagcaccgacgcccccaaggcctggaactacgagctgcccgccaccaactacgagacccaggacagccacaaggccggccccatcggcatcctgttcgagctggtgcacatcttcctgtacgtggtgcagcccagagacttccccgaggacaccctgagaaagttcctgcagaaggcctacgagagcaagatcgactacgacaagcccgagaccgtgatcctgggcctgaagatcgtgtactacgaggccggcatcatcctgtgctgcgtgctgggcctgctgttcatcatcctgatgcccctggtgggctacttcttctgcatgtgcagatgctgcaacaagtgcggcggcgagatgcaccagagacagaaggagaacggccccttcctgagaaagtgcttcgccatcagcctgctggtgatctgcatcatcatcagcatcggcatcttctacggcttcgtggccaaccaccaggtgagaaccagaatcaagagaagcagaaagctggccgacagcaacttcaaggacctgagaaccctgctgaacgagacccccgagcagatcaagtacatcctggcccagtacaacaccaccaaggacaaggccttcaccgacctgaacagcatcaacagcgtgctgggcggcggcatcctggacagactgagacccaacatcatccccgtgctggacgagatcaagagcatggccaccgccatcaaggagaccaaggaggccctggagaacatgaacagcaccctgaagagcctgcaccagcagagcacccagctgagcagcagcctgaccagcgtgaagaccagcctgagaagcagcctgaacgaccccctgtgcctggtgcaccccagcagcgagacctgcaacagcatcagactgagcctgagccagctgaacagcaaccccgagctgagacagctgccccccgtggacgccgagctggacaacgtgaacaacgtgctgagaaccgacctggacggcctggtgcagcagggctaccagagcctgaacgacatccccgacagagtgcagagacagaccaccaccgtggtggccggcatcaagagagtgctgaacagcatcggcagcgacatcgacaacgtgacccagagactgcccatccaggacatcctgagcgccttcagcgtgtacgtgaacaacaccgagagctacatccacagaaacctgcccaccctggaggagtacgacagctactggtggctgggcggcctggtgatctgcagcctgctgaccctgatcgtgatcttctactacctgggcctgctgtgcggcgtgtgcggctacgacagacacgccacccccaccaccagaggctgcgtgagcaacaccggcggcgtgttcctgatggtgggcgtgggcctgagcttcctgttctgctggatcctgatgatcatcgtggtgctgaccttcgtgttcggcgccaacgtggagaagctgatctgcgagccctacaccagcaaggagctgttcagagtgctggacaccccctacctgctgaacgaggactgggagtactacctgagcggcaagctgttcaacaagagcaagatgaagctgaccttcgagcaggtgtacagcgactgcaagaagaacagaggcacctacggcaccctgcacctgcagaacagcttcaacatcagcgagcacctgaacatcaacgagcacaccggcagcatcagcagcgagctggagagcctgaaggtgaacctgaacatcttcctgctgggcgccgccggcagaaagaacctgcaggacttcgccgcctgcggcatcgacagaatgaactacgacagctacctggcccagaccggcaagagccccgccggcgtgaacctgctgagcttcgcctacgacctggaggccaaggccaacagcctgccccccggcaacctgagaaacagcctgaagagagacgcccagaccatcaagaccatccaccagcagagagtgctgcccatcgagcagagcctgagcaccctgtaccagagcgtgaagatcctgcagagaaccggcaacggcctgctggagagagtgaccagaatcctggccagcctggacttcgcccagaacttcatcaccaacaacaccagcagcgtgatcatcgaggagaccaagaagtacggcagaaccatcatcggctacttcgagcactacctgcagtggatcgagttcagcatcagcgagaaggtggccagctgcaagcccgtggccaccgccctggacaccgccgtggacgtgttcctgtgcagctacatcatcgaccccctgaacctgttctggttcggcatcggcaaggccaccgtgttcctgctgcccgccctgatcttcgccgtgaagctggccaagtactacagaagaatggacagcgaggacgtgtacgacgaccccagccagcactag

SEQ ID NO: 94741 - DNA, 2529 bp, synthetic construct
  misc_feature 1..2529: note = Description of Artificial Sequence: Synthetic coding sequence
  source 1..2529: mol_type = other DNA
atggccctggtgctgggcagcctgctgctgctgggcctgtgcggcaacagcttcagcggcggccagcccagcagcaccgacgcccccaaggcctggaactacgagctgcccgccaccaactacgagacccaggacagccacaaggccggccccatcggcatcctgttcgagctggtgcacatcttcctgtacgtggtgcagcccagagacttccccgaggacaccctgagaaagttcctgcagaaggcctacgagagcaagatcgactacgacaagcccgagaccgtgatcctgggcctgaagatcgtgtactacgaggccggcatcatcctgtgctgcgtgctgggcctgctgttcatcatcctgatgcccctggtgggctacttcttctgcatgtgcagatgctgcaacaagtgcggcggcgagatgcaccagagacagaaggagaacggccccttcctgagaaagtgcttcgccatcagcctgctggtgatctgcatcatcatcagcatcggcatcttctacggcttcgtggccaaccaccaggtgagaaccagaatcaagagaagcagaaagctggccgacagcaacttcaaggacctgagaaccctgctgaacgagacccccgagcagatcaagtacatcctggcccagtacaacaccaccaaggacaaggccttcaccgacctgaacagcatcaacagcgtgctgggcggcggcatcctggacagactgagacccaacatcatccccgtgctggacgagatcaagagcatggccaccgccatcaaggagaccaaggaggccctggagaacatgaacagcaccctgaagagcctgcaccagcagagcacccagctgagcagcagcctgaccagcgtgaagaccagcctgagaagcagcctgaacgaccccctgtgcctggtgcaccccagcagcgagacctgcaacagcatcagactgagcctgagccagctgaacagcaaccccgagctgagacagctgccccccgtggacgccgagctggacaacgtgaacaacgtgctgagaaccgacctggacggcctggtgcagcagggctaccagagcctgaacgacatccccgacagagtgcagagacagaccaccaccgtggtggccggcatcaagagagtgctgaacagcatcggcagcgacatcgacaacgtgacccagagactgcccatccaggacatcctgagcgccttcagcgtgtacgtgaacaacaccgagagctacatccacagaaacctgcccaccctggaggagtacgacagctactggtggctgggcggcctggtgatctgcagcctgctgaccctgatcgtgatcttctactacctgggcctgctgtgcggcgtgtgcggctacgacagacacgccacccccaccaccagaggctgcgtgagcaacaccggcggcgtgttcctgatggtgggcgtgggcctgagcttcctgttctgctggatcctgatgatcatcgtggtgctgaccttcgtgttcggcgccaacgtggagaagctgatctgcgagccctacaccagcaaggagctgttcagagtgctggacaccccctacctgctgaacgaggactgggagtactacctgagcggcaagctgttcaacaagagcaagatgaagctgaccttcgagcaggtgtacagcgactgcaagaagaacagaggcacctacggcaccctgcacctgcagaacagcttcaacatcagcgagcacctgaacatcaacgagcacaccggcagcatcagcagcgagctggagagcctgaaggtgaacctgaacatcttcctgctgggcgccgccggcagaaagaacctgcaggacttcgccgcctgcggcatcgacagaatgaactacgacagctacctggcccagaccggcaagagccccgccggcgtgaacctgctgagcttcgcctacgacctggaggccaaggccaacagcctgccccccggcaacctgagaaacagcctgaagagagacgcccagaccatcaagaccatccaccagcagagagtgctgcccatcgagcagagcctgagcaccctgtaccagagcgtgaagatcctgcagagaaccggcaacggcctgctggagagagtgaccagaatcctggccagcctggacttcgcccagaacttcatcaccaacaacaccagcagcgtgatcatcgaggagaccaagaagtacggcagaaccatcatcggctacttcgagcactacctgcagtggatcgagttcagcatcagcgagaaggtggccagctgcaagcccgtggccaccgccctggacaccgccgtggacgtgttcctgtgcagctacatcatcgaccccctgaacctgttctggttcggcatcggcaaggccaccgtgttcctgctgcccgccctgatcttcgccgtgaagctggccaagtactacagaagaatggacagcgaggacgtgtacgacgacgtggagaccatccccatgaagaaccccagccagcactag

SEQ ID NO: 94742 - DNA, 2493 bp, synthetic construct
  misc_feature 1..2493: note = Description of Artificial Sequence: Synthetic coding sequence
  source 1..2493: mol_type = other DNA
atggccctggtgctgggcagcctgctgctgctgggcctgtgcggcaacagcttcagcggcggccagcccagcagcaccgacgcccccaaggcctggaactacgagctgcccgccaccaactacgagacccaggacagccacaaggccggccccatcggcatcctgttcgagctggtgcacatcttcctgtacgtggtgcagcccagagacttccccgaggacaccctgagaaagttcctgcagaaggcctacgagagcaagatcgactacgacaagatcgtgtactacgaggccggcatcatcctgtgctgcgtgctgggcctgctgttcatcatcctgatgcccctggtgggctacttcttctgcatgtgcagatgctgcaacaagtgcggcggcgagatgcaccagagacagaaggagaacggccccttcctgagaaagtgcttcgccatcagcctgctggtgatctgcatcatcatcagcatcggcatcttctacggcttcgtggccaaccaccaggtgagaaccagaatcaagagaagcagaaagctggccgacagcaacttcaaggacctgagaaccctgctgaacgagacccccgagcagatcaagtacatcctggcccagtacaacaccaccaaggacaaggccttcaccgacctgaacagcatcaacagcgtgctgggcggcggcatcctggacagactgagacccaacatcatccccgtgctggacgagatcaagagcatggccaccgccatcaaggagaccaaggaggccctggagaacatgaacagcaccctgaagagcctgcaccagcagagcacccagctgagcagcagcctgaccagcgtgaagaccagcctgagaagcagcctgaacgaccccctgtgcctggtgcaccccagcagcgagacctgcaacagcatcagactgagcctgagccagctgaacagcaaccccgagctgagacagctgccccccgtggacgccgagctggacaacgtgaacaacgtgctgagaaccgacctggacggcctggtgcagcagggctaccagagcctgaacgacatccccgacagagtgcagagacagaccaccaccgtggtggccggcatcaagagagtgctgaacagcatcggcagcgacatcgacaacgtgacccagagactgcccatccaggacatcctgagcgccttcagcgtgtacgtgaacaacaccgagagctacatccacagaaacctgcccaccctggaggagtacgacagctactggtggctgggcggcctggtgatctgcagcctgctgaccctgatcgtgatcttctactacctgggcctgctgtgcggcgtgtgcggctacgacagacacgccacccccaccaccagaggctgcgtgagcaacaccggcggcgtgttcctgatggtgggcgtgggcctgagcttcctgttctgctggatcctgatgatcatcgtggtgctgaccttcgtgttcggcgccaacgtggagaagctgatctgcgagccctacaccagcaaggagctgttcagagtgctggacaccccctacctgctgaacgaggactgggagtactacctgagcggcaagctgttcaacaagagcaagatgaagctgaccttcgagcaggtgtacagcgactgcaagaagaacagaggcacctacggcaccctgcacctgcagaacagcttcaacatcagcgagcacctgaacatcaacgagcacaccggcagcatcagcagcgagctggagagcctgaaggtgaacctgaacatcttcctgctgggcgccgccggcagaaagaacctgcaggacttcgccgcctgcggcatcgacagaatgaactacgacagctacctggcccagaccggcaagagccccgccggcgtgaacctgctgagcttcgcctacgacctggaggccaaggccaacagcctgccccccggcaacctgagaaacagcctgaagagagacgcccagaccatcaagaccatccaccagcagagagtgctgcccatcgagcagagcctgagcaccctgtaccagagcgtgaagatcctgcagagaaccggcaacggcctgctggagagagtgaccagaatcctggccagcctggacttcgcccagaacttcatcaccaacaacaccagcagcgtgatcatcgaggagaccaagaagtacggcagaaccatcatcggctacttcgagcactacctgcagtggatcgagttcagcatcagcgagaaggtggccagctgcaagcccgtggccaccgccctggacaccgccgtggacgtgttcctgtgcagctacatcatcgaccccctgaacctgttctggttcggcatcggcaaggccaccgtgttcctgctgcccgccctgatcttcgccgtgaagctggccaagtactacagaagaatggacagcgaggacgtgtacgacgacagcagctgggtgaccagcgtgcagtgctag

SEQ ID NO: 94743 - DNA, 681 bp, synthetic construct
  misc_feature 1..681: note = Description of Artificial Sequence: Synthetic coding sequence
  source 1..681: mol_type = other DNA
atggaggccgagagaagaagacaggccgagaagcccaagaagggcagagtgggcagcaacctgctgcccgagagacaccccgccaccggcacccccaccaccaccgtggacagcagcgcccccccctgcagaagactgcccggcgccggcggcggcagaagcagattcagcccccagggcggccagagaggcagaccccacagcagaagaagacacagaaccaccttcagccccgtgcagctggagcagctggagagcgccttcggcagaaaccagtaccccgacatctgggccagagagagcctggccagagacaccggcctgagcgaggccagaatccaggtgtggttccagaacagaagagccaagcagagaaagcaggagagaagcctgctgcagcccctggcccacctgagccccgccgccttcagcagcttcctgcccgagagcaccgcctgcccctacagctacgccgccccccccccccccgtgacctgcttcccccacccctacagccacgccctgcccagccagcccagcaccggcggcgccttcgccctgagccaccagagcgaggactggtaccccaccctgcaccccgcccccgccggccacctgccctgccccccccccccccccatgctgcccctgagcctggagcccagcaagagctggaactag

SEQ ID NO: 94744 - DNA, 417 bp, synthetic construct
  misc_feature 1..417: note = Description of Artificial Sequence: Synthetic coding sequence
  source 1..417: mol_type = other DNA
aacatcagcctgtgccccgagatctgcttccagaagatcgagagccaggtgtacttcgtgagagtggacagcggcatccagcccggcagcgacatcagcatctactacgaccccatgatcagcaagctgatcacctacggcagcgacagaaccgaggccctgaagagaatggccgacgccctggacaactacgtgatcagaggcgtgacccacaacatcgccctgctgagagaggtgatcatcaacagcagattcgtgaagggcgacatcagcaccaagttcctgagcgacgtgtaccccgacggcttcaagggccacatgctgaccaagagcgagaagaaccagctgctggccatcgccagcagcctgttcgtggccttccagctgagagcccagcacttccaggagaacagctag

SEQ ID NO: 94745 - DNA, 363 bp, synthetic construct
  misc_feature 1..363: note = Description of Artificial Sequence: Synthetic coding sequence
  source 1..363: mol_type = other DNA
atgagcatccagttcctgggcaccgtgtacaaggtgaacatcctgaccagactggccgccgagctgaacaagttcatgctggagaaggtgaccgaggacaccagcagcgtgctgagaagccccatgcccggcgtggtggtggccgtgagcgtgaagcccggcgacgccgccaccagcagcctgagcgtggagatctgcctgttctggaccttccaggtggccgagggccaggagatctgcgtgatcgaggccatgaagatgcagaacagcatgaccgccggcaagaccggcaccgtgaagagcgtgcactgccaggccggcgacaccgtgggcgagggcgacctgctggtggagctggagtag

SEQ ID NO: 94746 - DNA, 2046 bp, synthetic construct
  misc_feature 1..2046: note = Description of Artificial Sequence: Synthetic coding sequence
  source 1..2046: mol_type = other DNA
atggccggcttctgggtgggcaccgcccccctggtggccgccggcagaagaggcagatggcccccccagcagctgatgctgagcgccgccctgagaaccctgaagcacgtgctgtactacagcagacagtgcctgatggtgagcagaaacctgggcagcgtgggctacgaccccaacgagaagaccttcgacaagatcctggtggccaacagaggcgagatcgcctgcagagtgatcagaacctgcaagaagatgggcatcaagaccgtggccatccacagcgacgtggacgccagcagcgtgcacgtgaagatggccgacgaggccgtgtgcgtgggccccgcccccaccagcaagagctacctgaacatggacgccatcatggaggccatcaagaagaccagagcccaggccgtgcaccccggctacggcttcctgagcgagaacaaggagttcgccagatgcctggccgccgaggacgtggtgttcatcggccccgacacccacgccatccaggccatgggcgacaagatcgagagcaagctgctggccaagaaggccgaggtgaacaccatccccggcttcgacggcgtggtgaaggacgccgaggaggccgtgagaatcgccagagagatcggctaccccgtgatgatcaaggccagcgccggcggcggcggcaagggcatgagaatcgcctgggacgacgaggagaccagagacggcttcagactgagcagccaggaggccgccagcagcttcggcgacgacagactgctgatcgagaagttcatcgacaaccccagacacatcgagatccaggtgctgggcgacaagcacggcaacgccctgtggctgaacgagagagagtgcagcatccagagaagaaaccagaaggtggtggaggaggcccccagcatcttcctggacgccgagaccagaagagccatgggcgagcaggccgtggccctggccagagccgtgaagtacagcagcgccggcaccgtggagttcctggtggacagcaagaagaacttctacttcctggagatgaacaccagactgcaggtggagcaccccgtgaccgagtgcatcaccggcctggacctggtgcaggagatgatcagagtggccaagggctaccccctgagacacaagcaggccgacatcagaatcaacggctgggccgtggagtgcagagtgtacgccgaggacccctacaagagcttcggcctgcccagcatcggcagactgagccagtaccaggagcccctgcacctgcccggcgtgagagtggacagcggcatccagcccggcagcgacatcagcatctactacgaccccatgatcagcaagctgatcacctacggcagcgacagaaccgaggccctgaagagaatggccgacgccctggacaactacgtgatcagaggcgtgacccacaacatcgccctgctgagagaggtgatcatcaacagcagattcgtgaagggcgacatcagcaccaagttcctgagcgacgtgtaccccgacggcttcaagggccacatgctgaccaagagcgagaagaaccagctgctggccatcgccagcagcctgttcgtggccttccagctgagagcccagcacttccaggagaacagcagaatgcccgtgatcaagcccgacatcgccaactgggagctgagcgtgaagctgcacgacaaggtgcacaccgtggtggccagcaacaacggcagcgtgttcagcgtggaggtggacggcagcaagctgaacgtgaccagcacctggaacctggccagccccctgctgagcgtgagcgtggacggcacccagagaaccgtgcagtgcctgagcagagaggccggcggcaacatgagcatccagttcctgggcaccgtggtggccgagggccaggagatctgcgtgatcgaggccatgaagatgcagaacagcatgaccgccggcaagaccggcaccgtgaagagcgtgcactgccaggccggcgacaccgtgggcgagggcgacctgctggtggagctggagtag

SEQ ID NO: 94747 - DNA, 2187 bp, synthetic construct
  misc_feature 1..2187: note = Description of Artificial Sequence: Synthetic coding sequence
  source 1..2187: mol_type = other DNA
atggccggcttctgggtgggcaccgcccccctggtggccgccggcagaagaggcagatggcccccccagcagctgatgctgagcgccgccctgagaaccctgaagcacgtgctgtactacagcagacagtgcctgatggtgagcagaaacctgggcagcgtgggctacgaccccaacgagaagaccttcgacaagatcctggtggccaacagaggcgagatcgcctgcagagtgatcagaacctgcaagaagatgggcatcaagaccgtggccatccacagcgacgtggacgccagcagcgtgcacgtgaagatggccgacgaggccgtgtgcgtgggccccgcccccaccagcaagagctacctgaacatggacgccatcatggaggccatcaagaagaccagagcccaggccgtgcaccccggctacggcttcctgagcgagaacaaggagttcgccagatgcctggccgccgaggacgtggtgttcatcggccccgacacccacgccatccaggccatgggcgacaagatcgagagcaagctgctggccaagaaggccgaggtgaacaccatccccggcttcgacggcgtggtgaaggacgccgaggaggccgtgagaatcgccagagagatcggctaccccgtgatgatcaaggccagcgccggcggcggcggcaagggcatgagaatcgcctgggacgacgaggagaccagagacggcttcagactgagcagccaggaggccgccagcagcttcggcgacgacagactgctgatcgagaagttcatcgacaaccccagacacatcgagatccaggtgctgggcgacaagcacggcaacgccctgtggctgaacgagagagagtgcagcatccagagaagaaaccagaaggtggtggaggaggcccccagcatcttcctggacgccgagaccagaagagccatgggcgagcaggccgtggccctggccagagccgtgaagtacagcagcgccggcaccgtggagttcctggtggacagcaagaagaacttctacttcctggagatgaacaccagactgcaggtggagcaccccgtgaccgagtgcatcaccggcctggacctggtgcaggagatgatcagagtggccaagggctaccccctgagacacaagcaggccgacatcagaatcaacggctgggccgtggagtgcagagtgtacgccgaggacccctacaagagcttcggcctgcccagcatcggcagactgagccagtaccaggagcccctgcacctgcccggcgtgagagtggacagcggcatccagcccggcagcgacatcagcatctactacgaccccatgatcagcaagctgatcacctacggcagcgacagaaccgaggccctgaagagaatggccgacgccctggacaactacgtgatcagaggcgtgacccacaacatcgccctgctgagagaggtgatcatcaacagcagattcgtgaagggcgacatcagcaccaagttcctgagcgacgtgtaccccgacggcttcaagggccacatgctgaccaagagcgagaagaaccagctgctggccatcgccagcagcctgttcgtggccttccagctgagagcccagcacttccaggagaacagcagaatgcccgtgatcaagcccgacatcgccaactgggagctgagcgtgaagctgcacgacaaggtgcacaccgtggtggccagcaacaacggcagcgtgttcagcgtggaggtggacggcagcaagctgaacgtgaccagcacctggaacctggccagccccctgctgagcgtgagcgtggacggcacccagagaaccgtgcagtgcctgagcagagaggccggcggcaacatgagcatccagttcctgggcaccgtgtacaaggtgaacatcctgaccagactggccgccgagctgaacaagttcatgctggagaaggtgaccgaggacaccagcagcgtgctgagaagccccatgcccggcgtggtggtggccgtgagcgtgaagcccggcgacgccgtggccgagggccaggagatctgcgtgatcgaggccatgaagatgcagaacagcatgaccgccggcaagaccggcaccgtgaagagcgtgcactgccaggccggcgacaccgtgggcgagggcgacctgctggtggagctggagtag

SEQ ID NO: 94748 - DNA, 2109 bp, synthetic construct
  misc_feature 1..2109: note = Description of Artificial Sequence: Synthetic coding sequence
  source 1..2109: mol_type = other DNA
atggccggcttctgggtgggcaccgcccccctggtggccgccggcagaagaggcagatggcccccccagcagctgatgctgagcgccgccctgagaaccctgaagaccttcgacaagatcctggtggccaacagaggcgagatcgcctgcagagtgatcagaacctgcaagaagatgggcatcaagaccgtggccatccacagcgacgtggacgccagcagcgtgcacgtgaagatggccgacgaggccgtgtgcgtgggccccgcccccaccagcaagagctacctgaacatggacgccatcatggaggccatcaagaagaccagagcccaggccgtgcaccccggctacggcttcctgagcgagaacaaggagttcgccagatgcctggccgccgaggacgtggtgttcatcggccccgacacccacgccatccaggccatgggcgacaagatcgagagcaagctgctggccaagaaggccgaggtgaacaccatccccggcttcgacggcgtggtgaaggacgccgaggaggccgtgagaatcgccagagagatcggctaccccgtgatgatcaaggccagcgccggcggcggcggcaagggcatgagaatcgcctgggacgacgaggagaccagagacggcttcagactgagcagccaggaggccgccagcagcttcggcgacgacagactgctgatcgagaagttcatcgacaaccccagacacatcgagatccaggtgctgggcgacaagcacggcaacgccctgtggctgaacgagagagagtgcagcatccagagaagaaaccagaaggtggtggaggaggcccccagcatcttcctggacgccgagaccagaagagccatgggcgagcaggccgtggccctggccagagccgtgaagtacagcagcgccggcaccgtggagttcctggtggacagcaagaagaacttctacttcctggagatgaacaccagactgcaggtggagcaccccgtgaccgagtgcatcaccggcctggacctggtgcaggagatgatcagagtggccaagggctaccccctgagacacaagcaggccgacatcagaatcaacggctgggccgtggagtgcagagtgtacgccgaggacccctacaagagcttcggcctgcccagcatcggcagactgagccagtaccaggagcccctgcacctgcccggcgtgagagtggacagcggcatccagcccggcagcgacatcagcatctactacgaccccatgatcagcaagctgatcacctacggcagcgacagaaccgaggccctgaagagaatggccgacgccctggacaactacgtgatcagaggcgtgacccacaacatcgccctgctgagagaggtgatcatcaacagcagattcgtgaagggcgacatcagcaccaagttcctgagcgacgtgtaccccgacggcttcaagggccacatgctgaccaagagcgagaagaaccagctgctggccatcgccagcagcctgttcgtggccttccagctgagagcccagcacttccaggagaacagcagaatgcccgtgatcaagcccgacatcgccaactgggagctgagcgtgaagctgcacgacaaggtgcacaccgtggtggccagcaacaacggcagcgtgttcagcgtggaggtggacggcagcaagctgaacgtgaccagcacctggaacctggccagccccctgctgagcgtgagcgtggacggcacccagagaaccgtgcagtgcctgagcagagaggccggcggcaacatgagcatccagttcctgggcaccgtgtacaaggtgaacatcctgaccagactggccgccgagctgaacaagttcatgctggagaaggtgaccgaggacaccagcagcgtgctgagaagccccatgcccggcgtggtggtggccgtgagcgtgaagcccggcgacgccgtggccgagggccaggagatctgcgtgatcgaggccatgaagatgcagaacagcatgaccgccggcaagaccggcaccgtgaagagcgtgcactgccaggccggcgacaccgtgggcgagggcgacctgctggtggagctggagtag

SEQ ID NO: 94749 - DNA, 255 bp, synthetic construct
  misc_feature 1..255: note = Description of Artificial Sequence: Synthetic coding sequence
  source 1..255: mol_type = other DNA
tgaaactgggagctgagcgtgaagctgcacgacaaggtgcacaccgtggtggccagcaacaacggcagcgtgttcagcgtggaggtggacggcagcaagctgaacgtgaccagcacctggaacctggccagccccctgctgagcgtgagcgtggacggcacccagagaaccgtgcagtgcctgagcagagaggccggcggcaacatgagcatccagttcctgggcaccgtgccctggagaaagctgctggactag

SEQ ID NO: 94750 - DNA, 336 bp, synthetic construct
  misc_feature 1..336: note = Description of Artificial Sequence: Synthetic coding sequence
  source 1..336: mol_type = other DNA
tacaaggtgaacatcctgaccagactggccgccgagctgaacaagttcatgctggagaaggtgaccgaggacaccagcagcgtgctgagaagccccatgcccggcgtggtggtggccgtgagcgtgaagcccggcgacgccgccaccagcagcctgagcgtggagatctgcctgttctggaccttccaggtggccgagggccaggagatctgcgtgatcgaggccatgaagatgcagaacagcatgaccgccggcaagaccggcaccgtgaagagcgtgcactgccaggccggcgacaccgtgggcgagggcgacctgctggtggagctggagtag

SEQ ID NO: 94751 - DNA, 405 bp, synthetic construct
  misc_feature 1..405: note = Description of Artificial Sequence: Synthetic coding sequence
  source 1..405: mol_type = other DNA
tgaatgcccgtgatcaagcccgacatcgccaactgggagctgagcgtgaagctgcacgacaaggtgcacaccgtggtggccagcaacaacggcagcgtgttcagcgtggaggtggacggcagcaagctgaacgtgaccagcacctggaacctggccagccccctgctgagcgtgagcgtggacggcacccagagaaccgtgcagtgcctgagcagagaggccggcggcaacatgagcatccagttcctgggcaccgtggtggccgagggccaggagatctgcgtgatcgaggccatgaagatgcagaacagcatgaccgccggcaagaccggcaccgtgaagagcgtgcactgccaggccggcgacaccgtgggcgagggcgacctgctggtggagctggagtag

SEQ ID NO: 94752 - DNA, 309 bp, synthetic construct
  misc_feature 1..309: note = Description of Artificial Sequence: Synthetic coding sequence
  source 1..309: mol_type = other DNA
agcgacgtgtaccccgacggcttcaagggccacatgctgaccaagagcgagaagaaccagctgctggccatcgccagcagcctgttcgtggccttccagctgagagcccagcacttccaggagaacagcagaatgcccgtgatcaagcccgacatcgccaactgggagctgagcgtgaagctgcacgacaaggtgcacaccgtggtggccagcaacaacggcagcgtgttcagcgtggaggtggacggcagcaagctgaacgtgaccagcacctggaacctgttcgccctgatcgtgtgccagagatag

SEQ ID NO: 94753 - DNA, 1620 bp, synthetic construct
  misc_feature 1..1620: note = Description of Artificial Sequence: Synthetic coding sequence
  source 1..1620: mol_type = other DNA
atggccgccgccctgagagtggccgccgtgggcgccagactgagcgtgctggccagcggcctgagagccgccgtgagaagcctgtgcagccaggccaccagcgtgaacgagagaatcgagaacaagagaagaaccgccctgctgggcggcggccagagaagaatcgacgcccagcacaagagaggcaagctgaccgccagagagagaatcagcctgctgctggaccccggcagcttcgtggagagcgacatgttcgtggagcacagatgcgccgacttcggcatggccgccgacaagaacaagttccccggcgacagcgtggtgaccggcagaggcagaatcaacggcagactggtgtacgtgttcagccaggacttcaccgtgttcggcggcagcctgagcggcgcccacgcccagaagatctgcaagatcatggaccaggccatcaccgtgggcgcccccgtgatcggcctgaacgacagcggcggcgccagaatccaggagggcgtggagagcctggccggctacgccgacatcttcctgagaaacgtgaccgccagcggcgtgatcccccagatcagcctgatcatgggcccctgcgccggcggcgccgtgtacagccccgccctgaccgacttcaccttcatggtgaaggacaccagctacctgttcatcaccggccccgacgtggtgaagagcgtgaccaacgaggacgtgacccaggaggagctgggcggcgccaagacccacaccaccatgagcggcgtggcccacagagccttcgagaacgacgtggacgccctgtgcaacctgagagacttcttcaactacctgcccctgagcagccaggaccccgcccccgtgagagagtgccacgaccccagcgacagactggtgcccgagctggacaccatcgtgcccctggagagcaccaaggcctacaacatggtggacatcatccacagcgtggtggacgagagagagttcttcgagatcatgcccaactacgccaagaacatcatcgtgggcttcgccagaatgaacggcagaaccgtgggcatcgtgggcaaccagcccaaggtggccagcggctgcctggacatcaacagcagcgtgaagggcgccagattcgtgagattctgcgacgccttcaacatccccctgatcaccttcgtggacgtgcccggcttcctgcccggcaccgcccaggagtacggcggcatcatcagacacggcgccaagctgctgtacgccttcgccgaggccaccgtgcccaaggtgaccgtgatcaccagaaaggcctacggcggcgcctacgacgtgatgagcagcaagcacctgtgcggcgacaccaactacgcctggcccaccgccgagatcgccgtgatgggcgccaagggcgccgtggagatcatcttcaagggccacgagaacgtggaggccgcccaggccgagtacatcgagaagttcgccaaccccttccccgccgccgtgagaggcttcgtggacgacatcatccagcccagcagcaccagagccagaatctgctgcgacctggacgtgctggccagcaagaaggtgcagagaccctggagaaagcacgccaacatccccctgtag

SEQ ID NO: 94754 - DNA, 1680 bp, synthetic construct
  misc_feature 1..1680: note = Description of Artificial Sequence: Synthetic coding sequence
  source 1..1680: mol_type = other DNA
atggccgccgccctgagagtggccgccgtgggcgccagactgagcgtgctggccagcggcctgagagccgccgtgagaagcctgtgcagccaggccaccagcgtgaacgagagaatcgagaacaagagaagaaccgccctgctgggcggcggccagagaagaatcgacgcccagcacaagagaggcaagctgaccgccagagagagaatcagcctgctgctggaccccggcagcttcgtggagagcgacatgttcgtggagcacagatgcgccgacttcggcatggccgccgacaagaacaagttccccggcgacagcgtggtgaccggcagaggcagaatcaacggcagactggtgtacgtgttcagccagcagatcatcggctgggcccagtggctgcccctggtgatcagcgccctgtgggaggccgaggacttcaccgtgttcggcggcagcctgagcggcgcccacgcccagaagatctgcaagatcatggaccaggccatcaccgtgggcgcccccgtgatcggcctgaacgacagcggcggcgccagaatccaggagggcgtggagagcctggccggctacgccgacatcttcctgagaaacgtgaccgccagcggcgtgatcccccagatcagcctgatcatgggcccctgcgccggcggcgccgtgtacagccccgccctgaccgacttcaccttcatggtgaaggacaccagctacctgttcatcaccggccccgacgtggtgaagagcgtgaccaacgaggacgtgacccaggaggagctgggcggcgccaagacccacaccaccatgagcggcgtggcccacagagccttcgagaacgacgtggacgccctgtgcaacctgagagacttcttcaactacctgcccctgagcagccaggaccccgcccccgtgagagagtgccacgaccccagcgacagactggtgcccgagctggacaccatcgtgcccctggagagcaccaaggcctacaacatggtggacatcatccacagcgtggtggacgagagagagttcttcgagatcatgcccaactacgccaagaacatcatcgtgggcttcgccagaatgaacggcagaaccgtgggcatcgtgggcaaccagcccaaggtggccagcggctgcctggacatcaacagcagcgtgaagggcgccagattcgtgagattctgcgacgccttcaacatccccctgatcaccttcgtggacgtgcccggcttcctgcccggcaccgcccaggagtacggcggcatcatcagacacggcgccaagctgctgtacgccttcgccgaggccaccgtgcccaaggtgaccgtgatcaccagaaaggcctacggcggcgcctacgacgtgatgagcagcaagcacctgtgcggcgacaccaactacgcctggcccaccgccgagatcgccgtgatgggcgccaagggcgccgtggagatcatcttcaagggccacgagaacgtggaggccgcccaggccgagtacatcgagaagttcgccaaccccttccccgccgccgtgagaggcttcgtggacgacatcatccagcccagcagcaccagagccagaatctgctgcgacctggacgtgctggccagcaagaaggtgcagagaccctggagaaagcacgccaacatccccctgtag

SEQ ID NO: 94755 - DNA, 1653 bp, synthetic construct
  misc_feature 1..1653: note = Description of Artificial Sequence: Synthetic coding sequence
  source 1..1653: mol_type = other DNA
atggccgccgccctgagagtggccgccgtgggcgccagactgagcgtgctggccagcggcctgagagccgccgtgagaagcctgtgcagccaggccaccagcgtgaacgagagaatcgagaacaagagaagaaccgccctgctgggcggcggccagagaagaatcgacgcccagcacaagagaggcaagctgaccgccagagagagaatcagcctgctgctggaccccggcagcttcgtggagagcgacatgttcgtggagcacagatgcgccgacttcggcatggccgccgacaagaacaagttccccggcgacagcgtggtgaccggcagaggcagaatcaacggcagactggtgtacgtgttcagccaggacttcaccgtgttcggcggcagcctgagcggcgcccacgcccagaagatctgcaagatcatggaccaggccatcaccgtgggcgcccccgtgatcggcctgaacgacagcggcggcgccagaatccaggagggcgtggagagcctggccggctacgccgacatcttcctgagaaacgtgaccgccagcggcgtgatcccccagatcagcctgatcatgggcccctgcgccggcggcgccgtgtacagccccgccctgaccgacttcaccttcatggtgaaggacaccagctacctgttcatcaccggccccgacgtggtgaagagcgtgaccaacgaggacgtgacccaggaggagctgggcggcgccaagacccacaccaccatgagcggcgtggcccacagagccttcgagaacgacgtggacgccctgtgcaacctgagagacttcttcaactacctgcccctgagcagccaggaccccgcccccgtgagagagtgccacgaccccagcgacagactggtgcccgagctggacaccatcgtgcccctggagagcaccaaggcctacaacatggtggacatcatccacagcgtggtggacgagagagagttcttcgagatcatgcccaactacgccaagaacatcatcgtgggcttcgccagaatgaacggcagaaccgtgggcatcgtgggcaaccagcccaaggtggccagcggctgcctggacatcaacagcagcgtgaagggcgccagattcgtgagattctgcgacgccttcaacatccccctgatcaccttcgtggacgtgcccggcttcctgcccggcaccgcccaggagtacggcggcatcatcagacacggcgccaagctgctgtacgccttcgccgaggccaccgtgcccaaggtgaccgtgatcaccagaaaggcctacggcggcgcctacgacgtgatgagcagcaagcacctgtgcggcgacaccaactacgcctggcccaccgccgagatcgccgtgatgggcgccaagggcgccgtggagatcatcttcaagggccacgagaacgtggaggccgcccaggccgagtacatcgagaagttcgccaaccccttccccgccgccgtgagaggcttcgtggacgacatcatccagcccagcagcaccagagccagaatctgctgcgacctggacgtgctggccagcaagaaggtgagagtgcaggaggtgttccaccaggtggtgcagagcggccacagagacggcagaggcgccgtgagatggtag

SEQ ID NO: 94756 - DNA, 387 bp, synthetic construct
  misc_feature 1..387: note = Description of Artificial Sequence: Synthetic coding sequence
  source 1..387: mol_type = other DNA
atgagcctgagactggacaccacccccagctgcaacagcgccagacccctgcacgccctgcaggtgctgctgctgctgagcctgctgctgaccgccctggccagcagcaccaagggccagaccaagagaaacctggccaagggcaaggaggagagcctggacagcgacctgtacgccgagctgagatgcatgtgcatcaagaccaccagcggcatccaccccaagaacatccagagcctggaggtgatcggcaagggcacccactgcaaccaggtggaggtgatcgccaccctgaaggacggcagaaagatctgcctggaccccgacgcccccagaatcaagaagatcgtgcagaagaagctggccggcgacgagagcgccgactag

SEQ ID NO: 94757 - DNA, 2262 bp, synthetic construct
  misc_feature 1..2262: note = Description of Artificial Sequence: Synthetic coding sequence
  source 1..2262: mol_type = other DNA
atggagagaagagcctggagcctgcagtgcaccgccttcgtgctgttctgcgcctggtgcgccctgaacagcgccaaggccaagagacagttcgtgaacgagtgggccgccgagatccccggcggccccgaggccgccagcgccatcgccgaggagctgggctacgacctgctgggccagatcggcagcctggagaaccactacctgttcaagcacaagaaccaccccagaagaagcagaagaagcgccttccacatcaccaagagactgagcgacgacgacagagtgatctgggccgagcagcagtacgagaaggagagaagcaagagaagcgccctgagagacagcgccctgaacctgttcaacgaccccatgtggaaccagcagtggtacctgcaggacaccagaatgaccgccgccctgcccaagctggacctgcacgtgatccccgtgtggcagaagggcatcaccggcaagggcgtggtgatcaccgtgctggacgacggcctggagtggaaccacaccgacatctacgccaactacgaccccgaggccagctacgacttcaacgacaacgaccacgaccccttccccagatacgaccccaccaacgagaacaagcacggcaccagatgcgccggcgagatcgccatgcaggccaacaaccacaagtgcggcgtgggcgtggcctacaacagcaaggtgggcggcatcagaatgctggacggcatcgtgaccgacgccatcgaggccagcagcatcggcttcaaccccggccacgtggacatctacagcgccagctggggccccaacgacgacggcaagaccgtggagggccccggcagactggcccagaaggccttcgagtacggcgtgaagcagggcagacagggcaagggcagcatcttcgtgtgggccagcggcaacggcggcagacagggcgacaactgcgactgcgacggctacaccgacagcatctacaccatcagcatcagcagcgccagccagcagggcctgagcccctggtacgccgagaagtgcagcagcaccctggccaccagctacagcagcggcgactacaccgaccagagaatcaccagcgccgacctgcacaacgactgcaccgagacccacaccggcaccagcgccagcgcccccctggccgccggcatcttcgccctggccctggaggccaaccccaacctgacctggagagacatgcagcacctggtggtgtggaccagcgagtacgaccccctggccaacaaccccggctggaagaagaacggcgccggcctgatggtgaacagcagattcggcttcggcctgctgaacgccaaggccctggtggacctggccgaccccagaacctggagaagcgtgcccgagaagaaggagtgcgtggtgaaggacaacgacttcgagcccagagccctgaaggccaacggcgaggtgatcatcgagatccccaccagagcctgcgagggccaggagaacgccatcaagagcctggagcacgtgcagttcgaggccaccatcgagtacagcagaagaggcgacctgcacgtgaccctgaccagcgccgccggcaccagcaccgtgctgctggccgagagagagagagacaccagccccaacggcttcaagaactgggacttcatgagcgtgcacacctggggcgagaaccccatcggcacctggaccctgagaatcaccgacatgagcggcagaatccagaacgagggcagaatcgtgaactggaagctgatcctgcacggcaccagcagccagcccgagcacatgaagcagcccagagtgtacaccagctacaacaccgtgcagaacgacagaagaggcgtggagaagatggtggaccccggcgaggagcagcccacccaggagaaccccaaggagaacaccctggtgagcaagagccccagcagcagcagcgtgggcggcagaagagacgagctggaggagggcgcccccagccaggccatgctgagactgctgcagagcgccttcagcaagaacagcccccccaagcagagccccaagaagagccccagcgccaagctgaacatcccctacgagaacttctacgaggccctggagaagctgaacaagcccagccagctgaaggacagcgaggacagcctgtacaacgactacgtggacgtgttctacaacaccaagccctacaagcacagagacgacagactgctgcaggccctggtggacatcctgaacgaggagaactag

SEQ ID NO: 94758 - DNA, 477 bp, synthetic construct
  misc_feature 1..477: note = Description of Artificial Sequence: Synthetic coding sequence
  source 1..477: mol_type = other DNA
atggagagaagagcctggagcctgcagtgcaccgccttcgtgctgttctgcgcctggtgcgccctgaacagcgccaaggccaagagacagttcgtgaacgagtgggccgccgagatccccggcggccccgaggccgccagcgccatcgccgaggagctgggctacgacctgctgggccagatcggcagcctggagaaccactacctgttcaagcacaagaaccaccccagaagaagcagaagaagcgccttccacatcaccaagagactgagcgacgacgacagagtgatctgggccgagcagcagtacgagaaggagagaagcaagagaagcgccctgagagacagcgccctgaacctgttcaacgaccccatgtggaaccagcagtggtacctgcaggacaccagaatgaccgccgccctgcccaagctggacctgcacgtgatccccgtgtggcagaagggcatcaccggctag

SEQ ID NO: 94759 - DNA, 2121 bp, synthetic construct
  misc_feature 1..2121: note = Description of Artificial Sequence: Synthetic coding sequence
  source 1..2121: mol_type = other DNA
atgggcaagggcagcatcagcttcctgttcttcagccagatcggcagcctggagaaccactacctgttcaagcacaagaaccaccccagaagaagcagaagaagcgccttccacatcaccaagagactgagcgacgacgacagagtgatctgggccgagcagcagtacgagaaggagagaagcaagagaagcgccctgagagacagcgccctgaacctgttcaacgaccccatgtggaaccagcagtggtacctgcaggacaccagaatgaccgccgccctgcccaagctggacctgcacgtgatccccgtgtggcagaagggcatcaccggcaagggcgtggtgatcaccgtgctggacgacggcctggagtggaaccacaccgacatctacgccaactacgaccccgaggccagctacgacttcaacgacaacgaccacgaccccttccccagatacgaccccaccaacgagaacaagcacggcaccagatgcgccggcgagatcgccatgcaggccaacaaccacaagtgcggcgtgggcgtggcctacaacagcaaggtgggcggcatcagaatgctggacggcatcgtgaccgacgccatcgaggccagcagcatcggcttcaaccccggccacgtggacatctacagcgccagctggggccccaacgacgacggcaagaccgtggagggccccggcagactggcccagaaggccttcgagtacggcgtgaagcagggcagacagggcaagggcagcatcttcgtgtgggccagcggcaacggcggcagacagggcgacaactgcgactgcgacggctacaccgacagcatctacaccatcagcatcagcagcgccagccagcagggcctgagcccctggtacgccgagaagtgcagcagcaccctggccaccagctacagcagcggcgactacaccgaccagagaatcaccagcgccgacctgcacaacgactgcaccgagacccacaccggcaccagcgccagcgcccccctggccgccggcatcttcgccctggccctggaggccaaccccaacctgacctggagagacatgcagcacctggtggtgtggaccagcgagtacgaccccctggccaacaaccccggctggaagaagaacggcgccggcctgatggtgaacagcagattcggcttcggcctgctgaacgccaaggccctggtggacctggccgaccccagaacctggagaagcgtgcccgagaagaaggagtgcgtggtgaaggacaacgacttcgagcccagagccctgaaggccaacggcgaggtgatcatcgagatccccaccagagcctgcgagggccaggagaacgccatcaagagcctggagcacgtgcagttcgaggccaccatcgagtacagcagaagaggcgacctgcacgtgaccctgaccagcgccgccggcaccagcaccgtgctgctggccgagagagagagagacaccagccccaacggcttcaagaactgggacttcatgagcgtgcacacctggggcgagaaccccatcggcacctggaccctgagaatcaccgacatgagcggcagaatccagaacgagggcagaatcgtgaactggaagctgatcctgcacggcaccagcagccagcccgagcacatgaagcagcccagagtgtacaccagctacaacaccgtgcagaacgacagaagaggcgtggagaagatggtggaccccggcgaggagcagcccacccaggagaaccccaaggagaacaccctggtgagcaagagccccagcagcagcagcgtgggcggcagaagagacgagctggaggagggcgcccccagccaggccatgctgagactgctgcagagcgccttcagcaagaacagcccccccaagcagagccccaagaagagccccagcgccaagctgaacatcccctacgagaacttctacgaggccctggagaagctgaacaagcccagccagctgaaggacagcgaggacagcctgtacaacgactacgtggacgtgttctacaacaccaagccctacaagcacagagacgacagactgctgcaggccctggtggacatcctgaacgaggagaactag

SEQ ID NO: 94760 - DNA, 798 bp, synthetic construct; identical to SEQ ID NO: 93816
  misc_feature 1..798: note = Description of Artificial Sequence: Synthetic coding sequence
  source 1..798: mol_type = other DNA

SEQ ID NO: 94761 - DNA, 1917 bp, synthetic construct
  misc_feature 1..1917: note = Description of Artificial Sequence: Synthetic coding sequence
  source 1..1917: mol_type = other DNA
atgaagggcggctgcgtgagccagtggaaggccgccgccggcttcctgttctgcgtgatggtgttcgccagcgccgagagacccgtgttcaccaaccacttcctggtggagctgcacaagggcggcgaggacaaggccagacaggtggccgccgagcacggcttcggcgtgagaaagctgcccttcgccgagggcctgtaccacttctaccacaacggcctggccaaggccaagagaagaagaagcctgcaccacaagcagcagctggagagagaccccagagtgaagatggccctgcagcaggagggcttcgacagaaagaagagaggctacagagacatcaacgagatcgacatcaacatgaacgaccccctgttcaccaagcagtggtacctgatcaacaccggccaggccgacggcacccccggcctggacctgaacgtggccgaggcctgggagctgggctacaccggcaagggcgtgaccatcggcatcatggacgacggcatcgactacctgcaccccgacctggccagcaactacaacgccgaggccagctacgacttcagcagcaacgacccctacccctaccccagatacaccgacgactggttcaacagccacggcaccagatgcgccggcgaggtgagcgccgccgccaacaacaacatctgcggcgtgggcgtggcctacaacagcaaggtggccggcatcagaatgctggaccagcccttcatgaccgacatcatcgaggccagcagcatcagccacatgccccagctgatcgacatctacagcgccagctggggccccaccgacaacggcaagaccgtggacggccccagagagctgaccctgcaggccatggccgacggcgtgaacaagggcagaggcggcaagggcagcatctacgtgtgggccagcggcgacggcggcagctacgacgactgcaactgcgacggctacgccagcagcatgtggaccatcagcatcaacagcgccatcaacgacggcagaaccgccctgtacgacgagagctgcagcagcaccctggccagcaccttcagcaacggcagaaagagaaaccccgaggccggcgtggccaccaccgacctgtacggcaactgcaccctgagacacagcggcaccagcgccgccgcccccgaggccgccggcgtgttcgccctggccctggaggccaacctgggcctgacctggagagacatgcagcacctgaccgtgctgaccagcaagagaaaccagctgcacgacgaggtgcaccagtggagaagaaacggcgtgggcctggagttcaaccacctgttcggctacggcgtgctggacgccggcgccatggtgaagatggccaaggactggaagaccgtgcccgagagattccactgcgtgggcggcagcgtgcaggaccccgagaagatccccagcaccggcaagctggtgctgaccctgaccaccgacgcctgcgagggcaaggagaacttcgtgagatacctggagcacgtgcaggccgtgatcaccgtgaacgccaccagaagaggcgacctgaacatcaacatgaccagccccatgggcaccaagagcatcctgctgagcagaagacccagagacgacgacagcaaggtgggcttcgacaagtggcccttcatgaccacccacacctggggcgaggacgccagaggcacctggaccctggagctgggcttcgtgggcagcgccccccagaagggcgtgctgaaggagtggaccctgatgctgcacggcacccagagcgccccctacatcgaccaggtggtgagagactaccagagcaagctggccatgagcaagaaggaggagctggaggaggagctggacgaggccgtggagagaagcctgaagagcatcctgaacaagaactag

SEQ ID NO: 94762 - DNA, 1860 bp, synthetic construct
  misc_feature 1..1860: note = Description of Artificial Sequence: Synthetic coding sequence
  source 1..1860: mol_type = other DNA
atggtgttcgccagcgccgagagacccgtgttcaccaaccacttcctggtggagctgcacaagggcggcgaggacaaggccagacaggtggccgccgagcacggcttcggcgtgagaaagctgcccttcgccgagggcctgtaccacttctaccacaacggcctggccaaggccaagagaagaagaagcctgcaccacaagcagcagctggagagagaccccagagtgaagatggccctgcagcaggagggcttcgacagaaagaagagaggctacagagacatcaacgagatcgacatcaacatgaacgaccccctgttcaccaagcagtggtacctgatcaacaccggccaggccgacggcacccccggcctggacctgaacgtggccgaggcctgggagctgggctacaccggcaagggcgtgaccatcggcatcatggacgacggcatcgactacctgcaccccgacctggccagcaactacaacgccgaggccagctacgacttcagcagcaacgacccctacccctaccccagatacaccgacgactggttcaacagccacggcaccagatgcgccggcgaggtgagcgccgccgccaacaacaacatctgcggcgtgggcgtggcctacaacagcaaggtggccggcatcagaatgctggaccagcccttcatgaccgacatcatcgaggccagcagcatcagccacatgccccagctgatcgacatctacagcgccagctggggccccaccgacaacggcaagaccgtggacggccccagagagctgaccctgcaggccatggccgacggcgtgaacaagggcagaggcggcaagggcagcatctacgtgtgggccagcggcgacggcggcagctacgacgactgcaactgcgacggctacgccagcagcatgtggaccatcagcatcaacagcgccatcaacgacggcagaaccgccctgtacgacgagagctgcagcagcaccctggccagcaccttcagcaacggcagaaagagaaaccccgaggccggcgtggccaccaccgacctgtacggcaactgcaccctgagacacagcggcaccagcgccgccgcccccgaggccgccggcgtgttcgccctggccctggaggccaacctgggcctgacctggagagacatgcagcacctgaccgtgctgaccagcaagagaaaccagctgcacgacgaggtgcaccagtggagaagaaacggcgtgggcctggagttcaaccacctgttcggctacggcgtgctggacgccggcgccatggtgaagatggccaaggactggaagaccgtgcccgagagattccactgcgtgggcggcagcgtgcaggaccccgagaagatccccagcaccggcaagctggtgctgaccctgaccaccgacgcctgcgagggcaaggagaacttcgtgagatacctggagcacgtgcaggccgtgatcaccgtgaacgccaccagaagaggcgacctgaacatcaacatgaccagccccatgggcaccaagagcatcctgctgagcagaagacccagagacgacgacagcaaggtgggcttcgacaagtggcccttcatgaccacccacacctggggcgaggacgccagaggcacctggaccctggagctgggcttcgtgggcagcgccccccagaagggcgtgctgaaggagtggaccctgatgctgcacggcacccagagcgccccctacatcgaccaggtggtgagagactaccagagcaagctggccatgagcaagaaggaggagctggaggaggagctggacgaggccgtggagagaagcctgaagagcatcctgaacaagaactag

SEQ ID NO: 94763 - DNA, 1812 bp, synthetic construct
  misc_feature 1..1812: note = Description of Artificial Sequence: Synthetic coding sequence
  source 1..1812: mol_type = other DNA
atgaagggcggctgcgtgagccagtggaaggccgccgccggcttcctgttctgcgtgatggtgttcgccagcgccgagagacccgtgttcaccaaccacttcctggtggagctgcacaagggcggcgaggacaaggccagacaggtggccgccgagcacggcttcggcgtgagaaaggtgaagatggccctgcagcaggagggcttcgacagaaagaagagaggctacagagacatcaacgagatcgacatcaacatgaacgaccccctgttcaccaagcagtggtacctgatcaacaccggccaggccgacggcacccccggcctggacctgaacgtggccgaggcctgggagctgggctacaccggcaagggcgtgaccatcggcatcatggacgacggcatcgactacctgcaccccgacctggccagcaactacaacgccgaggccagctacgacttcagcagcaacgacccctacccctaccccagatacaccgacgactggttcaacagccacggcaccagatgcgccggcgaggtgagcgccgccgccaacaacaacatctgcggcgtgggcgtggcctacaacagcaaggtggccggcatcagaatgctggaccagcccttcatgaccgacatcatcgaggccagcagcatcagccacatgccccagctgatcgacatctacagcgccagctggggccccaccgacaacggcaagaccgtggacggccccagagagctgaccctgcaggccatggccgacggcgtgaacaagggcagaggcggcaagggcagcatctacgtgtgggccagcggcgacggcggcagctacgacgactgcaactgcgacggctacgccagcagcatgtggaccatcagcatcaacagcgccatcaacgacggcagaaccgccctgtacgacgagagctgcagcagcaccctggccagcaccttcagcaacggcagaaagagaaaccccgaggccggcgtggccaccaccgacctgtacggcaactgcaccctgagacacagcggcaccagcgccgccgcccccgaggccgccggcgtgttcgccctggccctggaggccaacctgggcctgacctggagagacatgcagcacctgaccgtgctgaccagcaagagaaaccagctgcacgacgaggtgcaccagtggagaagaaacggcgtgggcctggagttcaaccacctgttcggctacggcgtgctggacgccggcgccatggtgaagatggccaaggactggaagaccgtgcccgagagattccactgcgtgggcggcagcgtgcaggaccccgagaagatccccagcaccggcaagctggtgctgaccctgaccaccgacgcctgcgagggcaaggagaacttcgtgagatacctggagcacgtgcaggccgtgatcaccgtgaacgccaccagaagaggcgacctgaacatcaacatgaccagccccatgggcaccaagagcatcctgctgagcagaagacccagagacgacgacagcaaggtgggcttcgacaagtggcccttcatgaccacccacacctggggcgaggacgccagaggcacctggaccctggagctgggcttcgtgggcagcgccccccagaagggcgtgctgaaggagtggaccctgatgctgcacggcacccagagcgccccctacatcgaccaggtggtgagagactaccagagcaagctggccatgagcaagaaggaggagctggaggaggagctggacgaggccgtggagagaagcctgaagagcatcctgaacaagaactag

SEQ ID NO: 94764 - DNA, 2268 bp, synthetic construct
  misc_feature 1..2268: note = Description of Artificial Sequence: Synthetic coding sequence
  source 1..2268: mol_type = other DNA
atgagacccgcccccatcgccctgtggctgagactggtgctggccctggccctggtgagacccagagccgtgggctgggcccccgtgagagcccccatctacgtgagcagctgggccgtgcaggtgagccagggcaacagagaggtggagagactggccagaaagttcggcttcgtgaacctgggccccatcttccccgacggccagtacttccacctgagacacagaggcgtggtgcagcagagcctgaccccccactggggccacagactgcacctgaagaagaaccccaaggtgcagtggttccagcagcagaccctgcagagaagagtgaagagaagcgtggtggtgcccaccgacccctggttcagcaagcagtggtacatgaacagcgaggcccagcccgacctgagcatcctgcaggcctggagccagggcctgagcggccagggcatcgtggtgagcgtgctggacgacggcatcgagaaggaccaccccgacctgtgggccaactacgaccccctggccagctacgacttcaacgactacgaccccgacccccagcccagatacacccccagcaaggagaacagacacggcaccagatgcgccggcgaggtggccgccatggccaacaacggcttctgcggcgtgggcgtggccttcaacgccagaatcggcggcgtgagaatgctggacggcaccatcaccgacgtgatcgaggcccagagcctgagcctgcagccccagcacatccacatctacagcgccagctggggccccgaggacgacggcagaaccgtggacggccccggcatcctgaccagagaggccttcagaagaggcgtgaccaagggcagaggcggcctgggcaccctgttcatctgggccagcggcaacggcggcctgcactacgacaactgcaactgcgacggctacaccaacagcatccacaccctgagcgtgggcagcaccacccagcagggcagagtgccctggtacagcgaggcctgcgccagcaccctgaccaccacctacagcagcggcgtggccaccgacccccagatcgtgaccaccgacctgcaccacggctgcaccgaccagcacaccggcaccagcgccagcgcccccctggccgccggcatgatcgccctggccctggaggccaaccccttcctgacctggagagacatgcagcacctggtggtgagagccagcaagcccgcccacctgcaggccgaggactggagaaccaacggcgtgggcagacaggtgagccaccactacggctacggcctgctggacgccggcctgctggtggacaccgccagaacctggctgcccacccagccccagagaaagtgcgccgtgagagtgcagagcagacccacccccatcctgcccctgatctacatcagagagaacgtgagcgcctgcgccggcctgcacaacagcatcagaagcctggagcacgtgcaggcccagctgaccctgagctacagcagaagaggcgacctggagatcagcctgaccagccccatgggcaccagaagcaccctggtggccatcagacccctggacgtgagcaccgagggctacaacaactgggtgttcatgagcacccacttctgggacgagaacccccagggcgtgtggaccctgggcctggagaacaagggctactacttcaacaccggcaccctgtacagatacaccctgctgctgtacggcaccgccgaggacatgaccgccagacccaccggcccccaggtgaccagcagcgcctgcgtgcagagagacaccgagggcctgtgccaggcctgcgacggccccgcctacatcctgggccagctgtgcctggcctactgcccccccagattcttcaaccacaccagactggtgaccgccggccccggccacaccgccgcccccgccctgagagtgtgcagcagctgccacgccagctgctacacctgcagaggcggcagccccagagactgcaccagctgcccccccagcagcaccctggaccagcagcagggcagctgcatgggccccaccacccccgacagcagacccagactgagagccgccgcctgcccccaccacagatgccccgccagcgccatggtgctgagcctgctggccgtgaccctgggcggccccgtgctgtgcggcatgagcatggacctgcccctgtacgcctggctgagcagagccagagccacccccaccaagccccaggtgtggctgcccgccggcacctag

SEQ ID NO: 94765 - DNA, 1137 bp, synthetic construct
  misc_feature 1..1137: note = Description of Artificial Sequence: Synthetic coding sequence
  source 1..1137: mol_type = other DNA
atggccagcagaagaaccaccagaaccagcggccccaccaccaccccctggcccgccatgaccagcatgaccaccaccagaacccccagccccgccaccccccccgccaagagaaccggcgtgagaatgctggacggcaccatcaccgacgtgatcgaggcccagagcctgagcctgcagccccagcacatccacatctacagcgccagctggggccccgaggacgacggcagaaccgtggacggccccggcatcctgaccagagaggccttcagaagaggcgtgaccaagggcagaggcggcctgggcaccctgttcatctgggccagcggcaacggcggcctgcactacgacaactgcaactgcgacggctacaccaacagcatccacaccctgagcgtgggcagcaccacccagcagggcagagtgccctggtacagcgaggcctgcgccagcaccctgaccaccacctacagcagcggcgtggccaccgacccccagatcgtgaccaccgacctgcaccacggctgcaccgaccagcacaccggcaccagcgccagcgcccccctggccgccggcatgatcgccctggccctggaggccaaccccttcctgacctggagagacatgcagcacctggtggtgagagccagcaagcccgcccacctgcaggccgaggactggagaaccaacggcgtgggcagacaggtgagccaccactacggctacggcctgctggacgccggcctgctggtggacaccgccagaacctggctgcccacccagccccagagaaagtgcgccgtgagagtgcagagcagacccacccccatcctgcccctgatctacatcagagagaacgtgagcgcctgcgccggcctgcacaacagcatcagaagcctggagcacgtgcaggcccagctgaccctgagctacagcagaagaggcgacctggagatcagcctgaccagccccatgggcaccagaagcaccctggtggccatcagagacgtggtgcccctgcacgccgccgccctgtgggacggcagaggccacgacagcgccgcctacagaccccccggcgaccagcagagagtgtgcgccgccggccacagaggcgccgtgcccggcgtgtag

SEQ ID NO: 94766 - DNA, 2742 bp, synthetic construct
  misc_feature 1..2742: note = Description of Artificial Sequence: Synthetic coding sequence
  source 1..2742: mol_type = other DNA
atgggctggggcagcagatgctgctgccccggcagactggacctgctgtgcgtgctggccctgctgggcggctgcctgctgcccgtgtgcagaaccagagtgtacaccaaccactgggccgtgaagatcgccggcggcttccccgaggccaacagaatcgccagcaagtacggcttcatcaacatcggccagatcggcgccctgaaggactactaccacttctaccacagcagaaccatcaagagaagcgtgatcagcagcagaggcacccacagcttcatcagcatggagcccaaggtggagtggatccagcagcaggtggtgaagaagagaaccaagagagactacgacttcagcagagcccagagcacctacttcaacgaccccaagtggcccagcatgtggtacatgcactgcagcgacaacacccacccctgccagagcgacatgaacatcgagggcgcctggaagagaggctacaccggcaagaacatcgtggtgaccatcctggacgacggcatcgagagaacccaccccgacctgatgcagaactacgacgccctggccagctgcgacgtgaacggcaacgacctggaccccatgcccagatacgacgccagcaacgagaacaagcacggcaccagatgcgccggcgaggtggccgccgccgccaacaacagccactgcaccgtgggcatcgccttcaacgccaagatcggcggcgtgagaatgctggacggcgacgtgaccgacatggtggaggccaagagcgtgagcttcaacccccagcacgtgcacatctacagcgccagctggggccccgacgacgacggcaagaccgtggacggccccgcccccctgaccagacaggccttcgagaacggcgtgagaatgggcagaagaggcctgggcagcgtgttcgtgtgggccagcggcaacggcggcagaagcaaggaccactgcagctgcgacggctacaccaacagcatctacaccatcagcatcagcagcaccgccgagagcggcaagaagccctggtacctggaggagtgcagcagcaccctggccaccacctacagcagcggcgagagctacgacaagaagatcatcaccaccgacctgagacagagatgcaccgacaaccacaccggcaccagcgccagcgcccccatggccgccggcatcatcgccctggccctggaggccaaccccttcctgacctggagagacgtgcagcacgtgatcgtgagaaccagcagagccggccacctgaacgccaacgactggaagaccaacgccgccggcttcaaggtgagccacctgtacggcttcggcctgatggacgccgaggccatggtgatggaggccgagaagtggaccaccgtgcccagacagcacgtgtgcgtggagagcaccgacagacagatcaagaccatcagacccaacagcgccgtgagaagcatctacaaggccagcggctgcagcgacaaccccaacagacacgtgaactacctggagcacgtggtggtgagaatcaccatcacccaccccagaagaggcgacctggccatctacctgaccagccccagcggcaccagaagccagctgctggccaacagactgttcgaccacagcatggagggcttcaagaactgggagttcatgaccatccactgctggggcgagagagccgccggcgactgggtgctggaggtgtacgacacccccagccagctgagaaacttcaagacccccggcaagctgaaggagtggagcctggtgctgtacggcaccagcgtgcagccctacagccccaccaacgagttccccaaggtggagagattcagatacagcagagtggaggaccccaccgacgactacggcaccgaggactacgccggcccctgcgaccccgagtgcagcgaggtgggctgcgacggccccggccccgaccactgcaacgactgcctgcactactactacaagctgaagaacaacaccagaatctgcgtgagcagctgcccccccggccactaccacgccgacaagaagagatgcagaaagtgcgcccccaactgcgagagctgcttcggcagccacggcgaccagtgcatgagctgcaagtacggctacttcctgaacgaggagaccaacagctgcgtgacccactgccccgacggcagctaccaggacaccaagaagaacctgtgcagaaagtgcagcgagaactgcaagacctgcaccgagttccacaactgcaccgagtgcagagacggcctgagcctgcagggcagcagatgcagcgtgagctgcgaggacggcagatacttcaacggccaggactgccagccctgccacagattctgcgccacctgcgccggcgccggcgccgacggctgcatcaactgcaccgagggctacttcatggaggacggcagatgcgtgcagagctgcagcatcagctactacttcgaccacagcagcgagaacggctacaagagctgcaagaagtgcgacatcagctgcctgacctgcaacggccccggcttcaagaactgcaccagctgccccagcggctacctgctggacctgggcatgtgccagatgggcgccatctgcaaggacgccaccgaggagagctgggccgagggcggcttctgcatgctggtgaagaagaacaacctgtgccagagaaaggtgctgcagcagctgtgctgcaagacctgcaccttccagggctag

SEQ ID NO: 94767 - DNA, 4773 bp, synthetic construct
  misc_feature 1..4773: note = Description of Artificial Sequence: Synthetic coding sequence
  source 1..4773: mol_type = other DNA
atgggcagaagaggcctgggcagcgtgttcgtgtgggccagcggcaacggcggcagaagcaaggaccactgcagctgcgacggctacaccaacagcatctacaccatcagcatcagcagcaccgccgagagcggcaagaagccctggtacctggaggagtgcagcagcaccctggccaccacctacagcagcggcgagagctacgacaagaagatcatcaccaccgacctgagacagagatgcaccgacaaccacaccggcaccagcgccagcgcccccatggccgccggcatcatcgccctggccctggaggccaaccccttcctgacctggagagacgtgcagcacgtgatcgtgagaaccagcagagccggccacctgaacgccaacgactggaagaccaacgccgccggcttcaaggtgagccacctgtacggcttcggcctgatggacgccgaggccatggtgatggaggccgagaagtggaccaccgtgcccagacagcacgtgtgcgtggagagcaccgacagacagatcaagaccatcagacccaacagcgccgtgagaagcatctacaaggccagcggctgcagcgacaaccccaacagacacgtgaactacctggagcacgtggtggtgagaatcaccatcacccaccccagaagaggcgacctggccatctacctgaccagccccagcggcaccagaagccagctgctggccaacagactgttcgaccacagcatggagggcttcaagaactgggagttcatgaccatccactgctggggcgagagagccgccggcgactgggtgctggaggtgtacgacacccccagccagctgagaaacttcaagacccccggcaagctgaaggagtggagcctggtgctgtacggcaccagcgtgcagccctacagccccaccaacgagttccccaaggtggagagattcagatacagcagagtggaggaccccaccgacgactacggcaccgaggactacgccggcccctgcgaccccgagtgcagcgaggtgggctgcgacggccccggccccgaccactgcaacgactgcctgcactactactacaagctgaagaacaacaccagaatctgcgtgagcagctgcccccccggccactaccacgccgacaagaagagatgcagaaagtgcgcccccaactgcgagagctgcttcggcagccacggcgaccagtgcatgagctgcaagtacggctacttcctgaacgaggagaccaacagctgcgtgacccactgccccgacggcagctaccaggacaccaagaagaacctgtgcagaaagtgcagcgagaactgcaagacctgcaccgagttccacaactgcaccgagtgcagagacggcctgagcctgcagggcagcagatgcagcgtgagctgcgaggacggcagatacttcaacggccaggactgccagccctgccacagattctgcgccacctgcgccggcgccggcgccgacggctgcatcaactgcaccgagggctacttcatggaggacggcagatgcgtgcagagctgcagcatcagctactacttcgaccacagcagcgagaacggctacaagagctgcaagaagtgcgacatcagctgcctgacctgcaacggccccggcttcaagaactgcaccagctgccccagcggctacctgctggacctgggcatgtgccagatgggcgccatctgcaaggacggcgagtacgtggacgagcacggccactgccagacctgcgaggccagctgcgccaagtgccagggccccacccaggaggactgcaccacctgccccatgaccagaatcttcgacgacggcagatgcgtgagcaactgccccagctggaagttcgagttcgagaaccagtgccacccctgccaccacacctgccagagatgccagggcagcggccccacccactgcaccagctgcggcgccgacaactacggcagagagcacttcctgtaccagggcgagtgcggcgacagctgccccgagggccactacgccaccgagggcaacacctgcctgccctgccccgacaactgcgagctgtgccacagcgtgcacgtgtgcaccagatgcatgaagggctacttcatcgcccccaccaaccacacctgccagaagctggagtgcggccagggcgaggtgcaggaccccgactacgaggagtgcgtgccctgcgaggagggctgcctgggctgcagcctggacgaccccggcacctgcaccagctgcgccatgggctactacagattcgaccaccactgctacaagacctgccccgagaagacctacagcgaggaggtggagtgcaaggcctgcgacagcaactgcggcagctgcgaccagaacggctgctactggtgcgaggagggcttcttcctgctgggcggcagctgcgtgagaaagtgcggccccggcttctacggcgaccaggagatgggcgagtgcgagagctgccacagagcctgcgagacctgcaccggccccggccacgacgagtgcagcagctgccaggagggcctgcagctgctgagaggcatgtgcgtgcacgccaccaagacccaggaggagggcaagttctggaacgaggccgtgagcaccgccaacctgagcgtggtgaagagcctgctgcaggagagaagaagatggaaggtgcagatcaagagagacatcctgagaaagctgcagccctgccacagcagctgcaagacctgcaacggcagcgccaccctgtgcaccagctgccccaagggcgcctacctgctggcccaggcctgcgtgagcagctgcccccagggcacctggcccagcgtgagaagcggcagctgcgagaactgcaccgaggcctgcgccatctgcagcggcgccgacctgtgcaagaagtgccagatgcagcccggccaccccctgttcctgcacgagggcagatgctacagcaagtgccccgagggcagctacgccgaggacggcatctgcgagagatgcagcagcccctgcagaacctgcgagggcaacgccaccaactgccacagctgcgagggcggccacgtgctgcaccacggcgtgtgccaggagaactgccccgagagacacgtggccgtgaagggcgtgtgcaagcactgccccgagatgtgccaggactgcatccacgagaagacctgcaaggagtgcacccccgagttcttcctgcacgacgacatgtgccaccagagctgccccagaggcttctacgccgacagcagacactgcgtgccctgccacaaggactgcctggagtgcagcggccccaaggccgacgactgcgagctgtgcctggagagcagctgggtgctgtacgacggcctgtgcctggaggagtgccccgccggcacctactacgagaaggagaccaaggagtgcagagactgccacaagagctgcctgacctgcagcagcagcggcacctgcaccacctgccagaagggcctgatcatgaaccccagaggcagctgcatggccaacgagaagtgcagccccagcgagtactgggacgaggacgcccccggctgcaagccctgccacgtgaagtgcttccactgcatgggccccgccgaggaccagtgccagacctgccccatgaacagcctgctgctgaacaccacctgcgtgaaggactgccccgagggctactacgccgacgaggacagcaacagatgcgcccactgccacagcagctgcagaacctgcgagggcagacacagcagacagtgccacagctgcagacccggctggttccagctgggcaaggagtgcctgctgcagtgcagagagggctactacgccgacaacagcaccggcagatgcgagagatgcaacagaagctgcaagggctgccagggccccagacccaccgactgcctgagctgcgacagattcttcttcctgctgagaagcaagggcgagtgccacagaagctgccccgaccactactacgtggagcagagcacccagacctgcgagagatgccaccccacctgcgaccagtgcaagggcaagggcgccctgaactgcctgagctgcgtgtggagctaccacctgatgggcggcatctgcaccagcgactgcctggtgggcgagtacagagtgggcgagggcgagaagttcaactgcgagaagtgccacgagagctgcatggagtgcaagggccccggcgccaagaactgcaccctgtgccccgccaacctggtgctgcacatggacgacagccactgcctgcactgctgcaacaccagcgacccccccagcgcccaggagtgctgcgactgccaggacaccaccgacgagtgcatcctgagaaccagcaaggtgagacccgccaccgagcacttcaagaccgccctgttcatcaccagcagcatgatgctggtgctgctgctgggcgccgccgtggtggtgtggaagaagagcagaggcagagtgcagcccgccgccaaggccggctacgagaagctggccgaccccaacaagagctacagcagctacaagagcagctacagagagagcaccagcttcgaggaggaccaggtgatcgagtacagagacagagactacgacgaggacgacgacgacgacatcgtgtacatgggccaggacggcaccgtgtacagaaagttcaagtacggcctgctggacgacgacgacatcgacgagctggagtacgacgacgagagctacagctactaccagtag

SEQ ID NO: 94768 - DNA, 2073 bp, synthetic construct
  misc_feature 1..2073: note = Description of Artificial Sequence: Synthetic coding sequence
  source 1..2073: mol_type = other DNA
atgggctggggcagcagatgctgctgccccggcagactggacctgctgtgcgtgctggccctgctgggcggctgcctgctgcccgtgtgcagaaccagagtgtacaccaaccactgggccgtgaagatcgccggcggcttccccgaggccaacagaatcgccagcaagtacggcttcatcaacatcggccagatcggcgccctgaaggactactaccacttctaccacagcagaaccatcaagagaagcgtgatcagcagcagaggcacccacagcttcatcagcatggagcccaaggtggagtggatccagcagcaggtggtgaagaagagaaccaagagagactacgacttcagcagagcccagagcacctacttcaacgaccccaagtggcccagcatgtggtacatgcactgcagcgacaacacccacccctgccagagcgacatgaacatcgagggcgcctggaagagaggctacaccggcaagaacatcgtggtgaccatcctggacgacggcatcgagagaacccaccccgacctgatgcagaactacgacgccctggccagctgcgacgtgaacggcaacgacctggaccccatgcccagatacgacgccagcaacgagaacaagcacggcaccagatgcgccggcgaggtggccgccgccgccaacaacagccactgcaccgtgggcatcgccttcaacgccaagatcggcggcgtgagaatgctggacggcgacgtgaccgacatggtggaggccaagagcgtgagcttcaacccccagcacgtgcacatctacagcgccagctggggccccgacgacgacggcaagaccgtggacggccccgcccccctgaccagacaggccttcgagaacggcgtgagaatgggcagaagaggcctgggcagcgtgttcgtgtgggccagcggcaacggcggcagaagcaaggaccactgcagctgcgacggctacaccaacagcatctacaccatcagcatcagcagcaccgccgagagcggcaagaagccctggtacctggaggagtgcagcagcaccctggccaccacctacagcagcggcgagagctacgacaagaagatcatcaccaccgacctgagacagagatgcaccgacaaccacaccggcaccagcgccagcgcccccatggccgccggcatcatcgccctggccctggaggccaaccccttcctgacctggagagacgtgcagcacgtgatcgtgagaaccagcagagccggccacctgaacgccaacgactggaagaccaacgccgccggcttcaaggtgagccacctgtacggcttcggcctgatggacgccgaggccatggtgatggaggccgagaagtggaccaccgtgcccagacagcacgtgtgcgtggagagcaccgacagacagatcaagaccatcagacccaacagcgccgtgagaagcatctacaaggccagcggctgcagcgacaaccccaacagacacgtgaactacctggagcacgtggtggtgagaatcaccatcacccaccccagaagaggcgacctggccatctacctgaccagccccagcggcaccagaagccagctgctggccaacagactgttcgaccacagcatggagggcttcaagaactgggagttcatgaccatccactgctggggcgagagagccgccggcgactgggtgctggaggtgtacgacacccccagccagctgagaaacttcaagacccccggcaagctgaaggagtggagcctggtgctgtacggcaccagcgtgcagccctacagccccaccaacgagttccccaaggtggagagattcagatacagcagagtggaggaccccaccgacgactacggcaccgaggactacgccggcgagctggccagcagcggcacccaggccaagaagagacagctgatgcaccaccccaccacctgggagaacagaatggagtggaacggcatgaagtggaacggcatgaagtggaacggcatggagtggaacggcatggagtggaacagaatcgagagcaacagaatcgagtag

SEQ ID NO: 94769 - DNA, 2073 bp, synthetic construct
  misc_feature 1..2073: note = Description of Artificial Sequence: Synthetic coding sequence
  source 1..2073: mol_type = other DNA
atgggctggggcagcagatgctgctgccccggcagactggacctgctgtgcgtgctggccctgctgggcggctgcctgctgcccgtgtgcagaaccagagtgtacaccaaccactgggccgtgaagatcgccggcggcttccccgaggccaacagaatcgccagcaagtacggcttcatcaacatcggccagatcggcgccctgaaggactactaccacttctaccacagcagaaccatcaagagaagcgtgatcagcagcagaggcacccacagcttcatcagcatggagcccaaggtggagtggatccagcagcaggtggtgaagaagagaaccaagagagactacgacttcagcagagcccagagcacctacttcaacgaccccaagtggcccagcatgtggtacatgcactgcagcgacaacacccacccctgccagagcgacatgaacatcgagggcgcctggaagagaggctacaccggcaagaacatcgtggtgaccatcctggacgacggcatcgagagaacccaccccgacctgatgcagaactacgacgccctggccagctgcgacgtgaacggcaacgacctggaccccatgcccagatacgacgccagcaacgagaacaagcacggcaccagatgcgccggcgaggtggccgccgccgccaacaacagccactgcaccgtgggcatcgccttcaacgccaagatcggcggcgtgagaatgctggacggcgacgtgaccgacatggtggaggccaagagcgtgagcttcaacccccagcacgtgcacatctacagcgccagctggggccccgacgacgacggcaagaccgtggacggccccgcccccctgaccagacaggccttcgagaacggcgtgagaatgggcagaagaggcctgggcagcgtgttcgtgtgggccagcggcaacggcggcagaagcaaggaccactgcagctgcgacggctacaccaacagcatctacaccatcagcatcagcagcaccgccgagagcggcaagaagccctggtacctggaggagtgcagcagcaccctggccaccacctacagcagcggcgagagctacgacaagaagatcatcaccaccgacctgagacagagatgcaccgacaaccacaccggcaccagcgccagcgcccccatggccgccggcatcatcgccctggccctggaggccaaccccttcctgacctggagagacgtgcagcacgtgatcgtgagaaccagcagagccggccacctgaacgccaacgactggaagaccaacgccgccggcttcaaggtgagccacctgtacggcttcggcctgatggacgccgaggccatggtgatggaggccgagaagtggaccaccgtgcccagacagcacgtgtgcgtggagagcaccgacagacagatcaagaccatcagacccaacagcgccgtgagaagcatctacaaggccagcggctgcagcgacaaccccaacagacacgtgaactacctggagcacgtggtggtgagaatcaccatcacccaccccagaagaggcgacctggccatctacctgaccagccccagcggcaccagaagccagctgctggccaacagactgttcgaccacagcatggagggcttcaagaactgggagttcatgaccatccactgctggggcgagagagccgccggcgactgggtgctggaggtgtacgacacccccagccagctgagaaacttcaagacccccggcaagctgaaggagtggagcctggtgctgtacggcaccagcgtgcagccctacagccccaccaacgagttccccaaggtggagagattcagatacagcagagtggaggaccccaccgacgactacggcaccgaggactacgccggcgagctggccagcagcggcacccaggccaagaagagacagctgatgcaccaccccaccacctgggagaacagaatggagtggaacggcatgaagtggaacggcatggagtggaacggcatggagtggaacggcatggagagcaacagaatcgagagcaacagaatcgagtag

SEQ ID NO: 94770 - DNA, 4683 bp, synthetic construct
  misc_feature 1..4683: note = Description of Artificial Sequence: Synthetic coding sequence
  source 1..4683: mol_type = other DNA
aacagcatctacaccatcagcatcagcagcaccgccgagagcggcaagaagccctggtacctggaggagtgcagcagcaccctggccaccacctacagcagcggcgagagctacgacaagaagatcatcaccaccgacctgagacagagatgcaccgacaaccacaccggcaccagcgccagcgcccccatggccgccggcatcatcgccctggccctggaggccaaccccttcctgacctggagagacgtgcagcacgtgatcgtgagaaccagcagagccggccacctgaacgccaacgactggaagaccaacgccgccggcttcaaggtgagccacctgtacggcttcggcctgatggacgccgaggccatggtgatggaggccgagaagtggaccaccgtgcccagacagcacgtgtgcgtggagagcaccgacagacagatcaagaccatcagacccaacagcgccgtgagaagcatctacaaggccagcggctgcagcgacaaccccaacagacacgtgaactacctggagcacgtggtggtgagaatcaccatcacccaccccagaagaggcgacctggccatctacctgaccagccccagcggcaccagaagccagctgctggccaacagactgttcgaccacagcatggagggcttcaagaactgggagttcatgaccatccactgctggggcgagagagccgccggcgactgggtgctggaggtgtacgacacccccagccagctgagaaacttcaagacccccggcaagctgaaggagtggagcctggtgctgtacggcaccagcgtgcagccctacagccccaccaacgagttccccaaggtggagagattcagatacagcagagtggaggaccccaccgacgactacggcaccgaggactacgccggcccctgcgaccccgagtgcagcgaggtgggctgcgacggccccggccccgaccactgcaacgactgcctgcactactactacaagctgaagaacaacaccagaatctgcgtgagcagctgcccccccggccactaccacgccgacaagaagagatgcagaaagtgcgcccccaactgcgagagctgcttcggcagccacggcgaccagtgcatgagctgcaagtacggctacttcctgaacgaggagaccaacagctgcgtgacccactgccccgacggcagctaccaggacaccaagaagaacctgtgcagaaagtgcagcgagaactgcaagacctgcaccgagttccacaactgcaccgagtgcagagacggcctgagcctgcagggcagcagatgcagcgtgagctgcgaggacggcagatacttcaacggccaggactgccagccctgccacagattctgcgccacctgcgccggcgccggcgccgacggctgcatcaactgcaccgagggctacttcatggaggacggcagatgcgtgcagagctgcagcatcagctactacttcgaccacagcagcgagaacggctacaagagctgcaagaagtgcgacatcagctgcctgacctgcaacggccccggcttcaagaactgcaccagctgccccagcggctacctgctggacctgggcatgtgccagatgggcgccatctgcaaggacggcgagtacgtggacgagcacggccactgccagacctgcgaggccagctgcgccaagtgccagggccccacccaggaggactgcaccacctgccccatgaccagaatcttcgacgacggcagatgcgtgagcaactgccccagctggaagttcgagttcgagaaccagtgccacccctgccaccacacctgccagagatgccagggcagcggccccacccactgcaccagctgcggcgccgacaactacggcagagagcacttcctgtaccagggcgagtgcggcgacagctgccccgagggccactacgccaccgagggcaacacctgcctgccctgccccgacaactgcgagctgtgccacagcgtgcacgtgtgcaccagatgcatgaagggctacttcatcgcccccaccaaccacacctgccagaagctggagtgcggccagggcgaggtgcaggaccccgactacgaggagtgcgtgccctgcgaggagggctgcctgggctgcagcctggacgaccccggcacctgcaccagctgcgccatgggctactacagattcgaccaccactgctacaagacctgccccgagaagacctacagcgaggaggtggagtgcaaggcctgcgacagcaactgcggcagctgcgaccagaacggctgctactggtgcgaggagggcttcttcctgctgggcggcagctgcgtgagaaagtgcggccccggcttctacggcgaccaggagatgggcgagtgcgagagctgccacagagcctgcgagacctgcaccggccccggccacgacgagtgcagcagctgccaggagggcctgcagctgctgagaggcatgtgcgtgcacgccaccaagacccaggaggagggcaagttctggaacgaggccgtgagcaccgccaacctgagcgtggtgaagagcctgctgcaggagagaagaagatggaaggtgcagatcaagagagacatcctgagaaagctgcagccctgccacagcagctgcaagacctgcaacggcagcgccaccctgtgcaccagctgccccaagggcgcctacctgctggcccaggcctgcgtgagcagctgcccccagggcacctggcccagcgtgagaagcggcagctgcgagaactgcaccgaggcctgcgccatctgcagcggcgccgacctgtgcaagaagtgccagatgcagcccggccaccccctgttcctgcacgagggcagatgctacagcaagtgccccgagggcagctacgccgaggacggcatctgcgagagatgcagcagcccctgcagaacctgcgagggcaacgccaccaactgccacagctgcgagggcggccacgtgctgcaccacggcgtgtgccaggagaactgccccgagagacacgtggccgtgaagggcgtgtgcaagcactgccccgagatgtgccaggactgcatccacgagaagacctgcaaggagtgcacccccgagttcttcctgcacgacgacatgtgccaccagagctgccccagaggcttctacgccgacagcagacactgcgtgccctgccacaaggactgcctggagtgcagcggccccaaggccgacgactgcgagctgtgcctggagagcagctgggtgctgtacgacggcctgtgcctggaggagtgccccgccggcacctactacgagaaggagaccaaggagtgcagagactgccacaagagctgcctgacctgcagcagcagcggcacctgcaccacctgccagaagggcctgatcatgaaccccagaggcagctgcatggccaacgagaagtgcagccccagcgagtactgggacgaggacgcccccggctgcaagccctgccacgtgaagtgcttccactgcatgggccccgccgaggaccagtgccagacctgccccatgaacagcctgctgctgaacaccacctgcgtgaaggactgccccgagggctactacgccgacgaggacagcaacagatgcgcccactgccacagcagctgcagaacctgcgagggcagacacagcagacagtgccacagctgcagacccggctggttccagctgggcaaggagtgcctgctgcagtgcagagagggctactacgccgacaacagcaccggcagatgcgagagatgcaacagaagctgcaagggctgccagggccccagacccaccgactgcctgagctgcgacagattcttcttcctgctgagaagcaagggcgagtgccacagaagctgccccgaccactactacgtggagcagagcacccagacctgcgagagatgccaccccacctgcgaccagtgcaagggcaagggcgccctgaactgcctgagctgcgtgtggagctaccacctgatgggcggcatctgcaccagcgactgcctggtgggcgagtacagagtgggcgagggcgagaagttcaactgcgagaagtgccacgagagctgcatggagtgcaagggccccggcgccaagaactgcaccctgtgccccgccaacctggtgctgcacatggacgacagccactgcctgcactgctgcaacaccagcgacccccccagcgcccaggagtgctgcgactgccaggacaccaccgacgagtgcatcctgagaaccagcaaggtgagacccgccaccgagcacttcaagaccgccctgttcatcaccagcagcatgatgctggtgctgctgctgggcgccgccgtggtggtgtggaagaagagcagaggcagagtgcagcccgccgccaaggccggctacgagaagctggccgaccccaacaagagctacagcagctacaagagcagctacagagagagcaccagcttcgaggaggaccaggtgatcgagtacagagacagagactacgacgaggacgacgacgacgacatcgtgtacatgggccaggacggcaccgtgtacagaaagttcaagtacggcctgctggacgacgacgacatcgacgagctggagtacgacgacgagagctacagctactaccagtag

SEQ ID NO: 94771 - DNA, 306 bp, synthetic construct
  misc_feature 1..306: note = Description of Artificial Sequence: Synthetic coding sequence
  source 1..306: mol_type = other DNA
tgccagccctgccacagattctgcgccacctgcgccggcgccggcgccgacggctgcatcaactgcaccgagggctacttcatggaggacggcagatgcgtgcagagctgcagcatcagctactacttcgaccacagcagcgagaacggctacaagagctgcaagaagtgcgacatcagctgcctgacctgcaacggccccggcttcaagaactgcaccagctgccccagcggctacctgctggacctgggcatgtgccagatgggcgccatctgcaaggacgtgagcctgttcagaggcgcctag

SEQ ID NO: 94772 - DNA, 5583 bp, synthetic construct
  misc_feature 1..5583: note = Description of Artificial Sequence: Synthetic coding sequence
  source 1..5583: mol_type = other DNA
atgggctggggcagcagatgctgctgccccggcagactggacctgctgtgcgtgctggccctgctgggcggctgcctgctgcccgtgtgcagaaccagagtgtacaccaaccactgggccgtgaagatcgccggcggcttccccgaggccaacagaatcgccagcaagtacggcttcatcaacatcggccagatcggcgccctgaaggactactaccacttctaccacagcagaaccatcaagagaagcgtgatcagcagcagaggcacccacagcttcatcagcatggagcccaaggtggagtggatccagcagcaggtggtgaagaagagaaccaagagagactacgacttcagcagagcccagagcacctacttcaacgaccccaagtggcccagcatgtggtacatgcactgcagcgacaacacccacccctgccagagcgacatgaacatcgagggcgcctggaagagaggctacaccggcaagaacatcgtggtgaccatcctggacgacggcatcgagagaacccaccccgacctgatgcagaactacgacgccctggccagctgcgacgtgaacggcaacgacctggaccccatgcccagatacgacgccagcaacgagaacaagcacggcaccagatgcgccggcgaggtggccgccgccgccaacaacagccactgcaccgtgggcatcgccttcaacgccaagatcggcggcgtgagaatgctggacggcgacgtgaccgacatggtggaggccaagagcgtgagcttcaacccccagcacgtgcacatctacagcgccagctggggccccgacgacgacggcaagaccgtggacggccccgcccccctgaccagacaggccttcgagaacggcgtgagaatgggcagaagaggcctgggcagcgtgttcgtgtgggccagcggcaacggcggcagaagcaaggaccactgcagctgcgacggctacaccaacagcatctacaccatcagcatcagcagcaccgccgagagcggcaagaagccctggtacctggaggagtgcagcagcaccctggccaccacctacagcagcggcgagagctacgacaagaagatcatcaccaccgacctgagacagagatgcaccgacaaccacaccggcaccagcgccagcgcccccatggccgccggcatcatcgccctggccctggaggccaaccccttcctgacctggagagacgtgcagcacgtgatcgtgagaaccagcagagccggccacctgaacgccaacgactggaagaccaacgccgccggcttcaaggtgagccacctgtacggcttcggcctgatggacgccgaggccatggtgatggaggccgagaagtggaccaccgtgcccagacagcacgtgtgcgtggagagcaccgacagacagatcaagaccatcagacccaacagcgccgtgagaagcatctacaaggccagcggctgcagcgacaaccccaacagacacgtgaactacctggagcacgtggtggtgagaatcaccatcacccaccccagaagaggcgacctggccatctacctgaccagccccagcggcaccagaagccagctgctggccaacagactgttcgaccacagcatggagggcttcaagaactgggagttcatgaccatccactgctggggcgagagagccgccggcgactgggtgctggaggtgtacgacacccccagccagctgagaaacttcaagacccccggcaagctgaaggagtggagcctggtgctgtacggcaccagcgtgcagccctacagccccaccaacgagttccccaaggtggagagattcagatacagcagagtggaggaccccaccgacgactacggcaccgaggactacgccggcccctgcgaccccgagtgcagcgaggtgggctgcgacggccccggccccgaccactgcaacgactgcctgcactactactacaagctgaagaacaacaccagaatctgcgtgagcagctgcccccccggccactaccacgccgacaagaagagatgcagaaagtgcgcccccaactgcgagagctgcttcggcagccacggcgaccagtgcatgagctgcaagtacggctacttcctgaacgaggagaccaacagctgcgtgacccactgccccgacggcagctaccaggacaccaagaagaacctgtgcagaaagtgcagcgagaactgcaagacctgcaccgagttccacaactgcaccgagtgcagagacggcctgagcctgcagggcagcagatgcagcgtgagctgcgaggacggcagatacttcaacggccaggactgccagccctgccacagattctgcgccacctgcgccggcgccggcgccgacggctgcatcaactgcaccgagggctacttcatggaggacggcagatgcgtgcagagctgcagcatcagctactacttcgaccacagcagcgagaacggctacaagagctgcaagaagtgcgacatcagctgcctgacctgcaacggccccggcttcaagaactgcaccagctgccccagcggctacctgctggacctgggcatgtgccagatgggcgccatctgcaaggacggcgagtacgtggacgagcacggccactgccagacctgcgaggccagctgcgccaagtgccagggccccacccaggaggactgcaccacctgccccatgaccagaatcttcgacgacggcagatgcgtgagcaactgccccagctggaagttcgagttcgagaaccagtgccacccctgccaccacacctgccagagatgccagggcagcggccccacccactgcaccagctgcggcgccgacaactacggcagagagcacttcctgtaccagggcgagtgcggcgacagctgccccgagggccactacgccaccgagggcaacacctgcctgccctgccccgacaactgcgagctgtgccacagcgtgcacgtgtgcaccagatgcatgaagggctacttcatcgcccccaccaaccacacctgccagaagctggagtgcggccagggcgaggtgcaggaccccgactacgaggagtgcgtgccctgcgaggagggctgcctgggctgcagcctggacgaccccggcacctgcaccagctgcgccatgggctactacagattcgaccaccactgctacaagacctgccccgagaagacctacagcgaggaggtggagtgcaaggcctgcgacagcaactgcggcagctgcgaccagaacggctgctactggtgcgaggagggcttcttcctgctgggcggcagctgcgtgagaaagtgcggccccggcttctacggcgaccaggagatgggcgagtgcgagagctgccacagagcctgcgagacctgcaccggccccggccacgacgagtgcagcagctgccaggagggcctgcagctgctgagaggcatgtgcgtgcacgccaccaagacccaggaggagggcaagttctggaacgacatcctgagaaagctgcagccctgccacagcagctgcaagacctgcaacggcagcgccaccctgtgcaccagctgccccaagggcgcctacctgctggcccaggcctgcgtgagcagctgcccccagggcacctggcccagcgtgagaagcggcagctgcgagaactgcaccgaggcctgcgccatctgcagcggcgccgacctgtgcaagaagtgccagatgcagcccggccaccccctgttcctgcacgagggcagatgctacagcaagtgccccgagggcagctacgccgaggacggcatctgcgagagatgcagcagcccctgcagaacctgcgagggcaacgccaccaactgccacagctgcgagggcggccacgtgctgcaccacggcgtgtgccaggagaactgccccgagagacacgtggccgtgaagggcgtgtgcaagcactgccccgagatgtgccaggactgcatccacgagaagacctgcaaggagtgcacccccgagttcttcctgcacgacgacatgtgccaccagagctgccccagaggcttctacgccgacagcagacactgcgtgccctgccacaaggactgcctggagtgcagcggccccaaggccgacgactgcgagctgtgcctggagagcagctgggtgctgtacgacggcctgtgcctggaggagtgccccgccggcacctactacgagaaggagaccaaggagtgcagagactgccacaagagctgcctgacctgcagcagcagcggcacctgcaccacctgccagaagggcctgatcatgaaccccagaggcagctgcatggccaacgagaagtgcagccccagcgagtactgggacgaggacgcccccggctgcaagccctgccacgtgaagtgcttccactgcatgggccccgccgaggaccagtgccagacctgccccatgaacagcctgctgctgaacaccacctgcgtgaaggactgccccgagggctactacgccgacgaggacagcaacagatgcgcccactgccacagcagctgcagaacctgcgagggcagacacagcagacagtgccacagctgcagacccggctggttccagctgggcaaggagtgcctgctgcagtgcagagagggctactacgccgacaacagcaccggcagatgcgagagatgcaacagaagctgcaagggctgccagggccccagacccaccgactgcctgagctgcgacagattcttcttcctgctgagaagcaagggcgagtgccacagaagctgccccgaccactactacgtggagcagagcacccagacctgcgagagatgccaccccacctgcgaccagtgcaagggcaagggcgccctgaactgcctgagctgcgtgtggagctaccacctgatgggcggcatctgcaccagcgactgcctggtgggcgagtacagagtgggcgagggcgagaagttcaactgcgagaagtgccacgagagctgcatggagtgcaagggccccggcgccaagaactgcaccctgtgccccgccaacctggtgctgcacatggacgacagccactgcctgcactgctgcaacaccagcgacccccccagcgcccaggagtgctgcgactgccaggacaccaccgacgagtgcatcctgagaaccagcaaggtgagacccgccaccgagcacttcaagaccgccctgttcatcaccagcagcatgatgctggtgctgctgctgggcgccgccgtggtggtgtggaagaagagcagaggcagagtgcagcccgccgccaaggccggctacgagaagctggccgaccccaacaagagctacagcagctacaagagcagctacagagagagcaccagcttcgaggaggaccaggtgatcgagtacagagacagagactacgacgaggacgacgacgacgacatcgtgtacatgggccaggacggcaccgtgtacagaaagttcaagtacggcctgctggacgacgacgacatcgacgagctggagtacgacgacgagagctacagctactaccagtag

SEQ ID NO: 94773 - DNA, 1497 bp, synthetic construct
  misc_feature 1..1497: note = Description of Artificial Sequence: Synthetic coding sequence
  source 1..1497: mol_type = other DNA
atctggaacgtgcaccactgcggcgacaagaacagcagatgcagaagcgagatgaacgtgcaggccgcctggaagagaggctacaccggcaagaacgtggtggtgaccatcctggacgacggcatcgagagaaaccaccccgacctggcccccaactacgacagctacgccagctacgacgtgaacggcaacgactacgaccccagccccagatacgacgccagcaacgagaacaagcacggcaccagatgcgccggcgaggtggccgccagcgccaacaacagctactgcatcgtgggcatcgcctacaacgccaagatcggcggcatcagaatgctggacggcgacgtgaccgacgtggtggaggccaagagcctgggcatcagacccaactacatcgacatctacagcgccagctggggccccgacgacgacggcaagaccgtggacggccccggcagactggccaagcaggccttcgagtacggcatcaagaagggcagacagggcctgggcagcatcttcgtgtgggccagcggcaacggcggcagagagggcgactactgcagctgcgacggctacaccaacagcatctacaccatcagcgtgagcagcgccaccgagaacggctacaagccctggtacctggaggagtgcgccagcaccctggccaccacctacagcagcggcgccttctacgagagaaagatcgtgaccaccgacctgagacagagatgcaccgacggccacaccggcaccagcgtgagcgcccccatggtggccggcatcatcgccctggccctggaggccaacagccagctgacctggagagacgtgcagcacctgctggtgaagaccagcagacccgcccacctgaaggccagcgactggaaggtgaacggcgccggccacaaggtgagccacttctacggcttcggcctggtggacgccgaggccctggtggtggaggccaagaagtggaccgccgtgcccagccagcacatgtgcgtggccgccagcgacaagagacccagaagcatccccctggtgcaggtgctgagaaccaccgccctgaccagcgcctgcgccgagcacagcgaccagagagtggtgtacctggagcacgtggtggtgagaaccagcatcagccaccccagaagaggcgacctgcagatctacctggtgagccccagcggcaccaagagccagctgctggccaagagactgctggacctgagcaacgagggcttcaccaactgggagttcatgaccgtgcactgctggggcgagaaggccgagggccagtggaccctggagatccaggacctgcccagccaggtgagaaaccccgagaagcagggcgacctggagacccccgtggccaaccagctgaccaccgaggagagattcgtgagcaccctgagcatcctgttccactggagcgtgtacctgagctggagccagtaccacatcgtgctgatcaccgtggccctgtag

SEQ ID NO: 94774 - DNA, 1956 bp, synthetic construct
  misc_feature 1..1956: note = Description of Artificial Sequence: Synthetic coding sequence
  source 1..1956: mol_type = other DNA
atgccccccagagccccccccgcccccggccccagacccccccccagagccgccgccgccaccgacaccgccgccggcgccggcggcgccggcggcgccggcggcgccggcggccccggcttcagacccctggcccccagaccctggagatggctgctgctgctggccctgcccgccgcctgcagccccccccccagacccgtgtacaccaaccactgggccgtgcaggtgctgggcggccccgccgaggccgacagagtggccgccgcccacggctacctgaacctgggccagatcggcaacctggaggactactaccacttctaccacagcaagaccttcaagagaagcaccctgagcagcagaggcccccacaccttcctgagaatggacccccaggtgaagtggctgcagcagcaggaggtgaagagaagagtgaagagacaggtgagaagcgacccccaggccctgtacttcaacgaccccatctggagcaacatgtggtacctgcactgcggcgacaagaacagcagatgcagaagcgagatgaacgtgcaggccgcctggaagagaggctacaccggcaagaacgtggtggtgaccatcctggacgacggcatcgagagaaaccaccccgacctggcccccaactacgacagctacgccagctacgacgtgaacggcaacgactacgaccccagccccagatacgacgccagcaacgagaacaagcacggcaccagatgcgccggcgaggtggccgccagcgccaacaacagctactgcatcgtgggcatcgcctacaacgccaagatcggcggcatcagaatgctggacggcgacgtgaccgacgtggtggaggccaagagcctgggcatcagacccaactacatcgacatctacagcgccagctggggccccgacgacgacggcaagaccgtggacggccccggcagactggccaagcaggccttcgagtacggcatcaagaagggcagacagggcctgggcagcatcttcgtgtgggccagcggcaacggcggcagagagggcgactactgcagctgcgacggctacaccaacagcatctacaccatcagcgtgagcagcgccaccgagaacggctacaagccctggtacctggaggagtgcgccagcaccctggccaccacctacagcagcggcgccttctacgagagaaagatcgtgaccaccgacctgagacagagatgcaccgacggccacaccggcaccagcgtgagcgcccccatggtggccggcatcatcgccctggccctggaggccaacagccagctgacctggagagacgtgcagcacctgctggtgaagaccagcagacccgcccacctgaaggccagcgactggaaggtgaacggcgccggccacaaggtgagccacttctacggcttcggcctggtggacgccgaggccctggtggtggaggccaagaagtggaccgccgtgcccagccagcacatgtgcgtggccgccagcgacaagagacccagaagcatccccctggtgcaggtgctgagaaccaccgccctgaccagcgcctgcgccgagcacagcgaccagagagtggtgtacctggagcacgtggtggtgagaaccagcatcagccaccccagaagaggcgacctgcagatctacctggtgagccccagcggcaccaagagccagctgctggccaagagactgctggacctgagcaacgagggcttcaccaactgggagttcatgaccgtgcactgctggggcgagaaggccgagggccagtggaccctggagatccaggacctgcccagccaggtgagaaaccccgagaagcagggcgacctggagacccccgtggccaaccagctgaccaccgaggagagagagcccggcctgaagcacgtgttcagatggcagatcgagcaggagctgtggtag

SEQ ID NO: 94775 - DNA, 2907 bp, synthetic construct
  misc_feature 1..2907: note = Description of Artificial Sequence: Synthetic coding sequence
  source 1..2907: mol_type = other DNA
atgccccccagagccccccccgcccccggccccagacccccccccagagccgccgccgccaccgacaccgccgccggcgccggcggcgccggcggcgccggcggcgccggcggccccggcttcagacccctggcccccagaccctggagatggctgctgctgctggccctgcccgccgcctgcagccccccccccagacccgtgtacaccaaccactgggccgtgcaggtgctgggcggccccgccgaggccgacagagtggccgccgcccacggctacctgaacctgggccagatcggcaacctggaggactactaccacttctaccacagcaagaccttcaagagaagcaccctgagcagcagaggcccccacaccttcctgagaatggacccccaggtgaagtggctgcagcagcaggaggtgaagagaagagtgaagagacaggtgagaagcgacccccaggccctgtacttcaacgaccccatctggagcaacatgtggtacctgcactgcggcgacaagaacagcagatgcagaagcgagatgaacgtgcaggccgcctggaagagaggctacaccggcaagaacgtggtggtgaccatcctggacgacggcatcgagagaaaccaccccgacctggcccccaactacgacagctacgccagctacgacgtgaacggcaacgactacgaccccagccccagatacgacgccagcaacgagaacaagcacggcaccagatgcgccggcgaggtggccgccagcgccaacaacagctactgcatcgtgggcatcgcctacaacgccaagatcggcggcatcagaatgctggacggcgacgtgaccgacgtggtggaggccaagagcctgggcatcagacccaactacatcgacatctacagcgccagctggggccccgacgacgacggcaagaccgtggacggccccggcagactggccaagcaggccttcgagtacggcatcaagaagggcagacagggcctgggcagcatcttcgtgtgggccagcggcaacggcggcagagagggcgactactgcagctgcgacggctacaccaacagcatctacaccatcagcgtgagcagcgccaccgagaacggctacaagccctggtacctggaggagtgcgccagcaccctggccaccacctacagcagcggcgccttctacgagagaaagatcgtgaccaccgacctgagacagagatgcaccgacggccacaccggcaccagcgtgagcgcccccatggtggccggcatcatcgccctggccctggaggccaacagccagctgacctggagagacgtgcagcacctgctggtgaagaccagcagacccgcccacctgaaggccagcgactggaaggtgaacggcgccggccacaaggtgagccacttctacggcttcggcctggtggacgccgaggccctggtggtggaggccaagaagtggaccgccgtgcccagccagcacatgtgcgtggccgccagcgacaagagacccagaagcatccccctggtgcaggtgctgagaaccaccgccctgaccagcgcctgcgccgagcacagcgaccagagagtggtgtacctggagcacgtggtggtgagaaccagcatcagccaccccagaagaggcgacctgcagatctacctggtgagccccagcggcaccaagagccagctgctggccaagagactgctggacctgagcaacgagggcttcaccaactgggagttcatgaccgtgcactgctggggcgagaaggccgagggccagtggaccctggagatccaggacctgcccagccaggtgagaaaccccgagaagcagggcaagctgaaggagtggagcctgatcctgtacggcaccgccgagcacccctaccacaccttcagcgcccaccagagcagaagcagaatgctggagctgagcgcccccgagctggagccccccaaggccgccctgagccccagccaggtggaggtgcccgaggacgaggaggactacaccgcccagagcacccccggcagcgccaacatcctgcagaccagcgtgtgccaccccgagtgcggcgacaagggctgcgacggccccaacgccgaccagtgcctgaactgcgtgcacttcagcctgggcagcgtgaagaccagcagaaagtgcgtgagcgtgtgccccctgggctacttcggcgacaccgccgccagaagatgcagaagatgccacaagggctgcgagacctgcagcagcagagccgccacccagtgcctgagctgcagaagaggcttctaccaccaccaggagatgaacacctgcgtgaccctgtgccccgccggcttctacgccgacgagagccagaagaactgcctgaagtgccaccccagctgcaagaagtgcgtggacgagcccgagaagtgcaccgtgtgcaaggagggcttcagcctggccagaggcagctgcatccccgactgcgagcccggcacctacttcgacagcgagctgatcagatgcggcgagtgccaccacacctgcggcacctgcgtgggccccggcagagaggagtgcatccactgcgccaagaacttccacttccacgactggaagtgcgtgcccgcctgcggcgagggcttctaccccgaggagatgcccggcctgccccacaaggtgtgcagaagatgcgacgagaactgcctgagctgcgccggcagcagcagaaactgcagcagatgcaagaccggcttcacccagctgggcaccagctgcatcaccaaccacacctgcagcaacgccgacgagaccttctgcgagatggtgaagagcaacagactgtgcgagagaaagctgttcatccagttctgctgcagaacctgcctgctggccggctag

SEQ ID NO: 94776 - DNA, 2868 bp, synthetic construct
  misc_feature 1..2868: note = Description of Artificial Sequence: Synthetic coding sequence
  source 1..2868: mol_type = other DNA
atgccccccagagccccccccgcccccggccccagacccccccccagagccgccgccgccaccgacaccgccgccggcgccggcggcgccggcggcgccggcggcgccggcggccccggcttcagacccctggcccccagaccctggagatggctgctgctgctggccctgcccgccgcctgcagccccccccccagacccgtgtacaccaaccactgggccgtgcaggtgctgggcggccccgccgaggccgacagagtggccgccgcccacggctacctgaacctgggccagatcggcaacctggaggactactaccacttctaccacagcaagaccttcaagagaagcaccctgagcagcagaggcccccacaccttcctgagaatggacccccaggtgaagtggctgcagcagcaggaggtgaagagaagagtgaagagacaggtgagaagcgacccccaggccctgtacttcaacgaccccatctggagcaacatgtggtacctgcactgcggcgacaagaacagcagatgcagaagcgagatgaacgtgcaggccgcctggaagagaggctacaccggcaagaacgtggtggtgaccatcctggacgacggcatcgagagaaaccaccccgacctggcccccaactacgacagctacgccagctacgacgtgaacggcaacgactacgaccccagccccagatacgacgccagcaacgagaacaagcacggcaccagatgcgccggcgaggtggccgccagcgccaacaacagctactgcatcgtgggcatcgcctacaacgccaagatcggcggcatcagaatgctggacggcgacgtgaccgacgtggtggaggccaagagcctgggcatcagacccaactacatcgacatctacagcgccagctggggccccgacgacgacggcaagaccgtggacggccccggcagactggccaagcaggccttcgagtacggcatcaagaagggcagacagggcctgggcagcatcttcgtgtgggccagcggcaacggcggcagagagggcgactactgcagctgcgacggctacaccaacagcatctacaccatcagcgtgagcagcgccaccgagaacggctacaagccctggtacctggaggagtgcgccagcaccctggccaccacctacagcagcggcgccttctacgagagaaagatcgtgaccaccgacctgagacagagatgcaccgacggccacaccggcaccagcgtgagcgcccccatggtggccggcatcatcgccctggccctggaggccaacagccagctgacctggagagacgtgcagcacctgctggtgaagaccagcagacccgcccacctgaaggccagcgactggaaggtgaacggcgccggccacaaggtgagccacttctacggcttcggcctggtggacgccgaggccctggtggtggaggccaagaagtggaccgccgtgcccagccagcacatgtgcgtggccgccagcgacaagagacccagaagcatccccctggtgcaggtgctgagaaccaccgccctgaccagcgcctgcgccgagcacagcgaccagagagtggtgtacctggagcacgtggtggtgagaaccagcatcagccaccccagaagaggcgacctgcagatctacctggtgagccccagcggcaccaagagccagctgctggccaagagactgctggacctgagcaacgagggcttcaccaactgggagttcatgaccgtgcactgctggggcgagaaggccgagggccagtggaccctggagatccaggacctgcccagccaggtgagaaaccccgagaagcagggcaagctgaaggagtggagcctgatcctgtacggcaccgccgagcacccctaccacaccttcagcgcccaccagagcagaagcagaatgctggagctgagcgcccccgagctggagccccccaaggccgccctgagccccagccaggtggaggtgcccgaggacgaggaggactacaccggcgtgtgccaccccgagtgcggcgacaagggctgcgacggccccaacgccgaccagtgcctgaactgcgtgcacttcagcctgggcagcgtgaagaccagcagaaagtgcgtgagcgtgtgccccctgggctacttcggcgacaccgccgccagaagatgcagaagatgccacaagggctgcgagacctgcagcagcagagccgccacccagtgcctgagctgcagaagaggcttctaccaccaccaggagatgaacacctgcgtgaccctgtgccccgccggcttctacgccgacgagagccagaagaactgcctgaagtgccaccccagctgcaagaagtgcgtggacgagcccgagaagtgcaccgtgtgcaaggagggcttcagcctggccagaggcagctgcatccccgactgcgagcccggcacctacttcgacagcgagctgatcagatgcggcgagtgccaccacacctgcggcacctgcgtgggccccggcagagaggagtgcatccactgcgccaagaacttccacttccacgactggaagtgcgtgcccgcctgcggcgagggcttctaccccgaggagatgcccggcctgccccacaaggtgtgcagaagatgcgacgagaactgcctgagctgcgccggcagcagcagaaactgcagcagatgcaagaccggcttcacccagctgggcaccagctgcatcaccaaccacacctgcagcaacgccgacgagaccttctgcgagatggtgaagagcaacagactgtgcgagagaaagctgttcatccagttctgctgcagaacctgcctgctggccggctag

SEQ ID NO: 94777 - DNA, 1869 bp, synthetic construct
  misc_feature 1..1869: note = Description of Artificial Sequence: Synthetic coding sequence
  source 1..1869: mol_type = other DNA
atgccccccagagccccccccgcccccggccccagacccccccccagagccgccgccgccaccgacaccgccgccggcgccggcggcgccggcggcgccggcggcgccggcggccccggcttcagacccctggcccccagaccctggagatggctgctgctgctggccctgcccgccgcctgcagcgccccccccagacccgtgtacaccaaccactgggccgtgcaggtgctgggcggccccgccgaggccgacagagtggccgccgcccacggctacctgaacctgggccagatcggcaacctggaggactactaccacttctaccacagcaagaccttcaagagaagcaccctgagcagcagaggcccccacaccttcctgagaatggacccccaggtgaagtggctgcagcagcaggaggtgaagagaagagtgaagagacaggtgagaagcgacccccaggccctgtacttcaacgaccccatctggagcaacatgtggtacctgcactgcggcgacaagaacagcagatgcagaagcgagatgaacgtgcaggccgcctggaagagaggctacaccggcaagaacgtggtggtgaccatcctggacgacggcatcgagagaaaccaccccgacctggcccccaactacgacagctacgccagctacgacgtgaacggcaacgactacgaccccagccccagatacgacgccagcaacgagaacaagcacggcaccagatgcgccggcgaggtggccgccagcgccaacaacagctactgcatcgtgggcatcgcctacaacgccaagatcggcggcatcagaatgctggacggcgacgtgaccgacgtggtggaggccaagagcctgggcatcagacccaactacatcgacatctacagcgccagctggggccccgacgacgacggcaagaccgtggacggccccggcagactggccaagcaggccttcgagtacggcatcaagaagggcagacagggcctgggcagcatcttcgtgtgggccagcggcaacggcggcagagagggcgactactgcagctgcgacggctacaccaacagcatctacaccatcagcgtgagcagcgccaccgagaacggctacaagccctggtacctggaggagtgcgccagcaccctggccaccacctacagcagcggcgccttctacgagagaaagatcgtgaccaccgacctgagacagagatgcaccgacggccacaccggcaccagcgtgagcgcccccatggtggccggcatcatcgccctggccctggaggccaacagccagctgacctggagagacgtgcagcacctgctggtgaagaccagcagacccgcccacctgaaggccagcgactggaaggtgaacggcgccggccacaaggtgagccacttctacggcttcggcctggtggacgccgaggccctggtggtggaggccaagaagtggaccgccgtgcccagccagcacatgtgcgtggccgccagcgacaagagacccagaagcatccccctggtgcaggtgctgagaaccaccgccctgaccagcgcctgcgccgagcacagcgaccagagagtggtgtacctggagcacgtggtggtgagaaccagcatcagccaccccagaagaggcgacctgcagatctacctggtgagccccagcggcaccaagagccagctgctggccaagagactgctggacctgagcaacgagggcttcaccaactgggagttcatgaccgtgcactgctggggcgagaaggccgagggccagtggaccctggagatccaggacctgcccagccaggtgagaaaccccgagaagcagggcaacctggactag

SEQ ID NO: 94778 - DNA, 1584 bp, synthetic construct
  misc_feature 1..1584: note = Description of Artificial Sequence: Synthetic coding sequence
  source 1..1584: mol_type = other DNA
atgtacgccctgttcctgctggccagcctgctgggcgccgccctggccggccccgtgctgggcctgaaggagtgcaccagaggcagcgccgtgtggtgccagaacgtgaagaccgccagcgactgcggcgccgtgaagcactgcctgcagaccgtgtggaacaagcccaccgtgaagagcctgccctgcgacatctgcaaggacgtggtgaccgccgccggcgacatgctgaaggacaacgccaccgaggaggagatcctggtgtacctggagaagacctgcgactggctgcccaagcccaacatgagcgccagctgcaaggagatcgtggacagctacctgcccgtgatcctggacatcatcaagggcgagatgagcagacccggcgaggtgtgcagcgccctgaacctgtgcgagagcctgcagaagcacctggccgagctgaaccaccagaagcagctggagagcaacaagatccccgagctggacatgaccgaggtggtggcccccttcatggccaacatccccctgctgctgtacccccaggacggccccagaagcaagccccagcccaaggacaacggcgacgtgtgccaggactgcatccagatggtgaccgacatccagaccgccgtgagaaccaacagcaccttcgtgcaggccctggtggagcacgtgaaggaggagtgcgacagactgggccccggcatggccgacatctgcaagaactacatcagccagtacagcgagatcgccatccagatgatgatgcacatgagcgccgagcagcccaaggagatctgcgccctggtgggcttctgcgacgaggtgaaggagatgcccatgcagaccctggtgcccgccaaggtggccagcaagaacgtgatccccgccctggagctggtggagcccatcaagaagcacgaggtgcccgccaagagcgacgtgtactgcgaggtgtgcgagttcctggtgaaggaggtgaccaagctgatcgacaacaacaagaccgagaaggagatcctggacgccttcgacaagatgtgcagcaagctgcccaagagcctgagcgaggagtgccaggaggtggtggacacctacggcagcagcatcctgagcatcctgctggaggaggtgagccccgagctggtgtgcagcatgctgcacctgtgcagcggcaccagactgcccgccctgaccgtgcacgtgacccagcccaaggacggcggcttctgcgaggtgtgcaagaagctggtgggctacctggacagaaacctggagaagaacagcaccaagcaggagatcctggccgccctggagaagggctgcagcttcctgcccgacccctaccagaagcagtgcgaccagttcgtggccgagtacgagcccgtgctgatcgagatcctggtggaggtgatggaccccagcttcgtgtgcctgaagatcggcgcctgccccagcgcccacaagcccctgctgggcaccgagaagtgcatctggggccccagctactggtgccagaacaccgagaccgccgcccagtgcaacgccgtggagcactgcaagagacacgtgtggaactag

SEQ ID NO: 94779 - DNA, 1680 bp, synthetic construct
  misc_feature 1..1680: note = Description of Artificial Sequence: Synthetic coding sequence
  source 1..1680: mol_type = other DNA
atgtacgccctgttcctgctggccagcctgctgggcgccgccctggccggccccgtgctgggcctgaaggagtgcaccagaggcagcgccgtgtggtgccagaacgtgaagaccgccagcgactgcggcgccgtgaagcactgcctgcagaccgtgtggaacaagcccaccgtgaagagcctgccctgcgacatctgcaaggacgtggtgaccgccgccggcgacatgctgaaggacaacgccaccgaggaggagatcctggtgtacctggagaagacctgcgactggctgcccaagcccaacatgagcgccagctgcaaggagatcgtggacagctacctgcccgtgatcctggacatcatcaagggcgagatgagcagacccggcgaggtgtgcagcgccctgaacctgtgcgagagcctgcagaagcacctggccgagctgaaccaccagaagcagctggagagcaacaagatccccgagctggacatgaccgaggtggtggcccccttcatggccaacatccccctgctgctgtacccccaggacggccccagaagcaagccccagcccaaggacaacggcgacgtgtgccaggactgcatccagatggtgaccgacatccagaccgccgtgagaaccaacagcaccttcgtgcaggccctggtggagcacgtgaaggaggagtgcgacagactgggccccggcatggccgacatctgcaagaactacatcagccagtacagcgagatcgccatccagatgatgatgcacatgcagcccaaggagatctgcgccctggtgggcttctgcgacgaggtgaaggagatgcccatgcagaccctggtgcccgccaaggtggccagcaagaacgtgatccccgccctggagctggtggagcccatcaagaagcacgaggtgcccgccaagagcgacgtgtactgcgaggtgtgcgagttcctggtgaaggaggtgaccaagctgatcgacaacaacaagaccgagaaggagatcctggacgccttcgacaagatgtgcagcaagctgcccaagagcctgagcgaggagtgccaggaggtggtggacacctacggcagcagcatcctgagcatcctgctggaggaggtgagccccgagctggtgtgcagcatgctgcacctgtgcagcggcaccagactgcccgccctgaccgtgcacgtgacccagcccaaggacggcggcttctgcgaggtgtgcaagaagctggtgggctacctggacagaaacctggagaagaacagcaccaagcaggagatcctggccgccctggagaagggctgcagcttcctgcccgacccctaccagaagcagtgcgaccagttcgtggccgagtacgagcccgtgctgatcgagatcctggtggaggtgatggaccccagcttcgtgtgcctgaagatcggcgcctgccccagcgcccacaagcccctgctgggcaccgagaagtgcatctggggccccagctactggtgccagaacaccgagaccgccgcccagtgcaacgccgtggagcactgcaagagacacgtgtggatcggctgctggggcgtgggcgtgggcagctgcctgtggcccacctgggcccccaccctgctgagcaccagcggctgccaggagaccgccagcaaggccagcagaacctag

SEQ ID NO: 94780 - DNA, 723 bp, synthetic construct
  misc_feature 1..723: note = Description of Artificial Sequence: Synthetic coding sequence
  source 1..723: mol_type = other DNA
atgtacgccctgttcctgctggccagcctgctgggcgccgccctggccggccccgtgctgggcctgaaggagtgcaccagaggcagcgccgtgtggtgccagaacgtgaagaccgccagcgactgcggcgccgtgaagcactgcctgcagaccgtgtggaacaagcccaccgtgaagagcctgccctgcgacatctgcaaggacgtggtgaccgccgccggcgacatgctgaaggacaacgccaccgaggaggagatcctggtgtacctggaggtgagccccgagctggtgtgcagcatgctgcacctgtgcagcggcaccagactgcccgccctgaccgtgcacgtgacccagcccaaggacggcggcttctgcgaggtgtgcaagaagctggtgggctacctggacagaaacctggagaagaacagcaccaagcaggagatcctggccgccctggagaagggctgcagcttcctgcccgacccctaccagaagcagtgcgaccagttcgtggccgagtacgagcccgtgctgatcgagatcctggtggaggtgatggaccccagcttcgtgtgcctgaagatcggcgcctgccccagcgcccacaagcccctgctgggcaccgagaagtgcatctggggccccagctactggtgccagaacaccgagaccgccgcccagtgcaacgccgtggagcactgcaagagacacgtgtggaactag

SEQ ID NO: 94781 - DNA, 1581 bp, synthetic construct
  misc_feature 1..1581: note = Description of Artificial Sequence: Synthetic coding sequence
  source 1..1581: mol_type = other DNA
atgtacgccctgttcctgctggccagcctgctgggcgccgccctggccggccccgtgctgggcctgaaggagtgcaccagaggcagcgccgtgtggtgccagaacgtgaagaccgccagcgactgcggcgccgtgaagcactgcctgcagaccgtgtggaacaagcccaccgtgaagagcctgccctgcgacatctgcaaggacgtggtgaccgccgccggcgacatgctgaaggacaacgccaccgaggaggagatcctggtgtacctggagaagacctgcgactggctgcccaagcccaacatgagcgccagctgcaaggagatcgtggacagctacctgcccgtgatcctggacatcatcaagggcgagatgagcagacccggcgaggtgtgcagcgccctgaacctgtgcgagagcctgcagaagcacctggccgagctgaaccaccagaagcagctggagagcaacaagatccccgagctggacatgaccgaggtggtggcccccttcatggccaacatccccctgctgctgtacccccaggacggccccagaagcaagccccagcccaaggacaacggcgacgtgtgccaggactgcatccagatggtgaccgacatccagaccgccgtgagaaccaacagcaccttcgtgcaggccctggtggagcacgtgaaggaggagtgcgacagactgggccccggcatggccgacatctgcaagaactacatcagccagtacagcgagatcgccatccagatgatgatgcacatgctgcagcagcccaaggagatctgcgccctggtgggcttctgcgacgaggtgaaggagatgcccatgcagaccctggtgcccgccaaggtggccagcaagaacgtgatccccgccctggagctggtggagcccatcaagaagcacgaggtgcccgccaagagcgacgtgtactgcgaggtgtgcgagttcctggtgaaggaggtgaccaagctgatcgacaacaacaagaccgagaaggagatcctggacgccttcgacaagatgtgcagcaagctgcccaagagcctgagcgaggagtgccaggaggtggtggacacctacggcagcagcatcctgagcatcctgctggaggaggtgagccccgagctggtgtgcagcatgctgcacctgtgcagcggcaccagactgcccgccctgaccgtgcacgtgacccagcccaaggacggcggcttctgcgaggtgtgcaagaagctggtgggctacctggacagaaacctggagaagaacagcaccaagcaggagatcctggccgccctggagaagggctgcagcttcctgcccgacccctaccagaagcagtgcgaccagttcgtggccgagtacgagcccgtgctgatcgagatcctggtggaggtgatggaccccagcttcgtgtgcctgaagatcggcgcctgccccagcgcccacaagcccctgctgggcaccgagaagtgcatctggggccccagctactggtgccagaacaccgagaccgccgcccagtgcaacgccgtggagcactgcaagagacacgtgtggaactag

SEQ ID NO: 94782 - DNA, 1575 bp, synthetic construct
  misc_feature 1..1575: note = Description of Artificial Sequence: Synthetic coding sequence
  source 1..1575: mol_type = other DNA
atgtacgccctgttcctgctggccagcctgctgggcgccgccctggccggccccgtgctgggcctgaaggagtgcaccagaggcagcgccgtgtggtgccagaacgtgaagaccgccagcgactgcggcgccgtgaagcactgcctgcagaccgtgtggaacaagcccaccgtgaagagcctgccctgcgacatctgcaaggacgtggtgaccgccgccggcgacatgctgaaggacaacgccaccgaggaggagatcctggtgtacctggagaagacctgcgactggctgcccaagcccaacatgagcgccagctgcaaggagatcgtggacagctacctgcccgtgatcctggacatcatcaagggcgagatgagcagacccggcgaggtgtgcagcgccctgaacctgtgcgagagcctgcagaagcacctggccgagctgaaccaccagaagcagctggagagcaacaagatccccgagctggacatgaccgaggtggtggcccccttcatggccaacatccccctgctgctgtacccccaggacggccccagaagcaagccccagcccaaggacaacggcgacgtgtgccaggactgcatccagatggtgaccgacatccagaccgccgtgagaaccaacagcaccttcgtgcaggccctggtggagcacgtgaaggaggagtgcgacagactgggccccggcatggccgacatctgcaagaactacatcagccagtacagcgagatcgccatccagatgatgatgcacatgcagcccaaggagatctgcgccctggtgggcttctgcgacgaggtgaaggagatgcccatgcagaccctggtgcccgccaaggtggccagcaagaacgtgatccccgccctggagctggtggagcccatcaagaagcacgaggtgcccgccaagagcgacgtgtactgcgaggtgtgcgagttcctggtgaaggaggtgaccaagctgatcgacaacaacaagaccgagaaggagatcctggacgccttcgacaagatgtgcagcaagctgcccaagagcctgagcgaggagtgccaggaggtggtggacacctacggcagcagcatcctgagcatcctgctggaggaggtgagccccgagctggtgtgcagcatgctgcacctgtgcagcggcaccagactgcccgccctgaccgtgcacgtgacccagcccaaggacggcggcttctgcgaggtgtgcaagaagctggtgggctacctggacagaaacctggagaagaacagcaccaagcaggagatcctggccgccctggagaagggctgcagcttcctgcccgacccctaccagaagcagtgcgaccagttcgtggccgagtacgagcccgtgctgatcgagatcctggtggaggtgatggaccccagcttcgtgtgcctgaagatcggcgcctgccccagcgcccacaagcccctgctgggcaccgagaagtgcatctggggccccagctactggtgccagaacaccgagaccgccgcccagtgcaacgccgtggagcactgcaagagacacgtgtggaactag

SEQ ID NO: 94783 - DNA, 1353 bp, synthetic construct
  misc_feature 1..1353: note = Description of Artificial Sequence: Synthetic coding sequence
  source 1..1353: mol_type = other DNA
atgctgaaggacaacgccaccgaggaggagatcctggtgtacctggagaagacctgcgactggctgcccaagcccaacatgagcgccagctgcaaggagatcgtggacagctacctgcccgtgatcctggacatcatcaagggcgagatgagcagacccggcgaggtgtgcagcgccctgaacctgtgcgagagcctgcagaagcacctggccgagctgaaccaccagaagcagctggagagcaacaagatccccgagctggacatgaccgaggtggtggcccccttcatggccaacatccccctgctgctgtacccccaggacggccccagaagcaagccccagcccaaggacaacggcgacgtgtgccaggactgcatccagatggtgaccgacatccagaccgccgtgagaaccaacagcaccttcgtgcaggccctggtggagcacgtgaaggaggagtgcgacagactgggccccggcatggccgacatctgcaagaactacatcagccagtacagcgagatcgccatccagatgatgatgcacatgcagcagcccaaggagatctgcgccctggtgggcttctgcgacgaggtgaaggagatgcccatgcagaccctggtgcccgccaaggtggccagcaagaacgtgatccccgccctggagctggtggagcccatcaagaagcacgaggtgcccgccaagagcgacgtgtactgcgaggtgtgcgagttcctggtgaaggaggtgaccaagctgatcgacaacaacaagaccgagaaggagatcctggacgccttcgacaagatgtgcagcaagctgcccaagagcctgagcgaggagtgccaggaggtggtggacacctacggcagcagcatcctgagcatcctgctggaggaggtgagccccgagctggtgtgcagcatgctgcacctgtgcagcggcaccagactgcccgccctgaccgtgcacgtgacccagcccaaggacggcggcttctgcgaggtgtgcaagaagctggtgggctacctggacagaaacctggagaagaacagcaccaagcaggagatcctggccgccctggagaagggctgcagcttcctgcccgacccctaccagaagcagtgcgaccagttcgtggccgagtacgagcccgtgctgatcgagatcctggtggaggtgatggaccccagcttcgtgtgcctgaagatcggcgcctgccccagcgcccacaagcccctgctgggcaccgagaagtgcatctggggccccagctactggtgccagaacaccgagaccgccgcccagtgcaacgccgtggagcactgcaagagacacgtgtggaactag

SEQ ID NO: 94784 - DNA, 1593 bp, synthetic construct
  misc_feature 1..1593: note = Description of Artificial Sequence: Synthetic coding sequence
  source 1..1593: mol_type = other DNA
gacggcgccatgtacgccctgttcctgctggccagcctgctgggcgccgccctggccggccccgtgctgggcctgaaggagtgcaccagaggcagcgccgtgtggtgccagaacgtgaagaccgccagcgactgcggcgccgtgaagcactgcctgcagaccgtgtggaacaagcccaccgtgaagagcctgccctgcgacatctgcaaggacgtggtgaccgccgccggcgacatgctgaaggacaacgccaccgaggaggagatcctggtgtacctggagaagacctgcgactggctgcccaagcccaacatgagcgccagctgcaaggagatcgtggacagctacctgcccgtgatcctggacatcatcaagggcgagatgagcagacccggcgaggtgtgcagcgccctgaacctgtgcgagagcctgcagaagcacctggccgagctgaaccaccagaagcagctggagagcaacaagatccccgagctggacatgaccgaggtggtggcccccttcatggccaacatccccctgctgctgtacccccaggacggccccagaagcaagccccagcccaaggacaacggcgacgtgtgccaggactgcatccagatggtgaccgacatccagaccgccgtgagaaccaacagcaccttcgtgcaggccctggtggagcacgtgaaggaggagtgcgacagactgggccccggcatggccgacatctgcaagaactacatcagccagtacagcgagatcgccatccagatgatgatgcacatgagcgccgagcagcccaaggagatctgcgccctggtgggcttctgcgacgaggtgaaggagatgcccatgcagaccctggtgcccgccaaggtggccagcaagaacgtgatccccgccctggagctggtggagcccatcaagaagcacgaggtgcccgccaagagcgacgtgtactgcgaggtgtgcgagttcctggtgaaggaggtgaccaagctgatcgacaacaacaagaccgagaaggagatcctggacgccttcgacaagatgtgcagcaagctgcccaagagcctgagcgaggagtgccaggaggtggtggacacctacggcagcagcatcctgagcatcctgctggaggaggtgagccccgagctggtgtgcagcatgctgcacctgtgcagcggcaccagactgcccgccctgaccgtgcacgtgacccagcccaaggacggcggcttctgcgaggtgtgcaagaagctggtgggctacctggacagaaacctggagaagaacagcaccaagcaggagatcctggccgccctggagaagggctgcagcttcctgcccgacccctaccagaagcagtgcgaccagttcgtggccgagtacgagcccgtgctgatcgagatcctggtggaggtgatggaccccagcttcgtgtgcctgaagatcggcgcctgccccagcgcccacaagcccctgctgggcaccgagaagtgcatctggggccccagctactggtgccagaacaccgagaccgccgcccagtgcaacgccgtggagcactgcaagagacacgtgtggaactag

SEQ ID NO: 94785 - DNA, 2214 bp, synthetic construct
  misc_feature 1..2214: note = Description of Artificial Sequence: Synthetic coding sequence
  source 1..2214: mol_type = other DNA
atgcccgaccacgacagcaccgccctgctgagcagacagaccaagagaagaagagtggacatcggcgtgaagagaaccgtgggcaccgccagcgccttcttcgccaaggccagagccaccttcttcagcgccatgaacccccagggcagcgagcaggacgtggagtacagcgtggtgcagcacgccgacggcgagaagagcaacgtgctgagaaagctgctgaagagagccaacagctacgaggacgccatgatgcccttccccggcgccaccatcatcagccagctgctgaagaacaacatgaacaagaacggcggcaccgagcccagcttccaggccagcggcctgagcagcaccggcagcgaggtgcaccaggaggacatctgcagcaacagcagcagagacagcccccccgagtgcctgagccccttcggcagacccaccatgagccagttcgacatggacagactgtgcgacgagcacctgagagccaagagagccagagtggagaacatcatcagaggcatgagccacagccccagcgtggccctgagaggcaacgagaacgagagagagatggccccccagagcgtgagccccagagagagctacagagagaacaagagaaagcagaagctgccccagcagcagcagcagagcttccagcagctggtgagcgccagaaaggagcagaagagagaggagagaagacagctgaagcagcagctggaggacatgcagaagcagctgagacagctgcaggagaagttctaccagatctacgacagcaccgacagcgagaacgacgaggacggcaacctgagcgaggacagcatgagaagcgagatcctggacgccagagcccaggacagcgtgggcagaagcgacaacgagatgtgcgagctggaccccggccagttcatcgacagagccagagccctgatcagagagcaggagatggccgagaacaagcccaagagagagggcaacaacaaggagagagaccacggccccaacagcctgcagcccgagggcaagcacctggccgagaccctgaagcaggagctgaacaccgccatgagccaggtggtggacaccgtggtgaaggtgttcagcgccaagcccagcagacaggtgccccaggtgttcccccccctgcagatcccccaggccagattcgccgtgaacggcgagaaccacaacttccacaccgccaaccagagactgcagtgcttcggcgacgtgatcatccccaaccccctggacaccttcggcaacgtgcagatggccagcagcaccgaccagaccgaggccctgcccctggtggtgagaaagaacagcagcgaccagagcgccagcggccccgccgccggcggccaccaccagcccctgcaccagagccccctgagcgccaccaccggcttcaccaccagcaccttcagacaccccttccccctgcccctgatggcctaccccttccagagccccctgggcgcccccagcggcagcttcagcggcaaggacagagccagccccgagagcctggacctgaccagagacaccaccagcctgagaaccaagatgagcagccaccacctgagccaccacccctgcagccccgcccacccccccagcaccgccgagggcctgagcctgagcctgatcaagagcgagtgcggcgacctgcaggacatgagcgagatcagcccctacagcggcagcgccatgcaggagggcctgagccccaaccacctgaagaaggccaagctgatgttcttctacaccagataccccagcagcaacatgctgaagacctacttcagcgacgtgaagttcaacagatgcatcaccagccagctgatcaagtggttcagcaacttcagagagttctactacatccagatggagaagtacgccagacaggccatcaacgacggcgtgaccagcaccgaggagctgagcatcaccagagactgcgagctgtacagagccctgaacatgcactacaacaaggccaacgacttcgaggtgcccgagagattcctggaggtggcccagatcaccctgagagagttcttcaacgccatcatcgccggcaaggacgtggaccccagctggaagaaggccatctacaaggtgatctgcaagctggacagcgaggtgcccgagatcttcaagagccccaactgcctgcaggagctgctgcacgagtag

SEQ ID NO: 94786 - DNA, 2031 bp, synthetic construct
  misc_feature 1..2031: note = Description of Artificial Sequence: Synthetic coding sequence
  source 1..2031: mol_type = other DNA
atgcccgaccacgacagcaccgccctgctgagcagacagaccaagagaagaagagtggacatcggcgtgaagagaaccgtgggcaccgccagcgccttcttcgccaaggccagagccaccttcttcagcgccatgaacccccagggcagcgagcaggacgtggagtacagcgtggtgcagcacgccgacggcgagaagagcaacgtgctgagaaagctgctgaagagagccaacagctacgaggacgccatgatgcccttccccggcgccaccatcatcagccagctgctgaagaacaacatgaacaagaacggcggcaccgagcccagcttccaggccagcggcctgagcagcaccggcagcgaggtgcaccaggaggacatctgcagcaacagcagcagagacagcccccccgagtgcctgagccccttcggcagacccaccatgagccagttcgacatggacagactgtgcgacgagcacctgagagccaagagagccagagtggagaacatcatcagaggcatgagccacagccccagcgtggccctgagaggcaacgagaacgagagagagatggccccccagagcgtgagccccagagagagctacagagagaacaagagaaagcagaagctgccccagcagcagcagcagagcttccagcagctggtgagcgccagaaaggagcagaagagagaggagagaagacagctgaagcagcagctggaggacatgcagaagcagctgagacagctgcaggagaagttctaccagatctacgacagcaccgacagcgagaacgacgaggacggcaacctgagcgaggacagcatgagaagcgagatcctggacgccagagcccaggacagcgtgggcagaagcgacaacgagatgtgcgagctggaccccggccagttcatcgacagagccagagccctgatcagagagcaggagatggccgagaacaagcccaagagagagggcaacaacaaggagagagaccacggccccaacagcctgcagcccgagggcaagcacctggccgagaccctgaagcaggagctgaacaccgccatgagccaggtggtggacaccgtggtgaaggtgttcagcgccaagcccagcagacaggtgccccaggtgttcccccccctgcagatcccccaggccagattcgccgtgaacggcgagaaccacaacttccacaccgccaaccagagactgcagtgcttcggcgacgtgatcatccccaaccccctggacaccttcggcaacgtgcagatggccagcagcaccgaccagaccgaggccctgcccctggtggtgagaaagaacagcagcgaccagagcgccagcggccccgccgccggcggccaccaccagcccctgcaccagagccccctgagcgccaccaccggcttcaccaccagcaccttcagacaccccttccccctgcccctgatggcctaccccttccagagccccctgggcgcccccagcggcagcttcagcggcaaggacagagccagccccgagagcctggacctgaccagagacaccaccagcctgagaaccaagatgagcagccaccacctgagccaccacccctgcagccccgcccacccccccagcaccgccgagggcctgagcctgagcctgatcaagagcgagtgcggcgacctgcaggacatgagcgagatcagcccctacagcggcagcgccatgcaggagggcctgagccccaaccacctgaagaaggccaagctgatgttcttctacaccagataccccagcagcaacatgctgaagacctacttcagcgacgtgaagttcaacagatgcatcaccagccagctgatcaagtggttcagcaacttcagagagttctactacatccagatggagaagtacgccagacaggccatcaacgacggcgtgaccagcaccgaggagctgagcatcaccagagactgcgagctgtacagagccctgaacatgcactacaacaaggccaacgacttcgagtag

SEQ ID NO: 94787 - DNA, 2214 bp, synthetic construct; identical to SEQ ID NO: 94785
  misc_feature 1..2214: note = Description of Artificial Sequence: Synthetic coding sequence
  source 1..2214: mol_type = other DNA

SEQ ID NO: 94788 - DNA, 693 bp, synthetic construct
  misc_feature 1..693: note = Description of Artificial Sequence: Synthetic coding sequence
  source 1..693: mol_type = other DNA
atgcccgaccacgacagcaccgccctgctgagcagacagaccaagagaagaagagtggacatcggcgtgaagagaaccgtgggcaccgccagcgccttcttcgccaaggccagagccaccttcttcagcgccatgaacccccagggcagcgagcaggacgtggagtacagcgtggtgcagcacgccgacggcgagaagagcaacgtgctgagaaagctgctgaagagagccaacagctacgaggacgccatgatgcccttccccggcgccaccatcatcagccagctgctgaagaacaacatgaacaagaacggcggcaccgagcccagcttccaggccagcggcctgagcagcaccggcagcgaggtgcaccaggaggacatctgcagcaacagcagcagagacagcccccccgagtgcctgagccccttcggcagacccaccatgagccagttcgacatggacagactgtgcgacgagcacctgagagccaagagagccagagtggagaacatcatcagaggcatgagccacagccccagcgtggccctgagaggcaacgagaacgagagagagatggccccccagagcgtgagccccagagagagctacagagagaacaagagaaagcagaagctgccccagcagcagcagcagagcttccagcagctggtgagcgccagaaaggagtag

SEQ ID NO: 94789 - DNA, 2214 bp, synthetic construct; identical to SEQ ID NO: 94785
  misc_feature 1..2214: note = Description of Artificial Sequence: Synthetic coding sequence
  source 1..2214: mol_type = other DNA

SEQ ID NO: 94790 - DNA, 930 bp, synthetic construct
  misc_feature 1..930: note = Description of Artificial Sequence: Synthetic coding sequence
  source 1..930: mol_type = other DNA
atggccagcagcaccgaccagaccgaggccctgcccctggtggtgagaaagaacagcagcgaccagagcgccagcggccccgccgccggcggccaccaccagcccctgcaccagagccccctgagcgccaccaccggcttcaccaccagcaccttcagacaccccttccccctgcccctgatggcctaccccttccagagccccctgggcgcccccagcggcagcttcagcggcaaggacagagccagccccgagagcctggacctgaccagagacaccaccagcctgagaaccaagatgagcagccaccacctgagccaccacccctgcagccccgcccacccccccagcaccgccgagggcctgagcctgagcctgatcaagagcgagtgcggcgacctgcaggacatgagcgagatcagcccctacagcggcagcgccatgcaggagggcctgagccccaaccacctgaagaaggccaagctgatgttcttctacaccagataccccagcagcaacatgctgaagacctacttcagcgacgtgaagttcaacagatgcatcaccagccagctgatcaagtggttcagcaacttcagagagttctactacatccagatggagaagtacgccagacaggccatcaacgacggcgtgaccagcaccgaggagctgagcatcaccagagactgcgagctgtacagagccctgaacatgcactacaacaaggccaacgacttcgaggtgcccgagagattcctggaggtggcccagatcaccctgagagagttcttcaacgccatcatcgccggcaaggacgtggaccccagctggaagaaggccatctacaaggtgatctgcaagctggacagcgaggtgcccgagatcttcaagagccccaactgcctgcaggagctgctgcacgagtag

SEQ ID NO: 94791 - DNA, 1080 bp, synthetic construct
  misc_feature 1..1080: note = Description of Artificial Sequence: Synthetic coding sequence
  source 1..1080: mol_type = other DNA
atgaagagccccttctacagatgccagaacaccaccagcgtggagaagggcaacagcgccgtgatgggcggcgtgctgttcagcaccggcctgctgggcaacctgctggccctgggcctgctggccagaagcggcctgggctggtgcagcagaagacccctgagacccctgcccagcgtgttctacatgctggtgtgcggcctgaccgtgaccgacctgctgggcaagtgcctgctgagccccgtggtgctggccgcctacgcccagaacagaagcctgagagtgctggcccccgccctggacaacagcctgtgccaggccttcgccttcttcatgagcttcttcggcctgagcagcaccctgcagctgctggccatggccctggagtgctggctgagcctgggccaccccttcttctacagaagacacatcaccctgagactgggcgccctggtggcccccgtggtgagcgccttcagcctggccttctgcgccctgcccttcatgggcttcggcaagttcgtgcagtactgccccggcacctggtgcttcatccagatggtgcacgaggagggcagcctgagcgtgctgggctacagcgtgctgtacagcagcctgatggccctgctggtgctggccaccgtgctgtgcaacctgggcgccatgagaaacctgtacgccatgcacagaagactgcagagacaccccagaagctgcaccagagactgcgccgagcccagagccgacggcagagaggccagcccccagcccctggaggagctggaccacctgctgctgctggccctgatgaccgtgctgttcaccatgtgcagcctgcccgtgatctacagagcctactacggcgccttcaaggacgtgaaggagaagaacagaaccagcgaggaggccgaggacctgagagccctgagattcctgagcgtgatcagcatcgtggacccctggatcttcatcatcttcagaagccccgtgttcagaatcttcttccacaagatcttcatcagacccctgagatacagaagcagatgcagcaacagcaccaacatggagagcagcctgtag

SEQ ID NO: 94792 - DNA, 8034 bp, synthetic construct
  misc_feature 1..8034: note = Description of Artificial Sequence: Synthetic coding sequence
  source 1..8034: mol_type = other DNA
atgagcacctgctgctggtgcacccccggcggcgccagcaccatcgacttcctgaagagatacgccagcaacacccccagcggcgagttccagaccgccgacgaggacctgtgctactgcctggagtgcgtggccgagtaccacaaggccagagacgagctgcccttcctgcacgaggtgctgtgggagctggagaccctgagactgatcaaccacttcgagaagagcatgaaggccgagatcggcgacgacgacgagctgtacatcgtggacaacaacggcgagatgcccctgttcgacatcaccggccaggacttcgagaacaagctgagagtgcccctgctggagatcctgaagtacccctacctgctgctgcacgagagagtgaacgagctgtgcgtggaggccctgtgcagaatggagcaggccaactgcagcttccaggtgttcgacaagcaccccggcatctacctgttcctggtgcaccccaacgagatggtgagaagatgggccatcctgaccgccagaaacctgggcaaggtggacagagacgactactacgacctgcaggaggtgctgctgtgcctgttcaaggtgatcgagctgggcctgctggagagccccgacatctacaccagcagcgtgctggagaagggcaagctgatcctgctgcccagccacatgtacgacaccaccaactacaagagctactggctgggcatctgcatgctgctgaccatcctggaggagcaggccatggacagcctgctgctgggcagcgacaagcagaacgacttcatgcagagcatcctgcacaccatggagagagaggccgacgacgacagcgtggaccccttctggcccgccctgcactgcttcatggtgatcctggacagactgggcagcaaggtgtggggccagctgatggaccccatcgtggccttccagaccatcatcaacaacgccagctacaacagagagatcagacacatcagaaacagcagcgtgagaaccaagctggagcccgagagctacctggacgacatggtgacctgcagccagatcgtgtacaactacaaccccgagaagaccaagaaggacagcggctggagaaccgccatctgccccgactactgccccaacatgtacgaggagatggagaccctggccagcgtgctgcagagcgacatcggccaggacatgagagtgcacaacagcaccttcctgtggttcatccccttcgtgcagagcctgatggacctgaaggacctgggcgtggcctacatcgcccaggtggtgaaccacctgtacagcgaggtgaaggaggtgctgaaccagaccgacgccgtgtgcgacaaggtgaccgagttcttcctgctgatcctggtgagcgtgatcgagctgcacagaaacaagaagtgcctgcacctgctgtgggtgagcagccagcagtgggtggaggccgtggtgaagtgcgccaagctgcccaccaccgccttcaccagaagcagcgagaagagcagcggcaactgcagcaagggcaccgccatgatcagcagcctgagcctgcacagcatgcccagcaacagcgtgcagctggcctacgtgcagctgatcagaagcctgctgaaggagggctaccagctgggccagcagagcctgtgcaagagattctgggacaagctgaacctgttcctgagaggcaacctgagcctgggctggcagctgaccagccaggagacccacgagctgcagagctgcctgaagcagatcatcagaaacatcaagttcaaggcccccccctgcaacaccttcgtggacctgaccagcgcctgcaagatcagccccgccagctacaacaaggaggagagcgagcagatgggcaagaccagcagaaaggacatgcactgcctggaggccagcagccccaccttcagcaaggagcccatgaaggtgcaggacagcgtgctgatcaaggccgacaacaccatcgagggcgacaacaacgagcagaactacatcaaggacgtgaagctggaggaccacctgctggccggcagctgcctgaagcagagcagcaagaacatcttcaccgagagagccgaggaccagatcaagatcagcaccagaaagcagaagagcgtgaaggagatcagcagctacacccccaaggactgcaccagcagaaacggccccgagagaggctgcgacagaggcatcatcgtgagcaccagactgctgaccgacagcagcaccgacgccctggagaaggtgagcaccagcaacgaggacttcagcctgaaggacgacgccctggccaagaccagcaagagaaagaccaaggtgcagaaggacgagatctgcgccaagctgagccacgtgatcaagaagcagcacagaaagagcaccctggtggacaacaccatcaacctggacgagaacctgaccgtgagcaacatcgagagcttctacagcagaaaggacaccggcgtgcagaagggcgacggcttcatccacaacctgagcctggaccccagcggcgtgctggacgacaagaacggcgagcagaagagccagaacaacgtgctgcccaaggagaagcagctgaagaacgaggagctggtgatcttcagcttccacgagaacaactgcaagatccaggagttccacgtggacggcaaggagctgatccccttcaccgagatgaccaacgccagcgagaagaagagcagccccttcaaggacctgatgaccgtgcccgagagcagagacgaggagatgagcaacagcaccagcgtgatctacagcaacctgaccagagagcaggcccccgacatcagccccaagagcgacaccctgaccgacagccagatcgacagagacctgcacaagctgagcctgctggcccaggccagcgtgatcaccttccccagcgacagcccccagaacagcagccagctgcagagaaaggtgaaggaggacaagagatgcttcaccgccaaccagaacaacgtgggcgacaccagcagaggccaggtgatcatcatcagcgacagcgacgacgacgacgacgagagaatcctgagcctggagaagctgaccaagcaggacaagatctgcctggagagagagcaccccgagcagcacgtgagcaccgtgaacagcaaggaggagaagaaccccgtgaaggaggagaagaccgagaccctgttccagttcgaggagagcgacagccagtgcttcgagttcgagagcagcagcgaggtgttcagcgtgtggcaggaccaccccgacgacaacaacagcgtgcaggacggcgagaagaagtgcctggcccccatcgccaacaccaccaacggccagggctgcaccgactacgtgagcgaggtggtgaagaagggcgccgagggcatcgaggagcacaccagacccagaagcatcagcgtggaggagttctgcgagatcgaggtgaagaagcccaagagaaagagaagcgagaagcccatggccgaggaccccgtgagacccagcagcagcgtgagaaacgagggccagagcgacaccaacaagagagacctggtgggcaacgacttcaagagcatcgacagaagaaccagcacccccaacagcagaatccagagagccaccaccgtgagccagaagaagagcagcaagctgtgcacctgcaccgagcccatcagaaaggtgcccgtgagcaagacccccaagaagacccacagcgacgccaagaagggccagaacagaagcagcaactacctgagctgcagaaccacccccgccatcgtgccccccaagaagttcagacagtgccccgagcccaccagcaccgccgagaagctgggcctgaagaagggccccagaaaggcctacgagctgagccagagaagcctggactacgtggcccagctgagagaccacggcaagaccgtgggcgtggtggacaccagaaagaagaccaagctgatcagcccccagaacctgagcgtgagaaacaacaagaagctgctgaccagccaggagctgcagatgcagagacagatcagacccaagagccagaagaacagaagaagactgagcgactgcgagagcaccgacgtgaagagagccggcagccacaccgcccagaacagcgacatcttcgtgcccgagagcgacagaagcgactacaactgcaccggcggcaccgaggtgctggccaacagcaacagaaagcagctgatcaagtgcatgcccagcgagcccgagaccatcaaggccaagcacggcagccccgccaccgacgacgcctgccccctgaaccagtgcgacagcgtggtgctgaacggcaccgtgcccaccaacgaggtgatcgtgagcaccagcgaggaccccctgggcggcggcgaccccaccgccagacacatcgagatggccgccctgaaggagggcgagcccgacagcagcagcgacgccgaggaggacaacctgttcctgacccagaacgaccccgaggacatggacctgtgcagccagatggagaacgacaactacaagctgatcgagctgatccacggcaaggacaccgtggaggtggaggaggacagcgtgagcagaccccagctggagagcctgagcggcaccaagtgcaagtacaaggactgcctggagaccaccaagaaccagggcgagtactgccccaagcacagcgaggtgaaggccgccgacgaggacgtgttcagaaagcccggcctgcccccccccgccagcaagcccctgagacccaccaccaagatcttcagcagcaagagcaccagcagaatcgccggcctgagcaagagcctggagaccagcagcgccctgagccccagcctgaagaacaagagcaagggcatccagagcatcctgaaggtgccccagcccgtgcccctgatcgcccagaagcccgtgggcgagatgaagaacagctgcaacgtgctgcacccccagagccccaacaacagcaacagacagggctgcaaggtgcccttcggcgagagcaagtacttccccagcagcagccccgtgaacatcctgctgagcagccagagcgtgagcgacaccttcgtgaaggaggtgctgaagtggaagtacgagatgttcctgaacttcggccagtgcggcccccccgccagcctgtgccagagcatcagcagacccgtgcccgtgagattccacaactacggcgactacttcaacgtgttcttccccctgatggtgctgaacaccttcgagaccgtggcccaggagtggctgaacagccccaacagagagaacttctaccagctgcaggtgagaaagttccccgccgactacatcaagtactgggagttcgccgtgtacctggaggagtgcgagctggccaagcagctgtaccccaaggagaacgacctggtgttcctggcccccgagagaatcaacgaggagaagaaggacaccgagagaaacgacatccaggacctgcacgagtaccacagcggctacgtgcacaagttcagaagaaccagcgtgatgagaaacggcaagaccgagtgctacctgagcatccagacccaggagaacttccccgccaacctgaacgagctggtgaactgcatcgtgatcagcagcctggtgaccacccagagaaagctgaaggccatgagcctgctgggcagcagaaaccagctggccagagccgtgctgaaccccaaccccatggacttctgcaccaaggacctgctgaccaccaccagcgagagaatcatcgcctacctgagagacttcaacgaggaccagaagaaggccatcgagaccgcctacgccatggtgaagcacagccccagcgtggccaagatctgcctgatccacggcccccccggcaccggcaagagcaagaccatcgtgggcctgctgtacagactgctgaccgagaaccagagaaagggccacagcgacgagaacagcaacgccaagatcaagcagaacagagtgctggtgtgcgcccccagcaacgccgccgtggacgagctgatgaagaagatcatcctggagttcaaggagaagtgcaaggacaagaagaaccccctgggcaactgcggcgacatcaacctggtgagactgggccccgagaagagcatcaacagcgaggtgctgaagttcagcctggacagccaggtgaaccacagaatgaagaaggagctgcccagccacgtgcaggccatgcacaagagaaaggagttcctggactaccagctggacgagctgagcagacagagagccctgtgcagaggcggcagagagatccagagacaggagctggacgagaacatcagcaaggtgagcaaggagagacaggagctggccagcaagatcaaggaggtgcagggcagaccccagaagacccagagcatcatcatcctggagagccacatcatctgctgcaccctgagcaccagcggcggcctgctgctggagagcgccttcagaggccagggcggcgtgcccttcagctgcgtgatcgtggacgaggccggccagagctgcgagatcgagaccctgacccccctgatccacagatgcaacaagctgatcctggtgggcgaccccaagcagctgccccccaccgtgatcagcatgaaggcccaggagtacggctacgaccagagcatgatggccagattctgcagactgctggaggagaacgtggagcacaacatgatcagcagactgcccatcctgcagctgaccgtgcagtacagaatgcaccccgacatctgcctgttccccagcaactacgtgtacaacagaaacctgaagaccaacagacagaccgaggccatcagatgcagcagcgactggcccttccagccctacctggtgttcgacgtgggcgacggcagcgagagaagagacaacgacagctacatcaacgtgcaggagatcaagctggtgatggagatcatcaagctgatcaaggacaagagaaaggacgtgagcttcagaaacatcggcatcatcacccactacaaggcccagaagaccatgatccagaaggacctggacaaggagttcgacagaaagggccccgccgaggtggacaccgtggacgccttccagggcagacagaaggactgcgtgatcgtgacctgcgtgagagccaacagcatccagggcagcatcggcttcctggccagcctgcagagactgaacgtgaccatcaccagagccaagtacagcctgttcatcctgggccacctgagaaccctgatggagaaccagcactggaaccagctgatccaggacgcccagaagagaggcgccatcatcaagacctgcgacaagaactacagacacgacgccgtgaagatcctgaagctgaagcccgtgctgcagagaagcctgacccacccccccaccatcgcccccgagggcagcagaccccagggcggcctgcccagcagcaagctggacagcggcttcgccaagaccagcgtggccgccagcctgtaccacacccccagcgacagcaaggagatcaccctgaccgtgaccagcaaggaccccgagagaccccccgtgcacgaccagctgcaggaccccagactgctgaagagaatgggcatcgaggtgaagggcggcatcttcctgtgggacccccagcccagcagcccccagcaccccggcgccaccccccccaccggcgagcccggcttccccgtggtgcaccaggacctgagccacatccagcagcccgccgccgtggtggccgccctgagcagccacaagccccccgtgagaggcgagccccccgccgccagccccgaggccagcacctgccagagcaagtgcgacgaccccgaggaggagctgtgccacagaagagaggccagagccttcagcgagggcgagcaggagaagtgcggcagcgagacccaccacaccagaagaaacagcagatgggacaagagaaccctggagcaggaggacagcagcagcaagaagagaaagctgctgtag

SEQ ID NO: 94793 - DNA, 483 bp, synthetic construct
  misc_feature 1..483: note = Description of Artificial Sequence: Synthetic coding sequence
  source 1..483: mol_type = other DNA
atggccacccaccacaccctgtggatgggcctggccctgctgggcgtgctgggcgacctgcaggccgcccccgaggcccaggtgagcgtgcagcccaacttccagcaggacaagttcctgggcagatggttcagcgccggcctggccagcaacagcagctggctgagagagaagaaggccgccctgagcatgtgcaagagcgtggtggcccccgccaccgacggcggcctgaacctgaccagcaccttcctgagaaagaaccagtgcgagaccagaaccatgctgctgcagcccgccggcagcctgggcagctacagctacagaagccccagagagtggggcctgcacagaccccccggccccagcctgggcgccaccctggccggcaccaccctgggccagccccccgccgccgagatccacggcgtgggcggcgacggctgccccaccagcgtgagaggcaagggccaggcctgggcctag

SEQ ID NO: 94794 - DNA, 573 bp, synthetic construct
  misc_feature 1..573: note = Description of Artificial Sequence: Synthetic coding sequence
  source 1..573: mol_type = other DNA
atggccacccaccacaccctgtggatgggcctggccctgctgggcgtgctgggcgacctgcaggccgcccccgaggcccaggtgagcgtgcagcccaacttccagcaggacaagttcctgggcagatggttcagcgccggcctggccagcaacagcagctggctgagagagaagaaggccgccctgagcatgtgcaagagcgtggtggcccccgccaccgacggcggcctgaacctgaccagcaccttcctgagaaagaaccagtgcgagaccagaaccatgctgctgcagcccgccggcagcctgggcagctacagctacagaagcccccactggggcagcacctacagcgtgagcgtggtggagaccgactacgaccagtacgccctgctgtacagccagggcagcaagggccccggcgaggacttcagaatggccaccctgtacagcagaacccagacccccagagccgagctgaaggagaagttcaccgccttctgcaaggcccagggcttcaccgaggacaccatcgtgttcctgccccagaccgacaagtgcatgaccgagcagtag

SEQ ID NO: 94795 - DNA, 189 bp, synthetic construct
  misc_feature 1..189: note = Description of Artificial Sequence: Synthetic coding sequence
  source 1..189: mol_type = other DNA
tgaggctaccactgcctgcccgcccccaacagagcccagggcgaggtgggcggcgacggcggcagcgtgcagttcggcggcagcgtgaagaccagcagcgccctgagagaggagcaggaggcccagtgggagaactggcccaagagcggcgtgctgaccaccgcccccggcttcttcctgggcagatag

SEQ ID NO: 94796 - DNA, 642 bp, synthetic construct
  misc_feature 1..642: note = Description of Artificial Sequence: Synthetic coding sequence
  source 1..642: mol_type = other DNA
tgactgagaggcggcggccagttcctgggcagaggcgtgagaggcgtggccgccagaggcatcggcagaggcggcggcgccggcctggagaccggcggcgtggacggcagaggcgcccccgccggcagaagaagatgggtgagaagagtgctggccgacgccggcggcggcagaagcccccagttcctgggcagatggttcagcgccggcctggccagcaacagcagctggctgagagagaagaaggccgccctgagcatgtgcaagagcgtggtggcccccgccaccgacggcggcctgaacctgaccagcaccttcctgagaaagaaccagtgcgagaccagaaccatgctgctgcagcccgccggcagcctgggcagctacagctacagaagcccccactggggcagcacctacagcgtgagcgtggtggagaccgactacgaccagtacgccctgctgtacagccagggcagcaagggccccggcgaggacttcagaatggccaccctgtacagcagaacccagacccccagagccgagctgaaggagaagttcaccgccttctgcaaggcccagggcttcaccgaggacaccatcgtgttcctgccccagaccgacaagtgcatgaccgagcagtag

SEQ ID NO: 94797 - DNA, 588 bp, synthetic construct
  misc_feature 1..588: note = Description of Artificial Sequence: Synthetic coding sequence
  source 1..588: mol_type = other DNA
atggccacccaccacaccctgtggatgggcctggccctgctgggcgtgctgggcgacctgcaggccgcccccgaggcccaggtgagcgtgcagcccaacttccagcaggacaagttcctgggcagatggttcagcgccggcctggccagcaacagcagctggctgagagagaagaaggccgccctgagcatgtgcaagagcgtggtggcccccgccaccgacggcggcctgaacctgaccagcaccttcctgagaaagaaccagtgcgagaccagaaccatgctgctgcagcccgccggcagcctgggcagctacagctacagaagccccagagagtggggcctgcacagaccccccggccccagcctgggcgccaccctggccggcaccaccctgggccagccccccgccgccgagatccacggcgtgggcgactggggcagcacctacagcgtgagcgtggtggagaccgactacgaccagtacgccctgctgtacagccagggcagcaagggccccggcgaggacttcagaatggccaccctgtacagcagaacccagacccccagagccgagctgaaggagtag

SEQ ID NO: 94798 - DNA, 573 bp, synthetic construct; identical to SEQ ID NO: 94794
  misc_feature 1..573: note = Description of Artificial Sequence: Synthetic coding sequence
  source 1..573: mol_type = other DNA

SEQ ID NO: 94799 - DNA, 1209 bp, synthetic construct
  misc_feature 1..1209: note = Description of Artificial Sequence: Synthetic coding sequence
  source 1..1209: mol_type = other DNA
atgagcccctgcggccccctgaacctgagcctggccggcgaggccaccacctgcgccgccccctgggtgcccaacaccagcgccgtgccccccagcggcgccagccccgccctgcccatcttcagcatgaccctgggcgccgtgagcaacctgctggccctggccctgctggcccaggccgccggcagactgagaagaagaagaagcgccgccaccttcctgctgttcgtggccagcctgctggccaccgacctggccggccacgtgatccccggcgccctggtgctgagactgtacaccgccggcagagcccccgccggcggcgcctgccacttcctgggcggctgcatggtgttcttcggcctgtgccccctgctgctgggctgcggcatggccgtggagagatgcgtgggcgtgaccagacccctgctgcacgccgccagagtgagcgtggccagagccagactggccctggccgccgtggccgccgtggccctggccgtggccctgctgcccctggccagagtgggcagatacgagctgcagtaccccggcacctggtgcttcatcggcctgggcccccccggcggctggagacaggccctgctggccggcctgttcgccagcctgggcctggtggccctgctggccgccctggtgtgcaacaccctgagcggcctggccctgctgagagccagatggagaagaagaagcagaagacccccccccgccagcggccccgacagcagaagaagatggggcgcccacggccccagaagcgccagcgccagcagcgccagcagcatcgccagcgccagcaccttcttcggcggcagcagaagcagcggcagcgccagaagagccagagcccacgacgtggagatggtgggccagctggtgggcatcatggtggtgagctgcatctgctggagccccatgctggtgctggtggccctggccgtgggcggctggagcagcaccagcctgcagagacccctgttcctggccgtgagactggccagctggaaccagatcctggacccctgggtgtacatcctgctgagacaggccgtgctgagacagctgctgagactgctgccccccagagccggcgccaagggcggccccgccggcctgggcctgacccccagcgcctgggaggccagcagcctgagaagcagcagacacagcggcctgagccacttctag

SEQ ID NO: 94800 - DNA, 1077 bp, synthetic construct
  misc_feature 1..1077: note = Description of Artificial Sequence: Synthetic coding sequence
  source 1..1077: mol_type = other DNA
atgggcaacgccagcaacgacagccagagcgaggactgcgagaccagacagtggctgccccccggcgagagccccgccatcagcagcgtgatgttcagcgccggcgtgctgggcaacctgatcgccctggccctgctggccagaagatggagaggcgacgtgggctgcagcgccggcagaagaagcagcctgagcctgttccacgtgctggtgaccgagctggtgttcaccgacctgctgggcacctgcctgatcagccccgtggtgctggccagctacgccagaaaccagaccctggtggccctggcccccgagagcagagcctgcacctacttcgccttcgccatgaccttcttcagcctggccaccatgctgatgctgttcgccatggccctggagagatacctgagcatcggccacccctacttctaccagagaagagtgagcagaagcggcggcctggccgtgctgcccgtgatctacgccgtgagcctgctgttctgcagcctgcccctgctggactacggccagtacgtgcagtactgccccggcacctggtgcttcatcagacacggcagaaccgcctacctgcagctgtacgccaccctgctgctgctgctgatcgtgagcgtgctggcctgcaacttcagcgtgatcctgaacctgatcagaatgcacagaagaagcagaagaagcagatgcggccccagcctgggcagcggcagaggcggccccggcgccagaagaagaggcgagagagtgagcatggccgaggagaccgaccacctgatcctgctggccatcatgaccatcaccttcgccgtgtgcagcctgcccttcaccatcttcgcctacatgaacgagaccagcagcagaaaggagaagtgggacctgcaggccctgagattcctgagcatcaacagcatcatcgacccctgggtgttcgccatcctgagaccccccgtgctgagactgatgagaagcgtgctgtgctgcagaatcagcctgagaacccaggacgccacccagaccagctgcagcacccagagcgacgccagcaagcaggccgacctgtag

SEQ ID NO: 94801 - DNA, 1173 bp, synthetic construct
  misc_feature 1..1173: note = Description of Artificial Sequence: Synthetic coding sequence
  source 1..1173: mol_type = other DNA
atgaaggagaccagaggctacggcggcgacgcccccttctgcaccagactgaaccacagctacaccggcatgtgggcccccgagagaagcgccgaggccagaggcaacctgaccagaccccccggcagcggcgaggactgcggcagcgtgagcgtggccttccccatcaccatgctgctgaccggcttcgtgggcaacgccctggccatgctgctggtgagcagaagctacagaagaagagagagcaagagaaagaagagcttcctgctgtgcatcggctggctggccctgaccgacctggtgggccagctgctgaccacccccgtggtgatcgtggtgtacctgagcaagcagagatgggagcacatcgaccccagcggcagactgtgcaccttcttcggcctgaccatgaccgtgttcggcctgagcagcctgttcatcgccagcgccatggccgtggagagagccctggccatcagagccccccactggtacgccagccacatgaagaccagagccaccagagccgtgctgctgggcgtgtggctggccgtgctggccttcgccctgctgcccgtgctgggcgtgggccagtacaccgtgcagtggcccggcacctggtgcttcatcagcaccggcagaggcggcaacggcaccagcagcagccacaactggggcaacctgttcttcgccagcgccttcgccttcctgggcctgctggccctgaccgtgaccttcagctgcaacctggccaccatcaaggccctggtgagcagatgcagagccaaggccaccgccagccagagcagcgcccagtggggcagaatcaccaccgagaccgccatccagctgatgggcatcatgtgcgtgctgagcgtgtgctggagccccctgctgatcatgatgctgaagatgatcttcaaccagaccagcgtggagcactgcaagacccacaccgagaagcagaaggagtgcaacttcttcctgatcgccgtgagactggccagcctgaaccagatcctggacccctgggtgtacctgctgctgagaaagatcctgctgagaaagttctgccagatcagataccacaccaacaactacgccagcagcagcaccagcctgccctgccagtgcagcagcaccctgatgtggagcgaccacctggagagatag

SEQ ID NO: 94802 - DNA, 1260 bp, synthetic construct
  misc_feature 1..1260: note = Description of Artificial Sequence: Synthetic coding sequence
  source 1..1260: mol_type = other DNA
atgaaggagaccagaggctacggcggcgacgcccccttctgcaccagactgaaccacagctacaccggcatgtgggcccccgagagaagcgccgaggccagaggcaacctgaccagaccccccggcagcggcgaggactgcggcagcgtgagcgtggccttccccatcaccatgctgctgaccggcttcgtgggcaacgccctggccatgctgctggtgagcagaagctacagaagaagagagagcaagagaaagaagagcttcctgctgtgcatcggctggctggccctgaccgacctggtgggccagctgctgaccacccccgtggtgatcgtggtgtacctgagcaagcagagatgggagcacatcgaccccagcggcagactgtgcaccttcttcggcctgaccatgaccgtgttcggcctgagcagcctgttcatcgccagcgccatggccgtggagagagccctggccatcagagccccccactggtacgccagccacatgaagaccagagccaccagagccgtgctgctgggcgtgtggctggccgtgctggccttcgccctgctgcccgtgctgggcgtgggccagtacaccgtgcagtggcccggcacctggtgcttcatcagcaccggcagaggcggcaacggcaccagcagcagccacaactggggcaacctgttcttcgccagcgccttcgccttcctgggcctgctggccctgaccgtgaccttcagctgcaacctggccaccatcaaggccctggtgagcagatgcagagccaaggccaccgccagccagagcagcgcccagtggggcagaatcaccaccgagaccgccatccagctgatgggcatcatgtgcgtgctgagcgtgtgctggagccccctgctgatcatgatgctgaagatgatcttcaaccagaccagcgtggagcactgcaagacccacaccgagaagcagaaggagtgcaacttcttcctgatcgccgtgagactggccagcctgaaccagatcctggacccctgggtgtacctgctgctgagaaagatcctgctgagaaagttctgccaggtggccaacgccgtgagcagctgcagcaacgacggccagaagggccagcccatcagcctgagcaacgagatcatccagaccgaggccatcagataccacaccaacaactacgccagcagcagcaccagcctgccctgccagtgcagcagcaccctgatgtggagcgaccacctggagagatag

SEQ ID NO: 94803 - DNA, 1290 bp, synthetic construct
  misc_feature 1..1290: note = Description of Artificial Sequence: Synthetic coding sequence
  source 1..1290: mol_type = other DNA
atgaaggagaccagaggctacggcggcgacgcccccttctgcaccagactgaaccacagctacaccggcatgtgggcccccgagagaagcgccgaggccagaggcaacctgaccagaccccccggcagcggcgaggactgcggcagcgtgagcgtggccttccccatcaccatgctgctgaccggcttcgtgggcaacgccctggccatgctgctggtgagcagaagctacagaagaagagagagcaagagaaagaagagcttcctgctgtgcatcggctggctggccctgaccgacctggtgggccagctgctgaccacccccgtggtgatcgtggtgtacctgagcaagcagagatgggagcacatcgaccccagcggcagactgtgcaccttcttcggcctgaccatgaccgtgttcggcctgagcagcctgttcatcgccagcgccatggccgtggagagagccctggccatcagagccccccactggtacgccagccacatgaagaccagagccaccagagccgtgctgctgggcgtgtggctggccgtgctggccttcgccctgctgcccgtgctgggcgtgggccagtacaccgtgcagtggcccggcacctggtgcttcatcagcaccggcagaggcggcaacggcaccagcagcagccacaactggggcaacctgttcttcgccagcgccttcgccttcctgggcctgctggccctgaccgtgaccttcagctgcaacctggccaccatcaaggccctggtgagcagatgcagagccaaggccaccgccagccagagcagcgcccagtggggcagaatcaccaccgagaccgccatccagctgatgggcatcatgtgcgtgctgagcgtgtgctggagccccctgctgatcatgatgctgaagatgatcttcaaccagaccagcgtggagcactgcaagacccacaccgagaagcagaaggagtgcaacttcttcctgatcgccgtgagactggccagcctgaaccagatcctggacccctgggtgtacctgctgctgagaaagatcctgctgagaaagttctgccagatgagaaagagaagactgagagagcagttctggagacccgccagcagcggcagcggctgccagcagatcagatgcctgatggagagctgcagcctgacccagaccggcgtgcagtggagcgacttcagaagcctgcagcccagccccccccccctgaccgccatcttcgccagctgggtgcaggtgatcctgctgccccagccccccaagtag

SEQ ID NO: 94804 - DNA, 1257 bp, synthetic construct
  misc_feature 1..1257: note = Description of Artificial Sequence: Synthetic coding sequence
  source 1..1257: mol_type = other DNA
atgaaggagaccagaggctacggcggcgacgcccccttctgcaccagactgaaccacagctacaccggcatgtgggcccccgagagaagcgccgaggccagaggcaacctgaccagaccccccggcagcggcgaggactgcggcagcgtgagcgtggccttccccatcaccatgctgctgaccggcttcgtgggcaacgccctggccatgctgctggtgagcagaagctacagaagaagagagagcaagagaaagaagagcttcctgctgtgcatcggctggctggccctgaccgacctggtgggccagctgctgaccacccccgtggtgatcgtggtgtacctgagcaagcagagatgggagcacatcgaccccagcggcagactgtgcaccttcttcggcctgaccatgaccgtgttcggcctgagcagcctgttcatcgccagcgccatggccgtggagagagccctggccatcagagccccccactggtacgccagccacatgaagaccagagccaccagagccgtgctgctgggcgtgtggctggccgtgctggccttcgccctgctgcccgtgctgggcgtgggccagtacaccgtgcagtggcccggcacctggtgcttcatcagcaccggcagaggcggcaacggcaccagcagcagccacaactggggcaacctgttcttcgccagcgccttcgccttcctgggcctgctggccctgaccgtgaccttcagctgcaacctggccaccatcaaggccctggtgagcagatgcagagccaaggccaccgccagccagagcagcgcccagtggggcagaatcaccaccgagaccgccatccagctgatgggcatcatgtgcgtgctgagcgtgtgctggagccccctgctgatcatgatgctgaagatgatcttcaaccagaccagcgtggagcactgcaagacccacaccgagaagcagaaggagtgcaacttcttcctgatcgccgtgagactggccagcctgaaccagatcctggacccctgggtgtacctgctgctgagaaagatcctgctgagaaagttctgccagatgagaaagagaagactgagagagcagctgatctgcagcctgcagaacagccagatccagagagccaccgcccactgcggccaggtgcagacctacagagtgctgaacagagaggagatggaggtgctggtgagcagcatcaacgtgtacaccagaatcagcaccgtgaagaccgagtag

SEQ ID NO: 94805 - DNA, 1209 bp, synthetic construct
  misc_feature 1..1209: note = Description of Artificial Sequence: Synthetic coding sequence
  source 1..1209: mol_type = other DNA
atgaaggagaccagaggctacggcggcgacgcccccttctgcaccagactgaaccacagctacaccggcatgtgggcccccgagagaagcgccgaggccagaggcaacctgaccagaccccccggcagcggcgaggactgcggcagcgtgagcgtggccttccccatcaccatgctgctgaccggcttcgtgggcaacgccctggccatgctgctggtgagcagaagctacagaagaagagagagcaagagaaagaagagcttcctgctgtgcatcggctggctggccctgaccgacctggtgggccagctgctgaccacccccgtggtgatcgtggtgtacctgagcaagcagagatgggagcacatcgaccccagcggcagactgtgcaccttcttcggcctgaccatgaccgtgttcggcctgagcagcctgttcatcgccagcgccatggccgtggagagagccctggccatcagagccccccactggtacgccagccacatgaagaccagagccaccagagccgtgctgctgggcgtgtggctggccgtgctggccttcgccctgctgcccgtgctgggcgtgggccagtacaccgtgcagtggcccggcacctggtgcttcatcagcaccggcagaggcggcaacggcaccagcagcagccacaactggggcaacctgttcttcgccagcgccttcgccttcctgggcctgctggccctgaccgtgaccttcagctgcaacctggccaccatcaaggccctggtgagcagatgcagagccaaggccaccgccagccagagcagcgcccagtggggcagaatcaccaccgagaccgccatccagctgatgggcatcatgtgcgtgctgagcgtgtgctggagccccctgctgatcatgatgctgaagatgatcttcaaccagaccagcgtggagcactgcaagacccacaccgagaagcagaaggagtgcaacttcttcctgatcgccgtgagactggccagcctgaaccagatcctggacccctgggtgtacctgctgctgagaaagatcctgctgagaaagttctgccagatgagaaagagaagactgagagagcaggagatgggccccgacggcagatgcttctgccacgcctggagacaggtgcccagaacctggtgcagcagccacgacagagagccctgcagcgtgcagctgagctag

SEQ ID NO: 94806 - DNA, 1167 bp, synthetic construct
  misc_feature 1..1167: note = Description of Artificial Sequence: Synthetic coding sequence
  source 1..1167: mol_type = other DNA
atgaaggagaccagaggctacggcggcgacgcccccttctgcaccagactgaaccacagctacaccggcatgtgggcccccgagagaagcgccgaggccagaggcaacctgaccagaccccccggcagcggcgaggactgcggcagcgtgagcgtggccttccccatcaccatgctgctgaccggcttcgtgggcaacgccctggccatgctgctggtgagcagaagctacagaagaagagagagcaagagaaagaagagcttcctgctgtgcatcggctggctggccctgaccgacctggtgggccagctgctgaccacccccgtggtgatcgtggtgtacctgagcaagcagagatgggagcacatcgaccccagcggcagactgtgcaccttcttcggcctgaccatgaccgtgttcggcctgagcagcctgttcatcgccagcgccatggccgtggagagagccctggccatcagagccccccactggtacgccagccacatgaagaccagagccaccagagccgtgctgctgggcgtgtggctggccgtgctggccttcgccctgctgcccgtgctgggcgtgggccagtacaccgtgcagtggcccggcacctggtgcttcatcagcaccggcagaggcggcaacggcaccagcagcagccacaactggggcaacctgttcttcgccagcgccttcgccttcctgggcctgctggccctgaccgtgaccttcagctgcaacctggccaccatcaaggccctggtgagcagatgcagagccaaggccaccgccagccagagcagcgcccagtggggcagaatcaccaccgagaccgccatccagctgatgggcatcatgtgcgtgctgagcgtgtgctggagccccctgctgatcatgatgctgaagatgatcttcaaccagaccagcgtggagcactgcaagacccacaccgagaagcagaaggagtgcaacttcttcctgatcgccgtgagactggccagcctgaaccagatcctggacccctgggtgtacctgctgctgagaaagatcctgctgagaaagttctgccaggtggccaacgccgtgagcagctgcagcaacgacggccagaagggccagcccatcagcctgagcaacgagatcatccagaccgaggcctag

SEQ ID NO: 94807 - DNA, 1173 bp, synthetic construct; identical to SEQ ID NO: 94801
  misc_feature 1..1173: note = Description of Artificial Sequence: Synthetic coding sequence
  source 1..1173: mol_type = other DNA

SEQ ID NO: 94808 - DNA, 1098 bp, synthetic construct
  misc_feature 1..1098: note = Description of Artificial Sequence: Synthetic coding sequence
  source 1..1098: mol_type = other DNA
atgaaggagaccagaggctacggcggcgacgcccccttctgcaccagactgaaccacagctacaccggcatgtgggcccccgagagaagcgccgaggccagaggcaacctgaccagaccccccggcagcggcgaggactgcggcagcgtgagcgtggccttccccatcaccatgctgctgaccggcttcgtgggcaacgccctggccatgctgctggtgagcagaagctacagaagaagagagagcaagagaaagaagagcttcctgctgtgcatcggctggctggccctgaccgacctggtgggccagctgctgaccacccccgtggtgatcgtggtgtacctgagcaagcagagatgggagcacatcgaccccagcggcagactgtgcaccttcttcggcctgaccatgaccgtgttcggcctgagcagcctgttcatcgccagcgccatggccgtggagagagccctggccatcagagccccccactggtacgccagccacatgaagaccagagccaccagagccgtgctgctgggcgtgtggctggccgtgctggccttcgccctgctgcccgtgctgggcgtgggccagtacaccgtgcagtggcccggcacctggtgcttcatcagcaccggcagaggcggcaacggcaccagcagcagccacaactggggcaacctgttcttcgccagcgccttcgccttcctgggcctgctggccctgaccgtgaccttcagctgcaacctggccaccatcaaggccctggtgagcagatgcagagccaaggccaccgccagccagagcagcgcccagtggggcagaatcaccaccgagaccgccatccagctgatgggcatcatgtgcgtgctgagcgtgtgctggagccccctgctgatcatgatgctgaagatgatcttcaaccagaccagcgtggagcactgcaagacccacaccgagaagcagaaggagtgcaacttcttcctgatcgccgtgagactggccagcctgaaccagatcctggacccctgggtgtacctgctgctgagaaagatcctgctgagaaagttctgccaggaggagttctggggcaactag

SEQ ID NO: 94809 - DNA, 1365 bp, synthetic construct
  misc_feature 1..1365: note = Description of Artificial Sequence: Synthetic coding sequence
  source 1..1365: mol_type = other DNA
atgaaggagaccagaggctacggcggcgacgcccccttctgcaccagactgaaccacagctacaccggcatgtgggcccccgagagaagcgccgaggccagaggcaacctgaccagaccccccggcagcggcgaggactgcggcagcgtgagcgtggccttccccatcaccatgctgctgaccggcttcgtgggcaacgccctggccatgctgctggtgagcagaagctacagaagaagagagagcaagagaaagaagagcttcctgctgtgcatcggctggctggccctgaccgacctggtgggccagctgctgaccacccccgtggtgatcgtggtgtacctgagcaagcagagatgggagcacatcgaccccagcggcagactgtgcaccttcttcggcctgaccatgaccgtgttcggcctgagcagcctgttcatcgccagcgccatggccgtggagagagccctggccatcagagccccccactggtacgccagccacatgaagaccagagccaccagagccgtgctgctgggcgtgtggctggccgtgctggccttcgccctgctgcccgtgctgggcgtgggccagtacaccgtgcagtggcccggcacctggtgcttcatcagcaccggcagaggcggcaacggcaccagcagcagccacaactggggcaacctgttcttcgccagcgccttcgccttcctgggcctgctggccctgaccgtgaccttcagctgcaacctggccaccatcaaggccctggtgagcagatgcagagccaaggccaccgccagccagagcagcgcccagtggggcagaatcaccaccgagaccgccatccagctgatgggcatcatgtgcgtgctgagcgtgtgctggagccccctgctgatcatgatgctgaagatgatcttcaaccagaccagcgtggagcactgcaagacccacaccgagaagcagaaggagtgcaacttcttcctgatcgccgtgagactggccagcctgaaccagatcctggacccctgggtgtacctgctgctgagaaagatcctgctgagaaagttctgccaggtggccaacgccgtgagcagctgcagcaacgacggccagaagggccagcccatcagcctgagcaacgagatcatccagaccgaggccatgagaaagagaagactgagagagcaggcccccctgctgcccaccagcaccgtgatcgaccccagcagattctgcgcccagcccttcagatggttcctggacctgagcttccccgccatgagcagcagccacccccagctgcccctgaccctggccagcttcaagctgctgagagagccctgcagcgtgcagctgagctag

SEQ ID NO: 94810 - DNA, 1173 bp, synthetic construct; identical to SEQ ID NO: 94801
  misc_feature 1..1173: note = Description of Artificial Sequence: Synthetic coding sequence
  source 1..1173: mol_type = other DNA

SEQ ID NO: 94811 - DNA, 1125 bp, synthetic construct
  misc_feature 1..1125: note = Description of Artificial Sequence: Synthetic coding sequence
  source 1..1125: mol_type = other DNA
atgaaggagaccagaggctacggcggcgacgcccccttctgcaccagactgaaccacagctacaccggcatgtgggcccccgagagaagcgccgaggccagaggcaacctgaccagaccccccggcagcggcgaggactgcggcagcgtgagcgtggccttccccatcaccatgctgctgaccggcttcgtgggcaacgccctggccatgctgctggtgagcagaagctacagaagaagagagagcaagagaaagaagagcttcctgctgtgcatcggctggctggccctgaccgacctggtgggccagctgctgaccacccccgtggtgatcgtggtgtacctgagcaagcagagatgggagcacatcgaccccagcggcagactgtgcaccttcttcggcctgaccatgaccgtgttcggcctgagcagcctgttcatcgccagcgccatggccgtggagagagccctggccatcagagccccccactggtacgccagccacatgaagaccagagccaccagagccgtgctgctgggcgtgtggctggccgtgctggccttcgccctgctgcccgtgctgggcgtgggccagtacaccgtgcagtggcccggcacctggtgcttcatcagcaccggcagaggcggcaacggcaccagcagcagccacaactggggcaacctgttcttcgccagcgccttcgccttcctgggcctgctggccctgaccgtgaccttcagctgcaacctggccaccatcaaggccctggtgagcagatgcagagccaaggccaccgccagccagagcagcgcccagtggggcagaatcaccaccgagaccgccatccagctgatgggcatcatgtgcgtgctgagcgtgtgctggagccccctgctgatcatgatgctgaagatgatcttcaaccagaccagcgtggagcactgcaagacccacaccgagaagcagaaggagtgcaacttcttcctgatcgccgtgagactggccagcctgaaccagatcctggacccctgggtgtacctgctgctgagaaagatcctgctgagaaagttctgccagatgagaaagagaagactgagagagcaggaggagttctggggcaactag

SEQ ID NO: 94812 - DNA, 1467 bp, synthetic construct
  misc_feature 1..1467: note = Description of Artificial Sequence: Synthetic coding sequence
  source 1..1467: mol_type = other DNA
atgagcacccccggcgtgaacagcagcgccagcctgagccccgacagactgaacagccccgtgaccatccccgccgtgatgttcatcttcggcgtggtgggcaacctggtggccatcgtggtgctgtgcaagagcagaaaggagcagaaggagaccaccttctacaccctggtgtgcggcctggccgtgaccgacctgctgggcaccctgctggtgagccccgtgaccatcgccacctacatgaagggccagtggcccggcggccagcccctgtgcgagtacagcaccttcatcctgctgttcttcagcctgagcggcctgagcatcatctgcgccatgagcgtggagagatacctggccatcaaccacgcctacttctacagccactacgtggacaagagactggccggcctgaccctgttcgccgtgtacgccagcaacgtgctgttctgcgccctgcccaacatgggcctgggcagcagcagactgcagtaccccgacacctggtgcttcatcgactggaccaccaacgtgaccgcccacgccgcctacagctacatgtacgccggcttcagcagcttcctgatcctggccaccgtgctgtgcaacgtgctggtgtgcggcgccctgctgagaatgcacagacagttcatgagaagaaccagcctgggcaccgagcagcaccacgccgccgccgccgccagcgtggccagcagaggccaccccgccgccagccccgccctgcccagactgagcgacttcagaagaagaagaagcttcagaagaatcgccggcgccgagatccagatggtgatcctgctgatcgccaccagcctggtggtgctgatctgcagcatccccctggtggtgagagtgttcgtgaaccagctgtaccagcccagcctggagagagaggtgagcaagaaccccgacctgcaggccatcagaatcgccagcgtgaaccccatcctggacccctggatctacatcctgctgagaaagaccgtgctgagcaaggccatcgagaagatcaagtgcctgttctgcagaatcggcggcagcagaagagagagaagcggccagcactgcagcgacagccagagaaccagcagcgccatgagcggccacagcagaagcttcatcagcagagagctgaaggagatcagcagcaccagccagaccctgctgcccgacctgagcctgcccgacctgagcgagaacggcctgggcggcagaaacctgctgcccggcgtgcccggcatgggcctggcccaggaggacaccaccagcctgagaaccctgagaatcagcgagaccagcgacagcagccagggccaggacagcgagagcgtgctgctggtggacgaggccggcggcagcggcagagccggccccgcccccaagggcagcagcctgcaggtgaccttccccagcgagaccctgaacctgagcgagaagtgcatctag

SEQ ID NO: 94813 - DNA, 459 bp, synthetic construct
  misc_feature 1..459: note = Description of Artificial Sequence: Synthetic coding sequence
  source 1..459: mol_type = other DNA
atgcccgcccacagcctggtgatgagcagccccgccctgcccgccttcctgctgtgcagcaccctgctggtgatcaagatgtacgtggtggccatcatcaccggccaggtgagactgagaaagaaggccttcgccaaccccgaggacgccctgagacacggcggcccccagtactgcagaagcgaccccgacgtggagagatgcctgagagcccacagaaacgacatggagaccatctaccccttcctgttcctgggcttcgtgtacagcttcctgggccccaaccccttcgtggcctggatgcacttcctggtgttcctggtgggcagagtggcccacaccgtggcctacctgggcaagctgagagcccccatcagaagcgtgacctacaccctggcccagctgccctgcgccagcatggccctgcagatcctgtgggaggccgccagacacctgtag

SEQ ID NO: 94814 - DNA, 561 bp, synthetic construct
  misc_feature 1..561: note = Description of Artificial Sequence: Synthetic coding sequence
  source 1..561: mol_type = other DNA
atgaaggccgtgaacgagcagggcaaggaggtgaccgagttcggcaacaagtactggctgatgctgaacgagaaggaggcccagcaggtgtacggcggcaaggaggccagaaccgaggagatgaagtggagacagtgggccgacgactggctggtgcacctgatcagccccaacgtgtacagaacccccaccgaggccctggccagcttcgactacatcgtgagagagggcaagttcggcgccgtggagggcgccgtggccaagtacatgggcgccgccgccatgtacctgatcagcaagagactgaagagcagacacagactgcaggacaacgtgagagaggacctgtacgaggccgccgacaagtgggtggccgccgtgggcaaggacagacccttcatgggcggccagaagcccaacctggccgacctggccgtgtacggcgtgctgagagtgatggagggcctggacgccttcgacgacctgatgcagcacacccacatccagccctggtacctgagagtggagagagccatcaccgaggccagccccgcccactag

SEQ ID NO: 94815 - DNA, 1134 bp, synthetic construct
  misc_feature 1..1134: note = Description of Artificial Sequence: Synthetic coding sequence
  source 1..1134: mol_type = other DNA
atggaccccgccgccagagtggtgagagccctgtggcccggcggctgcgccctggcctggagactgggcggcagaccccagcccctgctgcccacccagagcagagccggcttcgccggcgccgccggcggccccagccccgtggccgccgccagaaagggcagccccagactgctgggcgccgccgccctggccctgggcggcgccctgggcctgtaccacaccgccagatggcacctgagagcccaggacctgcacgccgagagaagcgccgcccagctgagcctgagcagcagactgcagctgaccctgtaccagtacaagacctgccccttctgcagcaaggtgagagccttcctggacttccacgccctgccctaccaggtggtggaggtgaaccccgtgagaagagccgagatcaagttcagcagctacagaaaggtgcccatcctggtggcccaggagggcgagagcagccagcagctgaacgacagcagcgtgatcatcagcgccctgaagacctacctggtgagcggccagcccctggaggagatcatcacctactaccccgccatgaaggccgtgaacgagcagggcaaggaggtgaccgagttcggcaacaagtactggctgatgctgaacgagaaggaggcccagcaggtgtacggcggcaaggaggccagaaccgaggagatgaagtggagacagtgggccgacgactggctggtgcacctgatcagccccaacgtgtacagaacccccaccgaggccctggccagcttcgactacatcgtgagagagggcaagttcggcgccgtggagggcgccgtggccaagtacatgggcgccgccgccatgtacctgatcagcaagagactgaagagcagacacagactgcaggacaacgtgagagaggacctgtacgaggccgccgacaagtgggtggccgccgtgggcaaggacagacccttcatgggcggccagaagcccaacctggccgacctggccgtgtacggcgtgctgagagtgatggagggcctggacgccttcgacgacctgatgcagcacacccacatccagccctggtacctgagagtggagagagccatcaccgaggccagccccgcccactag

SEQ ID NO: 94816 - DNA, 894 bp, synthetic construct
  misc_feature 1..894: note = Description of Artificial Sequence: Synthetic coding sequence
  source 1..894: mol_type = other DNA
atgagcatgaacaacagcaagcagctggtgagccccgccgccgccctgctgagcaacaccacctgccagaccgagaacagactgagcgtgttcttcagcgtgatcttcatgaccgtgggcatcctgagcaacagcctggccatcgccatcctgatgaaggcctaccagagattcagacagaagagcaaggccagcttcctgctgctggccagcggcctggtgatcaccgacttcttcggccacctgatcaacggcgccatcgccgtgttcgtgtacgccagcgacaaggagtggatcagattcgaccagagcaacgtgctgtgcagcatcttcggcatctgcatggtgttcagcggcctgtgccccctgctgctgggcagcgtgatggccatcgagagatgcatcggcgtgaccaagcccatcttccacagcaccaagatcaccagcaagcacgtgaagatgatgctgagcggcgtgtgcctgttcgccgtgttcatcgccctgctgcccatcctgggccacagagactacaagatccaggccagcagaacctggtgcttctacaacaccgaggacatcaaggactgggaggacagattctacctgctgctgttcagcttcctgggcctgctggccctgggcgtgagcctgctgtgcaacgccatcaccggcatcaccctgctgagagtgaagttcaagagccagcagcacagacagggcagaagccaccacctggagatggtgatccagctgctggccatcatgtgcgtgagctgcatctgctggagccccttcctgggctacagaatcatcctgaacggcaaggagaagtacaaggtgtacgaggagcagagcgacttcctgcacagactgcagtggcccaccctggagtag

SEQ ID NO: 94817 - DNA, 1080 bp, synthetic construct
  misc_feature 1..1080: note = Description of Artificial Sequence: Synthetic coding sequence
  source 1..1080: mol_type = other DNA
atgagcatgaacaacagcaagcagctggtgagccccgccgccgccctgctgagcaacaccacctgccagaccgagaacagactgagcgtgttcttcagcgtgatcttcatgaccgtgggcatcctgagcaacagcctggccatcgccatcctgatgaaggcctaccagagattcagacagaagagcaaggccagcttcctgctgctggccagcggcctggtgatcaccgacttcttcggccacctgatcaacggcgccatcgccgtgttcgtgtacgccagcgacaaggagtggatcagattcgaccagagcaacgtgctgtgcagcatcttcggcatctgcatggtgttcagcggcctgtgccccctgctgctgggcagcgtgatggccatcgagagatgcatcggcgtgaccaagcccatcttccacagcaccaagatcaccagcaagcacgtgaagatgatgctgagcggcgtgtgcctgttcgccgtgttcatcgccctgctgcccatcctgggccacagagactacaagatccaggccagcagaacctggtgcttctacaacaccgaggacatcaaggactgggaggacagattctacctgctgctgttcagcttcctgggcctgctggccctgggcgtgagcctgctgtgcaacgccatcaccggcatcaccctgctgagagtgaagttcaagagccagcagcacagacagggcagaagccaccacctggagatggtgatccagctgctggccatcatgtgcgtgagctgcatctgctggagccccttcctggtgaccatggccaacatcggcatcaacggcaaccacagcctggagacctgcgagaccaccctgttcgccctgagaatggccacctggaaccagatcctggacccctgggtgtacatcctgctgagaaaggccgtgctgaagaacctgtacaagctggccagccagtgctgcggcgtgcacgtgatcagcctgcacatctgggagctgagcagcatcaagaacagcctgaaggtggccgccatcagcgagagccccgtggccgagaagagcgccagcacctag

SEQ ID NO: 94818 - DNA, 1080 bp, synthetic construct; identical to SEQ ID NO: 94817
  misc_feature 1..1080: note = Description of Artificial Sequence: Synthetic coding sequence
  source 1..1080: mol_type = other DNA

SEQ ID NO: 94819 - DNA, 2640 bp, synthetic construct
  misc_feature 1..2640: note = Description of Artificial Sequence: Synthetic coding sequence
  source 1..2640: mol_type = other DNA
atgggcagactggccagcagacccctgctgctggccctgctgagcctggccctgtgcagaggcagagtggtgagagtgcccaccgccaccctggtgagagtggtgggcaccgagctggtgatcccctgcaacgtgagcgactacgacggccccagcgagcagaacttcgactggagcttcagcagcctgggcagcagcttcgtggagctggccagcacctgggaggtgggcttccccgcccagctgtaccaggagagactgcagagaggcgagatcctgctgagaagaaccgccaacgacgccgtggagctgcacatcaagaacgtgcagcccagcgaccagggccactacaagtgcagcacccccagcaccgacgccaccgtgcagggcaactacgaggacaccgtgcaggtgaaggtgctggccgacagcctgcacgtgggccccagcgccagacccccccccagcctgagcctgagagagggcgagcccttcgagctgagatgcaccgccgccagcgccagccccctgcacacccacctggccctgctgtgggaggtgcacagaggccccgccagaagaagcgtgctggccctgacccacgagggcagattccaccccggcctgggctacgagcagagataccacagcggcgacgtgagactggacaccgtgggcagcgacgcctacagactgagcgtgagcagagccctgagcgccgaccagggcagctacagatgcatcgtgagcgagtggatcgccgagcagggcaactggcaggagatccaggagaaggccgtggaggtggccaccgtggtgatccagcccagcgtgctgagagccgccgtgcccaagaacgtgagcgtggccgagggcaaggagctggacctgacctgcaacatcaccaccgacagagccgacgacgtgagacccgaggtgacctggagcttcagcagaatgcccgacagcaccctgcccggcagcagagtgctggccagactggacagagacagcctggtgcacagcagcccccacgtggccctgagccacgtggacgccagaagctaccacctgctggtgagagacgtgagcaaggagaacagcggctactactactgccacgtgagcctgtgggcccccggccacaacagaagctggcacaaggtggccgaggccgtgagcagccccgccggcgtgggcgtgacctggctggagcccgactaccaggtgtacctgaacgccagcaaggtgcccggcttcgccgacgaccccaccgagctggcctgcagagtggtggacaccaagagcggcgaggccaacgtgagattcaccgtgagctggtactacagaatgaacagaagaagcgacaacgtggtgaccagcgagctgctggccgtgatggacggcgactggaccctgaagtacggcgagagaagcaagcagagagcccaggacggcgacttcatcttcagcaaggagcacaccgacaccttcaacttcagaatccagagaaccaccgaggaggacagaggcaactactactgcgtggtgagcgcctggaccaagcagagaaacaacagctgggtgaagagcaaggacgtgttcagcaagcccgtgaacatcttctgggccctggaggacagcgtgctggtggtgaaggccagacagcccaagcccttcttcgccgccggcaacaccttcgagatgacctgcaaggtgagcagcaagaacatcaagagccccagatacagcgtgctgatcatggccgagaagcccgtgggcgacctgagcagccccaacgagaccaagtacatcatcagcctggaccaggacagcgtggtgaagctggagaactggaccgacgccagcagagtggacggcgtggtgctggagaaggtgcaggaggacgagttcagatacagaatgtaccagacccaggtgagcgacgccggcctgtacagatgcatggtgaccgcctggagccccgtgagaggcagcctgtggagagaggccgccaccagcctgagcaaccccatcgagatcgacttccagaccagcggccccatcttcaacgccagcgtgcacagcgacacccccagcgtgatcagaggcgacctgatcaagctgttctgcatcatcaccgtggagggcgccgccctggaccccgacgacatggccttcgacgtgagctggttcgccgtgcacagcttcggcctggacaaggcccccgtgctgctgagcagcctggacagaaagggcatcgtgaccaccagcagaagagactggaagagcgacctgagcctggagagagtgagcgtgctggagttcctgctgcaggtgcacggcagcgaggaccaggacttcggcaactactactgcagcgtgaccccctgggtgaagagccccaccggcagctggcagaaggaggccgagatccacagcaagcccgtgttcatcaccgtgaagatggacgtgctgaacgccttcaagtaccccctgctgatcggcgtgggcctgagcaccgtgatcggcctgctgagctgcctgatcggctactgcagcagccactggtgctgcaagaaggaggtgcaggagaccagaagagagagaagaagactgatgagcatggagatggactag

SEQ ID NO: 94820 - DNA, 2217 bp, synthetic construct
  misc_feature 1..2217: note = Description of Artificial Sequence: Synthetic coding sequence
  source 1..2217: mol_type = other DNA
agcggcgccgccggcgccggcagaggcggcggcggcgaggccgccggcaaggaggaggagggcgagcccttcgagctgagatgcaccgccgccagcgccagccccctgcacacccacctggccctgctgtgggaggtgcacagaggccccgccagaagaagcgtgctggccctgacccacgagggcagattccaccccggcctgggctacgagcagagataccacagcggcgacgtgagactggacaccgtgggcagcgacgcctacagactgagcgtgagcagagccctgagcgccgaccagggcagctacagatgcatcgtgagcgagtggatcgccgagcagggcaactggcaggagatccaggagaaggccgtggaggtggccaccgtggtgatccagcccagcgtgctgagagccgccgtgcccaagaacgtgagcgtggccgagggcaaggagctggacctgacctgcaacatcaccaccgacagagccgacgacgtgagacccgaggtgacctggagcttcagcagaatgcccgacagcaccctgcccggcagcagagtgctggccagactggacagagacagcctggtgcacagcagcccccacgtggccctgagccacgtggacgccagaagctaccacctgctggtgagagacgtgagcaaggagaacagcggctactactactgccacgtgagcctgtgggcccccggccacaacagaagctggcacaaggtggccgaggccgtgagcagccccgccggcgtgggcgtgacctggctggagcccgactaccaggtgtacctgaacgccagcaaggtgcccggcttcgccgacgaccccaccgagctggcctgcagagtggtggacaccaagagcggcgaggccaacgtgagattcaccgtgagctggtactacagaatgaacagaagaagcgacaacgtggtgaccagcgagctgctggccgtgatggacggcgactggaccctgaagtacggcgagagaagcaagcagagagcccaggacggcgacttcatcttcagcaaggagcacaccgacaccttcaacttcagaatccagagaaccaccgaggaggacagaggcaactactactgcgtggtgagcgcctggaccaagcagagaaacaacagctgggtgaagagcaaggacgtgttcagcaagcccgtgaacatcttctgggccctggaggacagcgtgctggtggtgaaggccagacagcccaagcccttcttcgccgccggcaacaccttcgagatgacctgcaaggtgagcagcaagaacatcaagagccccagatacagcgtgctgatcatggccgagaagcccgtgggcgacctgagcagccccaacgagaccaagtacatcatcagcctggaccaggacagcgtggtgaagctggagaactggaccgacgccagcagagtggacggcgtggtgctggagaaggtgcaggaggacgagttcagatacagaatgtaccagacccaggtgagcgacgccggcctgtacagatgcatggtgaccgcctggagccccgtgagaggcagcctgtggagagaggccgccaccagcctgagcaaccccatcgagatcgacttccagaccagcggccccatcttcaacgccagcgtgcacagcgacacccccagcgtgatcagaggcgacctgatcaagctgttctgcatcatcaccgtggagggcgccgccctggaccccgacgacatggccttcgacgtgagctggttcgccgtgcacagcttcggcctggacaaggcccccgtgctgctgagcagcctggacagaaagggcatcgtgaccaccagcagaagagactggaagagcgacctgagcctggagagagtgagcgtgctggagttcctgctgcaggtgcacggcagcgaggaccaggacttcggcaactactactgcagcgtgaccccctgggtgaagagccccaccggcagctggcagaaggaggccgagatccacagcaagcccgtgttcatcaccgtgaagatggacgtgctgaacgccttcaagtaccccctgctgatcggcgtgggcctgagcaccgtgatcggcctgctgagctgcctgatcggctactgcagcagccactggtgctgcaagaaggaggtgcaggagaccagaagagagagaagaagactgatgagcatggagatggactag

SEQ ID NO: 94821 - DNA, 1161 bp, synthetic construct
  misc_feature 1..1161: note = Description of Artificial Sequence: Synthetic coding sequence
  source 1..1161: mol_type = other DNA
atggccgacagctgcagaaacctgacctacgtgagaggcagcgtgggccccgccaccagcaccctgatgttcgtggccggcgtggtgggcaacggcctggccctgggcatcctgagcgccagaagacccgccagacccagcgccttcgccgtgctggtgaccggcctggccgccaccgacctgctgggcaccagcttcctgagccccgccgtgttcgtggcctacgccagaaacagcagcctgctgggcctggccagaggcggccccgccctgtgcgacgccttcgccttcgccatgaccttcttcggcctggccagcatgctgatcctgttcgccatggccgtggagagatgcctggccctgagccacccctacctgtacgcccagctggacggccccagatgcgccagactggccctgcccgccatctacgccttctgcgtgctgttctgcgccctgcccctgctgggcctgggccagcaccagcagtactgccccggcagctggtgcttcctgagaatgagatgggcccagcccggcggcgccgccttcagcctggcctacgccggcctggtggccctgctggtggccgccatcttcctgtgcaacggcagcgtgaccctgagcctgtgcagaatgtacagacagcagaagagacaccagggcagcctgggccccagacccagaaccggcgaggacgaggtggaccacctgatcctgctggccctgatgaccgtggtgatggccgtgtgcagcctgcccctgaccatcagatgcttcacccaggccgtggcccccgacagcagcagcgagatgggcgacctgctggccttcagattctacgccttcaaccccatcctggacccctgggtgttcatcctgttcagaaaggccgtgttccagagactgaagctgtgggtgtgctgcctgtgcctgggccccgcccacggcgacagccagacccccctgagccagctggccagcggcagaagagaccccagagcccccagcgcccccgtgggcaaggagggcagctgcgtgcccctgagcgcctggggcgagggccaggtggagcccctgccccccacccagcagagcagcggcagcgccgtgggcaccagcagcaaggccgaggccagcgtggcctgcagcctgtgctag

SEQ ID NO: 94822 - DNA, 1503 bp, synthetic construct
  misc_feature 1..1503: note = Description of Artificial Sequence: Synthetic coding sequence
  source 1..1503: mol_type = other DNA
atggcctgggccgccctgctgggcctgctggccgccctgctgctgctgctgctgctgagcagaagaagaaccagaagacccggcgagccccccctggacctgggcagcatcccctggctgggctacgccctggacttcggcaaggacgccgccagcttcctgaccagaatgaaggagaagcacggcgacatcttcaccatcctggtgggcggcagatacgtgaccgtgctgctggacccccacagctacgacgccgtggtgtgggagcccagaaccagactggacttccacgcctacgccatcttcctgatggagagaatcttcgacgtgcagctgccccactacagccccagcgacgagaaggccagaatgaagctgaccctgctgcacagagagctgcaggccctgaccgaggccatgtacaccaacctgcacgccgtgctgctgggcgacgccaccgaggccggcagcggctggcacgagatgggcctgctggacttcagctacagcttcctgctgagagccggctacctgaccctgtacggcatcgaggccctgcccagaacccacgagagccaggcccaggacagagtgcacagcgccgacgtgttccacaccttcagacagctggacagactgctgcccaagctggccagaggcagcctgagcgtgggcgacaaggaccacatgtgcagcgtgaagagcagactgtggaagctgctgagccccgccagactggccagaagagcccacagaagcaagtggctggagagctacctgctgcacctggaggagatgggcgtgagcgaggagatgcaggccagagccctggtgctgcagctgtgggccacccagggcaacatgggccccgccgccttctggctgctgctgttcctgctgaagaaccccgaggccctggccgccgtgagaggcgagctggagagcatcctgtggcaggccgagcagcccgtgagccagaccaccaccctgccccagaaggtgctggacagcacccccgtgctggacagcgtgctgagcgagagcctgagactgaccgccgcccccttcatcaccagagaggtggtggtggacctggccatgcccatggccgacggcagagagttcaacctgagaagaggcgacagactgctgctgttccccttcctgagcccccagagagaccccgagatctacaccgaccccgaggtgttcaagtacaacagattcctgaaccccgacggcagcgagaagaaggacttctacaaggacggcaagagactgaagaactacaacatgccctggggcgccggccacaaccactgcctgggcagaagctacgccgtgaacagcatcaagcagttcgtgttcctggtgctggtgcacctggacctggagctgatcaacgccgacgtggagatccccgagttcgacctgagcagatacggcttcggcctgatgcagcccgagcacgacgtgcccgtgagatacagaatcagaccctag

SEQ ID NO: 94823 - DNA, 408 bp, synthetic construct
  misc_feature 1..408: note = Description of Artificial Sequence: Synthetic coding sequence
  source 1..408: mol_type = other DNA
atgagagccttcctgagaaaccagaagtacgaggacatgcacaacatcatccacatcctgcagatcagaaagctgagacacagactgagcaacttccccagactgcccggcatcctggcccccgagaccgtgctgctgcccttctgctacaaggtgttcagaaagaaggagaaggtgaagagaagccagaaggccaccgagttcatcgactacagcatcgagcagagccaccacgccatcctgacccccctgcagacccacctgaccatgaagggcagcagcatgaagtgcagcagcctgagcagcgaggccatcctgttcaccctgaccctgcagctgacccagaccctgggcctggagtgctgcctgctgtacctgagcaagaccatccacccccagatcatctag

SEQ ID NO: 94824 - DNA, 345 bp, synthetic construct
  misc_feature 1..345: note = Description of Artificial Sequence: Synthetic coding sequence
  source 1..345: mol_type = other DNA
atggccggcctggccctgcagcccggcaccgccctgctgtgctacagctgcaaggcccaggtgagcaacgaggactgcctgcaggtggagaactgcacccagctgggcgagcagtgctggaccgccagaatcagagccgtgggcctgctgaccgtgatcagcaagggctgcagcctgaactgcgtggacgacagccaggactactacgtgggcaagaagaacatcacctgctgcgacaccgacctgtgcaacgccagcggcgcccacgccctgcagcccgccgccgccatcctggccctgctgcccgccctgggcctgctgctgtggggccccggccagctgtag

SEQ ID NO: 94825 - DNA, 714 bp, synthetic construct
  misc_feature 1..714: note = Description of Artificial Sequence: Synthetic coding sequence
  source 1..714: mol_type = other DNA
atgatggtgatggtggtggtgatcacctgcctgctgagccactacaagctgagcgccagaagcttcatcagcagacacagccagggcagaagaagagaggacgccctgagcagcgagggctgcctgtggcccagcgagagcaccgtgagcggcaacggcatccccgagccccaggtgtacgccccccccagacccaccgacagactggccgtgccccccttcgcccagagagagagattccacagattccagcccacctacccctacctgcagcacgagatcgacctgccccccaccatcagcctgagcgacggcgaggagccccccccctaccagggcccctgcaccctgcagctgagagaccccgagcagcagctggagctgaacagagagagcgtgagagccccccccaacagaaccatcttcgacagcgacctgatggacagcgccagactgggcggcccctgcccccccagcagcaacagcggcatcagcgccacctgctacggcagcggcggcagaatggagggccccccccccacctacagcgaggtgatcggccactaccccggcagcagcttccagcaccagcagagcagcggcccccccagcctgctggagggcaccagactgcaccacacccacatcgcccccctggagagcgccgccatctggagcaaggagaaggacaagcagaagggccaccccctgtag

SEQ ID NO: 94826 - DNA, 864 bp, synthetic construct
  misc_feature 1..864: note = Description of Artificial Sequence: Synthetic coding sequence
  source 1..864: mol_type = other DNA
atgcacagactgatgggcgtgaacagcaccgccgccgccgccgccggccagcccaacgtgagctgcacctgcaactgcaagagaagcctgttccagagcatggagatcaccgagctggagttcgtgcagatcatcatcatcgtggtggtgatgatggtgatggtggtggtgatcacctgcctgctgagccactacaagctgagcgccagaagcttcatcagcagacacagccagggcagaagaagagaggacgccctgagcagcgagggctgcctgtggcccagcgagagcaccgtgagcggcaacggcatccccgagccccaggtgtacgccccccccagacccaccgacagactggccgtgccccccttcgcccagagagagagattccacagattccagcccacctacccctacctgcagcacgagatcgacctgccccccaccatcagcctgagcgacggcgaggagccccccccctaccagggcccctgcaccctgcagctgagagaccccgagcagcagctggagctgaacagagagagcgtgagagccccccccaacagaaccatcttcgacagcgacctgatggacagcgccagactgggcggcccctgcccccccagcagcaacagcggcatcagcgccacctgctacggcagcggcggcagaatggagggccccccccccacctacagcgaggtgatcggccactaccccggcagcagcttccagcaccagcagagcagcggcccccccagcctgctggagggcaccagactgcaccacacccacatcgcccccctggagagcgccgccatctggagcaaggagaaggacaagcagaagggccaccccctgtag

SEQ ID NO: 94827 - DNA, 759 bp, synthetic construct
  misc_feature 1..759: note = Description of Artificial Sequence: Synthetic coding sequence
  source 1..759: mol_type = other DNA
atggccgagctggagttcgtgcagatcatcatcatcgtggtggtgatgatggtgatggtggtggtgatcacctgcctgctgagccactacaagctgagcgccagaagcttcatcagcagacacagccagggcagaagaagagaggacgccctgagcagcgagggctgcctgtggcccagcgagagcaccgtgagcggcaacggcatccccgagccccaggtgtacgccccccccagacccaccgacagactggccgtgccccccttcgcccagagagagagattccacagattccagcccacctacccctacctgcagcacgagatcgacctgccccccaccatcagcctgagcgacggcgaggagccccccccctaccagggcccctgcaccctgcagctgagagaccccgagcagcagctggagctgaacagagagagcgtgagagccccccccaacagaaccatcttcgacagcgacctgatggacagcgccagactgggcggcccctgcccccccagcagcaacagcggcatcagcgccacctgctacggcagcggcggcagaatggagggccccccccccacctacagcgaggtgatcggccactaccccggcagcagcttccagcaccagcagagcagcggcccccccagcctgctggagggcaccagactgcaccacacccacatcgcccccctggagagcgccgccatctggagcaaggagaaggacaagcagaagggccaccccctgtag

SEQ ID NO: 94828 - DNA, 714 bp, synthetic construct; identical to SEQ ID NO: 94825
  misc_feature 1..714: note = Description of Artificial Sequence: Synthetic coding sequence
  source 1..714: mol_type = other DNA

SEQ ID NO: 94829 - DNA, 714 bp, synthetic construct; identical to SEQ ID NO: 94825
  misc_feature 1..714: note = Description of Artificial Sequence: Synthetic coding sequence
  source 1..714: mol_type = other DNA

SEQ ID NO: 94830 - DNA, 684 bp, synthetic construct
  misc_feature 1..684: note = Description of Artificial Sequence: Synthetic coding sequence
  source 1..684: mol_type = other DNA
atgcacagactgatgggcgtgaacagcaccgccgccgccgccgccggccagcccaacgtgagctgcacctgcaactgcaagagaagcctgttccagagcatggagatcagctgccacggcttccccgtgtgcaagagccaccagcaccaggagtggaagagcctgtgctggagcctgagaagccccggcggcgccagcagcatcaccggcttcggcagcatgaaggtgaccaaccccgccatgaacctgcccgagtgccagtggctgagaatccagaaggccgagctggagttcgtgcagatcatcatcatcgtggtggtgatgatggtgatggtggtggtgatcacctgcctgctgagccactacaagctgagcgccagaagcttcatcagcagacacagccagggcagaagaagagaggacgccctgagcagcgagggctgcctgtggcccagcgagagcaccgtgagcggcaacggcatccccgagccccaggtgtacgccccccccagacccaccgacagactggccgtgccccccttcgcccagagagagagattccacagattccagcccacctacccctacctgcagcacgagatcgacctgccccccaccatcagcctgagcgacggcgaggagccccccccctaccagggcccctgcaccctgcagctgagatag

SEQ ID NO: 94831 - DNA, 627 bp, synthetic construct
  misc_feature 1..627: note = Description of Artificial Sequence: Synthetic coding sequence
  source 1..627: mol_type = other DNA
atgcccgccatccccgcccacggcgccgagctggagttcgtgcagatcatcatcatcgtggtggtgatgatggtgatggtggtggtgatcacctgcctgctgagccactacaagctgagcgccagaagcttcatcagcagacacagccagggcagaagaagagaggacgccctgagcagcgagggctgcctgtggcccagcgagagcaccgtgagcggcaacggcatccccgagccccaggtgtacgccccccccagacccaccgacagactggccgtgccccccttcgcccagagagagagattccacagattccagcccacctacccctacctgcagcacgagatcgacctgccccccaccatcagcctgagcgacggcgaggagccccccccctaccagggcccctgcaccctgcagctgagagaccccgagcagcagctggagctgaacagagagagcgtgagagccccccccaacagaaccatcttcgacagcgacctgatggacagcgccagactgggcggcccctgcccccccagcagcaacagcggcatcagcgccacctgctacggcagcggcggcagaatggagggccccccccccacctacagcgaggtgatctag

SEQ ID NO: 94832 - DNA, 156 bp, synthetic construct
  misc_feature 1..156: note = Description of Artificial Sequence: Synthetic coding sequence
  source 1..156: mol_type = other DNA
atggccagatacagatgctgcagaagccagagcagaagcagatactacagacagagacagagaagcagaagaagaagaagaagaagctgccagaccagaagaagagccatgagatgctgcagacccagatacagacccagatgcagaagacactag

SEQ ID NO: 94833 - DNA, 309 bp, synthetic construct
  misc_feature 1..309: note = Description of Artificial Sequence: Synthetic coding sequence
  source 1..309: mol_type = other DNA
atggtgagatacagagtgagaagcctgagcgagagaagccacgaggtgtacagacagcagctgcacggccaggagcagggccaccacggccaggaggagcagggcctgagccccgagcacgtggaggtgtacgagagaacccacggccagagccactacagaagaagacactgcagcagaagaagactgcacagaatccacagaagacagcacagaagctgcagaagaagaaagagaagaagctgcagacacagaagaagacacagaagaggctgcagaaccagaaagagaacctgcagaagacactag

SEQ ID NO: 94834 - DNA, 423 bp, synthetic construct
  misc_feature 1..423: note = Description of Artificial Sequence: Synthetic coding sequence
  source 1..423: mol_type = other DNA
atggtgagatacagagtgagaagcctgagcgagagaagccacgaggtgtacagacagcagctgcacggccaggagcagggccaccacggccaggaggagcagggcctgagccccgagcacgtggaggtgtacgagagaacccacggccagagccactacagaagaagacactgcagcagaagaagactgcacagaatccacagaagacagcacagaagctgcagaagaagaaagagaagaagctgcagacacagaagaagacacagaagagagagcctgggcgaccccctgaaccagaacttcctgagccagaaggccgccgagcccggcagagagcacgccgagggcaccaagctgcccggccccctgacccccagctggaagctgagaaagagcagacccaagcaccaggtgagaccctag

SEQ ID NO: 94835 - DNA, 657 bp, synthetic construct
  misc_feature 1..657: note = Description of Artificial Sequence: Synthetic coding sequence
  source 1..657: mol_type = other DNA
tgactggccctgctgctggccagagccggcctgagaaagcccgagagccaggaggccgcccccctgagcggcccctgcggcagaagagtgatcaccagcagaatcgtgggcggcgaggacgccgagctgggcagatggccctggcagggcagcctgagactgtgggacagccacgtgtgcggcgtgagcctgctgagccacagatgggccctgaccgccgcccactgcttcgagaccgacctgagcgaccccagcggctggatggtgcagttcggccagctgaccagcatgcccagcttctggagcctgcaggcctactacaccagatacttcgtgagcaacatctacctgagccccagatacctgggcaacagcccctacgacatcgccctggtgaagctgagcgcccccgtgacctacaccaagcacatccagcccatctgcctgcaggccagcaccttcgagttcgagaacagaaccgactgctgggtgaccggctggggctacatcaaggaggacgagggcagcagcggcagacaccacaagcagctgtacgtgcagccccccctgccccaggtgcagttcccccagggccacctgtggagacacggcctgtgctggcagtgccccagaagagagggctgcctgctgagatag

SEQ ID NO: 94836 - DNA, 744 bp, synthetic construct
  misc_feature 1..744: note = Description of Artificial Sequence: Synthetic coding sequence
  source 1..744: mol_type = other DNA
atgaaccccctgctgatcctgaccttcgtggccgccgccctggccgcccccttcgacgacgacgacaagatcgtgggcggctacaactgcgaggagaacagcgtgccctaccaggtgagcctgaacagcggctaccacttctgcggcggcagcctgatcaacgagcagtgggtggtgagcgccggccactgctacaagagcagaatccaggtgagactgggcgagcacaacatcgaggtgctggagggcaacgagcagttcatcaacgccgccaagatcatcagacacccccagtacgacagaaagaccctgaacaacgacatcatgctgatcaagctgagcagcagagccgtgatcaacgccagagtgagcaccatcagcctgcccaccgccccccccgccaccggcaccaagtgcctgatcagcggctggggcaacaccgccagcagcggcgccgactaccccgacgagctgcagtgcctggacgcccccgtgctgagccaggccaagtgcgaggccagctaccccggcaagatcaccagcaacatgttctgcgtgggcttcctggagggcggcaaggacagctgccagggcgacagcggcggccccgtggtgtgcaacggccagctgcagggcgtggtgagctggggcgacggctgcgcccagaagaacaagcccggcgtgtacaccaaggtgtacaactacgtgaagtggatcaagaacaccatcgccgccaacagctag

SEQ ID NO: 94837 - DNA, 714 bp, synthetic construct
  misc_feature 1..714: note = Description of Artificial Sequence: Synthetic coding sequence
  source 1..714: mol_type = other DNA
atgaaccccctgctgatcctgaccttcgtggccgccgccctggccgcccccttcgacgacgacgacaagatcgtgggcggctacaactgcgaggagaacagcgtgccctaccaggtgagcctgaacagcggctaccacttctgcggcggcagcctgatcaacgagcagtgggtggtgagcgccggccactgctacaagagcagaatccaggtgagactgggcgagcacaacatcaacgccgccaagatcatcagacacccccagtacgacagaaagaccctgaacaacgacatcatgctgatcaagctgagcagcagagccgtgatcaacgccagagtgagcaccatcagcctgcccaccgccccccccgccaccggcaccaagtgcctgatcagcggctggggcaacaccgccagcagcggcgccgactaccccgacgagctgcagtgcctggacgcccccgtgctgagccaggccaagtgcgaggccagctaccccggcaagatcaccagcaacatgttctgcgtgggcttcctggagggcggcaaggacagctgccagggcgacagcggcggccccgtggtgtgcaacggccagctgcagggcgtggtgagctggggcgacggctgcgcccagaagaacaagcccggcgtgtacaccaaggtgtacaactacgtgaagtggatcaagaacaccatcgccgccaacagctag

SEQ ID NO: 94838 - DNA, 2628 bp, synthetic construct
  misc_feature 1..2628: note = Description of Artificial Sequence: Synthetic coding sequence
  source 1..2628: mol_type = other DNA
atgaccctggccagattcgtgctggccctgatgctgggcgccctgcccgaggtggtgggcttcgacagcgtgctgaacgacagcctgcaccacagccacagacacagcccccccgccggcccccactacccctactacctgcccacccagcagagaccccccagaaccagaccccccccccccctgcccagattccccagaccccccagagccctgcccgcccagagaccccacgccctgcaggccggccacacccccagaccccacccctggggctgccccgccggcgagccctgggtgagcgtgaccgacttcggcgccccctgcctgagatgggccgaggtgccccccttcctggagagaagcccccccgccagctgggcccagctgagaggccagagacacaacttctgcagaagccccgacggcgccggcagaccctggtgcttctacggcgacgccagaggcaaggtggactggggctactgcgactgcagacacggcagcgtgagactgagaggcggcaagaacgagttcgagggcaccgtggaggtgtacgccagcggcgtgtggggcaccgtgtgcagcagccactgggacgacagcgacgccagcgtgatctgccaccagctgcagctgggcggcaagggcatcgccaagcagacccccttcagcggcctgggcctgatccccatctactggagcaacgtgagatgcagaggcgacgaggagaacatcctgctgtgcgagaaggacatctggcagggcggcgtgtgcccccagaagatggccgccgccgtgacctgcagcttcagccacggccccaccttccccatcatcagactggccggcggcagcagcgtgcacgagggcagagtggagctgtaccacgccggccagtggggcaccgtgtgcgacgaccagtgggacgacgccgacgccgaggtgatctgcagacagctgggcctgagcggcatcgccaaggcctggcaccaggcctacttcggcgagggcagcggccccgtgatgctggacgaggtgagatgcaccggcaacgagctgagcatcgagcagtgccccaagagcagctggggcgagcacaactgcggccacaaggaggacgccggcgtgagctgcacccccctgaccgacggcgtgatcagactggccggcggcaagggcagccacgagggcagactggaggtgtactacagaggccagtggggcaccgtgtgcgacgacggctggaccgagctgaacacctacgtggtgtgcagacagctgggcttcaagtacggcaagcaggccagcgccaaccacttcgaggagagcaccggccccatctggctggacgacgtgagctgcagcggcaaggagaccagattcctgcagtgcagcagaagacagtggggcagacacgactgcagccacagagaggacgtgagcatcgcctgctaccccggcggcgagggccacagactgagcctgggcttccccgtgagactgatggacggcgagaacaagaaggagggcagagtggaggtgttcatcaacggccagtggggcaccatctgcgacgacggctggaccgacaaggacgccgccgtgatctgcagacagctgggctacaagggccccgccagagccagaaccatggcctacttcggcgagggcaagggccccatccacgtggacaacgtgaagtgcaccggcaacgagagaagcctggccgactgcatcaagcaggacatcggcagacacaactgcagacacagcgaggacgccggcgtgatctgcgactacttcggcaagaaggccagcggcaacagcaacaaggagagcctgagcagcgtgtgcggcctgagactgctgcacagaagacagaagagaatcatcggcggcaagaacagcctgagaggcggctggccctggcaggtgagcctgagactgaagagcagccacggcgacggcagactgctgtgcggcgccaccctgctgagcagctgctgggtgctgaccgccgcccactgcttcaagagatacggcaacagcaccagaagctacgccgtgagagtgggcgactaccacaccctggtgcccgaggagttcgaggaggagatcggcgtgcagcagatcgtgatccacagagagtacagacccgacagaagcgactacgacatcgccctggtgagactgcagggccccgaggagcagtgcgccagattcagcagccacgtgctgcccgcctgcctgcccctgtggagagagagaccccagaagaccgccagcaactgctacatcaccggctggggcgacaccggcagagcctacagcagaaccctgcagcaggccgccatccccctgctgcccaagagattctgcgaggagagatacaagggcagattcaccggcagaatgctgtgcgccggcaacctgcacgagcacaagagagtggacagctgccagggcgacagcggcggccccctgatgtgcgagagacccggcgagagctgggtggtgtacggcgtgaccagctggggctacggctgcggcgtgaaggacagccccggcgtgtacaccaaggtgagcgccttcgtgccctggatcaagagcgtgaccaagctgtag

SEQ ID NO: 94839 - DNA, 489 bp, synthetic construct
  misc_feature 1..489: note = Description of Artificial Sequence: Synthetic coding sequence
  source 1..489: mol_type = other DNA
atgaagggcttcaccgccaccctgttcctgtggaccctgatcttccccagctgcagcggcggcggcggcggcaaggcctggcccacccacgtggtgtgcagcgacagcggcctggaggtgctgtaccagagctgcgaccccctgcaggacttcggcttcagcgtggagaagtgcagcaagcagctgaagagcaacatcaacatcagattcggcatcatcctgagagaggacatcaaggagctgttcctggacctggccctgatgagccagggcagcagcgtgctgaacttcagctaccccatctgcgaggccgccctgcccaagttcagcttctgcggcagaagaaagggcgagcagatctactacgccggccccgtgaacaaccccgagttcaccatcccccagggcgagtaccaggtgctgctggagctgtacaccgagaagagaagcaccgtggcctgcgccaacgccaccatcatgtgcagctag

SEQ ID NO: 94840 - DNA, 822 bp, synthetic construct
  misc_feature 1..822: note = Description of Artificial Sequence: Synthetic coding sequence
  source 1..822: mol_type = other DNA
atggccgtgtggctggcccagtggctgggccccctgctgctggtgagcctgtggggcctgctggcccccgccagcctgctgagaagactgggcgagcacatccagcagttccaggagagcagcgcccagggcctgggcctgagcctgggccccggcgccgccgccctgcccaaggtgggctggctggagcagctgctggaccccttcaacgtgagcgacagaagaagcttcctgcagagatactgggtgaacgaccagcactgggtgggccaggacggccccatcttcctgcacctgggcggcgagggcagcctgggccccggcagcgtgatgagaggccaccccgccgccctggcccccgcctggggcgccctggtgatcagcctggagcacagattctacggcctgagcatccccgccggcggcctggagatggcccagctgagattcctgagcagcagactggccctggccgacgtggtgagcgccagactggccctgagcagactgttcaacatcagcagcagcagcccctggatctgcttcggcggcagctacgccggcagcctggccgcctgggccagactgaagttcccccacctgatcttcgccagcgtggccagcagcgcccccgtgagagccgtgctggacttcagcgagtacaacgacatcgtgctgcacagcctgggccagaagtgcctgagcttcagcagagccgagaccgtggcccagctgagaagcaccgagccccagctgagcggcgtgggcgacagacagtggctgtaccagacctgcaccgagttcggcttctacatcacctag

SEQ ID NO: 94841 - DNA, 501 bp, synthetic construct
  misc_feature 1..501: note = Description of Artificial Sequence: Synthetic coding sequence
  source 1..501: mol_type = other DNA
atggccgtgtggctggcccagtggctgggccccctgctgctggtgagcctgtggggcctgctggcccccgccagcctgctgagaagactgggcgagcacatccagcagttccaggagagcagcgcccagggcctgggcctgagcctgggccccggcgccgccgccctgcccaaggtgggctggctggagcagctgctggaccccttcaacgtgagcgacagaagaagcttcctgcagagatactgggtgaacgaccagcactgggtgggccaggacggccccatcttcctgcacctgggcggcgagggcagcctgggccccggcagcgtgatgagaggccaccccgccgccctggcccccgcctggggcgccctggtgatcagcctggagcacagattctacggcctgagcatccccgccggcggcctggagatggcccagctgagattcctgagcagcagactggccctgagctgcaccgcctgggccagaagcgtgtag

SEQ ID NO: 94842 - DNA, 498 bp, synthetic construct
  misc_feature 1..498: note = Description of Artificial Sequence: Synthetic coding sequence
  source 1..498: mol_type = other DNA
tgagtgatgagaggccaccccgccgccctggcccccgcctggggcgccctggtgatcagcctggagcacagattctacggcctgagcatccccgccggcggcctggagatggcccagctgagattcctgagcagcagactggccctggccgacgtggtgagcgccagactggccctgagcagactgttcaacatcagcagcagcagcccctggatctgcttcggcggcagctacgccggcagcctggccgcctgggccagactgaagttcccccacctgatcttcgccagcgtggccagcagcgcccccgtgagagccgtgctggacttcagcgagtacaacgacatcgtgctgcacagcctgggccagaagtgcctgagcttcagcagagccgagaccgtggcccagctgagaagcaccgagccccagctgagcggcgtgggcgacagacagtggctgtaccagacctgcaccgagttcggcttctacgtgacctag

SEQ ID NO: 94843 - DNA, 945 bp, synthetic construct
  misc_feature 1..945: note = Description of Artificial Sequence: Synthetic coding sequence
  source 1..945: mol_type = other DNA
atgggcgccagaggcgccctgctgctggccctgctgctggccagagccggcctgagaaagcccgagagccaggaggccgcccccctgagcggcccctgcggcagaagagtgatcaccagcagaatcgtgggcggcgaggacgccgagctgggcagatggccctggcagggcagcctgagactgtgggacagccacgtgtgcggcgtgagcctgctgagccacagatgggccctgaccgccgcccactgcttcgagacctacagcgacctgagcgaccccagcggctggatggtgcagttcggccagctgaccagcatgcccagcttctggagcctgcaggcctactacaccagatacttcgtgagcaacatctacctgagccccagatacctgggcaacagcccctacgacatcgccctggtgaagctgagcgcccccgtgacctacaccaagcacatccagcccatctgcctgcaggccagcaccttcgagttcgagaacagaaccgactgctgggtgaccggctggggctacatcaaggaggacgaggccctgcccagcccccacaccctgcaggaggtgcaggtggccatcatcaacaacagcatgtgcaaccacctgttcctgaagtacagcttcagaaaggacatcttcggcgacatggtgtgcgccggcaacgcccagggcggcaaggacgcctgcttcggcgacagcggcggccccctggcctgcaacaagaacggcctgtggtaccagatcggcgtggtgagctggggcgtgggctgcggcagacccaacagacccggcgtgtacaccaacatcagccaccacttcgagtggatccagaagctgatggcccagagcggcatgagccagcccgaccccagctggcccctgctgttcttccccctgctgtgggccctgcccctgctgggccccgtgtag

SEQ ID NO: 94844 - DNA, 903 bp, synthetic construct
  misc_feature 1..903: note = Description of Artificial Sequence: Synthetic coding sequence
  source 1..903: mol_type = other DNA
atgggcgccagaggcgccctgctgctggccctgctgctggccagagccggcctgagaaagcccgagagccaggaggccgcccccctgagcggcccctgcggcagaagagtgatcaccagcagaatcgtgggcggcgaggacgccgagctgggcagatggccctggcagggcagcctgagactgtgggacagccacgtgtgcggcgtgagcctgctgagccacagatgggccctgaccgccgcccactgcttcgagacctacagcgacctgagcgaccccagcggctggatggtgcagttcggccagctgaccagcatgcccagcttctggagcctgcaggcctactacaccagatacttcgtgagcaacatctacctgagccccagatacctgggcaacagcccctacgacatcgccctggtgaagctgagcgcccccgtgacctacaccaagcacatccagcccatctgcctgcaggccagcaccttcgagttcgagaacagaaccgactgctgggtgaccggctggggctacatcaaggaggacgaggccctgcccagcccccacaccctgcaggaggtgcaggtggccatcatcaacaacagcatgtgcaaccacctgttcctgaagtacagcttcagaaaggacatcttcggcgacatgggcgacagcggcggccccctggcctgcaacaagaacggcctgtggtaccagatcggcgtggtgagctggggcgtgggctgcggcagacccaacagacccggcgtgtacaccaacatcagccaccacttcgagtggatccagaagctgatggcccagagcggcatgagccagcccgaccccagctggcccctgctgttcttccccctgctgtgggccctgcccctgctgggccccgtgtag

SEQ ID NO: 94845 - DNA, 939 bp, synthetic construct
  misc_feature 1..939: note = Description of Artificial Sequence: Synthetic coding sequence
  source 1..939: mol_type = other DNA
atgggcgccagaggcgccctgctgctggccctgctgctggccagagccggcctgagaaagcccgagagccaggaggccgcccccctgagcggcccctgcggcagaagagtgatcaccagcagaatcgtgggcggcgaggacgccgagctgggcagatggccctggcagggcagcctgagactgtgggacagccacgtgtgcggcgtgagcctgctgagccacagatgggccctgaccgccgcccactgcttcgagaccgacctgagcgaccccagcggctggatggtgcagttcggccagctgaccagcatgcccagcttctggagcctgcaggcctactacaccagatacttcgtgagcaacatctacctgagccccagatacctgggcaacagcccctacgacatcgccctggtgaagctgagcgcccccgtgacctacaccaagcacatccagcccatctgcctgcaggccagcaccttcgagttcgagaacagaaccgactgctgggtgaccggctggggctacatcaaggaggacgaggccctgcccagcccccacaccctgcaggaggtgcaggtggccatcatcaacaacagcatgtgcaaccacctgttcctgaagtacagcttcagaaaggacatcttcggcgacatggtgtgcgccggcaacgcccagggcggcaaggacgcctgcttcggcgacagcggcggccccctggcctgcaacaagaacggcctgtggtaccagatcggcgtggtgagctggggcgtgggctgcggcagacccaacagacccggcgtgtacaccaacatcagccaccacttcgagtggatccagaagctgatggcccagagcggcatgagccagcccgaccccagctggcccctgctgttcttccccctgctgtgggccctgcccctgctgggccccgtgtag

SEQ ID NO: 94846 - DNA, 954 bp, synthetic construct
  misc_feature 1..954: note = Description of Artificial Sequence: Synthetic coding sequence
  source 1..954: mol_type = other DNA
atggtggtgagcggcgccccccccgccctgggcggcggctgcctgggcaccttcaccagcctgctgctgctggccagcaccgccatcctgaacgccgccagaatccccgtgccccccgcctgcggcaagccccagcagctgaacagagtggtgggcggcgaggacagcaccgacagcgagtggccctggatcgtgagcatccagaagaacggcacccaccactgcgccggcagcctgctgaccagcagatgggtgatcaccgccgcccactgcttcaaggacaacctgaacaagccctacctgttcagcgtgctgctgggcgcctggcagctgggcaaccccggcagcagaagccagaaggtgggcgtggcctgggtggagccccaccccgtgtacagctggaaggagggcgcctgcgccgacatcgccctggtgagactggagagaagcatccagttcagcgagagagtgctgcccatctgcctgcccgacgccagcatccacctgccccccaacacccactgctggatcagcggctggggcagcatccaggacggcgtgcccctgccccacccccagaccctgcagaagctgaaggtgcccatcatcgacagcgaggtgtgcagccacctgtactggagaggcgccggccagggccccatcaccgaggacatgctgtgcgccggctacctggagggcgagagagacgcctgcctgggcgacagcggcggccccctgatgtgccaggtggacggcgcctggctgctggccggcatcatcagctggggcgagggctgcgccgagagaaacagacccggcgtgtacatcagcctgagcgcccacagaagctgggtggagaagatcgtgcagggcgtgcagctgagaggcagagcccagggcggcggcgccctgagagcccccagccagggcagcggcgccgccgccagaagctag

SEQ ID NO: 94847 - DNA, 786 bp, synthetic construct
  misc_feature 1..786: note = Description of Artificial Sequence: Synthetic coding sequence
  source 1..786: mol_type = other DNA
atgcacatgagagagaccagcggcttcaccctgaagaagggcagaagcgcccccctggtgttccacccccccgacgccctgatcgccgtgcccttcgacgacgacgacaagatcgtgggcggctacacctgcgaggagaacagcctgccctaccaggtgagcctgaacagcggcagccacttctgcggcggcagcctgatcagcgagcagtgggtggtgagcgccgcccactgctacaagaccagaatccaggtgagactgggcgagcacaacatcaaggtgctggagggcaacgagcagttcatcaacgccgccaagatcatcagacaccccaagtacaacagagacaccctggacaacgacatcatgctgatcaagctgagcagccccgccgtgatcaacgccagagtgagcaccatcagcctgcccaccaccccccccgccgccggcaccgagtgcctgatcagcggctggggcaacaccctgagcttcggcgccgactaccccgacgagctgaagtgcctggacgcccccgtgctgacccaggccgagtgcaaggccagctaccccggcaagatcaccaacagcatgttctgcgtgggcttcctggagggcggcaaggacagctgccagagagacagcggcggccccgtggtgtgcaacggccagctgcagggcgtggtgagctggggccacggctgcgcctggaagaacagacccggcgtgtacaccaaggtgtacaactacgtggactggatcaaggacaccatcgccgccaacagctag

SEQ ID NO: 94848 - DNA, 915 bp, synthetic construct
  misc_feature 1..915: note = Description of Artificial Sequence: Synthetic coding sequence
  source 1..915: mol_type = other DNA
atgtgcggccccgacgacagatgccccgccagatggcccggccccggcagagccgtgaagtgcggcaagggcctggccgccgccagacccggcagagtggagagaggcggcgcccagagaggcggcgccggcctggagctgcaccccctgctgggcggcagaacctggagagccgccagagacgccgacggctgcgaggccctgggcaccgtggccgtgcccttcgacgacgacgacaagatcgtgggcggctacacctgcgaggagaacagcctgccctaccaggtgagcctgaacagcggcagccacttctgcggcggcagcctgatcagcgagcagtgggtggtgagcgccgcccactgctacaagaccagaatccaggtgagactgggcgagcacaacatcaaggtgctggagggcaacgagcagttcatcaacgccgccaagatcatcagacaccccaagtacaacagagacaccctggacaacgacatcatgctgatcaagctgagcagccccgccgtgatcaacgccagagtgagcaccatcagcctgcccaccaccccccccgccgccggcaccgagtgcctgatcagcggctggggcaacaccctgagcttcggcgccgactaccccgacgagctgaagtgcctggacgcccccgtgctgacccaggccgagtgcaaggccagctaccccggcaagatcaccaacagcatgttctgcgtgggcttcctggagggcggcaaggacagctgccagagagacagcggcggccccgtggtgtgcaacggccagctgcagggcgtggtgagctggggccacggctgcgcctggaagaacagacccggcgtgtacaccaaggtgtacaactacgtggactggatcaaggacaccatcgccgccaacagctag

SEQ ID NO: 94849 - DNA, 744 bp, synthetic construct
  misc_feature 1..744: note = Description of Artificial Sequence: Synthetic coding sequence
  source 1..744: mol_type = other DNA
atgaaccccttcctgatcctggccttcgtgggcgccgccgtggccgtgcccttcgacgacgacgacaagatcgtgggcggctacacctgcgaggagaacagcctgccctaccaggtgagcctgaacagcggcagccacttctgcggcggcagcctgatcagcgagcagtgggtggtgagcgccgcccactgctacaagaccagaatccaggtgagactgggcgagcacaacatcaaggtgctggagggcaacgagcagttcatcaacgccgccaagatcatcagacaccccaagtacaacagagacaccctggacaacgacatcatgctgatcaagctgagcagccccgccgtgatcaacgccagagtgagcaccatcagcctgcccaccaccccccccgccgccggcaccgagtgcctgatcagcggctggggcaacaccctgagcttcggcgccgactaccccgacgagctgaagtgcctggacgcccccgtgctgacccaggccgagtgcaaggccagctaccccggcaagatcaccaacagcatgttctgcgtgggcttcctggagggcggcaaggacagctgccagagagacagcggcggccccgtggtgtgcaacggccagctgcagggcgtggtgagctggggccacggctgcgcctggaagaacagacccggcgtgtacaccaaggtgtacaactacgtggactggatcaaggacaccatcgccgccaacagctag

SEQ ID NO: 94850 - DNA, 723 bp, synthetic construct
  misc_feature 1..723: note = Description of Artificial Sequence: Synthetic coding sequence
  source 1..723: mol_type = other DNA
atgggccccgccggcgaggtggccgtgcccttcgacgacgacgacaagatcgtgggcggctacacctgcgaggagaacagcctgccctaccaggtgagcctgaacagcggcagccacttctgcggcggcagcctgatcagcgagcagtgggtggtgagcgccgcccactgctacaagaccagaatccaggtgagactgggcgagcacaacatcaaggtgctggagggcaacgagcagttcatcaacgccgccaagatcatcagacaccccaagtacaacagagacaccctggacaacgacatcatgctgatcaagctgagcagccccgccgtgatcaacgccagagtgagcaccatcagcctgcccaccaccccccccgccgccggcaccgagtgcctgatcagcggctggggcaacaccctgagcttcggcgccgactaccccgacgagctgaagtgcctggacgcccccgtgctgacccaggccgagtgcaaggccagctaccccggcaagatcaccaacagcatgttctgcgtgggcttcctggagggcggcaaggacagctgccagagagacagcggcggccccgtggtgtgcaacggccagctgcagggcgtggtgagctggggccacggctgcgcctggaagaacagacccggcgtgtacaccaaggtgtacaactacgtggactggatcaaggacaccatcgccgccaacagctag

SEQ ID NO: 94851 - DNA, 537 bp, synthetic construct
  misc_feature 1..537: note = Description of Artificial Sequence: Synthetic coding sequence
  source 1..537: mol_type = other DNA
atgagagagaccagcggcttcaccctgaagaagggcagaagcgcccccctggtgttccacccccccgacgccctgatcgccgtgcccttcgacgacgacgacaagatcgtgggcggctacacctgcgaggagaacagcctgccctaccaggtgagcctgaacagcggcagccacttctgcggcggcagcctgatcagcgagcagtgggtggtgagcgccgcccactgctacaagaccagaatccaggtgagactgggcgagcacaacatcaaggtgctggagggcaacgagcagttcatcaacgccgccaagatcatcagacaccccaagtacaacagagacaccctggacaacgacatcatgctgatcaagctgagcagccccgccgtgatcaacgccagagtgagcaccatcagcctgcccaccaccccccccgccgccggcaccgagtgcctgatcagcggctggggcaacaccctgagcttcggcgccgactaccccgacgagctgaagtgcctggacgcccccgtgctgtag

SEQ ID NO: 94852 - DNA, 843 bp, synthetic construct
  misc_feature 1..843: note = Description of Artificial Sequence: Synthetic coding sequence
  source 1..843: mol_type = other DNA
atgagaggcgtgagctgcctgcaggtgctgctgctgctggtgctgggcgccgccggcacccagggcagaaagagcgccgcctgcggccagcccagaatgagcagcagaatcgtgggcggcagagacggcagagacggcgagtggccctggcaggccagcatccagcacagaggcgcccacgtgtgcggcggcagcctgatcgccccccagtgggtgctgaccgccgcccactgcttccccagaagagccctgcccgccgagtacagagtgagactgggcgccctgagactgggcagcaccagccccagaaccctgagcgtgcccgtgagaagagtgctgctgccccccgactacagcgaggacggcgccagaggcgacctggccctgctgcagctgagaagacccgtgcccctgagcgccagagtgcagcccgtgtgcctgcccgtgcccggcgccagacccccccccggcaccccctgcagagtgaccggctggggcagcctgagacccggcgtgcccctgcccgagtggagacccctgcagggcgtgagagtgcccctgctggacagcagaacctgcgacggcctgtaccacgtgggcgccgacgtgccccaggccgagagaatcgtgctgcccggcagcctgtgcgccggctacccccagggccacaaggacgcctgccagggcgacagcggcggccccctgacctgcctgcagagcggcagctgggtgctggtgggcgtggtgagctggggcaagggctgcgccctgcccaacagacccggcgtgtacaccagcgtggccacctacagcccctggatccaggccagagtgagcttctag

SEQ ID NO: 94853 - DNA, 1032 bp, synthetic construct
  misc_feature 1..1032: note = Description of Artificial Sequence: Synthetic coding sequence
  source 1..1032: mol_type = other DNA
atggcccagaagggcgtgctgggccccggccagctgggcgccgtggccatcctgctgtacctgggcctgctgagaagcggcaccggcgccgagggcgccgaggccccctgcggcgtggccccccaggccagaatcaccggcggcagcagcgccgtggccggccagtggccctggcaggtgagcatcacctacgagggcgtgcacgtgtgcggcggcagcctggtgagcgagcagtgggtgctgagcgccgcccactgcttccccagcgagcaccacaaggaggcctacgaggtgaagctgggcgcccaccagctggacagctacagcgaggacgccaaggtgagcaccctgaaggacatcatcccccaccccagctacctgcaggagggcagccagggcgacatcgccctgctgcagctgagcagacccatcaccttcagcagatacatcagacccatctgcctgcccgccgccaacgccagcttccccaacggcctgcactgcaccgtgaccggctggggccacgtggcccccagcgtgagcctgctgacccccaagcccctgcagcagctggaggtgcccctgatcagcagagagacctgcaactgcctgtacaacatcgacgccaagcccgaggagccccacttcgtgcaggaggacatggtgtgcgccggctacgtggagggcggcaaggacgcctgccagggcgacagcggcggccccctgagctgccccgtggagggcctgtggtacctgaccggcatcgtgagctggggcgacgcctgcggcgccagaaacagacccggcgtgtacaccctggccagcagctacgccagctggatccagagcaaggtgaccgagctgcagcccagagtggtgccccagacccaggagagccagcccgacagcaacctgtgcggcagccacctggccttcagcagcgcccccgcccagggcctgctgagacccatcctgttcctgcccctgggcctggccctgggcctgctgagcccctggctgagcgagcactag

SEQ ID NO: 94854 - DNA, 504 bp, synthetic construct
  misc_feature 1..504: note = Description of Artificial Sequence: Synthetic coding sequence
  source 1..504: mol_type = other DNA
atggcccagaagggcgtgctgggccccggccagctgggcgccgtggccatcctgctgtacctgggcctgctgagaagcggcaccggcaaggagggcgccgccgccccctgcggcgtggccccccaggccagaatcaccggcggcagcagcgccgtggccggccagtggccctggcaggtgagcatcaccttcagcagatacatcagacccatctgcctgcccgccgccaacgccagcttccccaacggcctgcactgcaccgtgaccggctggggccacgtggcccccagcgtgagcctgctgacccccaagcccctgcagcagctggaggtgcccctgatcagcagagagacctgcaactgcctgtacaacatcgacgccaagcccgaggagccccacttcgtgcaggaggacatggtgtgcgccggctacgtggagggcgccctgctgagagtgaccctgggcgcccacagccccgccctgtggagagtgagcggcacctag

SEQ ID NO: 94855 - DNA, 1197 bp, synthetic construct
  misc_feature 1..1197: note = Description of Artificial Sequence: Synthetic coding sequence
  source 1..1197: mol_type = other DNA
atggagctggaggagggcaaggccggcagcggcctgagacagtactacctgagcaagatcgaggagctgcagctgatcgtgaacgacaagagccagaacctgagaagactgcaggcccagagaaacgagctgaacgccaaggtgagactgctgagagaggagctgcagctgctgcaggagcagggcagctacgtgggcgaggtggtgagagccatggacaagaagaaggtgctggtgaaggtgcaccccgagggcaagttcgtggtggacgtggacaagaacatcgacatcaacgacgtgacccccaactgcagagtggccctgagaaacgacagctacaccctgcacaagatcctgcccaacaaggtggaccccctggtgagcctgatgatggtggagaaggtgcccgacagcacctacgagatgatcggcggcctggacaagcagatcaaggagatcaaggaggtgatcgagctgcccgtgaagcaccccgagctgttcgaggccctgggcatcgcccagcccaagggcgtgctgctgtacggcccccccggcaccggcaagaccctgctggccagagccgtggcccaccacaccgactgcaccttcatcagagtgagcggcagcgagctggtgcagaagttcatcggcgagggcgccagaatggtgagagagctgttcgtgatggccagagagcacgcccccagcatcatcttcatggacgagatcgacagcatcggcagcagcagactggagggcggcagcggcggcgacagcgaggtgcagagaaccatgctggagctgctgaaccagctggacggcttcgaggccaccaagaacatcaaggtgatcatggccaccaacagaatcgacatcctggacagcgccctgctgagacccggcagaatcgacagaaagatcgagttccccccccccaacgaggaggccagactggacatcctgaagatccacagcagaaagatgaacctgaccagaggcatcaacctgagaaagatcgccgagctgatgcccggcgccagcggcgccgaggtgaagggcgtgtgcaccgaggccggcatgtacgccctgagagagagaagagtgcacgtgacccaggaggacttcgagatggccgtggccaaggtgatgcagaaggacagcgagaagaacatgagcatcaagaagctgtggaagtag

SEQ ID NO: 94856 - DNA, 765 bp, synthetic construct
  misc_feature 1..765: note = Description of Artificial Sequence: Synthetic coding sequence
  source 1..765: mol_type = other DNA
atggccagcctgctgaaggtggaccaggaggtgaagctgaaggtggacagcttcagagagagaatcaccagcgaggccgaggacctggtggccaacttcttccccaagaagctgctggagctggacagcttcctgaaggagcccatcctgaacatccacgacctgacccagatccacagcgacatgaacctgcccgtgcccgaccccatcctgctgaccaacagccacgacggcctggacggccccacctacaagaagagaagactggacgagtgcgaggaggccttccagggcaccaaggtgttcgtgatgcccaacggcatgctgaagagcaaccagcagctggtggacatcatcgagaaggtgaagcccgagatcagactgctgatcgagaagtgcaacaccgtgaagatgtgggtgcagctgctgatccccagaatcgaggacggcaacaacttcggcgtgagcatccaggaggagaccgtggccgagctgagaaccgtggagagcgaggccgccagctacctggaccagatcagcagatactacatcaccagagccaagctggtgagcaagatcgccaagtacccccacgtggaggactacagaagaaccgtgaccgagatcgacgagaaggagtacatcagcctgagactgatcatcagcgagctgagaaaccagtacgtgaccctgcacgacatgatcctgaagaacatcgagaagatcaagagacccagaagcagcaacgccgagaccctgtactag

SEQ ID NO: 94857 - DNA, 1323 bp, synthetic construct
  misc_feature 1..1323: note = Description of Artificial Sequence: Synthetic coding sequence
  source 1..1323: mol_type = other DNA
atgggccagagccagagcggcggccacggccccggcggcggcaagaaggacgacaaggacaagaagaagaagtacgagccccccgtgcccaccagagtgggcaagaagaagaagaagaccaagggccccgacgccgccagcaagctgcccctggtgaccccccacacccagtgcagactgaagctgctgaagctggagagaatcaaggactacctgctgatggaggaggagttcatcagaaaccaggagcagatgaagcccctggaggagaagcaggaggaggagagaagcaaggtggacgacctgagaggcacccccatgagcgtgggcaccctggaggagatcatcgacgacaaccacgccatcgtgagcaccagcgtgggcagcgagcactacgtgagcatcctgagcttcgtggacaaggacctgctggagcccggctgcagcgtgctgctgaaccacaaggtgcacgccgtgatcggcgtgctgatggacgacaccgaccccctggtgaccgtgatgaaggtggagaaggccccccaggagacctacgccgacatcggcggcctggacaaccagatccaggagatcaaggagagcgtggagctgcccctgacccaccccgagtactacgaggagatgggcatcaagccccccaagggcgtgatcctgtacggcccccccggcaccggcaagaccctgctggccaaggccgtggccaaccagaccagcgccaccttcctgagagtggtgggcagcgagctgatccagaagtacctgggcgacggccccaagctggtgagagagctgttcagagtggccgaggagcacgcccccagcatcgtgttcatcgacgagatcgacgccatcggcaccaagagatacgacagcaacagcggcggcgagagagagatccagagaaccatgctggagctgctgaaccagctggacggcttcgacagcagaggcgacgtgaaggtgatcatggccaccaacagaatcgagaccctggaccccgccctgatcagacccggcagaatcgacagaaagatcgagttccccctgcccgacgagaagaccaagaagagaatcttccagatccacaccagcagaatgaccctggccgacgacgtgaccctggacgacctgatcatggccaaggacgacctgagcggcgccgacatcaaggccatctgcaccgaggccggcctgatggccctgagagagagaagaatgaaggtgaccaacgaggacttcaagaagagcaaggagaacgtgctgtacaagaagcaggagggcacccccgagggcctgtacctgtag

SEQ ID NO: 94858 - DNA, 1104 bp, synthetic construct
  misc_feature 1..1104: note = Description of Artificial Sequence: Synthetic coding sequence
  source 1..1104: mol_type = other DNA
atggaggaggagttcatcagaaaccaggagcagatgaagcccctggaggagaagcaggaggaggagagaagcaaggtggacgacctgagaggcacccccatgagcgtgggcaccctggaggagatcatcgacgacaaccacgccatcgtgagcaccagcgtgggcagcgagcactacgtgagcatcctgagcttcgtggacaaggacctgctggagcccggctgcagcgtgctgctgaaccacaaggtgcacgccgtgatcggcgtgctgatggacgacaccgaccccctggtgaccgtgatgaaggtggagaaggccccccaggagacctacgccgacatcggcggcctggacaaccagatccaggagatcaaggagagcgtggagctgcccctgacccaccccgagtactacgaggagatgggcatcaagccccccaagggcgtgatcctgtacggcccccccggcaccggcaagaccctgctggccaaggccgtggccaaccagaccagcgccaccttcctgagagtggtgggcagcgagctgatccagaagtacctgggcgacggccccaagctggtgagagagctgttcagagtggccgaggagcacgcccccagcatcgtgttcatcgacgagatcgacgccatcggcaccaagagatacgacagcaacagcggcggcgagagagagatccagagaaccatgctggagctgctgaaccagctggacggcttcgacagcagaggcgacgtgaaggtgatcatggccaccaacagaatcgagaccctggaccccgccctgatcagacccggcagaatcgacagaaagatcgagttccccctgcccgacgagaagaccaagaagagaatcttccagatccacaccagcagaatgaccctggccgacgacgtgaccctggacgacctgatcatggccaaggacgacctgagcggcgccgacatcaaggccatctgcaccgaggccggcctgatggccctgagagagagaagaatgaaggtgaccaacgaggacttcaagaagagcaaggagaacgtgctgtacaagaagcaggagggcacccccgagggcctgtacctgtag

SEQ ID NO: 94859 - DNA, 1302 bp, synthetic construct
  misc_feature 1..1302: note = Description of Artificial Sequence: Synthetic coding sequence
  source 1..1302: mol_type = other DNA
atgcccgactacctgggcgccgaccagagaaagaccaaggaggacgagaaggacgacaagcccatcagagccctggacgagggcgacatcgccctgctgaagacctacggccagagcacctacagcagacagatcaagcaggtggaggacgacatccagcagctgctgaagaagatcaacgagctgaccggcatcaaggagagcgacaccggcctggccccccccgccctgtgggacctggccgccgacaagcagaccctgcagagcgagcagcccctgcaggtggccagatgcaccaagatcatcaacgccgacagcgaggaccccaagtacatcatcaacgtgaagcagttcgccaagttcgtggtggacctgagcgaccaggtggcccccaccgacatcgaggagggcatgagagtgggcgtggacagaaacaagtaccagatccacatccccctgccccccaagatcgaccccaccgtgaccatgatgcaggtggaggagaagcccgacgtgacctacagcgacgtgggcggctgcaaggagcagatcgagaagctgagagaggtggtggagacccccctgctgcaccccgagagattcgtgaacctgggcatcgagccccccaagggcgtgctgctgttcggcccccccggcaccggcaagaccctgtgcgccagagccgtggccaacagaaccgacgcctgcttcatcagagtgatcggcagcgagctggtgcagaagtacgtgggcgagggcgccagaatggtgagagagctgttcgagatggccagaaccaagaaggcctgcctgatcttcttcgacgagatcgacgccatcggcggcgccagattcgacgacggcgccggcggcgacaacgaggtgcagagaaccatgctggagctgatcaaccagctggacggcttcgaccccagaggcaacatcaaggtgctgatggccaccaacagacccgacaccctggaccccgccctgatgagacccggcagactggacagaaagatcgagttcagcctgcccgacctggagggcagaacccacatcttcaagatccacgccagaagcatgagcgtggagagagacatcagattcgagctgctggccagactgtgccccaacagcaccggcgccgagatcagaagcgtgtgcaccgaggccggcatgttcgccatcagagccagaagaaagatcgccaccgagaaggacttcctggaggccgtgaacaaggtgatcaagagctacgccaagttcagcgccacccccagatacatgacctacaactag

SEQ ID NO: 94860 - DNA, 393 bp, synthetic construct
  misc_feature 1..393: note = Description of Artificial Sequence: Synthetic coding sequence
  source 1..393: mol_type = other DNA
atgcccgactacctgggcgccgaccagagaaagaccaaggaggacgagaaggacgacaagcccatcagagccctggacgagggcgacatcgccctgctgaagacctacggccagagcacctacagcagacagatcaagcaggtggaggacgacatccagcagctgctgaagaagatcaacgagctgaccggcatcaaggagagcgacaccggcctggccccccccgccctgtgggacctggccgccgacaagcagaccctgcagagcgagcagcccctgcaggtggccagatgcaccaagatcatcaacgccgacagcgaggaccccaagtacatcatcaacgtgaagcagttcgccaagttcgtggtggacctgagcgaccaggtggcctag

SEQ ID NO: 94861 - DNA, 1302 bp, synthetic construct; identical to SEQ ID NO: 94859
  misc_feature 1..1302: note = Description of Artificial Sequence: Synthetic coding sequence
  source 1..1302: mol_type = other DNA

SEQ ID NO: 94862 - DNA, 393 bp, synthetic construct; identical to SEQ ID NO: 94860
  misc_feature 1..393: note = Description of Artificial Sequence: Synthetic coding sequence
  source 1..393: mol_type = other DNA

SEQ ID NO: 94863 - DNA, 891 bp, synthetic construct
  misc_feature 1..891: note = Description of Artificial Sequence: Synthetic coding sequence
  source 1..891: mol_type = other DNA
atgagagtgggcgtggacagaaacaagtaccagatccacatccccctgccccccaagatcgaccccaccgtgaccatgatgcaggtggaggagaagcccgacgtgacctacagcgacgtgggcggctgcaaggagcagatcgagaagctgagagaggtggtggagacccccctgctgcaccccgagagattcgtgaacctgggcatcgagccccccaagggcgtgctgctgttcggcccccccggcaccggcaagaccctgtgcgccagagccgtggccaacagaaccgacgcctgcttcatcagagtgatcggcagcgagctggtgcagaagtacgtgggcgagggcgccagaatggtgagagagctgttcgagatggccagaaccaagaaggcctgcctgatcttcttcgacgagatcgacgccatcggcggcgccagattcgacgacggcgccggcggcgacaacgaggtgcagagaaccatgctggagctgatcaaccagctggacggcttcgaccccagaggcaacatcaaggtgctgatggccaccaacagacccgacaccctggaccccgccctgatgagacccggcagactggacagaaagatcgagttcagcctgcccgacctggagggcagaacccacatcttcaagatccacgccagaagcatgagcgtggagagagacatcagattcgagctgctggccagactgtgccccaacagcaccggcgccgagatcagaagcgtgtgcaccgaggccggcatgttcgccatcagagccagaagaaagatcgccaccgagaaggacttcctggaggccgtgaacaaggtgatcaagagctacgccaagttcagcgccacccccagatacatgacctacaactag

SEQ ID NO: 94864 - DNA, 1320 bp, synthetic construct
  misc_feature 1..1320: note = Description of Artificial Sequence: Synthetic coding sequence
  source 1..1320: mol_type = other DNA
atgaacctgctgcccaacatcgagagccccgtgaccagacaggagaagatggccaccgtgtgggacgaggccgagcaggacggcatcggcgaggaggtgctgaagatgagcaccgaggagatcatccagagaaccagactgctggacagcgagatcaagatcatgaagagcgaggtgctgagagtgacccacgagctgcaggccatgaaggacaagatcaaggagaacagcgagaagatcaaggtgaacaagaccctgccctacctggtgagcaacgtgatcgagctgctggacgtggaccccaacgaccaggaggaggacggcgccaacatcgacctggacagccagagaaagggcaagtgcgccgtgatcaagaccagcaccagacagacctacttcctgcccgtgatcggcctggtggacgccgagaagctgaagcccggcgacctggtgggcgtgaacaaggacagctacctgatcctggagaccctgcccaccgagtacgacagcagagtgaaggccatggaggtggacgagagacccaccgagcagtacagcgacatcggcggcctggacaagcagatccaggagctggtggaggccatcgtgctgcccatgaaccacaaggagaagttcgagaacctgggcatccagccccccaagggcgtgctgatgtacggcccccccggcaccggcaagaccctgctggccagagcctgcgccgcccagaccaaggccaccttcctgaagctggccggcccccagctggtgcagatgttcatcggcgacggcgccaagctggtgagagacgccttcgccctggccaaggagaaggcccccagcatcatcttcatcgacgagctggacgccatcggcaccaagagattcgacagcgagaaggccggcgacagagaggtgcagagaaccatgctggagctgctgaaccagctggacggcttccagcccaacacccaggtgaaggtgatcgccgccaccaacagagtggacatcctggaccccgccctgctgagaagcggcagactggacagaaagatcgagttccccatgcccaacgaggaggccagagccagaatcatgcagatccacagcagaaagatgaacgtgagccccgacgtgaactacgaggagctggccagatgcaccgacgacttcaacggcgcccagtgcaaggccgtgtgcgtggaggccggcatgatcgccctgagaagaggcgccaccgagctgacccacgaggactacatggagggcatcctggaggtgcaggccaagaagaaggccaacctgcagtactacgcctag

SEQ ID NO: 94865 - DNA, 1257 bp, synthetic construct
  misc_feature 1..1257: note = Description of Artificial Sequence: Synthetic coding sequence
  source 1..1257: mol_type = other DNA
atggaggagatcggcatcctggtggagaaggcccaggacgagatccccgccctgagcgtgagcagaccccagaccggcctgagcttcctgggccccgagcccgaggacctggaggacctgtacagcagatacaagaagctgcagcaggagctggagttcctggaggtgcaggaggagtacatcaaggacgagcagaagaacctgaagaaggagttcctgcacgcccaggaggaggtgaagagaatccagagcatccccctggtgatcggccagttcctggaggccgtggaccagaacaccgccatcgtgggcagcaccaccggcagcaactactacgtgagaatcctgagcaccatcgacagagagctgctgaagcccaacgccagcgtggccctgcacaagcacagcaacgccctggtggacgtgctgccccccgaggccgacagcagcatcatgatgctgaccagcgaccagaagcccgacgtgatgtacgccgacatcggcggcatggacatccagaagcaggaggtgagagaggccgtggagctgcccctgacccacttcgagctgtacaagcagatcggcatcgacccccccagaggcgtgctgatgtacggcccccccggctgcggcaagaccatgctggccaaggccgtggcccaccacaccaccgccgccttcatcagagtggtgggcagcgagttcgtgcagaagtacctgggcgagggccccagaatggtgagagacgtgttcagactggccaaggagaacgcccccgccatcatcttcatcgacgagatcgacgccatcgccaccaagagattcgacgcccagaccggcgccgacagagaggtgcagagaatcctgctggagctgctgaaccagatggacggcttcgaccagaacgtgaacgtgaaggtgatcatggccaccaacagagccgacaccctggaccccgccctgctgagacccggcagactggacagaaagatcgagttccccctgcccgacagaagacagaagagactgatcttcagcaccatcaccagcaagatgaacctgagcgaggaggtggacctggaggactacgtggccagacccgacaagatcagcggcgccgacatcaacagcatctgccaggagagcggcatgctggccgtgagagagaacagatacatcgtgctggccaaggacttcgagaaggcctacaagaccgtgatcaagaaggacgagcaggagcacgagttctacaagtag

SEQ ID NO: 94866 - DNA, 1164 bp, synthetic construct
  misc_feature 1..1164: note = Description of Artificial Sequence: Synthetic coding sequence
  source 1..1164: mol_type = other DNA
atggaggagatcggcatcctggtggagaaggcccaggacgagatccccgccctgagcgtgagcagaccccagaccggcctgagcttcctgggccccgagcccgaggacctggaggacctgtacagcagatacaaggaggaggtgaagagaatccagagcatccccctggtgatcggccagttcctggaggccgtggaccagaacaccgccatcgtgggcagcaccaccggcagcaactactacgtgagaatcctgagcaccatcgacagagagctgctgaagcccaacgccagcgtggccctgcacaagcacagcaacgccctggtggacgtgctgccccccgaggccgacagcagcatcatgatgctgaccagcgaccagaagcccgacgtgatgtacgccgacatcggcggcatggacatccagaagcaggaggtgagagaggccgtggagctgcccctgacccacttcgagctgtacaagcagatcggcatcgacccccccagaggcgtgctgatgtacggcccccccggctgcggcaagaccatgctggccaaggccgtggcccaccacaccaccgccgccttcatcagagtggtgggcagcgagttcgtgcagaagtacctgggcgagggccccagaatggtgagagacgtgttcagactggccaaggagaacgcccccgccatcatcttcatcgacgagatcgacgccatcgccaccaagagattcgacgcccagaccggcgccgacagagaggtgcagagaatcctgctggagctgctgaaccagatggacggcttcgaccagaacgtgaacgtgaaggtgatcatggccaccaacagagccgacaccctggaccccgccctgctgagacccggcagactggacagaaagatcgagttccccctgcccgacagaagacagaagagactgatcttcagcaccatcaccagcaagatgaacctgagcgaggaggtggacctggaggactacgtggccagacccgacaagatcagcggcgccgacatcaacagcatctgccaggagagcggcatgctggccgtgagagagaacagatacatcgtgctggccaaggacttcgagaaggcctacaagaccgtgatcaagaaggacgagcaggagcacgagttctacaagtag

SEQ ID NO: 94867 - DNA, 1221 bp, synthetic construct
  misc_feature 1..1221: note = Description of Artificial Sequence: Synthetic coding sequence
  source 1..1221: mol_type = other DNA
atggccctggacggccccgagcagatggagctggaggagggcaaggccggcagcggcctgagacagtactacctgagcaagatcgaggagctgcagctgatcgtgaacgacaagagccagaacctgagaagactgcaggcccagagaaacgagctgaacgccaaggtgagactgctgagagaggagctgcagctgctgcaggagcagggcagctacgtgggcgaggtggtgagagccatggacaagaagaaggtgctggtgaaggtgcaccccgagggcaagttcgtggtggacgtggacaagaacatcgacatcaacgacgtgacccccaactgcagagtggccctgagaaacgacagctacaccctgcacaagatcctgcccaacaaggtggaccccctggtgagcctgatgatggtggagaaggtgcccgacagcacctacgagatgatcggcggcctggacaagcagatcaaggagatcaaggaggtgatcgagctgcccgtgaagcaccccgagctgttcgaggccctgggcatcgcccagcccaagggcgtgctgctgtacggcccccccggcaccggcaagaccctgctggccagagccgtggcccaccacaccgactgcaccttcatcagagtgagcggcagcgagctggtgcagaagttcatcggcgagggcgccagaatggtgagagagctgttcgtgatggccagagagcacgcccccagcatcatcttcatggacgagatcgacagcatcggcagcagcagactggagggcggcagcggcggcgacagcgaggtgcagagaaccatgctggagctgctgaaccagctggacggcttcgaggccaccaagaacatcaaggtgatcatggccaccaacagaatcgacatcctggacagcgccctgctgagacccggcagaatcgacagaaagatcgagttccccccccccaacgaggaggccagactggacatcctgaagatccacagcagaaagatgaacctgaccagaggcatcaacctgagaaagatcgccgagctgatgcccggcgccagcggcgccgaggtgaagggcgtgtgcaccgaggccggcatgtacgccctgagagagagaagagtgcacgtgacccaggaggacttcgagatggccgtggccaaggtgatgcagaaggacagcgagaagaacatgagcatcaagaagctgtggaagtag

SEQ ID NO: 94868 - DNA, 1197 bp, synthetic construct; identical to SEQ ID NO: 94855
  misc_feature 1..1197: note = Description of Artificial Sequence: Synthetic coding sequence
  source 1..1197: mol_type = other DNA

SEQ ID NO: 94869 - DNA, 1212 bp, synthetic construct
  misc_feature 1..1212: note = Description of Artificial Sequence: Synthetic coding sequence
  source 1..1212: mol_type = other DNA
atggccatccccggcatcccctacgagagaagactgctgatcatggccgaccccagagacaaggccctgcaggactacagaaagaagctgctggagcacaaggagatcgacggcagactgaaggagctgagagagcagctgaaggagctgaccaagcagtacgagaagagcgagaacgacctgaaggccctgcagagcgtgggccagatcgtgggcgaggtgctgaagcagctgaccgaggagaagttcatcgtgaaggccaccaacggccccagatacgtggtgggctgcagaagacagctggacaagagcaagctgaagcccggcaccagagtggccctggacatgaccaccctgaccatcatgagatacctgcccagagaggtggaccccctggtgtacaacatgagccacgaggaccccggcaacgtgagctacagcgagatcggcggcctgagcgagcagatcagagagctgagagaggtgatcgagctgcccctgaccaaccccgagctgttccagagagtgggcatcatcccccccaagggctgcctgctgtacggcccccccggcaccggcaagaccctgctggccagagccgtggccagccagctggactgcaacttcctgaaggtggtgagcagcagcatcgtggacaagtacatcggcgagagcgccagactgatcagagagatgttcaactacgccagagaccaccagccctgcatcatcttcatggacgagatcgacgccatcggcggcagaagattcagcgagggcaccagcgccgacagagagatccagagaaccctgatggagctgctgaaccagatggacggcttcgacaccctgcacagagtgaagatgatcatggccaccaacagacccgacaccctggaccccgccctgctgagacccggcagactggacagaaagatccacatcgacctgcccaacgagcaggccagactggacatcctgaagatccacgccggccccatcaccaagcacggcgagatcgactacgaggccatcgtgaagctgagcgacggcttcaacggcgccgacctgagaaacgtgtgcaccgaggccggcatgttcgccatcagagccgaccacgacttcgtggtgcaggaggacttcatgaaggccgtgagaaaggtggccgacagcaagaagctggagagcaagctggactacaagcccgtgtag

SEQ ID NO: 94870 - DNA, 933 bp, synthetic construct
  misc_feature 1..933: note = Description of Artificial Sequence: Synthetic coding sequence
  source 1..933: mol_type = other DNA
atggacagactgctgagactgggcggcggcatgcccggcctgggccagggcccccccaccgacgcccccgccgtggacaccgccgagcaggtgtacatcagcagcctggccctgctgaagatgctgaagcacggcagagccggcgtgcccatggaggtgatgggcctgatgctgggcgagttcgtggacgactacaccgtgagagtgatcgacgtgttcgccatgccccagagcggcaccggcgtgagcgtggaggccgtggaccccgtgttccaggccaagatgctggacatgctgaagcagaccggcagacccgagatggtggtgggctggtaccacagccaccccggcttcggctgctggctgagcggcgtggacatcaacacccagcagagcttcgaggccctgagcgagagagccgtggccgtggtggtggaccccatccagagcgtgaagggcaaggtggtgatcgacgccttcagactgatcaacgccaacatgatggtgctgggccacgagcccagacagaccaccagcaacctgggccacctgaacaagcccagcatccaggccctgatccacggcctgaacagacactactacagcatcaccatcaactacagaaagaacgagctggagcagaagatgctgctgaacctgcacaagaagagctggatggagggcctgaccctgcaggactacagcgagcactgcaagcacaacgagagcgtggtgaaggagatgctggagctggccaagaactacaacaaggccgtggaggaggaggacaagatgacccccgagcagctggccatcaagaacgtgggcaagcaggaccccaagagacacctggaggagcacgtggacgtgctgatgaccagcaacatcgtgcagtgcctggccgccatgctggacaccgtggtgttcaagtag

SEQ ID NO: 94871 - DNA, 255 bp, synthetic construct
  misc_feature 1..255: note = Description of Artificial Sequence: Synthetic coding sequence
  source 1..255: mol_type = other DNA
atggacagactgctgagactgggcggcggcatgcccggcctgggccagggcccccccaccgacgcccccgccgtggacaccgccgagcaggtgtacatcagcagcctggccctgctgaagatgctgaagcacggcagagccggcgtgcccatggaggtgatgggcctgatgctgggcgagttcgtggacgactacaccgtgagagtgatcgacgtgttcgccatgccccagagcggcaccggcgtgagcgtgtag

SEQ ID NO: 94872 - DNA, 2727 bp, synthetic construct
  misc_feature 1..2727: note = Description of Artificial Sequence: Synthetic coding sequence
  source 1..2727: mol_type = other DNA
atggaggagggcggcagagacaaggcccccgtgcagccccagcagagccccgccgccgcccccggcggcaccgacgagaagcccagcggcaaggagagaagagacgccggcgacaaggacaaggagcaggagctgagcgaggaggacaagcagctgcaggacgagctggagatgctggtggagagactgggcgagaaggacaccagcctgtacagacccgccctggaggagctgagaagacagatcagaagcagcaccaccagcatgaccagcgtgcccaagcccctgaagttcctgagaccccactacggcaagctgaaggagatctacgagaacatggcccccggcgagaacaagagattcgccgccgacatcatcagcgtgctggccatgaccatgagcggcgagagagagtgcctgaagtacagactggtgggcagccaggaggagctggccagctggggccacgagtacgtgagacacctggccggcgaggtggccaaggagtggcaggagctggacgacgccgagaaggtgcagagagagcccctgctgaccctggtgaaggagatcgtgccctacaacatggcccacaacgccgagcacgaggcctgcgacctgctgatggagatcgagcaggtggacatgctggagaaggacatcgacgagaacgcctacgccaaggtgtgcctgtacctgaccagctgcgtgaactacgtgcccgagcccgagaacagcgccctgctgagatgcgccctgggcgtgttcagaaagttcagcagattccccgaggccctgagactggccctgatgctgaacgacatggagctggtggaggacatcttcaccagctgcaaggacgtggtggtgcagaagcagatggccttcatgctgggcagacacggcgtgttcctggagctgagcgaggacgtggaggagtacgaggacctgaccgagatcatgagcaacgtgcagctgaacagcaacttcctggccctggccagagagctggacatcatggagcccaaggtgcccgacgacatctacaagacccacctggagaacaacagattcggcggcagcggcagccaggtggacagcgccagaatgaacctggccagcagcttcgtgaacggcttcgtgaacgccgccttcggccaggacaagctgctgaccgacgacggcaacaagtggctgtacaagaacaaggaccacggcatgctgagcgccgccgccagcctgggcatgatcctgctgtgggacgtggacggcggcctgacccagatcgacaagtacctgtacagcagcgaggactacatcaagagcggcgccctgctggcctgcggcatcgtgaacagcggcgtgagaaacgagtgcgaccccgccctggccctgctgagcgactacgtgctgcacaacagcaacaccatgagactgggcagcatcttcggcctgggcctggcctacgccggcagcaacagagaggacgtgctgaccctgctgctgcccgtgatgggcgacagcaagagcagcatggaggtggccggcgtgaccgccctggcctgcggcatgatcgccgtgggcagctgcaacggcgacgtgaccagcaccatcctgcagaccatcatggagaagagcgagaccgagctgaaggacacctacgccagatggctgcccctgggcctgggcctgaaccacctgggcaagggcgaggccatcgaggccatcctggccgccctggaggtggtgagcgagcccttcagaagcttcgccaacaccctggtggacgtgtgcgcctacgccggcagcggcaacgtgctgaaggtgcagcagctgctgcacatctgcagcgagcacttcgacagcaaggagaaggaggaggacaaggacaagaaggagaagaaggacaaggacaagaaggaggcccccgccgacatgggcgcccaccagggcgtggccgtgctgggcatcgccctgatcgccatgggcgaggagatcggcgccgagatggccctgagaaccttcggccacctgctgagatacggcgagcccaccctgagaagagccgtgcccctggccctggccctgatcagcgtgagcaaccccagactgaacatcctggacaccctgagcaagttcagccacgacgccgaccccgaggtgagctacaacagcatcttcgccatgggcatggtgggcagcggcaccaacaacgccagactggccgccatgctgagacagctggcccagtaccacgccaaggaccccaacaacctgttcatggtgagactggcccagggcctgacccacctgggcaagggcaccctgaccctgtgcccctaccacagcgacagacagctgatgagccaggtggccgtggccggcctgctgaccgtgctggtgagcttcctggacgtgagaaacatcatcctgggcaagagccactacgtgctgtacggcctggtggccgccatgcagcccagaatgctggtgaccttcgacgaggagctgagacccctgcccgtgagcgtgagagtgggccaggccgtggacgtggtgggccaggccggcaagcccaagaccatcaccggcttccagacccacaccacccccgtgctgctggcccacggcgagagagccgagctggccaccgaggagttcctgcccgtgacccccatcctggagggcttcgtgatcctgagaaagaaccccaactacgacctgtag

SEQ ID NO: 94873 - DNA, 1743 bp, synthetic construct
  misc_feature 1..1743: note = Description of Artificial Sequence: Synthetic coding sequence
  source 1..1743: mol_type = other DNA
cagtgcaccgcccagcagcagctgctgggcctgagcagcggcgccggccaccacggcgcccagctgatgctgcagaacccccccagagagcagcaggtgtggggccagtggctgagcggcggcctgtgcccccacgagcccggcctgctgttctgcgagtggctgtgcgagtgcagcttctgggacaagctgctgaccgacgacggcaacaagtggctgtacaagaacaaggaccacggcatgctgagcgccgccgccagcctgggcatgatcctgctgtgggacgtggacggcggcctgacccagatcgacaagtacctgtacagcagcgaggactacatcaagagcggcgccctgctggcctgcggcatcgtgaacagcggcgtgagaaacgagtgcgaccccgccctggccctgctgagcgactacgtgctgcacaacagcaacaccatgagactgggcagcatcttcggcctgggcctggcctacgccggcagcaacagagaggacgtgctgaccctgctgctgcccgtgatgggcgacagcaagagcagcatggaggtggccggcgtgaccgccctggcctgcggcatgatcgccgtgggcagctgcaacggcgacgtgaccagcaccatcctgcagaccatcatggagaagagcgagaccgagctgaaggacacctacgccagatggctgcccctgggcctgggcctgaaccacctgggcaagggcgaggccatcgaggccatcctggccgccctggaggtggtgagcgagcccttcagaagcttcgccaacaccctggtggacgtgtgcgcctacgccggcagcggcaacgtgctgaaggtgcagcagctgctgcacatctgcagcgagcacttcgacagcaaggagaaggaggaggacaaggacaagaaggagaagaaggacaaggacaagaaggaggcccccgccgacatgggcgcccaccagggcgtggccgtgctgggccccctgctgctgtggggcagaagactggtgcagagatggcactacgagccctaccaccagctgagatacggcgagcccaccctgagaagagccgtgcccctggccctggccctgatcagcgtgagcaaccccagactgaacatcctggacaccctgagcaagttcagccacgacgccgaccccgaggtgagctacaacagcatcttcgccatgggcatggtgggcagcggcaccaacaacgccagactggccgccatgctgagacagctggcccagtaccacgccaaggaccccaacaacctgttcatggtgagactggcccagggcctgacccacctgggcaagggcaccctgaccctgtgcccctaccacagcgacagacagctgatgagccaggtggccgtggccggcctgctgaccgtgctggtgagcttcctggacgtgagaaacatcatcctgggcaagagccactacgtgctgtacggcctggtggccgccatgcagcccagaatgctggtgaccttcgacgaggagctgagacccctgcccgtgagcgtgagagtgggccaggccgtggacgtggtgggccaggccggcaagcccaagaccatcaccggcttccagacccacaccacccccgtgctgctggcccacggcgagagagccgagctggccaccgaggagttcctgcccgtgacccccatcctggagggcttcgtgttcggcagaacccccatcatgatcagcaagtag

SEQ ID NO: 94874 - DNA, 2703 bp, synthetic construct
  misc_feature 1..2703: note = Description of Artificial Sequence: Synthetic coding sequence
  source 1..2703: mol_type = other DNA
atggaggagggcggcagagacaaggcccccgtgcagccccagcagagccccgccgccgcccccggcggcaccgacgagaagcccagcggcaaggacaaggagcaggagctgagcgaggaggacaagcagctgcaggacgagctggagatgctggtggagagactgggcgagaaggacaccagcctgtacagacccgccctggaggagctgagaagacagatcagaagcagcaccaccagcatgaccagcgtgcccaagcccctgaagttcctgagaccccactacggcaagctgaaggagatctacgagaacatggcccccggcgagaacaagagattcgccgccgacatcatcagcgtgctggccatgaccatgagcggcgagagagagtgcctgaagtacagactggtgggcagccaggaggagctggccagctggggccacgagtacgtgagacacctggccggcgaggtggccaaggagtggcaggagctggacgacgccgagaaggtgcagagagagcccctgctgaccctggtgaaggagatcgtgccctacaacatggcccacaacgccgagcacgaggcctgcgacctgctgatggagatcgagcaggtggacatgctggagaaggacatcgacgagaacgcctacgccaaggtgtgcctgtacctgaccagctgcgtgaactacgtgcccgagcccgagaacagcgccctgctgagatgcgccctgggcgtgttcagaaagttcagcagattccccgaggccctgagactggccctgatgctgaacgacatggagctggtggaggacatcttcaccagctgcaaggacgtggtggtgcagaagcagatggccttcatgctgggcagacacggcgtgttcctggagctgagcgaggacgtggaggagtacgaggacctgaccgagatcatgagcaacgtgcagctgaacagcaacttcctggccctggccagagagctggacatcatggagcccaaggtgcccgacgacatctacaagacccacctggagaacaacagattcggcggcagcggcagccaggtggacagcgccagaatgaacctggccagcagcttcgtgaacggcttcgtgaacgccgccttcggccaggacaagctgctgaccgacgacggcaacaagtggctgtacaagaacaaggaccacggcatgctgagcgccgccgccagcctgggcatgatcctgctgtgggacgtggacggcggcctgacccagatcgacaagtacctgtacagcagcgaggactacatcaagagcggcgccctgctggcctgcggcatcgtgaacagcggcgtgagaaacgagtgcgaccccgccctggccctgctgagcgactacgtgctgcacaacagcaacaccatgagactgggcagcatcttcggcctgggcctggcctacgccggcagcaacagagaggacgtgctgaccctgctgctgcccgtgatgggcgacagcaagagcagcatggaggtggccggcgtgaccgccctggcctgcggcatgatcgccgtgggcagctgcaacggcgacgtgaccagcaccatcctgcagaccatcatggagaagagcgagaccgagctgaaggacacctacgccagatggctgcccctgggcctgggcctgaaccacctgggcaagggcgaggccatcgaggccatcctggccgccctggaggtggtgagcgagcccttcagaagcttcgccaacaccctggtggacgtgtgcgcctacgccggcagcggcaacgtgctgaaggtgcagcagctgctgcacatctgcagcgagcacttcgacagcaaggagaaggaggaggacaaggacaagaaggagaagaaggacaaggacaagaaggaggcccccgccgacatgggcgcccaccagggcgtggccgtgctgggcatcgccctgatcgccatgggcgaggagatcggcgccgagatggccctgagaaccttcggccacctgctgagatacggcgagcccaccctgagaagagccgtgcccctggccctggccctgatcagcgtgagcaaccccagactgaacatcctggacaccctgagcaagttcagccacgacgccgaccccgaggtgagctacaacagcatcttcgccatgggcatggtgggcagcggcaccaacaacgccagactggccgccatgctgagacagctggcccagtaccacgccaaggaccccaacaacctgttcatggtgagactggcccagggcctgacccacctgggcaagggcaccctgaccctgtgcccctaccacagcgacagacagctgatgagccaggtggccgtggccggcctgctgaccgtgctggtgagcttcctggacgtgagaaacatcatcctgggcaagagccactacgtgctgtacggcctggtggccgccatgcagcccagaatgctggtgaccttcgacgaggagctgagacccctgcccgtgagcgtgagagtgggccaggccgtggacgtggtgggccaggccggcaagcccaagaccatcaccggcttccagacccacaccacccccgtgctgctggcccacggcgagagagccgagctggccaccgaggagttcctgcccgtgacccccatcctggagggcttcgtgatcctgagaaagaaccccaactacgacctgtag

SEQ ID NO: 94875 - DNA, 552 bp, synthetic construct
  misc_feature 1..552: note = Description of Artificial Sequence: Synthetic coding sequence
  source 1..552: mol_type = other DNA
atggacgccagccccagccccttcagcctgcccaagaagctgaacgagctgagcgccagaagaggcagcgacgagctgctgagcagcggcatcatcaacggccccttcaccatgaacagcagcacccccagcaccgccaacggcaacgacagcaagaagttcaagagagacagacccccctgcagccccagcagagtgctgcacctgagaaagatcccctgcgacgtgaccgaggccgagatcatcagcctgggcctgcccttcggcaaggtgaccaacctgctgatgctgaagggcaagagccaggccttcctggagatggccagcgaggaggccgccgtgaccatggtgaactactacacccccatcaccccccacctgagaagccagcccgtgtacatccagtacagcaaccacagagagctgaagaccgacaacctgcccaaccaggccagagcccaggccgccctgcaggccgtgagcgccgtgcagagcggcagcctggccctgagcggcggccccagcaacgagggcaccgtgctgcccggctag

SEQ ID NO: 94876 - DNA, 474 bp, synthetic construct
  misc_feature 1..474: note = Description of Artificial Sequence: Synthetic coding sequence
  source 1..474: mol_type = other DNA
atggtgaccagcctggcctacacccaccacggcagacagtacctggcccaggagggcgtgatcgaccagatcagcaacatcatcgtgggcgccgacagcgaccccttcagcagcttctacctgcccggcttcgtgaagttcttcggcaacctggccgtgatggacagcccccagcagatctgcgagagataccccatcttcgtggagaaggtgttcgagatgatcgagagccaggaccccaccatgatcggcgtggccgtggacaccgtgggcatcctgggcagcaacgtggagggcaagcaggtgctgcagaagaccggctggtacgacctggccctgttcagagacatcctgatcttcgacagaggcagcatctgcaagttcatctgctggtgggtgaactacatcgtggagaccatcctgtgggtggccgtgctgctgaccatgaccctgtacagctgcctgaagatctag

SEQ ID NO: 94877 - DNA, 1386 bp, synthetic construct
  misc_feature 1..1386: note = Description of Artificial Sequence: Synthetic coding sequence
  source 1..1386: mol_type = other DNA
atggccgcccaggccctggccctgctgagagaggtggccagactggaggcccccctggaggagctgagagccctgcacagcgtgctgcaggccgtgcccctgaacgagctgagacagcaggccgccgagctgagactgggccccctgttcagcctgctgaacgagaaccacagagagaagaccaccctgtgcgtgagcatcctggagagactgctgcaggccatggagcccgtgcacgtggccagaaacctgagagtggacctgcagagaggcctgatccaccccgacgacagcgtgaagatcctgaccctgagccagatcggcagaatcgtggagaacagcgacgccgtgaccgagatcctgaacaacgccgagctgctgaagcagatcgtgtactgcatcggcggcgagaacctgagcgtggccaaggccctgatcatcgagatcagcagcgtgagccccgagagcctgaactactgcaccaccagcggcctggtgacccagctgctgagagagctgaccggcgaggacgtgctggtgagagccacctgcatcgagatggtgaccagcctggcctacacccaccacggcagacagtacctggcccaggagggcgtgatcgaccagatcagcaacatcatcgtgggcgccgacagcgaccccttcagcagcttctacctgcccggcttcgtgaagttcttcggcaacctggccgtgatggacagcccccagcagatctgcgagagataccccatcttcgtggagaaggtgttcgagatgatcgagagccaggaccccaccatgatcggcgtggccgtggacaccgtgggcatcctgggcagcaacgtggagggcaagcaggtgctgcagaagaccggcaccagattcgagagactgctgatgagaatcggccaccagagcaagaacgcccccgtggagctgaagatcagatgcctggacgccatcagcagcctgctgtacctgccccccgagcagcagaccgacgacctgctgagaatgaccgagagctggttcagcagcctgagcagagaccccctggagctgttcagaggcatcagcagccagcccttccccgagctgcactgcgccgccctgaaggtgttcaccgccatcgccaaccagccctgggcccagaagctgatgttcaacagccccggcttcgtggagtacgtggtggacagaagcgtggagcacgacaaggccagcaaggacgccaagtacgagctggtgaaggccctggccaacagcaagaccatcgccgagatcttcggcaaccccaactacctgagactgagaacctacctgagcgagggcccctactacgtgaagcccgtgagcaccaccgccgtggagggcgccgagtag

SEQ ID NO: 94878 - DNA, 294 bp, synthetic construct
  misc_feature 1..294: note = Description of Artificial Sequence: Synthetic coding sequence
  source 1..294: mol_type = other DNA
atgagaatcggccaccagagcaagaacgcccccgtggagctgaagatcagatgcctggacgccatcagcagcctgctgtacctgccccccgagcagcagaccgacgacctgctgagaatgaccgagagctggttcagcagcctgagcagagaccccctggagctgttcagaggcatcagcagccagcccttccccgagctgcactgcgccgccctgaaggtgttcaccggcagaaagcacctgcacctggaggagctggtgggcggcaaccaggtgaagaacaccgtggagtag

SEQ ID NO: 94879 - DNA, 510 bp, synthetic construct
  misc_feature 1..510: note = Description of Artificial Sequence: Synthetic coding sequence
  source 1..510: mol_type = other DNA
atgatctgcctggtgctgaccatcttcgccaacctgttccccgccgcctgcaccggcgcccacgagagaaccttcctggccgtgaagcccgacggcgtgcagagaagactggtgggcgagatcgtgagaagattcgagagaaagggcttcaagctggtggccctgaagctggtgcaggccagcgaggagctgctgagagagcactacgccgagctgagagagagacccttctacggcagactggtgaagtacatggccagcggccccgtggtggccatggtgtggcagggcctggacgtggtgagaaccagcagagccctgatcggcgccaccaaccccgccgacgccccccccggcaccatcagaggcgacttctgcatcgaggtgggcaagaacctgatccacggcagcgacagcgtggagagcgccagaagagagatcgccctgtggttcagagccgacgagctgctgtgctgggaggacagcgccggccactggctgtacgagtag

SEQ ID NO: 94880 - DNA, 744 bp, synthetic construct
  misc_feature 1..744: note = Description of Artificial Sequence: Synthetic coding sequence
  source 1..744: mol_type = other DNA
atgtacggcatgttcaagaaggtgaacgccagagagagaatcgtgggctggtaccacaccggccccaagctgcacaagaacgacatcgccatcaacgagctgatgaagagatactgccccaacagcgtgctggtgatcatcgacgtgaagcccaaggacctgggcctgcccaccgaggcctacatcagcgtggaggaggtgcacgacgacggcacccccaccagcaagaccttcgagcacgtgaccagcgagatcggcgccgaggaggccgaggaggtgggcgtggagcacctgctgagagacatcaaggacaccaccgtgggcaccctgagccagagaatcaccaaccaggtgcacggcctgaagggcctgaacagcaagctgctggacatcagaagctacctggagaaggtggccaccggcaagctgcccatcaaccaccagatcatctaccagctgcaggacgtgttcaacctgctgcccgacgtgagcctgcaggagttcgtgaaggccttctacctgaagaccaacgaccagatggtggtggtgtacctggccagcctgatcagaagcgtggtggccctgcacaacctgatcaacaacaagatcgccaacagagacgccgagaagaaggagggccaggagaaggaggagagcaagaaggacagaaaggaggacaaggagaaggacaaggacaaggagaagagcgacgtgaagaaggaggagaagaaggagaagaagtag

SEQ ID NO: 94881 - DNA, 624 bp, synthetic construct
  misc_feature 1..624: note = Description of Artificial Sequence: Synthetic coding sequence
  source 1..624: mol_type = other DNA
atgagcgacgaggaggccagacagagcggcggcagcagccaggccggcgtggtgaccgtgagcgacgtgcaggagctgatgagaagaaaggaggagatcgaggcccagatcaaggccaactacgacgtgctggagagccagaagggcatcggcatgaacgagcccctggtggactgcgagggctaccccagaagcgacgtggacctgtaccaggtgagaaccgccagacacaacatcatctgcctgcagaacgaccacaaggccgtgatgaagcaggtggaggaggccctgcaccagctgcacgccagagacaaggagaagcaggccagagacatggccgaggcccacaaggaggccatgagcagaaagctgggccagagcgagagccagggcccccccagagccttcgccaaggtgaacagcatcagccccggcagccccgccagcatcgccggcctgcaggtggacgacgagatcgtggagttcggcagcgtgaacacccagaacttccagagcctgcacaacatcggcagcgtggtgcagcacagcgagggcgccctggcccccaccatcctgctgagcgtgagcatgaacctgaccacccccggcaccagcagcagatag

SEQ ID NO: 94882 - DNA, 672 bp, synthetic construct
  misc_feature 1..672: note = Description of Artificial Sequence: Synthetic coding sequence
  source 1..672: mol_type = other DNA
atgagcgacgaggaggccagacagagcggcggcagcagccaggccggcgtggtgaccgtgagcgacgtgcaggagctgatgagaagaaaggaggagatcgaggcccagatcaaggccaactacgacgtgctggagagccagaagggcatcggcatgaacgagcccctggtggactgcgagggctaccccagaagcgacgtggacctgtaccaggtgagaaccgccagacacaacatcatctgcctgcagaacgaccacaaggccgtgatgaagcaggtggaggaggccctgcaccagctgcacgccagagacaaggagaagcaggccagagacatggccgaggcccacaaggaggccatgagcagaaagctgggccagagcgagagccagggcccccccagagccttcgccaaggtgaacagcatcagccccggcagccccgccagcatcgccggcctgcaggtggacgacgagatcgtggagttcggcagcgtgaacacccagaacttccagagcctgcacaacatcggcagcgtggtgcagcacagcgagggcaagcccctgaacgtgaccgtgatcagaagaggcgagaagcaccagctgagactggtgcccaccagatgggccggcaagggcctgctgggctgcaacatcatccccctgcagagatag

SEQ ID NO: 94883 - DNA, 411 bp, synthetic construct
  misc_feature 1..411: note = Description of Artificial Sequence: Synthetic coding sequence
  source 1..411: mol_type = other DNA
atgctgctgaagctgaaggagaaggccagcctgaccctggccgtgggcaccctgcccttccccagccagttcaacttcgtgccccccggcagaatgtgcagagtggccggctggggcagaaccggcgtgctgaagcccggcagcgacaccctgcaggaggtgaagctgagactgatggacccccaggcctgcagccacttcagagacttcgaccacaacctgcagctgtgcgtgggcaaccccagaaagaccaagagcgccttcaagggcgacagcggcggccccctgctgtgcgccggcgtggcccagggcatcgtgagctacggcagaagcgacgccaagccccccgccgtgttcaccagaatcagccactacagaccctggatcaaccagatcctgcaggccaactag

SEQ ID NO: 94884 - DNA, 753 bp, synthetic construct
  misc_feature 1..753: note = Description of Artificial Sequence: Synthetic coding sequence
  source 1..753: mol_type = other DNA
atggccatgctgagagtgcagcccgaggcccaggccaaggtggacgtgttcagagaggacctgtgcaccaagaccgagaacctgctgggcagctacttccccaagaagatcagcgagctggacgccttcctgaaggagcccgccctgaacgaggccaacctgagcaacctgaaggcccccctggacatccccgtgcccgaccccgtgaaggagaaggagaaggaggagagaaagaagcagcaggagaaggaggacaaggacgagaagaagaagggcgaggacgaggacaagggccccccctgcggccccgtgaactgcaacgagaagatcgtggtgctgctgcagagactgaagcccgagatcaaggacgtgatcgagcagctgaacctggtgaccacctggctgcagctgcagatccccagaatcgaggacggcaacaacttcggcgtggccgtgcaggagaaggtgttcgagctgatgaccagcctgcacaccaagctggagggcttccacacccagatcagcaagtacttcagcgagagaggcgacgccgtgaccaaggccgccaagcagccccacgtgggcgactacagacagctggtgcacgagctggacgaggccgagtacagagacatcagactgatggtgatggagatcagaaacgcctacgtgagaagacagggccagggcagaggcggccagagacagctgagccaggccacccacagcctgaccctgcaggccagaggctag

SEQ ID NO: 94885 - DNA, 627 bp, synthetic construct
  misc_feature 1..627: note = Description of Artificial Sequence: Synthetic coding sequence
  source 1..627: mol_type = other DNA
atgggcgaggtggagatcagcgccctggcctacgtgaagatgtgcctgcacgccgccagatacccccacgccgccgtgaacggcctgttcctggcccccgcccccagaagcggcgagtgcctgtgcctgaccgactgcgtgcccctgttccacagccacctggccctgagcgtgatgctggaggtggccctgaaccaggtggacgtgtggggcgcccaggccggcctggtggtggccggctactaccacgccaacgccgccgtgaacgaccagagccccggccccctggccctgaagatcgccggcagaatcgccgagttcttccccgacgccgtgctgatcatgctggacaaccagaagctggtgccccagcccagagtgccccccgtgatcgtgctggagaaccagggcctgagatgggtgcccaaggacaagaacctggtgatgtggagagactgggaggagagcagacagatggtgggcgccctgctggaggacagagcccaccagcacctggtggacttcgactgccacctggacgacatcagacaggactggaccaaccagagactgaacacccagatcacccagtgggtgggccccaccaacggcaacggcaacgcctag

SEQ ID NO: 94886 - DNA, 804 bp, synthetic construct
  misc_feature 1..804: note = Description of Artificial Sequence: Synthetic coding sequence
  source 1..804: mol_type = other DNA
atggccagcctgctgaaggtggaccaggaggtgaagctgaaggtggacagcttcagagagagaatcaccagcgaggccgaggacctggtggccaacttcttccccaagaagctgctggagctggacagcttcctgaaggagcccatcctgaacatccacgacctgacccagatccacagcgacatgaacctgcccgtgcccgaccccatcctgctgaccaacagccacgacggcctggacggccccacctacaagaagagaagactggacgagtgcgaggaggccttccagggcaccaaggtgttcgtgatgcccaacggcatgctgaagagcaaccagcagctggtggacatcatcgagaaggtgaagcccgagatcagactgctgatcgagaagtgcaacacccccagcggcaagggcccccacatctgcttcgacctgcaggtgaagatgtgggtgcagctgctgatccccagaatcgaggacggcaacaacttcggcgtgagcatccaggaggagaccgtggccgagctgagaaccgtggagagcgaggccgccagctacctggaccagatcagcagatactacatcaccagagccaagctggtgagcaagatcgccaagtacccccacgtggaggactacagaagaaccgtgaccgagatcgacgagaaggagtacatcagcctgagactgatcatcagcgagctgagaaaccagtacgtgaccctgcacgacatgatcctgaagaacatcgagaagatcaagagacccagaagcagcaacgccgagaccctgtactag

SEQ ID NO: 94887 - DNA, 765 bp, synthetic construct; identical to SEQ ID NO: 94856
  misc_feature 1..765: note = Description of Artificial Sequence: Synthetic coding sequence
  source 1..765: mol_type = other DNA

SEQ ID NO: 94888 - DNA, 48 bp, synthetic construct
  misc_feature 1..48: note = Description of Artificial Sequence: Synthetic coding sequence
  source 1..48: mol_type = other DNA
atggccagcctgctgaaggtggaccaggaggtgaagctgaagctgtag

SEQ ID NO: 94889 - DNA, 393 bp, synthetic construct
  misc_feature 1..393: note = Description of Artificial Sequence: Synthetic coding sequence
  source 1..393: mol_type = other DNA
atggccagcctgctgaaggtggaccaggaggtgaagctgaaggtggacagcttcagagagagaatcaccagcgaggccgaggacctggtggccaacttcttccccaagaagctgctggagctggacagcttcctgaaggagcccatcctgaacatccacgacctgacccagatccacagcgacatgaacctgcccgtgcccgaccccatcctgctgaccaacagccacgacggcctggacggccccacctacaagaagagaagactggacgagtgcgaggaggccttccagggccagaacgtgggcaccgcccccgacagccaggacagaagatggaagcagctgtggggcgtgcacagcggcggcaacagctgcagagccaagaactgctag

SEQ ID NO: 94890 - DNA, 582 bp, synthetic construct
  misc_feature 1..582: note = Description of Artificial Sequence: Synthetic coding sequence
  source 1..582: mol_type = other DNA
atgaacctgcccgtgcccgaccccatcctgctgaccaacagccacgacggcctggacggccccacctacaagaagagaagactggacgagtgcgaggaggccttccagggcaccaaggtgttcgtgatgcccaacggcatgctgaagagcaaccagcagctggtggacatcatcgagaaggtgaagcccgagatcagactgctgatcgagaagtgcaacaccgtgaagatgtgggtgcagctgctgatccccagaatcgaggacggcaacaacttcggcgtgagcatccaggaggagaccgtggccgagctgagaaccgtggagagcgaggccgccagctacctggaccagatcagcagatactacatcaccagagccaagctggtgagcaagatcgccaagtacccccacgtggaggactacagaagaaccgtgaccgagatcgacgagaaggagtacatcagcctgagactgatcatcagcgagctgagaaaccagtacgtgaccctgcacgacatgatcctgaagaacatcgagaagatcaagagacccagaagcagcaacgccgagaccctgtactag

SEQ ID NO: 94891 - DNA, 5532 bp, synthetic construct
  misc_feature 1..5532: note = Description of Artificial Sequence: Synthetic coding sequence
  source 1..5532: mol_type = other DNA
atggagcccgccgagagagccggcgtgggcgagccccccgagcccggcggcagacccgagcccggccccagaggcttcgtgccccagaaggagatcgtgtacaacaagctgctgccctacgccgagagactggacgccgagagcgacctgcagctggcccagatcaagtgcaacctgggcagagccgtgcagctgcaggagctgtggcccggcggcctgttctggaccagaaagctgagcacctacatcagactgtacggcagaaagttcagcaaggaggaccacgtgctgttcatcaagctgctgtacgagctggtgagcatccccaagctggagatcagcatgatgcagggcttcgccagactgctgatcaacctgctgaagaagaaggagctgctgagcagagccgacctggagctgccctggagacccctgtacgacatggtggagagaatcctgtacagcaagaccgagcacctgggcctgaactggttccccaacagcgtggagaacatcctgaagaccctggtgaagagctgcagaccctacttccccgccgacgccaccgccgagatgctggaggagtggagacccctgatgtgccccttcgacgtgaccatgcagaaggccatcacctacttcgagatcttcctgcccaccagcctgccccccgagctgcaccacaagggcttcaagctgtggttcgacgagctgatcggcctgtgggtgagcgtgcagaacctgccccagtgggagggccagctggtgaacctgttcgccagactggccaccgacaacatcggctacatcgactgggacccctacgtgcccaagatcttcaccagaatcctgagaagcctgaacctgcccgtgggcagcagccaggtgctggtgcccagattcctgaccaacgcctacgacatcggccacgccgtgatctggatcaccgccatgatgggcggccccagcaagctggtgcagaagcacctggccggcctgttcaacagcatcaccagcttctaccaccccagcaacaacggcagatggctgaacaagctgatgaagctgctgcagagactgcccaacagcgtggtgagaagactgcacagagagagatacaagaagcccagctggctgacccccgtgcccgacagccacaagctgaccgaccaggacgtgaccgacttcgtgcagtgcatcatccagcccgtgctgctggccatgttcagcaagaccggcagcctggaggccgcccaggccctgcagaacctggccctgatgagacccgagctggtgatcccccccgtgctggagagaacctaccccgccctggagaccctgaccgagccccaccagctgaccgccaccctgagctgcgtgatcggcgtggccagaagcctggtgagcggcggcagatggttccccgagggccccacccacatgctgcccctgctgatgagagccctgcccggcgtggaccccaacgacttcagcaagtgcatgatcaccttccagttcatcgccaccttcagcaccctggtgcccctggtggactgcagcagcgtgctgcaggagagaaacgacctgaccgaggtggagagagagctgtgcagcgccaccgccgagttcgaggacttcgtgctgcagttcatggacagatgcttcggcctgatcgagagcagcaccctggagcagaccagagaggagaccgagaccgagaagatgacccacctggagagcctggtggagctgggcctgagcagcaccttcagcaccatcctgacccagtgcagcaaggagatcttcatggtggccctgcagaaggtgttcaacttcagcaccagccacatcttcgagaccagagtggccggcagaatggtggccgacatgtgcagagccgccgtgaagtgctgccccgaggagagcctgaagctgttcgtgccccactgctgcagcgtgatcacccagctgaccatgaacgacgacgtgctgaacgacgaggagctggacaaggagctgctgtggaacctgcagctgctgagcgagatcaccagagtggacggcagaaagctgctgctgtacagagagcagctggtgaagatcctgcagagaaccctgcacctgacctgcaagcagggctacaccctgagctgcaacctgctgcaccacctgctgagaagcaccaccctgatctaccccaccgagtactgcagcgtgcccggcggcttcgacaagccccccagcgagtacttccccatcaaggactggggcaagcccggcgacctgtggaacctgggcatccagtggcacgtgcccagcagcgaggaggtgagcttcgccttctacctgctggacagcttcctgcagcccgagctggtgaagctgcagcactgcggcgacggcaagctggagatgagcagagacgacatcctgcagagcctgaccatcgtgcacaactgcctgatcggcagcggcaacctgctgccccccctgaagggcgagcccgtgaccaacctggtgcccagcatggtgagcctggaggagaccaagctgtacaccggcctggagtacgacctgagcagagagaaccacagagaggtgatcgccaccgtgatcagaaagctgctgaaccacatcctggacaacagcgaggacgacaccaagagcctgttcctgatcatcaagatcatcggcgacctgctgcagttccagggcagccacaagcacgagttcgacagcagatggaagagcttcaacctggtgaagaagagcatggagaacagactgcacggcaagaagcagcacatcagagccctgctgatcgacagagtgatgctgcagcacgagctgagaaccctgaccgtggagggctgcgagtacaagaagatccaccaggacatgatcagagacctgctgagactgagcaccagcagctacagccaggtgagaaacaaggcccagcagaccttcttcgccgccctgggcgcctacaacttctgctgcagagacatcatccccctggtgctggagttcctgagacccgacagacagggcgtgacccagcagcagttcaagggcgccctgtactgcctgctgggcaaccacagcggcgtgtgcctggccaacctgcacgactgggactgcatcgtgcagacctggcccgccatcgtgagcagcggcctgagccaggccatgagcctggagaagcccagcatcgtgagactgttcgacgacctggccgagaagatccacagacagtacgagaccatcggcctggacttcaccatccccaagagctgcgtggagatcgccgagctgctgcagcagagcaagaaccccagcatcaaccagatcctgctgagccccgagaagatcaaggagggcatcaagagacagcaggagaagaacgccgacgccctgagaaactacgagaacctggtggacaccctgctggacggcgtggagcagagaaacctgccctggaagttcgagcacatcggcatcggcctgctgagcctgctgctgagagacgacagagtgctgcccctgagagccatcagattcttcgtggagaacctgaaccacgacgccatcgtggtgagaaagatggccatcagcgccgtggccggcatcctgaagcagctgaagagaacccacaagaagctgaccatcaacccctgcgagatcagcggctgccccaagcccacccagatcatcgccggcgacagacccgacaaccactggctgcactacgacagcaagaccatccccagaaccaagaaggagtgggagagcagctgcttcgtggagaagacccactggggctactacacctggcccaagaacatggtggtgtacgccggcgtggaggagcagcccaagctgggcagaagcagagaggacatgaccgaggccgagcagatcatcttcgaccacttcagcgaccccaagttcgtggagcagctgatcaccttcctgagcctggaggacagaaagggcaaggacaagttcaaccccagaagattctgcctgttcaagggcatcttcagaaacttcgacgacgccttcctgcccgtgctgaagccccacctggagcacctggtggccgacagccacgagagcacccagagatgcgtggccgagatcatcgccggcctgatcagaggcagcaagcactggaccttcgagaaggtggagaagctgtgggagctgctgtgccccctgctgagaaccgccctgagcaacatcaccgtggagacctacaacgactggggcgcctgcatcgccaccagctgcgagagcagagaccccagaaagctgcactggctgttcgagctgctgctggagagccccctgagcggcgagggcggcagcttcgtggacgcctgcagactgtacgtgctgcagggcggcctggcccagcaggagtggagagtgcccgagctgctgcacagactgctgaagtacctggagcccaagctgacccaggtgtacaagaacgtgagagagagaatcggcagcgtgctgacctacatcttcatgatcgacgtgagcctgcccaacaccacccccaccatcagcccccacgtgcccgagttcaccgccagaatcctggagaagctgaagcccctgatggacgtggacgaggagatccagaaccacgtgatggaggagaacggcatcggcgaggaggacgagagaacccagggcatcaagctgctgaagaccatcctgaagtggctgatggccagcgccggcagaagcttcagcaccgccgtgaccgagcagctgcagctgctgcccctgttcttcaagatcgcccccgtggagaacgacaacagctacgacgagctgaagagagacgccaagctgtgcctgagcctgatgagccagggcctgctgtacccccaccaggtgcccctggtgctgcaggtgctgaagcagaccgccagaagcagcagctggcacgccagatacaccgtgctgacctacctgcagaccatggtgttctacaacctgttcatcttcctgaacaacgaggacgccgtgaaggacatcagatggctggtgatcagcctgctggaggacgagcagctggaggtgagagagatggccgccaccaccctgagcggcctgctgcagtgcaacttcctgaccatggacagccccatgcagatccacttcgagcagctgtgcaagaccaagctgcccaagaagagaaagagagaccccggcagcgtgggcgacaccatccccagcgccgagctggtgaagagacacgccggcgtgctgggcctgggcgcctgcgtgctgagcagcccctacgacgtgcccacctggatgccccagctgctgatgaacctgagcgcccacctgaacgacccccagcccatcgagatgaccgtgaagaagaccctgagcaacttcagaagaacccaccacgacaactggcaggagcacaagcagcagttcaccgacgaccagctgctggtgctgaccgacctgctggtgagcccctgctactacgcctag

SEQ ID NO: 94892 - DNA, 2964 bp, synthetic construct
  misc_feature 1..2964: note = Description of Artificial Sequence: Synthetic coding sequence
  source 1..2964: mol_type = other DNA
atgggcgagaacctggccaagaagatcatgttcttcctgctgaccatcaagctgatcctgaaccacatcctggacaacagcgaggacgacaccaagagcctgttcctgatcatcaagatcatcggcgacctgctgcagttccagggcagccacaagcacgagttcgacagcagatggaagagcttcaacctggtgaagaagagcatggagaacagactgcacggcaagaagcagcacatcagagccctgctgatcgacagagtgatgctgcagcacgagctgagaaccctgaccgtggagggctgcgagtacaagaagatccaccaggacatgatcagagacctgctgagactgagcaccagcagctacagccaggtgagaaacaaggcccagcagaccttcttcgccgccctgggcgcctacaacttctgctgcagagacatcatccccctggtgctggagttcctgagacccgacagacagggcgtgacccagcagcagttcaagggcgccctgtactgcctgctgggcaaccacagcggcgtgtgcctggccaacctgcacgactgggactgcatcgtgcagacctggcccgccatcgtgagcagcggcctgagccaggccatgagcctggagaagcccagcatcgtgagactgttcgacgacctggccgagaagatccacagacagtacgagaccatcggcctggacttcaccatccccaagagctgcgtggagatcgccgagctgctgcagcagagcaagaaccccagcatcaaccagatcctgctgagccccgagaagatcaaggagggcatcaagagacagcaggagaagaacgccgacgccctgagaaactacgagaacctggtggacaccctgctggacggcgtggagcagagaaacctgccctggaagttcgagcacatcggcatcggcctgctgagcctgctgctgagagacgacagagtgctgcccctgagagccatcagattcttcgtggagaacctgaaccacgacgccatcgtggtgagaaagatggccatcagcgccgtggccggcatcctgaagcagctgaagagaacccacaagaagctgaccatcaacccctgcgagatcagcggctgccccaagcccacccagatcatcgccggcgacagacccgacaaccactggctgcactacgacagcaagaccatccccagaaccaagaaggagtgggagagcagctgcttcgtggagaagacccactggggctactacacctggcccaagaacatggtggtgtacgccggcgtggaggagcagcccaagctgggcagaagcagagaggacatgaccgaggccgagcagatcatcttcgaccacttcagcgaccccaagttcgtggagcagctgatcaccttcctgagcctggaggacagaaagggcaaggacaagttcaaccccagaagattctgcctgttcaagggcatcttcagaaacttcgacgacgccttcctgcccgtgctgaagccccacctggagcacctggtggccgacagccacgagagcacccagagatgcgtggccgagatcatcgccggcctgatcagaggcagcaagcactggaccttcgagaaggtggagaagctgtgggagctgctgtgccccctgctgagaaccgccctgagcaacatcaccgtggagacctacaacgactggggcgcctgcatcgccaccagctgcgagagcagagaccccagaaagctgcactggctgttcgagctgctgctggagagccccctgagcggcgagggcggcagcttcgtggacgcctgcagactgtacgtgctgcagggcggcctggcccagcaggagtggagagtgcccgagctgctgcacagactgctgaagtacctggagcccaagctgacccaggtgtacaagaacgtgagagagagaatcggcagcgtgctgacctacatcttcatgatcgacgtgagcctgcccaacaccacccccaccatcagcccccacgtgcccgagttcaccgccagaatcctggagaagctgaagcccctgatggacgtggacgaggagatccagaaccacgtgatggaggagaacggcatcggcgaggaggacgagagaacccagggcatcaagctgctgaagaccatcctgaagtggctgatggccagcgccggcagaagcttcagcaccgccgtgaccgagcagctgcagctgctgcccctgttcttcaagatcgcccccgtggagaacgacaacagctacgacgagctgaagagagacgccaagctgtgcctgagcctgatgagccagggcctgctgtacccccaccaggtgcccctggtgctgcaggtgctgaagcagaccgccagaagcagcagctggcacgccagatacaccgtgctgacctacctgcagaccatggtgttctacaacctgttcatcttcctgaacaacgaggacgccgtgaaggacatcagatggctggtgatcagcctgctggaggacgagcagctggaggtgagagagatggccgccaccaccctgagcggcctgctgcagtgcaacttcctgaccatggacagccccatgcagatccacttcgagcagctgtgcaagaccaagctgcccaagaagagaaagagagaccccggcagcgtgggcgacaccatccccagcgccgagctggtgaagagacacgccggcgtgctgggcctgggcgcctgcgtgctgagcagcccctacgacgtgcccacctggatgccccagctgctgatgaacctgagcgcccacctgaacgacccccagcccatcgagatgaccgtgaagaagaccctgagcaacttcagaagaacccaccacgacaactggcaggagcacaagcagcagttcaccgacgaccagctgctggtgctgaccgacctgctggtgagcccctgctactacgcctag

SEQ ID NO: 94893 - DNA, 867 bp, synthetic construct
  misc_feature 1..867: note = Description of Artificial Sequence: Synthetic coding sequence
  source 1..867: mol_type = other DNA
atggccgccaccttcttcggcgaggtggtgaaggccccctgcagagccggcaccgaggacgaggaggaggaggaggagggcagaagagagacccccgaggacagagaggtgagactgcagctggccagaaagagagaggtgagactgctgagaagacagaccaagaccagcctggaggtgagcctgctggagaagtacccctgcagcaagttcatcatcgccatcggcaacaacgccgtggccttcctgagcagcttcgtgatgaacagcggcgtgtgggaggaggtgggctgcgccaagctgtggaacgagtggtgcagaaccaccgacaccacccacctgagcagcaccgaggccttctgcgtgttctaccacctgaagagcaaccccagcgtgttcctgtgccagtgcagctgctacgtggccgaggaccagcagtaccagtggctggagaaggtgttcggcagctgccccagaaagaacatgcagatcaccatcctgacctgcagacacgtgaccgactacaagaccagcgagagcaccggcagcctgcccagccccttcctgagagccctgaagacccagaacttcaaggacagcgcctgctgccccctgctggagcagcccaacatcgtgcacgacctgcccgccgccgtgctgagctactgccaggtgtggaagatccccgccatcctgtacctgtgctacaccgacgtgatgaagctggacctgatcaccgtggaggccttcaagcccatcctgagcaccagaagcctgaagggcctggtgaagaacatcccccagagcaccgagatcctgaagaagctgatgaccaccaacgagatccagagcaacatctacacctag

SEQ ID NO: 94894 - DNA, 804 bp, synthetic construct
  misc_feature 1..804: note = Description of Artificial Sequence: Synthetic coding sequence
  source 1..804: mol_type = other DNA
atggccgccaccttcttcggcgaggtggtgaaggccccctgcagagccggcaccgaggacgaggaggaggaggaggagggcagaagagagacccccgaggacagagaggtgagactgcagctggccagaaagagagaggtgagactgctgagaagacagaccaagaccagcctggaggtgagcctgctggagaagtacccctgcagcaagttcatcatcgccatcggcaacaacgccgtggccttcctgagcagcttcgtgatgaacagcggcgtgtgggaggaggtgggctgcgccaagctgtggaacgagtggtgcagaaccaccgacaccacccacctgagcagcaccgaggccttctgcgtgttctaccacctgaagagcaaccccagcgtgttcggcagctgccccagaaagaacatgcagatcaccatcctgacctgcagacacgtgaccgactacaagaccagcgagagcaccggcagcctgcccagccccttcctgagagccctgaagacccagaacttcaaggacagcgcctgctgccccctgctggagcagcccaacatcgtgcacgacctgcccgccgccgtgctgagctactgccaggtgtggaagatccccgccatcctgtacctgtgctacaccgacgtgatgaagctggacctgatcaccgtggaggccttcaagcccatcctgagcaccagaagcctgaagggcctggtgaagaacatcccccagagcaccgagatcctgaagaagctgatgaccaccaacgagatccagagcaacatctacacctag

SEQ ID NO: 94895 - DNA, 795 bp, synthetic construct
  misc_feature 1..795: note = Description of Artificial Sequence: Synthetic coding sequence
  source 1..795: mol_type = other DNA
atgttcgtgccctgcggcgagagcgcccccgacctggccggcttcaccctgctgatgcccgccgtgagcgtgggcaacgtgggccagctggccatggacctgatcatcagcaccctgaacatgagcaagatcggctacttctacaccgactgcctggtgcccatggtgggcaacaacccctacgccaccaccgagggcaacagcaccgagctgagcatcaacgccgaggtgtacagcctgcccagcagaaagctggtggccctgcagctgagaagcatcttcatcaagtacaagagcaagcccttctgcgagaagctgctgagctgggtgaagagcagcggctgcgccagagtgatcgtgctgagcagcagccacagctaccagagaaacgacctgcagctgagaagcacccccttcagatacctgctgacccccagcatgcagaagagcgtgcagaacaagatcaagagcctgaactgggaggagatggagaagagcagatgcatccccgagatcgacgacagcgagttctgcatcagaatccccggcggcggcatcaccaagaccctgtacgacgagagctgcagcaaggagatccagatggccgtgctgctgaagttcgtgagcgagggcgacaacatccccgacgccctgggcctggtggagtacctgaacgagtggctgcagatcctgaagcccctgagcgacgaccccaccgtgagcgccagcagatggaagatccccagcagctggagactgctgttcggcagcggcctgccccccgccctgttctag

SEQ ID NO: 94896 - DNA, 459 bp, synthetic construct
  misc_feature 1..459: note = Description of Artificial Sequence: Synthetic coding sequence
  source 1..459: mol_type = other DNA
atgcccgccgtgagcgtgggcaacgtgggccagctggccatggacctgatcatcagcaccctgaacatgagcaagatcggctacttctacaccgactgcctggtgcccatggtgggcaacaacccctacgccaccaccgagggcaacagcaccgagctgagcatcaacgccgaggtgtacagcctgcccagcagaaagctggtggccctgcagctgagaagcatcttcatcaagtacaagagcaagcccttctgcgagaagctgctgagctgggtgaagagcagcggctgcgccagagtgatcgtgctgagcagcagccacagctaccagagaaacgacctgcagctgagaagcacccccttcagatacctgctgacccccagcatgcagaagagcgtgcagaacaagatcaagagcctgaactgggaggagatggagaagggcgccttcctgaagtag

SEQ ID NO: 94897 - DNA, 792 bp, synthetic construct
  misc_feature 1..792: note = Description of Artificial Sequence: Synthetic coding sequence
  source 1..792: mol_type = other DNA
atgttcagaaaccagtacgacaacgacgtgaccgtgtggagcccccagggcagaatccaccagatcgagtacgccatggaggccgtgaagcagggcagcgccaccgtgggcctgaagagcaagacccacgccgtgctggtggccctgaagagagcccagagcgagctggccgcccaccagaagaagatcctgcacgtggacaaccacatcggcatcagcatcgccggcctgaccgccgacgccagactgctgtgcaacttcatgagacaggagtgcctggacagcagattcgtgttcgacagacccctgcccgtgagcagactggtgagcctgatcggcagcaagacccagatccccacccagagatacggcagaagaccctacggcgtgggcctgctgatcgccggctacgacgacatgggcccccacatcttccagacctgccccagcgccaactacttcgactgcagagccatgagcatcggcgccagaagccagagcgccagaacctacctggagagacacatgagcgagttcatggagtgcaacctgaacgagctggtgaagcacggcctgagagccctgagagagaccctgcccgccgagcaggacctgaccaccaagaacgtgagcatcggcatcgtgggcaaggacctggagttcaccatctacgacgacgacgacgtgagccccttcctggagggcctggaggagagaccccagagaaaggcccagcccgcccagcccgccgacgagcccgccgagaaggccgacgagcccatggagcactag

SEQ ID NO: 94898 - DNA, 792 bp, synthetic construct; identical to SEQ ID NO: 94897
  misc_feature 1..792: note = Description of Artificial Sequence: Synthetic coding sequence
  source 1..792: mol_type = other DNA

SEQ ID NO: 94899 - DNA, 810 bp, synthetic construct
  misc_feature 1..810: note = Description of Artificial Sequence: Synthetic coding sequence
  source 1..810: mol_type = other DNA
atgcagctgagcaaggtgaagttcagaaaccagtacgacaacgacgtgaccgtgtggagcccccagggcagaatccaccagatcgagtacgccatggaggccgtgaagcagggcagcgccaccgtgggcctgaagagcaagacccacgccgtgctggtggccctgaagagagcccagagcgagctggccgcccaccagaagaagatcctgcacgtggacaaccacatcggcatcagcatcgccggcctgaccgccgacgccagactgctgtgcaacttcatgagacaggagtgcctggacagcagattcgtgttcgacagacccctgcccgtgagcagactggtgagcctgatcggcagcaagacccagatccccacccagagatacggcagaagaccctacggcgtgggcctgctgatcgccggctacgacgacatgggcccccacatcttccagacctgccccagcgccaactacttcgactgcagagccatgagcatcggcgccagaagccagagcgccagaacctacctggagagacacatgagcgagttcatggagtgcaacctgaacgagctggtgaagcacggcctgagagccctgagagagaccctgcccgccgagcaggacctgaccaccaagaacgtgagcatcggcatcgtgggcaaggacctggagttcaccatctacgacgacgacgacgtgagccccttcctggagggcctggaggagagaccccagagaaaggcccagcccgcccagcccgccgacgagcccgccgagaaggccgacgagcccatggagcactag

SEQ ID NO: 94900 - DNA, 495 bp, synthetic construct
  misc_feature 1..495: note = Description of Artificial Sequence: Synthetic coding sequence
  source 1..495: mol_type = other DNA
atgttcagaaaccagtacgacaacgacgtgaccgtgtggagcccccagggcagaatccaccagatcgagtacgccatggaggccgtgaagcagggcagcgccaccgtgggcctgaagagcaagacccacgccgtgctggtggccctgaagagagcccagagcgagctggccgcccaccagaagaagatcctgcacgtggacaaccacatcggcatcagcatcgccggcctgaccgccgacgccagactgctgtgcaacttcatgagacaggagtgcctggacagcagattcgtgttcgacagacccctgcccgtgagcagactggtgagcctgatcggcagcagcatcctgttcatgatctgggccctgaccttcagcaagcccgtgcacctgctgaccatcctgaccgccgagccctgccccctggagcccgtgcccaaccagctggtgctgacctggagagacatctgcctgaacctgtggagcgtgatctag

SEQ ID NO: 94901 - DNA, 1014 bp, synthetic construct
  misc_feature 1..1014: note = Description of Artificial Sequence: Synthetic coding sequence
  source 1..1014: mol_type = other DNA
atggaccagaacgagcacagccactggggcccccacgccaagggccagtgcgccagcagaagcgagctgagaatcatcctggtgggcaagaccggcaccggcaagagcgccgccggcaacagcatcctgagaaagcaggccttcgagagcaagctgggcagccagaccctgaccaagacctgcagcaagagccagggcagctggggcaacagagagatcgtgatcatcgacacccccgacatgttcagctggaaggaccactgcgaggccctgtacaaggaggtgcagagatgctacctgctgagcgcccccggcccccacgtgctgctgctggtgacccagctgggcagatacaccagccaggaccagcaggccgcccagagagtgaaggagatcttcggcgaggacgccatgggccacaccatcgtgctgttcacccacaaggaggacctgaacggcggcagcctgatggactacatgcacgacagcgacaacaaggccctgagcaagctggtggccgcctgcggcggcagaatctgcgccttcaacaacagagccgagggcagcaaccaggacgaccaggtgaaggagctgatggactgcatcgaggacctgctgatggagaagaacggcgaccactacaccaacggcctgtacagcctgatccagagaagcaagtgcggccccgtgggcagcgacgagagagtgaaggagttcaagcagagcctgatcaagtacatggagacccagagaagctacaccgccctggccgaggccaactgcctgaagggcgccctgatcaagacccagctgtgcgtgctgttctgcatccagctgttcctgagactgatcatcctgtggctgtgcatcctgcacagcatgtgcaacctgttctgctgcctgctgttcagcatgtgcaacctgttctgcagcctgctgttcatcatccccaagaagctgatgatcttcctgagaaccgtgatcagactggagagaaagacccccagactgtag

SEQ ID NO: 94902 - DNA, 300 bp, synthetic construct
  misc_feature 1..300: note = Description of Artificial Sequence: Synthetic coding sequence
  source 1..300: mol_type = other DNA
atgggccccgactacagagtgctggtgcacagagccagaaagctggcccagcagtactacctggtgtaccaggagcccatccccaccgcccagctggtgcagagagtggccagcgtgatgcaggagtacacccagagcggcggcgtgagacccttcggcgtgagcctgctgatctgcggctggaacgagggcagaccctacctgttccagagcgaccccagcggcgcctacttcgcctggaaggccaccgccatgggcaagaactacgtgaacggcaagaccttcctggagaagagatag

SEQ ID NO: 94903 - DNA, 465 bp, synthetic construct
  misc_feature 1..465: note = Description of Artificial Sequence: Synthetic coding sequence
  source 1..465: mol_type = other DNA
atgctgtactgcgaggccgagagcccccccaccgtggagaaggtgaagcccgccagagagaacagcgagaccgacctggagatcgagggcgagcacggccacctgggcgccgtgagagccgccagcccccagaagctggagaagagcggcttccaggagctgagcagccacagcttccccgagagcgccctgagaatggcctgcggcggcaacgtggccgagagacccgccagattctgcctggagagcagcagcggcctggccggcgagagcagctgcagcttccccagactgagccccgccagcggcgccgtgcccagcagaagactggtgaagagcggcatcaacacccagaccagattcagcaacctgctgaacgtgagcacctggggcatcctgtgcaacctgtgcaacagccccagaagcttccccaagaagggcagcaccgagagagagcacctgtag

SEQ ID NO: 94904 - DNA, 747 bp, synthetic construct
  misc_feature 1..747: note = Description of Artificial Sequence: Synthetic coding sequence
  source 1..747: mol_type = other DNA
atgagcagcatcggcaccggctacgacctgagcgccagcaccttcagccccgacggcagagtgttccaggtggagtacgccatgaaggccgtggagaacagcagcaccgccatcggcatcagatgcaaggacggcgtggtgttcggcgtggagaagctggtgctgagcaagctgtacgaggagggcagcaacaagagactgttcaacgtggacagacacgtgggcatggccgtggccggcctgctggccgacgccagaagcctggccgacatcgccagagaggaggccagcaacttcagaagcaacttcggctacaacatccccctgaagcacctggccgacagagtggccatgtacgtgcacgcctacaccctgtacagcgccgtgagacccttcggctgcagcgtgaacgacggcgcccagctgtacatgatcgaccccagcggcgtgagctacggctactggggctgcgccatcggcaaggccagacaggccgccaagaccgagatcgagaagctgcagatgaaggagatgacctgcagagacatcgtgaaggaggtggccaagatcatctacatcgtgcacgacgaggtgaaggacaaggccttcgagctggagctgagctgggtgggcgagctgaccaacggcagacacgagatcgtgcccaaggacatcagagaggaggccgagaagtacgccaaggagagcctgaaggaggaggacgagagcgacgacgacaacatgtag

SEQ ID NO: 94905 - DNA, 786 bp, synthetic construct
  misc_feature 1..786: note = Description of Artificial Sequence: Synthetic coding sequence
  source 1..786: mol_type = other DNA
atgagcagaagatacgacagcagaaccaccatcttcagccccgagggcagactgtaccaggtggagtacgccatggaggccatcggccacgccggcacctgcctgggcatcctggccaacgacggcgtgctgctggccgccgagagaagaaacatccacaagctgctggacgaggtgttcttcagcgagaagatctacaagctgaacgaggacatggcctgcagcgtggccggcatcaccagcgacgccaacgtgctgaccaacgagctgagactgatcgcccagagatacctgctgcagtaccaggagcccatcccctgcgagcagctggtgaccgccctgtgcgacatcaagcaggcctacacccagttcggcggcaagagacccttcggcgtgagcctgctgtacatcggctgggacaagcactacggcttccagctgtaccagagcgaccccagcggcaactacggcggctggaaggccacctgcatcggcaacaacagcgccgccgccgtgagcatgctgaagcaggactacaaggagggcgagatgaccctgaagagcgccctggccctggccatcaaggtgctgaacaagaccatggacgtgagcaagctgagcgccgagaaggtggagatcgccaccctgaccagagagaacggcaagaccgtgatcagagtgctgaagcagaaggaggtggagcagctgatcaagaagcacgaggaggaggaggccaaggccgagagagagaagaaggagaaggagcagaaggagaaggacaagtag

SEQ ID NO: 94906 - DNA, 573 bp, synthetic construct
  misc_feature 1..573: note = Description of Artificial Sequence: Synthetic coding sequence
  source 1..573: mol_type = other DNA
atggcctgcagcgtggccggcatcaccagcgacgccaacgtgctgaccaacgagctgagactgatcgcccagagatacctgctgcagtaccaggagcccatcccctgcgagcagctggtgaccgccctgtgcgacatcaagcaggcctacacccagttcggcggcaagagacccttcggcgtgagcctgctgtacatcggctgggacaagcactacggcttccagctgtaccagagcgaccccagcggcaactacggcggctggaaggccacctgcatcggcaacaacagcgccgccgccgtgagcatgctgaagcaggactacaaggagggcgagatgaccctgaagagcgccctggccctggccatcaaggtgctgaacaagaccatggacgtgagcaagctgagcgccgagaaggtggagatcgccaccctgaccagagagaacggcaagaccgtgatcagagtgctgaagcagaaggaggtggagcagctgatcaagaagcacgaggaggaggaggccaaggccgagagagagaagaaggagaaggagcagaaggagaaggacaagtag

SEQ ID NO: 94907 - DNA, 786 bp, synthetic construct; identical to SEQ ID NO: 94905
  misc_feature 1..786: note = Description of Artificial Sequence: Synthetic coding sequence
  source 1..786: mol_type = other DNA

SEQ ID NO: 94908 - DNA, 666 bp, synthetic construct
  misc_feature 1..666: note = Description of Artificial Sequence: Synthetic coding sequence
  source 1..666: mol_type = other DNA
atgagcagaagatacgacagcagaaccaccatcttcagccccgagggcagactgtaccaggtggagtacgccatggaggccatcggccacgccggcacctgcctgggcatcctggccaacgacggcgtgctgctggccgccgagagaagaaacatccacaagctgctggacgaggtgttcttcagcgagaagatctacaagctgaacgaggacatggcctgcagcgtggccggcatcaccagcgacgccaacgtgctgaccaacgagctgagactgatcgcccagagatacctgctgcagtaccaggagcccatcccctgcgagcagctggtgaccgccctgtgcgacatcaagcaggcctacacccagttcggcggcaagagacccttcggcgtgagcctgctgtacatcggctgggacaagcactacggcttccagctgtaccagagcgaccccagcggcaactacggcggctggaaggccacctgcatcggcaacaacagcgccgccgccgtgagcatgctgaagcaggactacaaggagggcgagatgaccctgaagagcgccctggccctggccatcaaggtgctgaacaagaccatggacgtgagcaagctgagcgccgagaaggtggagatcgccaccctgaccagagagaacggctag

SEQ ID NO: 94909 - DNA, 630 bp, synthetic construct
  misc_feature 1..630: note = Description of Artificial Sequence: Synthetic coding sequence
  source 1..630: mol_type = other DNA
atgagcagaagatacgacagcagaaccaccatcttcagccccgagggcagactgtaccaggtggagtacgccatggaggccatcggccacgccggcacctgcctgggcatcctggccaacgacggcgtgctgctggccgccgagagaagaaacatccacaagctgctggacgaggtgttcttcagcgagaagatctacaagctgaacgaggacatggcctgcagcgtggccggcatcaccagcgacgccaacgtgctgaccaacgagctgagactgatcgcccagagatacctgctgcagtaccaggagcccatcccctgcgagcagctggtgaccgccctgtgcgacatcaagcaggcctacacccagttcggcggcaagagacccttcggcgtgagcctgctgtacatcggctgggacaagcactacggcttccagctgtaccagagcgaccccagcggcaactacggcggctggaaggccacctgcatcggcaacaacagcgccgccgccgtgagcatgctgaagcaggactacaaggagggcgagatgaccctgaagagcgccctggccctggccatcaaggtgctgaacaagaccatggacgtgagcaagctgagcgccgagtag

SEQ ID NO: 94910 - DNA, 693 bp, synthetic construct
  misc_feature 1..693: note = Description of Artificial Sequence: Synthetic coding sequence
  source 1..693: mol_type = other DNA
atgagcagaagatacgacagcagaaccaccatcttcagccccgaggccgagagaagaaacatccacaagctgctggacgaggtgttcttcagcgagaagatctacaagctgaacgaggacatggcctgcagcgtggccggcatcaccagcgacgccaacgtgctgaccaacgagctgagactgatcgcccagagatacctgctgcagtaccaggagcccatcccctgcgagcagctggtgaccgccctgtgcgacatcaagcaggcctacacccagttcggcggcaagagacccttcggcgtgagcctgctgtacatcggctgggacaagcactacggcttccagctgtaccagagcgaccccagcggcaactacggcggctggaaggccacctgcatcggcaacaacagcgccgccgccgtgagcatgctgaagcaggactacaaggagggcgagatgaccctgaagagcgccctggccctggccatcaaggtgctgaacaagaccatggacgtgagcaagctgagcgccgagaaggtggagatcgccaccctgaccagagagaacggcaagaccgtgatcagagtgctgaagcagaaggaggtggagcagctgatcaagaagcacgaggaggaggaggccaaggccgagagagagaagaaggagaaggagcagaaggagaaggacaagtag

SEQ ID NO: 94911 - DNA, 711 bp, synthetic construct
  misc_feature 1..711: note = Description of Artificial Sequence: Synthetic coding sequence
  source 1..711: mol_type = other DNA
atgagcagaagatacgacagcagaaccaccatcttcagccccgagggcagactgtaccaggtggagtacgccatggaggccatcggccacgccggcacctgcctgggcatcctggccaacgacggcgtgctgctggccgccgagagaagaaacatccacaagctgctggacgaggtgttcttcagcgagaagatctacaagctgaacgaggacatggcctgcagcgtggccggcatcaccagcgacgccaacgtgctgaccaacgagctgagactgatcgcccagagatacctgctgcagtaccaggagcccatcccctgcgagcagctggtgaccgccctgtgcgacatcaagcaggcctacacccagttcggcggcaagagacccttcggcgtgagcctgctgtacatcggctgggacaagcactacggcttccagctgtaccagagcgaccccagcggcaactacggcggctggaaggccacctgcatcggcaacaacagcgccgccgccgtgagcatgctgaagcaggactacaaggagggcgagatgaccctgaagagcgccctggccctggccatcaaggtgctgaacaagaccatggacgtgagcaagctgagcgccgagaaggtggagatcgccaccctgaccagagagaacggcaagaccgtgatcagagtgctgaagcagaaggaggtggagcagctgtag

SEQ ID NO: 94912 - DNA, 726 bp, synthetic construct
  misc_feature 1..726: note = Description of Artificial Sequence: Synthetic coding sequence
  source 1..726: mol_type = other DNA
atgttcctgaccagaagcgagtacgacagaggcgtgaacaccttcagccccgagggcagactgttccaggtggagtacgccatcgaggccatcaagctgggcagcaccgccatcggcatccagaccagcgagggcgtgtgcctggccgtggagaagagaatcaccagccccctgatggagcccagcagcatcgagaagatcgtggagatcgacgcccacatcggctgcgccatgagcggcctgatcgccgacgccaagaccctgatcgacaaggccagagtggagacccagaaccactggttcacctacaacgagaccatgaccgtggagagcgtgacccaggccgtgagcaacctggccctgcagttcggcgaggaggacgccgaccccggcgccatgagcagacccttcggcgtggccctgctgttcggcggcgtggacgagaagggcccccagctgttccacatggaccccagcggcaccttcgtgcagtgcgacgccagagccatcggcagcgccagcgagggcgcccagagcagcctgcaggaggtgtaccacaagagcatgaccctgaaggaggccatcaagagcagcctgatcatcctgaagcaggtgatggaggagaagctgaacgccaccaacatcgagctggccaccgtgcagcccggccagaacttccacatgttcaccaaggaggagctggaggaggtgatcaaggacatctag

SEQ ID NO: 94913 - DNA, 552 bp, synthetic construct
  misc_feature 1..552: note = Description of Artificial Sequence: Synthetic coding sequence
  source 1..552: mol_type = other DNA
atggagcccagcagcatcgagaagatcgtggagatcgacgcccacatcggctgcgccatgagcggcctgatcgccgacgccaagaccctgatcgacaaggccagagtggagacccagaaccactggttcacctacaacgagaccatgaccgtggagagcgtgacccaggccgtgagcaacctggccctgcagttcggcgaggaggacgccgaccccggcgccatgagcagacccttcggcgtggccctgctgttcggcggcgtggacgagaagggcccccagctgttccacatggaccccagcggcaccttcgtgcagtgcgacgccagagccatcggcagcgccagcgagggcgcccagagcagcctgcaggaggtgtaccacaagagcatgaccctgaaggaggccatcaagagcagcctgatcatcctgaagcaggtgatggaggagaagctgaacgccaccaacatcgagctggccaccgtgcagcccggccagaacttccacatgttcaccaaggaggagctggaggaggtgatcaaggacatctag

SEQ ID NO: 94914 - DNA, 741 bp, synthetic construct
  misc_feature 1..741: note = Description of Artificial Sequence: Synthetic coding sequence
  source 1..741: mol_type = other DNA
atgagcagaggcagcagcgccggcttcgacagacacatcaccatcttcagccccgagggcagactgtaccaggtggagtacgccttcaaggccatcaaccagggcggcctgaccagcgtggccgtgagaggcaaggactgcgccgtgatcgtgacccagaagaaggtgcccgacaagctgctggacagcagcaccgtgacccacctgttcaagatcaccgagaacatcggctgcgtgatgaccggcatgaccgccgacagcagaagccaggtgcagagagccagatacgaggccgccaactggaagtacaagtacggctacgagatccccgtggacatgctgtgcaagagaatcgccgacatcagccaggtgtacacccagaacgccgagatgagacccctgggctgctgcatgatcctgatcggcatcgacgaggagcagggcccccaggtgtacaagtgcgaccccgccggctactactgcggcttcaaggccaccgccgccggcgtgaagcagaccgagagcaccagcttcctggagaagaaggtgaagaagaagttcgactggaccttcgagcagaccgtggagaccgccatcacctgcctgagcaccgtgctgagcatcgacttcaagcccagcgagatcgaggtgggcgtggtgaccgtggagaaccccaagttcagaatcctgaccgaggccgagatcgacgcccacctggtggccctggccgagagagactag

SEQ ID NO: 94915 - DNA, 684 bp, synthetic construct
  misc_feature 1..684: note = Description of Artificial Sequence: Synthetic coding sequence
  source 1..684: mol_type = other DNA
atggccggcctgagaagagagtacgccttcaaggccatcaaccagggcggcctgaccagcgtggccgtgagaggcaaggactgcgccgtgatcgtgacccagaagaaggtgcccgacaagctgctggacagcagcaccgtgacccacctgttcaagatcaccgagaacatcggctgcgtgatgaccggcatgaccgccgacagcagaagccaggtgcagagagccagatacgaggccgccaactggaagtacaagtacggctacgagatccccgtggacatgctgtgcaagagaatcgccgacatcagccaggtgtacacccagaacgccgagatgagacccctgggctgctgcatgatcctgatcggcatcgacgaggagcagggcccccaggtgtacaagtgcgaccccgccggctactactgcggcttcaaggccaccgccgccggcgtgaagcagaccgagagcaccagcttcctggagaagaaggtgaagaagaagttcgactggaccttcgagcagaccgtggagaccgccatcacctgcctgagcaccgtgctgagcatcgacttcaagcccagcgagatcgaggtgggcgtggtgaccgtggagaaccccaagttcagaatcctgaccgaggccgagatcgacgcccacctggtggccctggccgagagagactag

SEQ ID NO: 94916 - DNA, 759 bp, synthetic construct
  misc_feature 1..759: note = Description of Artificial Sequence: Synthetic coding sequence
  source 1..759: mol_type = other DNA
atgagcagaggcagcagcgccggcttcgacagacacatcaccatcttcagccccgagggcagactgtaccaggtggagtacgccttcaaggccatcaaccagggcggcctgaccagcgtggccgtgagaggcaaggactgcgccgtgatcgtgacccagaagaaggtgcccgacaagctgctggacagcagcaccgtgacccacctgttcaagatcaccgagaacatcggctgcgtgatgaccggcatgaccgccgacagcagaagccaggtgcagagagccagatacgaggccgccaactggaagtacaagtacggctacgagatccccgtggacatgctgtgcaagagaatcgccgacatcagccaggtgtacacccagaacgccgagatgagacccctgggctgctggagcttcctgttcctgggcatgatcctgatcggcatcgacgaggagcagggcccccaggtgtacaagtgcgaccccgccggctactactgcggcttcaaggccaccgccgccggcgtgaagcagaccgagagcaccagcttcctggagaagaaggtgaagaagaagttcgactggaccttcgagcagaccgtggagaccgccatcacctgcctgagcaccgtgctgagcatcgacttcaagcccagcgagatcgaggtgggcgtggtgaccgtggagaaccccaagttcagaatcctgaccgaggccgagatcgacgcccacctggtggccctggccgagagagactag

SEQ ID NO: 94917 - DNA, 324 bp, synthetic construct
  misc_feature 1..324: note = Description of Artificial Sequence: Synthetic coding sequence
  source 1..324: mol_type = other DNA
atgagcagaggcagcagcgccggcttcgacagacacatcaccatcttcagccccgagggcagactgtaccaggtggagtacgccttcaaggccatcaaccagggcggcctgaccagcgtggccgtgagaggcaaggactgcgccgtgatcgtgacccagaagaaggtgcccgacaagctgctggacagcagcaccgtgacccacctgttcaagatcaccgagaacatcggctgcgtgatgaccggcatgaccgtgagcctgtgcagacccggctgcagcgccagctgggtgcaggccatcctggtgccccagccccccagatag

SEQ ID NO: 94918 - DNA, 447 bp, synthetic construct
  misc_feature 1..447: note = Description of Artificial Sequence: Synthetic coding sequence
  source 1..447: mol_type = other DNA
atgagcagaggcagcagcgccggcttcgacagacacatcaccatcttcagccccgagggcagactgtaccaggtggagtacgccttcaaggccatcaaccagggcggcctgaccagcgtggccgtgagaggcaaggactgcgccgtgatcgtgacccagaagaaggtgcccgacaagctgctggacagcagcaccgtgacccacctgttcaagatcaccgagaacatcggctgcgtgatgaccggcatgaccgccgacagcagaagccaggtgcagagagccagatacgaggccgccaactggaagtacaagtacggctacgagatccccgtggacatgctgtgcaagagaatcgccgacatcagccaggtgtacacccagaacgccgagatgagacccctgggctgctactgcaactacatgcccgtgtactgcagcatcaactag

SEQ ID NO: 94919 - DNA, 504 bp, synthetic construct
  misc_feature 1..504: note = Description of Artificial Sequence: Synthetic coding sequence
  source 1..504: mol_type = other DNA
atgaccggcatgaccgccgacagcagaagccaggtgcagagagccagatacgaggccgccaactggaagtacaagtacggctacgagatccccgtggacatgctgtgcaagagaatcgccgacatcagccaggtgtacacccagaacgccgagatgagacccctgggctgctgcatgatcctgatcggcatcgacgaggagcagggcccccaggtgtacaagtgcgaccccgccggctactactgcggcttcaaggccaccgccgccggcgtgaagcagaccgagagcaccagcttcctggagaagaaggtgaagaagaagttcgactggaccttcgagcagaccgtggagaccgccatcacctgcctgagcaccgtgctgagcatcgacttcaagcccagcgagatcgaggtgggcgtggtgaccgtggagaaccccaagttcagaatcctgaccgaggccgagatcgacgcccacctggtggccctggccgagagagactag

SEQ ID NO: 94920 - DNA, 612 bp, synthetic construct
  misc_feature 1..612: note = Description of Artificial Sequence: Synthetic coding sequence
  source 1..612: mol_type = other DNA
atgagcagaggcagcagcgccggcttcgacagacacatcaccatcttcagccccgagggcagactgtaccaggtggagtacgccttcaaggccatcaaccagggcggcctgaccagcgtggccgtgagaggcaaggactgcgccgtgatcgtgacccagaagaaggtgcccgacaagctgctggacagcagcaccgtgacccacctgttcaagatcaccgagaacatcggctgcgtgatgaccggcatgaccgccgacagcagaagccaggtgcagagagccagatacgaggccgccaactggaagtacaagtacggctacgagatccccgtggacatgctgtgcaagagaatcgccgacatcagccaggtgtacacccagaacgccgagatgagacccctgggctgctgcatgatcctgatcggcatcgacgaggagcagggcccccaggtgtacaagtgcgaccccgccggctactactgcggcttcaaggccaccgccgccggcgtgaagcagaccgagagcaccagcttcctggagaagaaggtgaagaagaagttcgactggaccttcgagcagaccgtggaggacagctacagaagcagagactag

SEQ ID NO: 94921 - DNA, 450 bp, synthetic construct
  misc_feature 1..450: note = Description of Artificial Sequence: Synthetic coding sequence
  source 1..450: mol_type = other DNA
atgagctacgacagagccatcaccgtgttcagccccgacggccacctgttccaggtggagtacgcccaggaggccgtgaagaagggcagcaccgccgtgggcgtgagaggcagagacatcgtggtgctgggcgtggagaagaagagcgtggccaagctgcaggacgagagaaccgtgagaaagatctgcgccctggacgacaacgtgtgcatggccttcgccggcctgaccgccgacgccagaatcgtgatcaacagagccagagtggagtgccagagccacagactgaccgtggaggaccccgtgaccgtggagtacatcaccagatacatcgccagcctgaagcaggtgggcgcctgccccctggcctgcagccccctggccgccggccagagcagactgagacacggcggcagctgccacgtgaccagcggcgagagcgagaactag

SEQ ID NO: 94922 - DNA, 537 bp, synthetic construct
  misc_feature 1..537: note = Description of Artificial Sequence: Synthetic coding sequence
  source 1..537: mol_type = other DNA
atggccttcgccggcctgaccgccgacgccagaatcgtgatcaacagagccagagtggagtgccagagccacagactgaccgtggaggaccccgtgaccgtggagtacatcaccagatacatcgccagcctgaagcagagatacacccagagcaacggcagaagacccttcggcatcagcgccctgatcgtgggcttcgacttcgacggcacccccagactgtaccagaccgaccccagcggcacctaccacgcctggaaggccaacgccatcggcagaggcgccaagagcgtgagagagttcctggagaagaactacaccgacgaggccatcgagaccgacgacctgaccatcaagctggtgatcaaggccctgctggaggtggtgcagagcggcggcaagaacatcgagctggccgtgatgagaagagaccagagcctgaagatcctgaaccccgaggagatcgagaagtacgtggccgagatcgagaaggagaaggaggagaacgagaagaagaagcagaagaaggccagctag

SEQ ID NO: 94923 - DNA, 747 bp, synthetic construct
  misc_feature 1..747: note = Description of Artificial Sequence: Synthetic coding sequence
  source 1..747: mol_type = other DNA
atgagctacgacagagccatcaccgtgttcagccccgacggccacctgttccaggtggagtacgcccaggaggccgtgaagaagggcagcaccgccgtgggcgtgagaggcagagacatcgtggtgctgggcgtggagaagaagagcgtggccaagctgcaggacgagagaaccgtgagaaagatctgcgccctggacgacaacgtgtgcatggccttcgccggcctgaccgccgacgccagaatcgtgatcaacagagccagagtggagtgccagagccacagactgaccgtggaggaccccgtgaccgtggagtacatcaccagatacatcgccagcctgaagcagagatacacccagagcaacggcagaagacccttcggcatcagcgccctgatcgtgggcttcgacttcgacggcacccccagactgtaccagaccgaccccagcggcacctaccacgcctggaaggccaacgccatcggcagaggcgccaagagcgtgagagagttcctggagaagaactacaccgacgaggccatcgagaccgacgacctgaccatcaagctggtgatcaaggccctgctggaggtggtgcagagcggcggcaagaacatcgagctggccgtgatgagaagagaccagagcctgaagatcctgaaccccgaggagatcgagaagtacgtggccgagatcgagaaggagaaggaggagaacgagaagaagaagcagaagaaggccagctag

SEQ ID NO: 94924 - DNA, 564 bp, synthetic construct
  misc_feature 1..564: note = Description of Artificial Sequence: Synthetic coding sequence
  source 1..564: mol_type = other DNA
tgactgaccgccgacgccagaatcgtgatcaacagagccagagtggagtgccagagccacagactgaccgtggaggaccccgtgaccgtggagtacatcaccagatacatcgccagcctgaagcagagatacacccagagcaacggcagaagacccttcggcatcagcgccctgatcgtgggcttcgacttcgacggcacccccagactgtaccagaccgaccccagcggcacctaccacgcctggaaggccaacgccatcggcagaggcgccaagagcgtgagagagttcctggagaagaactacaccgacgaggccatcgagaccgacgacctgaccatcaagctggtgatcaaggccctgctggagggcaaggtggtgaacgcccccgtgttctgccccttcaaggtggtgcagagcggcggcaagaacatcgagctggccgtgatgagaagagaccagagcctgaagatcctgaaccccgaggagatcgagaagtacgtggccgagatcgagaaggagaaggaggagaacgagaagaagaagcagaagaaggccagctag

SEQ ID NO: 94925 - DNA, 726 bp, synthetic construct
  misc_feature 1..726: note = Description of Artificial Sequence: Synthetic coding sequence
  source 1..726: mol_type = other DNA
atgctgagcagcaccgccatgtacagcgcccccggcagagacctgggcatggagccccacagagccgccggccccctgcagctgagattcagcccctacgtgttcaacggcggcaccatcctggccatcgccggcgaggacttcgccatcgtggccagcgacaccagactgagcgagggcttcagcatccacaccagagacagccccaagtgctacaagctgaccgacaagaccgtgatcggctgcagcggcttccacggcgactgcctgaccctgaccaagatcatcgaggccagactgaagatgtacaagcacagcaacaacaaggccatgaccaccggcgccatcgccgccatgctgagcaccatcctgtacagcagaagattcttcccctactacgtgtacaacatcatcggcggcctggacgaggagggcaagggcgccgtgtacagcttcgaccccgtgggcagctaccagagagacagcttcaaggccggcggcagcgccagcgccatgctgcagcccctgctggacaaccaggtgggcttcaagaacatgcagaacgtggagcacgtgcccctgagcctggacagagccatgagactggtgaaggacgtgttcatcagcgccgccgagagagacgtgtacaccggcgacgccctgagaatctgcatcgtgaccaaggagggcatcagagaggagaccgtgagcctgagaaaggactag

SEQ ID NO: 94926 - DNA, 591 bp, synthetic construct
  misc_feature 1..591: note = Description of Artificial Sequence: Synthetic coding sequence
  source 1..591: mol_type = other DNA
agaagaagcagagccatgctgagcagcaccgccatgtacagcgcccccggcagagacctgggcatggagccccacagagccgccggccccctgcagctgagattcagcccctacgtgttcaacggcggcaccatcctggccatcgccggcgaggacttcgccatcgtggccagcgacaccagactgagcgagggcttcagcatccacaccagagacagccccaagtgctacaagctgaccgacaagaccgtgatcggctgcagcggcttccacggcgactgcctgaccctgaccaagatcatcgaggccagactgaagatgtacaagcacagcaacaacaaggccatgaccaccggcgccatcgccgccatgctgagcaccatcctgtacagcagaagattcttcccctactacgtgtacaacatcatcggcggcctggacgaggagggcaagggcgccgtgtacagcttcgaccccgtgggcagctaccagagagacagcttcaaggccggcggcagcgccagcgccatgctgcagcccctgctggacaaccagtacatcagcagcaacagcgtgagcctgtgcgtgtag

SEQ ID NO: 94927 - DNA, 822 bp, synthetic construct
  misc_feature 1..822: note = Description of Artificial Sequence: Synthetic coding sequence
  source 1..822: mol_type = other DNA
atgctgaagcccgccctggagcccagaggcggcttcagcttcgagaactgccagagaaacgccagcctggagagagtgctgcccggcctgaaggtgccccacgccagaaagaccggcaccaccatcgccggcctggtgttccaggacggcgtgatcctgggcgccgacaccagagccaccaacgacagcgtggtggccgacaagagctgcgagaagatccacttcatcgcccccaagatctactgctgcggcgccggcgtggccgccgacgccgagatgaccaccagaatggtggccagcaagatggagctgcacgccctgagcaccggcagagagcccagagtggccaccgtgaccagaatcctgagacagaccctgttcagataccagggccacgtgggcgccagcctgatcgtgggcggcgtggacctgaccggcccccagctgtacggcgtgcacccccacggcagctacagcagactgcccttcaccgccctgggcagcggccaggacgccgccctggccgtgctggaggacagattccagcccaacatgaccctggaggccgcccagggcctgctggtggaggccgtgaccgccggcatcctgggcgacctgggcagcggcggcaacgtggacgcctgcgtgatcaccaagaccggcgccaagctgctgagaaccctgagcagccccaccgagcccgtgaagagaagcggcagataccacttcgtgcccggcaccaccgccgtgctgacccagaccgtgaagcccctgaccctggagctggtggaggagaccgtgcaggccatggaggtggagtag

SEQ ID NO: 94928 - DNA, 903 bp, synthetic construct
  misc_feature 1..903: note = Description of Artificial Sequence: Synthetic coding sequence
  source 1..903: mol_type = other DNA
atggccctgcaggacgtgtgcaagtggcagagccccgacacccagggccccagcccccacctgcccagagccggcggctgggccgtgcccagaggctgcgacccccagaccttcctgcagatccacggccccagactggcccacggcaccaccaccctggccttcagattcagacacggcgtgatcgccgccgccgacaccagaagcagctgcggcagctacgtggcctgccccgccagctgcaaggtgatccccgtgcaccagcacctgctgggcaccaccagcggcaccagcgccgactgcgccacctggtacagagtgctgcagagagagctgagactgagagagctgagagagggccagctgcccagcgtggccagcgccgccaagctgctgagcgccatgatgagccagtacagaggcctggacctgtgcgtggccaccgccctgtgcggctgggacagaagcggccccgagctgttctacgtgtacagcgacggcaccagactgcagggcgacatcttcagcgtgggcagcggcagcccctacgcctacggcgtgctggacagaggctacagatacgacatgagcacccaggaggcctacgccctggccagatgcgccgtggcccacgccacccacagagacgcctacagcggcggcagcgtggacctgttccacgtgagagagagcggctgggagcacgtgagcagaagcgacgcctgcgtgctgtacgtggagctgcagaagctgctggagcccgagcccgaggaggacgccagccacgcccaccccgagcccgccaccgcccacagagccgccgaggacagagagctgagcgtgggccccggcgaggtgacccccggcgacagcagaatgcccgccggcaccgagaccgtgtag

SEQ ID NO: 94929 - DNA, 606 bp, synthetic construct
  misc_feature 1..606: note = Description of Artificial Sequence: Synthetic coding sequence
  source 1..606: mol_type = other DNA
atggagtacctgatcggcatccagggccccgactacgtgctggtggccagcgacagagtggccgccagcaacatcgtgcagatgaaggacgaccacgacaagatgttcaagatgagcgagaagatcctgctgctgtgcgtgggcgaggccggcgacaccgtgcagttcgccgagtacatccagaagaacgtgcagctgtacaagatgagaaacggctacgagctgagccccaccgccgccgccaacttcaccagaagaaacctggccgactgcctgagaagcagaaccccctaccacgtgaacctgctgctggccggctacgacgagcacgagggccccgccctgtactacatggactacctggccgccctggccaaggcccccttcgccgcccacggctacggcgccttcctgaccctgagcatcctggacagatactacacccccaccatcagcagagagagagccgtggagctgctgagaaagtgcctggaggagctgcagaagagattcatcctgaacctgcccaccttcagcgtgagaatcatcgacaagaacggcatccacgacctggacaacatcagcttccccaagcagggcagctag

SEQ ID NO: 94930 - DNA, 468 bp, synthetic construct
  misc_feature 1..468: note = Description of Artificial Sequence: Synthetic coding sequence
  source 1..468: mol_type = other DNA
atggccagcctgaagtgcagcaccgtggtgtgcgtgatctgcctggagaagcccaagtacagatgccccgcctgcagagtgccctactgcagcgtggtgtgcttcagaaagcacaaggagcagtgcaaccccgagaccagacccgtggagaagaagatcagaagcgccctgcccaccaagaccgtgaagcccgtggagaacaaggacgacgacgacagcatcgccgacttcctgaacagcgacgaggaggaggacagagtgagcctgcagaacctgaagaacctgggcgagagcgccaccctgagaagcctgctgctgaacccccacctgagacagctgatggtgaacctggaccagggcgaggacaaggccaagctgatgagagcctacatgcaggagcccctgttcgtggagttcgccgactgctgcctgggcatcgtggagcccagccagaacgaggagagctag

SEQ ID NO: 94931 - DNA, 795 bp, synthetic construct
  misc_feature 1..795: note = Description of Artificial Sequence: Synthetic coding sequence
  source 1..795: mol_type = other DNA
atggaggccttcctgggcagcagaagcggcctgtgggccggcggccccgcccccggccagttctacagaatccccagcacccccgacagcttcatggaccccgccagcgccctgtacagaggccccatcaccagaacccagaaccccatggtgaccggcaccagcgtgctgggcgtgaagttcgagggcggcgtggtgatcgccgccgacatgctgggcagctacggcagcctggccagattcagaaacatcagcagaatcatgagagtgaacaacagcaccatgctgggcgccagcggcgactacgccgacttccagtacctgaagcaggtgctgggccagatggtgatcgacgaggagctgctgggcgacggccacagctacagccccagagccatccacagctggctgaccagagccatgtacagcagaagaagcaagatgaaccccctgtggaacaccatggtgatcggcggctacgccgacggcgagagcttcctgggctacgtggacatgctgggcgtggcctacgaggcccccagcctggccaccggctacggcgcctacctggcccagcccctgctgagagaggtgctggagaagcagcccgtgctgagccagaccgaggccagagacctggtggagagatgcatgagagtgctgtactacagagacgccagaagctacaacagattccagatcgccaccgtgaccgagaagggcgtggagatcgagggccccctgagcaccgagaccaactgggacatcgcccacatgatcagcggcttcgagtag

SEQ ID NO: 94932 - DNA, 792 bp, synthetic construct
  misc_feature 1..792: note = Description of Artificial Sequence: Synthetic coding sequence
  source 1..792: mol_type = other DNA
atggccctggccagcgtgctggagagacccctgcccgtgaaccagagaggcttcttcggcctgggcggcagagccgacctgctggacctgggccccggcagcctgagcgacggcctgagcctggccgcccccggctggggcgtgcccgaggagcccggcatcgagatgctgcacggcaccaccaccctggccttcaagttcagacacggcgtgatcgtggccgccgacagcagagccaccgccggcgcctacatcgccagccagaccgtgaagaaggtgatcgagatcaacccctacctgctgggcaccatggccggcggcgccgccgactgcagcttctgggagagactgctggccagacagtgcagaatctacgagctgagaaacaaggagagaatcagcgtggccgccgccagcaagctgctggccaacatggtgtaccagtacaagggcatgggcctgagcatgggcaccatgatctgcggctgggacaagagaggccccggcctgtactacgtggacagcgagggcaacagaatcagcggcgccaccttcagcgtgggcagcggcagcgtgtacgcctacggcgtgatggacagaggctacagctacgacctggaggtggagcaggcctacgacctggccagaagagccatctaccaggccacctacagagacgcctacagcggcggcgccgtgaacctgtaccacgtgagagaggacggctggatcagagtgagcagcgacaacgtggccgacctgcacgagaagtacagcggcagcaccccctag

SEQ ID NO: 94933 - DNA, 483 bp, synthetic construct
  misc_feature 1..483: note = Description of Artificial Sequence: Synthetic coding sequence
  source 1..483: mol_type = other DNA
atggccggcggcgccgccgactgcagcttctgggagagactgctggccagacagtgcagaatctacgagctgagaaacaaggagagaatcagcgtggccgccgccagcaagctgctggccaacatggtgtaccagtacaagggcatgggcctgagcatgggcaccatgatctgcggctgggacaagagaggccccggcctgtactacgtggacagcgagggcaacagaatcagcggcgccaccttcagcgtgggcagcggcagcgtgtacgcctacggcgtgatggacagaggctacagctacgacctggaggtggagcaggcctacgacctggccagaagagccatctaccaggccacctacagagacgcctacagcggcggcgccgtgaacctgtaccacgtgagagaggacggctggatcagagtgagcagcgacaacgtggccgacctgcacgagaagtacagcggcagcaccccctag

SEQ ID NO: 94934 - DNA, 612 bp, synthetic construct
  misc_feature 1..612: note = Description of Artificial Sequence: Synthetic coding sequence
  source 1..612: mol_type = other DNA
atggccctggccagcgtgctggagagacccctgcccgtgaaccagagaggcttcttcggcctgggcggcagagccgacctgctggacctgggccccggcagcctgagcgacggcctgagcctggccgcccccggctggggcgtgcccgaggagcccggcatcgagatgctgcacggcaccaccaccctggccttcaagttcagacacggcgtgatcgtggccgccgacagcagagccaccgccggcgcctacatcgccagccagaccgtgaagaaggtgatcgagatcaacccctacctgctgggcaccatggccggcggcgccgccgactgcagcttctgggagagactgctggccagacagtgcagaatctacgagctgagaaacaaggagagaatcagcgtggccgccgccagcaagctgctggccaacatggtgtaccagtacaagggcatgggcctgagcatgggcaccatgatctgcggctgggacaagagaggccccgtgagcgaggtgctgtgcctgaagcccaagagcttcggcatgtacctgttctgcggctgcgccgagagaatcggcaacatggccagacccctgctgagaggccagtag

SEQ ID NO: 94935 - DNA, 834 bp, synthetic construct
  misc_feature 1..834: note = Description of Artificial Sequence: Synthetic coding sequence
  source 1..834: mol_type = other DNA
atggccgccgtgagcgtgtacgccccccccgtgggcggcttcagcttcgacaactgcagaagaaacgccgtgctggaggccgacttcgccaagagaggctacaagctgcccaaggtgagaaagaccggcaccaccatcgccggcgtggtgtacaaggacggcatcgtgctgggcgccgacaccagagccaccgagggcatggtggtggccgacaagaactgcagcaagatccacttcatcagccccaacatctactgctgcggcgccggcaccgccgccgacaccgacatgaccacccagctgatcagcagcaacctggagctgcacagcctgagcaccggcagactgcccagagtggtgaccgccaacagaatgctgaagcagatgctgttcagataccagggctacatcggcgccgccctggtgctgggcggcgtggacgtgaccggcccccacctgtacagcatctacccccacggcagcaccgacaagctgccctacgtgaccatgggcagcggcagcctggccgccatggccgtgttcgaggacaagttcagacccgacatggaggaggaggaggccaagaacctggtgagcgaggccatcgccgccggcatcttcaacgacctgggcagcggcagcaacatcgacctgtgcgtgatcagcaagaacaagctggacttcctgagaccctacaccgtgcccaacaagaagggcaccagactgggcagatacagatgcgagaagggcaccaccgccgtgctgaccgagaagatcacccccctggagatcgaggtgctggaggagaccgtgcagaccatggacaccagctag

SEQ ID NO: 94936 - DNA, 633 bp, synthetic construct
  misc_feature 1..633: note = Description of Artificial Sequence: Synthetic coding sequence
  source 1..633: mol_type = other DNA
atggccgccgtgagcgtgtacgccccccccgtgggcggcttcagcttcgacaactgcagaagaaacgccgtgctggaggccgacttcgccaagagaggctacaagctgcccaaggtgagaaagaccggcaccaccatcgccggcgtggtgtacaaggacggcatcgtgctgggcgccgacaccagagccaccgagggcatggtggtggccgacaagaactgcagcaagatccacttcatcagccccaacatctactgctgcggcgccggcaccgccgccgacaccgacatgaccacccagctgatcagcagcaacctggagctgcacagcctgagcaccggcagactgcccagagtggtgaccgccaacagaatgctgaagcagatgctgttcagataccagggctacatcggcgccgccctggtgctgggcggcgtggacgtgaccggcccccacctgtacagcatctacccccacggcagcaccgacaagctgccctacgtgaccatggtgcactgcgaggaggagctgttcaccgagaacctgttcttcatcagacaggccgaggtggtgagcgaggaggcctggggccccagcttcgccatcagcctggccgtgttcctggtggcctag

SEQ ID NO: 94937 - DNA, 429 bp, synthetic construct
  misc_feature 1..429: note = Description of Artificial Sequence: Synthetic coding sequence
  source 1..429: mol_type = other DNA
atggccgccgtgagcgtgtacgccccccccgtgggcggcttcagcttcgacaactgcagaagaaacgccgtgctggaggccgacttcgccaagagaggctacaagctgcccaaggtgagaaagaccggcaccaccatcgccggcgtggtgtacaaggacggcatcgtgctgggcgccgacaccagagccaccgagggcatggtggtggccgacaagaactgcagcaagatccacttcatcagccccaacatctactgctgcggcgccggcaccgccgccgacaccgacatgaccacccagctgatcagcagcaacctggagctgcacagcctgagcaccggcagactgcccagagtggtgaccgccaacagaatgctgaagcagatgctgttcagattctggctgctgggcagcaacggctgcatctag

SEQ ID NO: 94938 - DNA, 819 bp, synthetic construct
  misc_feature 1..819: note = Description of Artificial Sequence: Synthetic coding sequence
  source 1..819: mol_type = other DNA
atgctgatcggcacccccacccccagagacaccacccccagcagctggctgaccagcagcctgctggtggaggccgcccccctggacgacaccaccctgcccacccccgtgagcagcggctgccccggcctggagcccaccgagttcttccagagcctgggcggcgacggcgagagaaacgtgcagatcgagatggcccacggcaccaccaccctggccttcaagttccagcacggcgtgatcgccgccgtggacagcagagccagcgccggcagctacatcagcgccctgagagtgaacaaggtgatcgagatcaacccctacctgctgggcaccatgagcggctgcgccgccgactgccagtactgggagagactgctggccaaggagtgcagactgtactacctgagaaacggcgagagaatcagcgtgagcgccgccagcaagctgctgagcaacatgatgtgccagtacagaggcatgggcctgagcatgggcagcatgatctgcggctgggacaagaagggccccggcctgtactacgtggacgagcacggcaccagactgagcggcaacatgttcagcaccggcagcggcaacacctacgcctacggcgtgatggacagcggctacagacccaacctgagccccgaggaggcctacgacctgggcagaagagccatcgcctacgccacccacagagacagctacagcggcggcgtggtgaacatgtaccacatgaaggaggacggctgggtgaaggtggagagcaccgacgtgagcgacctgctgcaccagtacagagaggccaaccagtag

SEQ ID NO: 94939 - DNA, 831 bp, synthetic construct
  misc_feature 1..831: note = Description of Artificial Sequence: Synthetic coding sequence
  source 1..831: mol_type = other DNA
atggccctgctggacgtgtgcggcgcccccagaggccagagacccgagagcgccctgcccgtggccggcagcggcagaagaagcgaccccggccactacagcttcagcatgagaagccccgagctggccctgcccagaggcatgcagcccaccgagttcttccagagcctgggcggcgacggcgagagaaacgtgcagatcgagatggcccacggcaccaccaccctggccttcaagttccagcacggcgtgatcgccgccgtggacagcagagccagcgccggcagctacatcagcgccctgagagtgaacaaggtgatcgagatcaacccctacctgctgggcaccatgagcggctgcgccgccgactgccagtactgggagagactgctggccaaggagtgcagactgtactacctgagaaacggcgagagaatcagcgtgagcgccgccagcaagctgctgagcaacatgatgtgccagtacagaggcatgggcctgagcatgggcagcatgatctgcggctgggacaagaagggccccggcctgtactacgtggacgagcacggcaccagactgagcggcaacatgttcagcaccggcagcggcaacacctacgcctacggcgtgatggacagcggctacagacccaacctgagccccgaggaggcctacgacctgggcagaagagccatcgcctacgccacccacagagacagctacagcggcggcgtggtgaacatgtaccacatgaaggaggacggctgggtgaaggtggagagcaccgacgtgagcgacctgctgcaccagtacagagaggccaaccagtag

SEQ ID NO: 94940 - DNA, 831 bp, synthetic construct; identical to SEQ ID NO: 94939
  misc_feature 1..831: note = Description of Artificial Sequence: Synthetic coding sequence
  source 1..831: mol_type = other DNA

SEQ ID NO: 94941 - DNA, 819 bp, synthetic construct; identical to SEQ ID NO: 94938
  misc_feature 1..819: note = Description of Artificial Sequence: Synthetic coding sequence
  source 1..819: mol_type = other DNA

SEQ ID NO: 94942 - DNA, 759 bp, synthetic construct
  misc_feature 1..759: note = Description of Artificial Sequence: Synthetic coding sequence
  source 1..759: mol_type = other DNA
atggccctgctggacgtgtgcggcgcccccagaggccagagacccgagagcgccctgcccgtggccggcagcggcagaagaagcgaccccggccactacagcttcagcatgagaagccccgagctggccctgcccagaggcatgcagcccaccgagttcttccagagcctgggcggcgacggcgagagaaacgtgcagatcgagatggcccacggcaccaccaccctggccttcaagttccagcacggcgtgatcgccgccgtggacagcagagccagcgccggcagctacatcaactgccagtactgggagagactgctggccaaggagtgcagactgtactacctgagaaacggcgagagaatcagcgtgagcgccgccagcaagctgctgagcaacatgatgtgccagtacagaggcatgggcctgagcatgggcagcatgatctgcggctgggacaagaagggccccggcctgtactacgtggacgagcacggcaccagactgagcggcaacatgttcagcaccggcagcggcaacacctacgcctacggcgtgatggacagcggctacagacccaacctgagccccgaggaggcctacgacctgggcagaagagccatcgcctacgccacccacagagacagctacagcggcggcgtggtgaacatgtaccacatgaaggaggacggctgggtgaaggtggagagcaccgacgtgagcgacctgctgcaccagtacagagaggccaaccagtag

SEQ ID NO: 94943 - DNA, 759 bp, synthetic construct; identical to SEQ ID NO: 94942
  misc_feature 1..759: note = Description of Artificial Sequence: Synthetic coding sequence
  source 1..759: mol_type = other DNA

SEQ ID NO: 94944 - DNA, 819 bp, synthetic construct; identical to SEQ ID NO: 94938
  misc_feature 1..819: note = Description of Artificial Sequence: Synthetic coding sequence
  source 1..819: mol_type = other DNA

SEQ ID NO: 94945 - DNA, 819 bp, synthetic construct; identical to SEQ ID NO: 94938
  misc_feature 1..819: note = Description of Artificial Sequence: Synthetic coding sequence
  source 1..819: mol_type = other DNA

SEQ ID NO: 94946 - DNA, 831 bp, synthetic construct; identical to SEQ ID NO: 94939
  misc_feature 1..831: note = Description of Artificial Sequence: Synthetic coding sequence
  source 1..831: mol_type = other DNA

SEQ ID NO: 94947 - DNA, 759 bp, synthetic construct; identical to SEQ ID NO: 94942
  misc_feature 1..759: note = Description of Artificial Sequence: Synthetic coding sequence
  source 1..759: mol_type = other DNA

SEQ ID NO: 94948 - DNA, 759 bp, synthetic construct; identical to SEQ ID NO: 94942
  misc_feature 1..759: note = Description of Artificial Sequence: Synthetic coding sequence
  source 1..759: mol_type = other DNA

SEQ ID NO: 94949 - DNA, 831 bp, synthetic construct; identical to SEQ ID NO: 94939
  misc_feature 1..831: note = Description of Artificial Sequence: Synthetic coding sequence
  source 1..831: mol_type = other DNA

SEQ ID NO: 94950 - DNA, 819 bp, synthetic construct; identical to SEQ ID NO: 94938
  misc_feature 1..819: note = Description of Artificial Sequence: Synthetic coding sequence
  source 1..819: mol_type = other DNA

SEQ ID NO: 94951 - DNA, 819 bp, synthetic construct; identical to SEQ ID NO: 94938
  misc_feature 1..819: note = Description of Artificial Sequence: Synthetic coding sequence
  source 1..819: mol_type = other DNA

SEQ ID NO: 94952 - DNA, 831 bp, synthetic construct; identical to SEQ ID NO: 94939
  misc_feature 1..831: note = Description of Artificial Sequence: Synthetic coding sequence
  source 1..831: mol_type = other DNA

SEQ ID NO: 94953 - DNA, 819 bp, synthetic construct; identical to SEQ ID NO: 94938
  misc_feature 1..819: note = Description of Artificial Sequence: Synthetic coding sequence
  source 1..819: mol_type = other DNA

SEQ ID NO: 94954 - DNA, 831 bp, synthetic construct
  misc_feature 1..831: note = Description of Artificial Sequence: Synthetic coding sequence
  source 1..831: mol_type = other DNA
atggccctgctggacgtgtgcggcgcccccagaggccagagacccgagagcgccctgcccgtggccggcagcggcagaagaagcgaccccggccactacagcttcagcatgagaagccccgagctggccctgcccagaggcatgaagcccaccgagttcttccagagcctgggcggcgacggcgagagaaacgtgcagatcgagatggcccacggcaccaccaccctggccttcaagttccagcacggcgtgatcgccgccgtggacagcagagccagcgccggcagctacatcagcgccctgagagtgaacaaggtgatcgagatcaacccctacctgctgggcaccatgagcggctgcgccgccgactgccagtactgggagagactgctggccaaggagtgcagactgtactacctgagaaacggcgagagaatcagcgtgagcgccgccagcaagctgctgagcaacatgatgtgccagtacagaggcatgggcctgagcatgggcagcatgatctgcggctgggacaagaagggccccggcctgtactacgtggacgagcacggcaccagactgagcggcaacatgttcagcaccggcagcggcaacacctacgcctacggcgtgatggacagcggctacagacccaacctgagccccgaggaggcctacgacctgggcagaagagccatcgcctacgccacccacagagacagctacagcggcggcgtggtgaacatgtaccacatgaaggaggacggctgggtgaaggtggagagcaccgacgtgagcgacctgctgcaccagtacagagaggccaaccagtag

SEQ ID NO: 94955 - DNA, 759 bp, synthetic construct; identical to SEQ ID NO: 94942
  misc_feature 1..759: note = Description of Artificial Sequence: Synthetic coding sequence
  source 1..759: mol_type = other DNA

SEQ ID NO: 94956 - DNA, 759 bp, synthetic construct; identical to SEQ ID NO: 94942
  misc_feature 1..759: note = Description of Artificial Sequence: Synthetic coding sequence
  source 1..759: mol_type = other DNA

SEQ ID NO: 94957 - DNA, 759 bp, synthetic construct
  misc_feature 1..759: note = Description of Artificial Sequence: Synthetic coding sequence
  source 1..759: mol_type = other DNA
atggccctgctggacgtgtgcggcgcccccagaggccagagacccgagagcgccctgcccgtggccggcagcggcagaagaagcgaccccggccactacagcttcagcatgagaagccccgagctggccctgcccagaggcatgaagcccaccgagttcttccagagcctgggcggcgacggcgagagaaacgtgcagatcgagatggcccacggcaccaccaccctggccttcaagttccagcacggcgtgatcgccgccgtggacagcagagccagcgccggcagctacatcaactgccagtactgggagagactgctggccaaggagtgcagactgtactacctgagaaacggcgagagaatcagcgtgagcgccgccagcaagctgctgagcaacatgatgtgccagtacagaggcatgggcctgagcatgggcagcatgatctgcggctgggacaagaagggccccggcctgtactacgtggacgagcacggcaccagactgagcggcaacatgttcagcaccggcagcggcaacacctacgcctacggcgtgatggacagcggctacagacccaacctgagccccgaggaggcctacgacctgggcagaagagccatcgcctacgccacccacagagacagctacagcggcggcgtggtgaacatgtaccacatgaaggaggacggctgggtgaaggtggagagcaccgacgtgagcgacctgctgcaccagtacagagaggccaaccagtag

SEQ ID NO: 94958 - DNA, 819 bp, synthetic construct; identical to SEQ ID NO: 94938
  misc_feature 1..819: note = Description of Artificial Sequence: Synthetic coding sequence
  source 1..819: mol_type = other DNA

SEQ ID NO: 94959 - DNA, 831 bp, synthetic construct; identical to SEQ ID NO: 94939
  misc_feature 1..831: note = Description of Artificial Sequence: Synthetic coding sequence
  source 1..831: mol_type = other DNA

SEQ ID NO: 94960 - DNA, 831 bp, synthetic construct; identical to SEQ ID NO: 94939
  misc_feature 1..831: note = Description of Artificial Sequence: Synthetic coding sequence
  source 1..831: mol_type = other DNA

SEQ ID NO: 94961 - DNA, 759 bp, synthetic construct; identical to SEQ ID NO: 94942
  misc_feature 1..759: note = Description of Artificial Sequence: Synthetic coding sequence
  source 1..759: mol_type = other DNA

SEQ ID NO: 94962 - DNA, 831 bp, synthetic construct; identical to SEQ ID NO: 94939
  misc_feature 1..831: note = Description of Artificial Sequence: Synthetic coding sequence
  source 1..831: mol_type = other DNA

SEQ ID NO: 94963 - DNA, 660 bp, synthetic construct
  misc_feature 1..660: note = Description of Artificial Sequence: Synthetic coding sequence
  source 1..660: mol_type = other DNA
atgctgagagccggcgcccccaccggcgacctgcccagagccggcgaggtgcacaccggcaccaccatcatggccgtggagttcgacggcggcgtggtgatgggcagcgacagcagagtgagcgccggcgaggccgtggtgaacagagtgttcgacaagctgagccccctgcacgagagaatctactgcgccctgagcggcagcgccgccgacgcccaggccgtggccgacatggccgcctaccagctggagctgcacggcatcgagctggaggagccccccctggtgctggccgccgccaacgtggtgagaaacatcagctacaagtacagagaggacctgagcgcccacctgatggtggccggctgggaccagagagagggcggccaggtgtacggcaccctgggcggcatgctgaccagacagcccttcgccatcggcggcagcggcagcaccttcatctacggctacgtggacgccgcctacaagcccggcatgagccccgaggagtgcagaagattcaccaccgacgccatcgccctggccatgagcagagacggcagcagcggcggcgtgatctacctggtgaccatcaccgccgccggcgtggaccacagagtgatcctgggcaacgagctgcccaagttctacgacgagtag

SEQ ID NO: 94964 - DNA, 660 bp, synthetic construct; identical to SEQ ID NO: 94963
  misc_feature 1..660: note = Description of Artificial Sequence: Synthetic coding sequence
  source 1..660: mol_type = other DNA

SEQ ID NO: 94965 - DNA, 660 bp, synthetic construct; identical to SEQ ID NO: 94963
  misc_feature 1..660: note = Description of Artificial Sequence: Synthetic coding sequence
  source 1..660: mol_type = other DNA

SEQ ID NO: 94966 - DNA, 591 bp, synthetic construct
  misc_feature 1..591: note = Description of Artificial Sequence: Synthetic coding sequence
  source 1..591: mol_type = other DNA
atggccgtggagttcgacggcggcgtggtgatgggcagcgacagcagagtgagcgccggcgaggccgtggtgaacagagtgttcgacaagctgagccccctgcacgagagaatctactgcgccctgagcggcagcgccgccgacgcccaggccgtggccgacatggccgcctaccagctggagctgcacggcatcgagctggaggagccccccctggtgctggccgccgccaacgtggtgagaaacatcagctacaagtacagagaggacctgagcgcccacctgatggtggccggctgggaccagagagagggcggccaggtgtacggcaccctgggcggcatgctgaccagacagcccttcgccatcggcggcagcggcagcaccttcatctacggctacgtggacgccgcctacaagcccggcatgagccccgaggagtgcagaagattcaccaccgacgccatcgccctggccatgagcagagacggcagcagcggcggcgtgatctacctggtgaccatcaccgccgccggcgtggaccacagagtgatcctgggcaacgagctgcccaagttctacgacgagtag

SEQ ID NO: 94967 - DNA, 537 bp, synthetic construct
  misc_feature 1..537: note = Description of Artificial Sequence: Synthetic coding sequence
  source 1..537: mol_type = other DNA
atgctgagagccggcgcccccaccggcgacctgcccagagccggcgaggtgcacaccggcaccaccatcatggccgtggagttcgacggcggcgtggtgatgggcagcgacagcagagtgagcgccggcatcgagctggaggagccccccctggtgctggccgccgccaacgtggtgagaaacatcagctacaagtacagagaggacctgagcgcccacctgatggtggccggctgggaccagagagagggcggccaggtgtacggcaccctgggcggcatgctgaccagacagcccttcgccatcggcggcagcggcagcaccttcatctacggctacgtggacgccgcctacaagcccggcatgagccccgaggagtgcagaagattcaccaccgacgccaccagcaccaagagaagagtgtgcggctacttcctgagaacccagaagagagagaaccagaaccagagagtgcacgagtacatgtgcaccggcgagagaagcctgagcagcagccccctgctgagctgcagctag

SEQ ID NO: 94968 - DNA, 591 bp, synthetic construct; identical to SEQ ID NO: 94966
  misc_feature 1..591: note = Description of Artificial Sequence: Synthetic coding sequence
  source 1..591: mol_type = other DNA

SEQ ID NO: 94969 - DNA, 537 bp, synthetic construct; identical to SEQ ID NO: 94967
  misc_feature 1..537: note = Description of Artificial Sequence: Synthetic coding sequence
  source 1..537: mol_type = other DNA

SEQ ID NO: 94970 - DNA, 591 bp, synthetic construct; identical to SEQ ID NO: 94966
  misc_feature 1..591: note = Description of Artificial Sequence: Synthetic coding sequence
  source 1..591: mol_type = other DNA

SEQ ID NO: 94971 - DNA, 537 bp, synthetic construct; identical to SEQ ID NO: 94967
  misc_feature 1..537: note = Description of Artificial Sequence: Synthetic coding sequence
  source 1..537: mol_type = other DNA

SEQ ID NO: 94972 - DNA, 396 bp, synthetic construct
  misc_feature 1..396: note = Description of Artificial Sequence: Synthetic coding sequence
  source 1..396: mol_type = other DNA
atggccgtggagttcgacggcggcgtggtgatgggcagcgacagcagagtgagcgccggcgaggccgtggtgaacagagtgttcgacaagctgagccccctgcacgagagaatctactgcgccctgagcggcagcgccgccgacgcccaggccgtggccgacatggccgcctaccagctggagctgcacggcatcgagctggaggagccccccctggtgctggccgccgccaacgtggtgagaaacatcagctacaagtacagagaggacctgagcgcccacctgatggtggccggctgggaccagagagagggcggccaggtgtacggcaccctgggcggcatgctgaccagacagcccttcgccatcggcggcagcggcagcaccttcatctag

SEQ ID NO: 94973 - DNA, 396 bp, synthetic construct; identical to SEQ ID NO: 94972
  misc_feature 1..396: note = Description of Artificial Sequence: Synthetic coding sequence
  source 1..396: mol_type = other DNA

SEQ ID NO: 94974 - DNA, 396 bp, synthetic construct; identical to SEQ ID NO: 94972
  misc_feature 1..396: note = Description of Artificial Sequence: Synthetic coding sequence
  source 1..396: mol_type = other DNA

SEQ ID NO: 94975 - DNA, 396 bp, synthetic construct; identical to SEQ ID NO: 94972
  misc_feature 1..396: note = Description of Artificial Sequence: Synthetic coding sequence
  source 1..396: mol_type = other DNA

SEQ ID NO: 94976 - DNA, 537 bp, synthetic construct
  misc_feature 1..537: note = Description of Artificial Sequence: Synthetic coding sequence
  source 1..537: mol_type = other DNA
atgctgagagccggcgcccccaccggcgacctgcccagagccggcgaggtgcacaccggcaccaccatcatggccgtggagttcgacggcggcgtggtgatgggcagcgacagcagagtgagcgccggcatcgagctggaggagccccccctggtgctggccgccgccaacgtggtgagaaacatcagctacaagtacagagaggacctgagcgcccacctgatggtggccggctgggaccagagagagggcggccaggtgtacggcaccctgggcggcatgctgaccagacagcccttcgccatcggcggcagcggcagcaccttcatctacggctacgtggacgccgcctacaagcccggcatgagccccgaggagtgcagaagattcaccaccgacgccaccagcaccaagagaagagtgtgcggctacttcctgagaacccagaagagagagaaccagaaccagagagtgcacgagtacatgtgcaccagcgagagaagcctgagcagcagccccctgctgagctgcagctag

SEQ ID NO: 94977 - DNA, 396 bp, synthetic construct
  misc_feature 1..396: note = Description of Artificial Sequence: Synthetic coding sequence
  source 1..396: mol_type = other DNA
atggccgtggagttcgacggcggcgtggtgatgggcagcgacagcagagtgagcgccggcgaggccgtggtgaacagagtgttcgacaagctgagccccctgcacgagcacatctactgcgccctgagcggcagcgccgccgacgcccaggccgtggccgacatggccgcctaccagctggagctgcacggcatcgagctggaggagccccccctggtgctggccgccgccaacgtggtgagaaacatcagctacaagtacagagaggacctgagcgcccacctgatggtggccggctgggaccagagagagggcggccaggtgtacggcaccctgggcggcatgctgaccagacagcccttcgccatcggcggcagcggcagcaccttcatctag

SEQ ID NO: 94978 - DNA, 591 bp, synthetic construct; identical to SEQ ID NO: 94966
  misc_feature 1..591: note = Description of Artificial Sequence: Synthetic coding sequence
  source 1..591: mol_type = other DNA

SEQ ID NO: 94979 - DNA, 660 bp, synthetic construct; identical to SEQ ID NO: 94963
  misc_feature 1..660: note = Description of Artificial Sequence: Synthetic coding sequence
  source 1..660: mol_type = other DNA

SEQ ID NO: 94980 - DNA, 591 bp, synthetic construct
  misc_feature 1..591: note = Description of Artificial Sequence: Synthetic coding sequence
  source 1..591: mol_type = other DNA
atggccgtggagttcgacggcggcgtggtgatgggcagcgacagcagagtgagcgccggcgaggccgtggtgaacagagtgttcgacaagctgagccccctgcacgagcacatctactgcgccctgagcggcagcgccgccgacgcccaggccgtggccgacatggccgcctaccagctggagctgcacggcatcgagctggaggagccccccctggtgctggccgccgccaacgtggtgagaaacatcagctacaagtacagagaggacctgagcgcccacctgatggtggccggctgggaccagagagagggcggccaggtgtacggcaccctgggcggcatgctgaccagacagcccttcgccatcggcggcagcggcagcaccttcatctacggctacgtggacgccgcctacaagcccggcatgagccccgaggagtgcagaagattcaccaccgacgccatcgccctggccatgagcagagacggcagcagcggcggcgtgatctacctggtgaccatcaccgccgccggcgtggaccacagagtgatcctgggcaacgagctgcccaagttctacgacgagtag

SEQ ID NO: 94981 - DNA, 537 bp, synthetic construct; identical to SEQ ID NO: 94976
  misc_feature 1..537: note = Description of Artificial Sequence: Synthetic coding sequence
  source 1..537: mol_type = other DNA

SEQ ID NO: 94982 - DNA, 537 bp, synthetic construct; identical to SEQ ID NO: 94976
  misc_feature 1..537: note = Description of Artificial Sequence: Synthetic coding sequence
  source 1..537: mol_type = other DNA

SEQ ID NO: 94983 - DNA, 660 bp, synthetic construct
  misc_feature 1..660: note = Description of Artificial Sequence: Synthetic coding sequence
  source 1..660: mol_type = other DNA
atgctgagagccggcgcccccaccggcgacctgcccagagccggcgaggtgcacaccggcaccaccatcatggccgtggagttcgacggcggcgtggtgatgggcagcgacagcagagtgagcgccggcgaggccgtggtgaacagagtgttcgacaagctgagccccctgcacgagcacatctactgcgccctgagcggcagcgccgccgacgcccaggccgtggccgacatggccgcctaccagctggagctgcacggcatcgagctggaggagccccccctggtgctggccgccgccaacgtggtgagaaacatcagctacaagtacagagaggacctgagcgcccacctgatggtggccggctgggaccagagagagggcggccaggtgtacggcaccctgggcggcatgctgaccagacagcccttcgccatcggcggcagcggcagcaccttcatctacggctacgtggacgccgcctacaagcccggcatgagccccgaggagtgcagaagattcaccaccgacgccatcgccctggccatgagcagagacggcagcagcggcggcgtgatctacctggtgaccatcaccgccgccggcgtggaccacagagtgatcctgggcaacgagctgcccaagttctacgacgagtag

SEQ ID NO: 94984 - DNA, 591 bp, synthetic construct; identical to SEQ ID NO: 94980
  misc_feature 1..591: note = Description of Artificial Sequence: Synthetic coding sequence
  source 1..591: mol_type = other DNA

SEQ ID NO: 94985 - DNA, 660 bp, synthetic construct; identical to SEQ ID NO: 94983
  misc_feature 1..660: note = Description of Artificial Sequence: Synthetic coding sequence
  source 1..660: mol_type = other DNA

SEQ ID NO: 94986 - DNA, 396 bp, synthetic construct; identical to SEQ ID NO: 94972
  misc_feature 1..396: note = Description of Artificial Sequence: Synthetic coding sequence
  source 1..396: mol_type = other DNA

SEQ ID NO: 94987 - DNA, 396 bp, synthetic construct; identical to SEQ ID NO: 94977
  misc_feature 1..396: note = Description of Artificial Sequence: Synthetic coding sequence
  source 1..396: mol_type = other DNA

SEQ ID NO: 94988 - DNA, 591 bp, synthetic construct; identical to SEQ ID NO: 94980
  misc_feature 1..591: note = Description of Artificial Sequence: Synthetic coding sequence
  source 1..591: mol_type = other DNA

SEQ ID NO: 94989 - DNA, 660 bp, synthetic construct; identical to SEQ ID NO: 94963
  misc_feature 1..660: note = Description of Artificial Sequence: Synthetic coding sequence
  source 1..660: mol_type = other DNA

SEQ ID NO: 94990 - DNA, 537 bp, synthetic construct; identical to SEQ ID NO: 94967
  misc_feature 1..537: note = Description of Artificial Sequence: Synthetic coding sequence
  source 1..537: mol_type = other DNA

SEQ ID NO: 94991 - DNA, 537 bp, synthetic construct; identical to SEQ ID NO: 94967
  misc_feature 1..537: note = Description of Artificial Sequence: Synthetic coding sequence
  source 1..537: mol_type = other DNA

SEQ ID NO: 94992 - DNA, 591 bp, synthetic construct; identical to SEQ ID NO: 94966
  misc_feature 1..591: note = Description of Artificial Sequence: Synthetic coding sequence
  source 1..591: mol_type = other DNA

SEQ ID NO: 94993 - DNA, 660 bp, synthetic construct; identical to SEQ ID NO: 94983
  misc_feature 1..660: note = Description of Artificial Sequence: Synthetic coding sequence
  source 1..660: mol_type = other DNA

SEQ ID NO: 94994 - DNA, 465 bp, synthetic construct
  misc_feature 1..465: note = Description of Artificial Sequence: Synthetic coding sequence
  source 1..465: mol_type = other DNA
atgctgagagccggcgcccccaccggcgacctgcccagagccggcgaggtgcacaccggcaccaccatcatggccgtggagttcgacggcggcgtggtgatgggcagcgacagcagagtgagcgccggcatcgagctggaggagccccccctggtgctggccgccgccaacgtggtgagaaacatcagctacaagtacagagaggacctgagcgcccacctgatggtggccggctgggaccagagagagggcggccaggtgtacggcaccctgggcggcatgctgaccagacagcccttcgccatcggcggcagcggcagcaccttcatctacggctacgtggacgccgcctacaagcccggcatgagccccgaggagtgcagaagattcaccaccgacggcaaccagcccagcggcagagtgcccggcgagggcttcgagacctgggagggcagcagactgtag

SEQ ID NO: 94995 - DNA, 396 bp, synthetic construct; identical to SEQ ID NO: 94977
  misc_feature 1..396: note = Description of Artificial Sequence: Synthetic coding sequence
  source 1..396: mol_type = other DNA

SEQ ID NO: 94996 - DNA, 465 bp, synthetic construct; identical to SEQ ID NO: 94994
  misc_feature 1..465: note = Description of Artificial Sequence: Synthetic coding sequence
  source 1..465: mol_type = other DNA

SEQ ID NO: 94997 - DNA, 465 bp, synthetic construct; identical to SEQ ID NO: 94994
  misc_feature 1..465: note = Description of Artificial Sequence: Synthetic coding sequence
  source 1..465: mol_type = other DNA

SEQ ID NO: 94998 - DNA, 465 bp, synthetic construct; identical to SEQ ID NO: 94994
  misc_feature 1..465: note = Description of Artificial Sequence: Synthetic coding sequence
  source 1..465: mol_type = other DNA

SEQ ID NO: 94999 - DNA, 465 bp, synthetic construct; identical to SEQ ID NO: 94994
  misc_feature 1..465: note = Description of Artificial Sequence: Synthetic coding sequence
  source 1..465: mol_type = other DNA

SEQ ID NO: 95000 - DNA, 465 bp, synthetic construct; identical to SEQ ID NO: 94994
  misc_feature 1..465: note = Description of Artificial Sequence: Synthetic coding sequence
  source 1..465: mol_type = other DNA

SEQ ID NO: 95001 - DNA, 465 bp, synthetic construct; identical to SEQ ID NO: 94994
  misc_feature 1..465: note = Description of Artificial Sequence: Synthetic coding sequence
  source 1..465: mol_type = other DNA

SEQ ID NO: 95002 - DNA, 465 bp, synthetic construct; identical to SEQ ID NO: 94994
  misc_feature 1..465: note = Description of Artificial Sequence: Synthetic coding sequence
  source 1..465: mol_type = other DNA

SEQ ID NO: 95003 - DNA, 426 bp, synthetic construct
  misc_feature 1..426: note = Description of Artificial Sequence: Synthetic coding sequence
  source 1..426: mol_type = other DNA
atgaacgccagaggcctgggcagcgagctgaaggacagcatccccgtgaccgagctgagcgccagcggccccttcgagagccacgacctgctgagaaagggcttcagctgcgtgaagaacgagctgctgcccagccaccccctggagctgagcgagaagaacttccagctgaaccaggacaagatgaacttcagcaccctgagaaacatccagggcctgttcgcccccctgaagctgcagatggagttcaaggccgtgcagcaggtgcagagactgcccttcctgagcagcagcaacctgagcctggacgtgctgagaggcaacgacgagaccatcggcttcgaggacatcctgaacgaccccagccagagcgaggtgatgggcgagccccacctgatggtggagtacaagctgggcctgctgtag

SEQ ID NO: 95004 - DNA, 471 bp, synthetic construct
  misc_feature 1..471: note = Description of Artificial Sequence: Synthetic coding sequence
  source 1..471: mol_type = other DNA
atgcccatggccggcctgctgaagggcctggtgagacagctggagagattcagcgtgcagcagcaggccagcaagatgccccccaagggcaagagcggcagcggcaaggccggcaagggcggcgccgccagcggcagcgacagcgccgacaagaaggcccagggccccaagggcggcggcaacgccgtgaaggtgagacacatcctgtgcgagaagcacggcaagatcatggaggccatggagaagctgaagagcggcatgagattcaacgaggtggccgcccagtacagcgaggacaaggccagacagggcggcgacctgggctggatgaccagaggcagcatggtgggccccttccaggaggccgccttcgccctgcccgtgagcggcatggacaagcccgtgttcaccgacccccccgtgaagaccaagttcggctaccacatcatcatggtggagggcagaaagtag

SEQ ID NO: 95005 - DNA, 402 bp, synthetic construct
  misc_feature 1..402: note = Description of Artificial Sequence: Synthetic coding sequence
  source 1..402: mol_type = other DNA
atgcccatggccggcctgctgaagggcctggtgagacagctggagagattcagcgtgcagcagcaggccagcaagatgccccccaagggcaagagcggcagcggcaaggccggcaagggcggcgccgccagcggcagcgacagcgccgacaagaaggcccagggccccaagggcggcggcaacgccgtgaaggtgagacacatcctgtgcgagaagcacggcaagatcatggaggccatggagaagctgaagagcggcatgagattcaacgaggtggccgcccagtacagcgaggacaaggccagacagggcatccccagcctgcagcagcacgccggccaccacagagacctgagaagcaccctgatcagcctggtgagctacctgcagaccaccccctag

SEQ ID NO: 95006 - DNA, 1062 bp, synthetic construct
  misc_feature 1..1062: note = Description of Artificial Sequence: Synthetic coding sequence
  source 1..1062: mol_type = other DNA
atggccgccgccgaggccgccaactgcatcatggaggtgagctgcggccaggccgagagcagcgagaagcccaacgccgaggacatgaccagcaaggactactacttcgacagctacgcccacttcggcatccacgaggagatgctgaaggacgaggtgagaaccctgacctacagaaacagcatgttccacaacagacacctgttcaaggacaaggtggtgctggacgtgggcagcggcaccggcatcctgtgcatgttcgccgccaaggccggcgccagaaaggtgatcggcatcgagtgcagcagcatcagcgactacgccgtgaagatcgtgaaggccaacaagctggaccacgtggtgaccatcatcaagggcaaggtggaggaggtggagctgcccgtggagaaggtggacatcatcatcagcgagtggatgggctactgcctgttctacgagagcatgctgaacaccgtgctgtacgccagagacaagtggctggcccccgacggcctgatcttccccgacagagccaccctgtacgtgaccgccatcgaggacagacagtacaaggactacaagatccactggtgggagaacgtgtacggcttcgacatgagctgcatcaaggacgtggccatcaaggagcccctggtggacgtggtggaccccaagcagctggtgaccaacgcctgcctgatcaaggaggtggacatctacaccgtgaaggtggaggacctgaccttcaccagccccttctgcctgcaggtgaagagaaacgactacgtgcacgccctggtggcctacttcaacatcgagttcaccagatgccacaagagaaccggcttcagcaccagccccgagagcccctacacccactggaagcagaccgtgttctacatggaggactacctgaccgtgaagaccggcgaggagatcttcggcaccatcggcatgagacccaacgccaagaacaacagagacctggacttcaccatcgacctggacttcaagggccagctgtgcgagctgagctgcagcaccgactacagaatgagatag

SEQ ID NO: 95007 - DNA, 882 bp, synthetic construct
  misc_feature 1..882: note = Description of Artificial Sequence: Synthetic coding sequence
  source 1..882: mol_type = other DNA
atggtgggcgtggccgaggtgagctgcggccaggccgagagcagcgagaagcccaacgccgaggacatgaccagcaaggactactacttcgacagctacgcccacttcggcatccacgaggagatgctgaaggacgaggtgagaaccctgacctacagaaacagcatgttccacaacagacacctgttcaaggacaaggtggtgctggacgtgggcagcggcaccggcatcctgtgcatgttcgccgccaaggccggcgccagaaaggtgatcggcatcgagtgcagcagcatcagcgactacgccgtgaagatcgtgaaggccaacaagctggaccacgtggtgaccatcatcaagggcaaggtggaggaggtggagctgcccgtggagaaggtggacatcatcatcagcgagtggatgggctactgcctgttctacgagagcatgctgaacaccgtgctgtacgccagagacaagtggctggcccccgacggcctgatcttccccgacagagccaccctgtacgtgaccgccatcgaggacagacagtacaaggactacaagatccactggtgggagaacgtgtacggcttcgacatgagctgcatcaaggacgtggccatcaaggagcccctggtggacgtggtggaccccaagcagctggtgaccaacgcctgcctgatcaaggtgagaggctgggcctggcccggcgccccctgggtggagaccaaggagagacccagccccggccccggcatgggcctgtggggccccgagtgctggcccgaggtgagcgagcccgacctgcccgccagaggcggcgccagaggccccggcaagaccctgagacccctgaacatcttcgtgagcgccgccgtgtag

SEQ ID NO: 95008 - DNA, 1116 bp, synthetic construct
  misc_feature 1..1116: note = Description of Artificial Sequence: Synthetic coding sequence
  source 1..1116: mol_type = other DNA
atggccgccgccgaggccgccaactgcatcatggagaacttcgtggccaccctggccaacggcatgagcctgcagccccccctggaggaggtgagctgcggccaggccgagagcagcgagaagcccaacgccgaggacatgaccagcaaggactactacttcgacagctacgcccacttcggcatccacgaggagatgctgaaggacgaggtgagaaccctgacctacagaaacagcatgttccacaacagacacctgttcaaggacaaggtggtgctggacgtgggcagcggcaccggcatcctgtgcatgttcgccgccaaggccggcgccagaaaggtgatcggcatcgagtgcagcagcatcagcgactacgccgtgaagatcgtgaaggccaacaagctggaccacgtggtgaccatcatcaagggcaaggtggaggaggtggagctgcccgtggagaaggtggacatcatcatcagcgagtggatgggctactgcctgttctacgagagcatgctgaacaccgtgctgtacgccagagacaagtggctggcccccgacggcctgatcttccccgacagagccaccctgtacgtgaccgccatcgaggacagacagtacaaggactacaagatccactggtgggagaacgtgtacggcttcgacatgagctgcatcaaggacgtggccatcaaggagcccctggtggacgtggtggaccccaagcagctggtgaccaacgcctgcctgatcaaggaggtggacatctacaccgtgaaggtggaggacctgaccttcaccagccccttctgcctgcaggtgaagagaaacgactacgtgcacgccctggtggcctacttcaacatcgagttcaccagatgccacaagagaaccggcttcagcaccagccccgagagcccctacacccactggaagcagaccgtgttctacatggaggactacctgaccgtgaagaccggcgaggagatcttcggcaccatcggcatgagacccaacgccaagaacaacagagacctggacttcaccatcgacctggacttcaagggccagctgtgcgagctgagctgcagcaccgactacagaatgagatag

SEQ ID NO: 95009 - DNA, 483 bp, synthetic construct
  misc_feature 1..483: note = Description of Artificial Sequence: Synthetic coding sequence
  source 1..483: mol_type = other DNA
atgaccagcaaggactactacttcgacagctacgcccacttcggcatccacgaggagatgctgaaggacgaggtgagaaccctgacctacagaaacagcatgttccacaacagacacctgttcaaggacaaggtggtgctggacgtgggcagcggcaccggcatcctgtgcatgttcgccgccaaggccggcgccagaaaggtgatcggcatcgagtgcagcagcatcagcgactacgccgtgaagatcgtgaaggccaacaagctggaccacgtggtgaccatcatcaagggcaaggtggaggaggtggagctgcccgtggagaaggtggacatcatcatcagcgagtggatgggctactgcctgttctacgagagcatgctgaacaccgtgctgtacgccagagacaagtggctggcccccgacggcctgatcttccccgacagagccaccctgtacgtgaccgccatcgaggacagatag

SEQ ID NO: 95010 - DNA, 618 bp, synthetic construct
  misc_feature 1..618: note = Description of Artificial Sequence: Synthetic coding sequence
  source 1..618: mol_type = other DNA
atgaccagcaaggactactacttcgacagctacgcccacttcggcatccacgaggagatgctgaaggacgaggtgagaaccctgacctacagaaacagcatgttccacaacagacacctgttcaaggacaaggtggtgctggacgtgggcagcggcaccggcatcctgtgcatgttcgccgccaaggccggcgccagaaaggtgatcggcatcgagtgcagcagcatcagcgactacgccgtgaagatcgtgaaggccaacaagctggaccacgtggtgaccatcatcaagggcaaggtggaggaggtggagctgcccgtggagaaggtggacatcatcatcagcgagtggatgggctactgcctgttctacgagagcatgctgaacaccgtgctgtacgccagagacaagtggctggcccccgacggcctgatcttccccgacagagccaccctgtacgtgaccgccatcgaggacagacagtacaaggactacaagatccactggtgggagaacgtgtacggcttcgacatgagctgcatcaaggacgtggccatcaaggagcccctggtggacgtggtggaccccaagcagctggtgaccaacgcctgcctgtag

SEQ ID NO: 95011 - DNA, 483 bp, synthetic construct; identical to SEQ ID NO: 95009
  misc_feature 1..483: note = Description of Artificial Sequence: Synthetic coding sequence
  source 1..483: mol_type = other DNA

SEQ ID NO: 95012 - DNA, 630 bp, synthetic construct
  misc_feature 1..630: note = Description of Artificial Sequence: Synthetic coding sequence
  source 1..630: mol_type = other DNA
atgaccagcaaggactactacttcgacagctacgcccacttcggcatccacgaggagatgctgaaggacgaggtgagaaccctgacctacagaaacagcatgttccacaacagacacctgttcaaggacaaggtggtgctggacgtgggcagcggcaccggcatcctgtgcatgttcgccgccaaggccggcgccagaaaggtgatcggcatcgagtgcagcagcatcagcgactacgccgtgaagatcgtgaaggccaacaagctggaccacgtggtgaccatcatcaagggcaaggtggaggaggtggagctgcccgtggagaaggtggacatcatcatcagcgagtggatgggctactgcctgttctacgagagcatgctgaacaccgtgctgtacgccagagacaagtggctggcccccgacggcctgatcttccccgacagagccaccctgtacgtgaccgccatcgaggacagacagtacaaggactacaagatccactggtgggagaacgtgtacggcttcgacatgagctgcatcaaggacgtggccatcaaggagcccctggtggacgtggtggaccccaagcagctggtgaccaacgcctgcctgatcaaggtgagatag

SEQ ID NO: 95013 - DNA, 687 bp, synthetic construct
  misc_feature 1..687: note = Description of Artificial Sequence: Synthetic coding sequence
  source 1..687: mol_type = other DNA
atggccaccagcggcgactgccccagaagcgagagccagggcgaggagcccgccgagtgcagcgaggccggcctgctgcaggagggcgtgcagcccgaggagttcgtggccatcgccgactacgccgccaccgacgagacccagctgagcttcctgagaggcgagaagatcctgatcctgagacagaccaccgccgactggtggtggggcgagagagccggctgctgcggctacatccccgccaaccacgtgggcaagcacgtggacgagtacgaccccgaggacacctggcaggacgaggagtacttcggcagctacggcaccctgaagctgcacctggagatgctggccgaccagcccagaaccaccaagtaccacagcgtgatcctgcagaacaaggagagcctgaccgacaaggtgatcctggacgtgggctgcggcaccggcatcatcagcctgttctgcgcccactacgccagacccagagccgtgtacgccgtggaggccagcgagatggcccagcacaccggccagctggtgctgcagaacggcttcgccgacatcatcaccgtgtaccagcagaaggtggaggacgtggtgctgcccgagaaggtggacgtgctggtgagcgagtggatgggcacctgcctgctggtgggcgagaaggtgttccccatctggagatag

SEQ ID NO: 95014 - DNA, 855 bp, synthetic construct
  misc_feature 1..855: note = Description of Artificial Sequence: Synthetic coding sequence
  source 1..855: mol_type = other DNA
atggccaccagcggcgactgccccagaagcgagagccagggcgaggagcccgccgagtgcagcgaggccggcctgctgcaggagggcgtgcagcccgaggagttcgtggccatcgccgactacgccgccaccgacgagacccagctgagcttcctgagaggcgagaagatcctgatcctgagacagaccaccgccgactggtggtggggcgagagagccggctgctgcggctacatccccgccaaccacgtgggcaagcacgtggacgagtacgaccccgaggacacctggcaggacgaggagtacttcggcagctacggcaccctgaagctgcacctggagatgctggccgaccagcccagaaccaccaagtaccacagcgtgatcctgcagaacaaggagagcctgaccgacaaggtgatcctggacgtgggctgcggcaccggcatcatcagcctgttctgcgcccactacgccagacccagagccgtgtacgccgtggaggccagcgagatggcccagcacaccggccagctggtgctgcagaacggcttcgccgacatcatcaccgtgtaccagcagaaggtggaggacgtggtgctgcccgagaaggtggacgtgctggtgagcgagtggatgggcacctgcctgctggccgcccccctgctgagctgcagaatcctgccctgcacctgcgccagcggccccctgcacgtgctgctggcctgctgcctgcccctgccctgcacctgcgccagcgtgcccctgcacgtgctgctggcctgctgcctgcccgtgctgagagccccccagcccagcggcctgcacctgagctggcccatcttcctgctgtag

SEQ ID NO: 95015 - DNA, 1302 bp, synthetic construct
  misc_feature 1..1302: note = Description of Artificial Sequence: Synthetic coding sequence
  source 1..1302: mol_type = other DNA
atggccaccagcggcgactgccccagaagcgagagccagggcgaggagcccgccgagtgcagcgaggccggcctgctgcaggagggcgtgcagcccgaggagttcgtggccatcgccgactacgccgccaccgacgagacccagctgagcttcctgagaggcgagaagatcctgatcctgagacagaccaccgccgactggtggtggggcgagagagccggctgctgcggctacatccccgccaaccacgtgggcaagcacgtggacgagtacgaccccgaggacacctggcaggacgaggagtacttcggcagctacggcaccctgaagctgcacctggagatgctggccgaccagcccagaaccaccaagtaccacagcgtgatcctgcagaacaaggagagcctgaccgacaaggtgatcctggacgtgggctgcggcaccggcatcatcagcctgttctgcgcccactacgccagacccagagccgtgtacgccgtggaggccagcgagatggcccagcacaccggccagctggtgctgcagaacggcttcgccgacatcatcaccgtgtaccagcagaaggtggaggacgtggtgctgcccgagaaggtggacgtgctggtgagcgagtggatgggcacctgcctgctgttcgagttcatgatcgagagcatcctgtacgccagagacgcctggctgaaggaggacggcgtgatctggcccaccatggccgccctgcacctggtgccctgcagcgccgacaaggactacagaagcaaggtgctgttctgggacaacgcctacgagttcaacctgagcgccctgaagagcctggccgtgaaggagttcttcagcaagcccaagtacaaccacatcctgaagcccgaggactgcctgagcgagccctgcaccatcctgcagctggacatgagaaccgtgcagatcagcgacctggagaccctgagaggcgagctgagattcgacatcagaaaggccggcaccctgcacggcttcaccgcctggttcagcgtgcacttccagagcctgcaggagggccagcccccccaggtgctgagcaccggccccttccaccccaccacccactggaagcagaccctgttcatgatggacgaccccgtgcccgtgcacaccggcgacgtggtgaccggcagcgtggtgctgcagagaaaccccgtgtggagaagacacatgagcgtggccctgagctgggccgtgaccagcagacaggaccccaccagccagaaggtgggcgagaaggtgttccccatctggagatag

SEQ ID NO: 95016 - DNA, 486 bp, synthetic construct
  misc_feature 1..486: note = Description of Artificial Sequence: Synthetic coding sequence
  source 1..486: mol_type = other DNA
atgctggccgaccagcccagaaccaccaagtaccacagcgtgatcctgcagaacaaggagagcctgagaatcaagagcagctggacctgggccgtgggcctgggcagcagcgtgagcagcgtgcacaccatgagaggcctggagagagtgtacgccgtggaggccagcgagatggcccagcacaccggccagctggtgctgcagaacggcttcgccgacatcatcaccgtgtaccagcagaaggtggaggacgtggtgctgcccgagaaggtggacgtgctggtgagcgagtggatgggcacctgcctgctgttcgagttcatgatcgagagcatcctgtacgccagagacgcctggctgaaggagaccggcagcttcggccccccctggctgagatgcaccctgtgccccgccgtgctgatcagaatcatcgtggccagatgcagcagcggcaccaccagaaccagcagcaccagcgccctgtag

SEQ ID NO: 95017 - DNA, 1302 bp, synthetic construct; identical to SEQ ID NO: 95015
  misc_feature 1..1302: note = Description of Artificial Sequence: Synthetic coding sequence
  source 1..1302: mol_type = other DNA

SEQ ID NO: 95018 - DNA, 1302 bp, synthetic construct; identical to SEQ ID NO: 95015
  misc_feature 1..1302: note = Description of Artificial Sequence: Synthetic coding sequence
  source 1..1302: mol_type = other DNA

SEQ ID NO: 95019 - DNA, 996 bp, synthetic construct
  misc_feature 1..996: note = Description of Artificial Sequence: Synthetic coding sequence
  source 1..996: mol_type = other DNA
atggccaccagcggcgactgccccagaagcgagagccagggcgaggagcccgccgagtgcagcgaggccggcctgctgcaggagggcgtgcagcccgaggagttcgtggccatcgccgactacgccgccaccgacgagacccagctgagcttcctgagaggcgagaagatcctgatcctgagacagaccaccgccgactggtggtggggcgagagagccggctgctgcggctacatccccgccaaccacgtgggcaagcacgtggacgagtacgaccccgaggacacctggcaggacgaggagtacttcggcagctacggcaccctgaagctgcacctggagatgctggccgaccagcccagaaccaccaagtaccacagcgtgatcctgcagaacaaggagagcctgaccgacaaggtgatcctggacgtgggctgcggcaccggcatcatcagcctgttctgcgcccactacgccagacccagagccgtgtacgccgtggaggccagcgagatggcccagcacaccggccagctggtgctgcagaacggcttcgccgacatcatcaccgtgtaccagcagaaggtggaggacgtggtgctgcccgagaaggtggacgtgctggtgagcgagtggatgggcacctgcctgctgaccctgagaggcgagctgagattcgacatcagaaaggccggcaccctgcacggcttcaccgcctggttcagcgtgcacttccagagcctgcaggagggccagcccccccaggtgctgagcaccggccccttccaccccaccacccactggaagcagaccctgttcatgatggacgaccccgtgcccgtgcacaccggcgacgtggtgaccggcagcgtggtgctgcagagaaaccccgtgtggagaagacacatgagcgtggccctgagctgggccgtgaccagcagacaggaccccaccagccagaaggtgggcgagaaggtgttccccatctggagatag

SEQ ID NO: 95020 - DNA, 870 bp, synthetic construct
  misc_feature 1..870: note = Description of Artificial Sequence: Synthetic coding sequence
  source 1..870: mol_type = other DNA
atggccaccagcggcgactgccccagaagcgagagccagggcgaggagcccgccgagtgcagcgaggccggcctgctgcaggagggcgtgcagcccgaggagttcgtggccatcgccgactacgccgccaccgacgagacccagctgagcttcctgagaggcgagaagatcctgatcctgagacagaccaccgccgactggtggtggggcgagagagccggctgctgcggctacatccccgccaaccacgtgggcaagcacgtggacgagtacgaccccgaggacacctggcaggacgaggagtacttcggcagctacggcaccctgaagctgcacctggagatgctggccgaccagcccagaaccaccaagtaccacagcgtgatcctgcagaacaaggagagcctgaccgacaaggtgatcctggacgtgggctgcggcaccggcatcatcagcctgttctgcgcccactacgccagacccagagccgtgtacgccgtggaggccagcgagatggcccagcacaccggccagctggtgctgcagaacggcttcgccgacatcatcaccgtgtaccagcagaaggtggaggacgtggtgctgcccgagaaggtggacgtgctggtgagcgagtggatgggcacctgcctgctgttcgagttcatgatcgagagcatcctgtacgccagagacgcctggctgaaggaggacggcgtgatctggcccaccatggccgccctgcacctggtgccctgcagcgccgacaaggactacagaagcaaggtgctgttctgggacaacgcctacgagttcaacctgagcgccctgaagctggagaagaagagcagccccagcggcgacgacagctag

SEQ ID NO: 95021 - DNA, 906 bp, synthetic construct
  misc_feature 1..906: note = Description of Artificial Sequence: Synthetic coding sequence
  source 1..906: mol_type = other DNA
atggccaccagcggcgactgccccagaagcgagagccagggcgaggagcccgccgagtgcagcgaggccggcctgctgcaggagggcgtgcagcccgaggagttcgtggccatcgccgactacgccgccaccgacgagacccagctgagcttcctgagaggcgagaagatcctgatcctgagacagaccaccgccgactggtggtggggcgagagagccggctgctgcggctacatccccgccaaccacgtgggcaagcacgtggacgagtacgaccccgaggacacctggcaggacgaggagtacttcggcagctacggcaccctgaagctgcacctggagatgctggccgaccagcccagaaccaccaagtaccacagcgtgatcctgcagaacaaggagagcctgaccgacaaggtgatcctggacgtgggctgcggcaccggcatcatcagcctgttctgcgcccactacgccagacccagagccgtgtacgccgtggaggccagcgagatggcccagcacaccggccagctggtgctgcagaacggcttcgccgacatcatcaccgtgtaccagcagaaggtggaggacgtggtgctgcccgagaaggtggacgtgctggtgagcgagtggatgggcacctgcctgctgcaccacaccctggaggccgacgccgtgcacgacggcagacccagcccctgcccctacagaagaagaggccacggcttcagctgcgtggccgagaagcccagcgtggagaaggcccacgtgtgcggcagcgagctgggctgccacttccagaccagaccccacatcagcaagagctggagaaagagcctgccccacctggagatgaccgtggacgccctgttcggcaagcagtgcgcctacctggagggctag

SEQ ID NO: 95022 - DNA, 951 bp, synthetic construct
  misc_feature 1..951: note = Description of Artificial Sequence: Synthetic coding sequence
  source 1..951: mol_type = other DNA
atgatcgccgacagagtgagaaccgacgcctacagactgggcatcctgagaaactgggccgccctgagaggcaagaccgtgctggacgtgggcgccggcaccggcatcctgagcatcttctgcgcccaggccggcgccagaagagtgtacgccgtggaggccagcgccatctggcagcaggccagagaggtggtgagattcaacggcctggaggacagagtgcacgtgctgcccggccccgtggagaccgtggagctgcccgagcaggtggacgccatcgtgagcgagtggatgggctacggcctgctgcacgagagcatgctgagcagcgtgctgcacgccagaaccaagtggctgaaggagggcggcctgctgctgcccgccagcgccgagctgttcatcgcccccatcagcgaccagatgctggagtggagactgggcttctggagccaggtgaagcagcactacggcgtggacatgagctgcctggagggcttcgccaccagatgcctgatgggccacagcgagatcgtggtgcagggcctgagcggcgaggacgtgctggccagaccccagagattcgcccagctggagctgagcagagccggcctggagcaggagctggaggccggcgtgggcggcagattcagatgcagctgctacggcagcgcccccatgcacggcttcgccatctggttccaggtgaccttccccggcggcgagagcgagaagcccctggtgctgagcaccagccccttccaccccgccacccactggaagcaggccctgctgtacctgaacgagcccgtgcaggtggagcaggacaccgacgtgagcggcgagatcaccctgctgcccagcagagacaaccccagaagactgagagtgctgctgagatacaaggtgggcgaccaggaggagaagaccaaggacttcgccatggaggactag

SEQ ID NO: 95023 - DNA, 1128 bp, synthetic construct
  misc_feature 1..1128: note = Description of Artificial Sequence: Synthetic coding sequence
  source 1..1128: mol_type = other DNA
atgagccagcccaagaagagaaagctggagagcggcggcggcggcgagggcggcgagggcaccgaggaggaggacggcgccgagagagaggccgccctggagagacccagaagaaccaagagagagagagaccagctgtactacgagtgctacagcgacgtgagcgtgcacgaggagatgatcgccgacagagtgagaaccgacgcctacagactgggcatcctgagaaactgggccgccctgagaggcaagaccgtgctggacgtgggcgccggcaccggcatcctgagcatcttctgcgcccaggccggcgccagaagagtgtacgccgtggaggccagcgccatctggcagcaggccagagaggtggtgagattcaacggcctggaggacagagtgcacgtgctgcccggccccgtggagaccgtggagctgcccgagcaggtggacgccatcgtgagcgagtggatgggctacggcctgctgcacgagagcatgctgagcagcgtgctgcacgccagaaccaagtggctgaaggagggcggcctgctgctgcccgccagcgccgagctgttcatcgcccccatcagcgaccagatgctggagtggagactgggcttctggagccaggtgaagcagcactacggcgtggacatgagctgcctggagggcttcgccaccagatgcctgatgggccacagcgagatcgtggtgcagggcctgagcggcgaggacgtgctggccagaccccagagattcgcccagctggagctgagcagagccggcctggagcaggagctggaggccggcgtgggcggcagattcagatgcagctgctacggcagcgcccccatgcacggcttcgccatctggttccaggtgaccttccccggcggcgagagcgagaagcccctggtgctgagcaccagccccttccaccccgccacccactggaagcaggccctgctgtacctgaacgagcccgtgcaggtggagcaggacaccgacgtgagcggcgagatcaccctgctgcccagcagagacaaccccagaagactgagagtgctgctgagatacaaggtgggcgaccaggaggagaagaccaaggacttcgccatggaggactag

SEQ ID NO: 95024 - DNA, 936 bp, synthetic construct
  misc_feature 1..936: note = Description of Artificial Sequence: Synthetic coding sequence
  source 1..936: mol_type = other DNA
atggccagaagcggcagaagaccctggagcgaccccggcggcctgagcggcgccgtgcagagagccggcggccccggcgccagacccgccggcaccagcggcgactgcagagtggccggcaccggcggctgccacagagagagagtggacggcctgagaacccccgccagagtgcacgccgagctgagaccccccagagccaaccaggtggccgagggcggcagaagcagccccgccggcctgagaagagccctgcacagcccccaccagagacccgacgccggcatggcccccggcctgctggagcccggcgaggccgccctgtggtgcggccacgagctgcccggcggcctgagacacgccctgagccacggccccctgggcgacagatgcgccggcatcgtgagaagaggcagagccggccccgccgccgccctgtgcagcgccagagccctgcccagaagactgggcgccggcgccggcggcagaagcggcagagccctgcccctgcagctgctgtggctgggcgcccacgcctggctgtgccacctggtgcccggcgacctgccctggagaggcgtgggcgagacccccggcgccgtgcacctggccttcagccccggccacagcctggagaccggcgcccccctgcccgagagagccggcgccagcggcgccagacacggcagattcagaagagaccacgccgccgccctgcccggccagccccccagccccgccagagccgccgccctgcagagcggcagacccggcggcgaggaccagagactgtgccacggcggcctgagcgtggccttcagccccagctacctgcccaagcagcccgacctgagaggcagaggcgtggccagaagcgagggcaagggcagaagccacgtgcaggtgggcggcatcagcccccccttccccagctag

SEQ ID NO: 95025 - DNA, 2532 bp, synthetic construct
  misc_feature 1..2532: note = Description of Artificial Sequence: Synthetic coding sequence
  source 1..2532: mol_type = other DNA
atggccaagcccctgaccgacagcgagaagagaaagcagatcagcgtgagaggcctggccggcctgggcgacgtggccgaggtgagaaagagcttcaacagacacctgcacttcaccctggtgaaggacagaaacgtggccacccccagagactacttcttcgccctggcccacaccgtgagagaccacctggtgggcagatggatcagaacccagcagcactactacgagagagaccccaagagaatctactacctgagcctggagttctacatgggcagaaccctgcagaacaccatggtgaacctgggcctgcagaacgcctgcgacgaggccatctaccagctgggcctggacctggaggagctggaggagatcgaggaggacgccggcctgggcaacggcggcctgggcagactggccgcctgcttcctggacagcatggccaccctgggcctggccgcctacggctacggcatcagatacgagttcggcatcttcaaccagaagatcgtgaacggctggcaggtggaggaggccgacgactggctgagatacggcaacccctgggagaaggccagacccgagtacatgctgcccgtgcacttctacggcagagtggagcacacccccgacggcgtgaagtggctggacacccaggtggtgctggccatgccctacgacacccccgtgcccggctacaagaacaacaccgtgaacaccatgagactgtggagcgccaaggcccccaacgacttcaagctgcaggacttcaacgtgggcgactacatcgaggccgtgctggacagaaacctggccgagaacatcagcagagtgctgtaccccaacgacaacttcttcgagggcaaggagctgagactgaagcaggagtacttcgtggtggccgccaccctgcaggacatcatcagaagattcaagagcagcaagttcggctgcagagaccccgtgagaacctgcttcgagaccttccccgacaaggtggccatccagctgaacgacacccaccccgccctgagcatccccgagctgatgagaatcctggtggacgtggagaaggtggactgggacaaggcctgggagatcaccaagaagacctgcgcctacaccaaccacaccgtgctgcccgaggccctggagagatggcccgtgagcatgttcgagaagctgctgcccagacacctggagatcatctacgccatcaaccagagacacctggaccacgtggccgccctgttccccggcgacgtggacagactgagaagaatgagcgtgatcgaggagggcgactgcaagagaatcaacatggcccacctgtgcgtgatcggcagccacgccgtgaacggcgtggccagaatccacagcgagatcgtgaagcagagcgtgttcaaggacttctacgagctggagcccgagaagttccagaacaagaccaacggcatcacccccagaagatggctgctgctgtgcaaccccggcctggccgacaccatcgtggagaagatcggcgaggagttcctgaccgacctgagccagctgaagaagctgctgcccctggtgagcgacgaggtgttcatcagagacgtggccaaggtgaagcaggagaacaagctgaagttcagcgccttcctggagaaggagtacaaggtgaagatcaaccccagcagcatgttcgacgtgcacgtgaagagaatccacgagtacaagagacagctgctgaactgcctgcacgtggtgaccctgtacaacagaatcaagagagaccccgccaaggccttcgtgcccagaaccgtgatgatcggcggcaaggccgcccccggctaccacatggccaagctgatcatcaagctggtgaccagcatcggcgacgtggtgaaccacgaccccgtggtgggcgacagactgaaggtgatcttcctggagaactacagagtgagcctggccgagaaggtgatccccgccgccgacctgagccagcagatcagcaccgccggcaccgaggccagcggcaccggcaacatgaagttcatgctgaacggcgccctgaccatcggcaccatggacggcgccaacgtggagatggccgaggaggccggcgccgagaacctgttcatcttcggcctgagagtggaggacgtggaggccctggacagaaagggctacaacgccagagagtactacgaccacctgcccgagctgaagcaggccgtggaccagatcagcagcggcttcttcagccccaaggagcccgactgcttcaaggacatcgtgaacatgctgatgcaccacgacagattcaaggtgttcgccgactacgaggcctacatgcagtgccaggcccaggtggaccagctgtacagaaaccccaaggagtggaccaagaaggtgatcagaaacatcgcctgcagcggcaagttcagcagcgacagaaccatcaccgagtacgccagagagatctggggcgtggagcccagcgacctgcagatccccccccccaacatccccagagactag

SEQ ID NO: 95026 - DNA, 717 bp, synthetic construct
  misc_feature 1..717: note = Description of Artificial Sequence: Synthetic coding sequence
  source 1..717: mol_type = other DNA
atgctgaccaccctgctgcccatcctgctgctgagcggctgggccttctgcagccaggacgccagcgacggcctgcagagactgcacatgctgcagatcagctacttcagagacccctaccacgtgtggtaccagggcaacgccagcctgggcggccacctgacccacgtgctggagggccccgacaccaacaccaccatcatccagctgcagcccctgcaggagcccgagagctgggccagaacccagagcggcctgcagagctacctgctgcagttccacggcctggtgagactggtgcaccaggagagaaccctggccttccccctgaccatcagatgcttcctgggctgcgagctgccccccgagggcagcagagcccacgtgttcttcgaggtggccgtgaacggcagcagcttcgtgagcttcagacccgagagagccctgtggcaggccgacacccaggtgaccagcggcgtggtgaccttcaccctgcagcagctgaacgcctacaacagaaccagatacgagctgagagagttcctggaggacacctgcgtgcagtacgtgcagaagcacatcagcgccgagaacaccaagggcagccagaccagcagaagctacaccagcctggtgctgggcgtgctggtgggcagcttcatcatcgccggcgtggccgtgggcatcttcctgtgcaccggcggcagaagatgctag

SEQ ID NO: 95027 - DNA, 4551 bp, synthetic construct
  misc_feature 1..4551: note = Description of Artificial Sequence: Synthetic coding sequence
  source 1..4551: mol_type = other DNA
atggacaaccagcaggacaaggccatcgtggccagcgccaacggcgagaacaccctgatcaacggcgtgaaggagaacgacagcgaggaccaggacgtggccatgaagagcttcgccgccctggaggccgccgcccccatccagcccacccccgtggcccagaaggagaccctgatgtaccccagaggcctgctgcccctgcccagcaagaagccctgcatgcagagcccccccagccccctgggcctgatcgaggcccccgagcacgccgccaacagcgccagcgtgaacgccatcagcctgaccagcggcatcgccaagggcctgaacacctggagcctgcccaacgagtgcgagaaggcccccttcgccatcatggagcccgccggcatgagcgccctgaacggcgactgcctgatgcagcccagcagaacctgcctgggctgcttcatggagagcaaggacgccgtggaccccgagcccggcatcagcctgaaggtgggcgacctgaacagagactacgagacctgcgccgtgagcgacatcggcatccagtgcatcaacgccggcgagaacatgaagtacggcgagcagctgctgagcgaccagctgctgggcttccccctgcacaagagcagagccggcgacagaagagagaccgagaagcccgacatcgacctggaggaccccgcccagaagagctactacgaggccctgctgctggacaagtgcaacaccgaggaggccctgctggccaacagcaaccaggactggggctacttcgagaccttcatcagcgagagcaagatcgagctgctggacctgtgcagcaagaacgagctgagcgtgaacctgttcagcgaggaggacgtggacaactacatgttcgacgacgacgagagcaccctgggcagcgacgtgtgcagcctgaagatcagatacgagagcttccaggacaacgtgagagacaagaccaccctgctgatgcaggaggacgcccagttcaacttcttccccagcgtgttcaccacctgccccaagagagagagcaagagcggcgccctgaagcagagcagcgacttcagccagttcaaggtgcccgacgtgagcatcatctggggcgaggaggacaagaacctggacaagaagaagggcaaggaggagggccaggaggacaagggcgtggagaagaaggacggcaaggacaacggcgagaagcccgccctgaacaagccctgcagcggcaccgaggtggagcagctgaagaaccccaagcagggccacctggccaacagcctggagaccagcggcagcttcagcgacgacagcagcttcatcgagatcagctacgacgccatgggcgagatcaaggactgcagcagatacatggccagagacaccaacagcggcagcagcagcagccagcagaactacggcctgagagccaagagaaaggtgagatacagcgaggactacctgtacgacgtggacagcctggagggcgagaaggtgaacgagagaaaggagtggctgcccgtgggcagcaaggaggaggacgacgacgagtggtgccccaagaagagaagaaaggtgaccagaaaggagccccccgtgatcatcaagtacatcatcatcaacagattcaagggcgagaagaacatgctggtgaagctgggcaaggtggacgccagcgagaccaccgtgaacctgagcgagaaccagctgaacaagtacgccaagctggcccccctgaagggcttctggcagaagaagaagaagcagagaaacaccaacaccgacagcatcaagacccccttcagccagaagcagagcttcgagcccggcagcttcgaggtgagcttcctgccccccgccagaaagagaaagagcaagctgggcaacagacacagaatccagagaatccccagcatcgagatcagcgccagcagcaagcagatcagcctgtgcaacgaccagagacacgccagcaaccacaaggaggacggcggcctgaagggcaccctgaagagcgcccccctgggcgcccccagctgcgccaacggcagccacctgaacgacatcaccggccccgacagcgtgaaggtgaaggcccaggacaccgagttcaagggccccgagagaaaggtgctgaacaagatcaagttcaagagcgaggccagactgaagagcaagaaggtgaaggccgccggccaggagagcaagcccatcgtgcagatgagccccctgctggagaaccagagcagcaaggccaacctgaagaacgaggtgatccccggcaccagcaacagcagcagactgagcgagttccacgaggccaaggccgccaagagcagcaccttcctgcccaccacctgcagcagcgagatgcccctgagcagcgccaacgtgaccaccaacatccccgtgatccccggcggctacctgcagaccctgctggacgccagcgacctgagcaacaacaccagcatcagctacttcagccaccacagccccgagcagaacgagggcagcctgacccagaccgagaagagcttcgtgcccctgcagcccacccaggactgcgtgctgaccagcagcagcgacagcgagctgcagcagagcagccacaacttcaagatggagagcagcaactacagaaacgtgtggcccaacaaggccaccagcggcacccaggagttcatggccgaggtgagcagagagatcgcccccacccagagcagcgagttcggcgccagccaggtggtgagcatggagaacaacctgacccccaccacctacaaccccatctgcctgaacagcggcggcagcaactgcaacaaggtgctgtacgacagcatgcaggacacccagctgcccagcgacgacagctaccagctgtgccacttcaacaacggcgagatctgcttccccttccagcagggccccgtgaacatggacgacggcagactgttcagcttcgacagcatggcccccctgagcgtgagcagcagcaactactgcagcctgagcctgaagagctgcgagaaggacggcgacgacgacatcaccgacgacttcctggcccactgcagccccaagctggtgatccagcagagcatcgacgagatcgcccccctgaaggagagcaccgacctgctggacatcagcaacttcacccccgacaagttcagacacagcagcctgagcgagatgagcccccccgacacccccagcctgagcccccagatcaccagatgcgagagcatgaagaccctgggcaccctgaagggcttccaggagggcgtgcccggccccctggacagcgtggagaagatcaagtgggactgcagcaccctgagcagacaggtgcagatggaggacggcttcaccctgaacaaccaccagttccagttccacatgttcaacgacgaggacagcgtgagcctgctgcagaagaacccctgcctgagcaccttcaacgaccccagcggccagatcagcaccaacaacaaggtgagcaagagcagaaagaagagcagccccagcaagagcggcgccatgaaccagagcagcagccagaagaacaccagaaagaagagcctgaagggcaacaacaagggcatcgagaagccccccggcaagaacagcagacaggtgcccaagagcaccaagaagggcaagtacatggccgccatcaacggcgagaagatgcagatcggcatcggcagaggcggcagccagaccaacaccatcagcagcaccggcaagaccctggccgagtgcatccagcacggcggccccatggccagcatgaagatgcccagccagaagggcctgagcggcgactgggccctgggcaaggagagcagccccggctggagcgacatgagcatgggcaccaacaccaacagcctgctggacgacgaccagagagagttccaggagcccagctacatcctgagcaacatcgccagcggcatggccgacgtgcagagattcatgatggccagcatcgagcccctgtgggagcccatggagcaccacggcgaccccaacatcttctacagccccgagagcaacagcctgaagctgaagaccctgaagatcctggccggcaccccccaggagagcaagaagaagatcaacagcggcagccagggcgccaccaagaaccacagaagcatcaagggcgtgagcaagagcaacggcaagaccgccatcggcgaccccggcagagccaacatgcccggctacaacgaggacagcagaagcaccttcttcgacaagaagtacagcaacatgagcaccctgggcaacaacggccccacccacaagaagctgtacagacacaagagcagcagcaaggccctgagagacgagaagtgcaagggcaagcacatggagagagagcaggtgcacaaggacgagagcggcaccgccagcttcgagaagctgagagacagcgactacaacctgctgaaggccgagaccaccttctgggtgctgcccgtgttcgaggaggagaccagaatcttccagaaggacatctag

SEQ ID NO: 95028 - DNA, 1008 bp, synthetic construct
  misc_feature 1..1008: note = Description of Artificial Sequence: Synthetic coding sequence
  source 1..1008: mol_type = other DNA
atgtgggccaccctgcccctgctgtgcgccggcgcctggctgctgggcgtgcccgtgtgcggcgccgccgagctgtgcgtgaacagcctggagaagttccacttcaagagctggatgagcaagcacagaaagacctacagcaccgaggagtaccaccacagactgcagaccttcgccagcaactggagaaagatcaacgcccacaacaacggcaaccacaccttcaagatggccctgaaccagttcagcgacatgagcttcgccgagatcaagcacaagtacctgtggagcgagccccagaactgcagcgccaccaagagcaactacctgagaggcaccggcccctacccccccagcgtggactggagaaagaagggcaacttcgtgagccccgtgaagaaccagggcgcctgcggcagctgctggaccttcagcaccaccggcgccctggagagcgccatcgccatcgccaccggcaagatgctgagcctggccgagcagcagctggtggactgcgcccaggacttcaacaaccacggctgccagggcggcctgcccagccaggccttcgagtacatcctgtacaacaagggcatcatgggcgaggacacctacccctaccagggcaaggacggctactgcaagttccagcccggcaaggccatcggcttcgtgaaggacgtggccaacatcaccatctacgacgaggaggccatggtggaggccgtggccctgtacaaccccgtgagcttcgccttcgaggtgacccaggacttcatgatgtacagaaccggcatctacagcagcaccagctgccacaagacccccgacaaggtgaaccacgccgtgctggccgtgggctacggcgagaagaacggcatcccctactggatcgtgaagaacagctggggcccccagtggggcatgaacggctacttcctgatcgagagaggcaagaacatgtgcggcctggccgcctgcgccagctaccccatccccctggtgtag

SEQ ID NO: 95029 - DNA, 5655 bp, synthetic construct
  misc_feature 1..5655: note = Description of Artificial Sequence: Synthetic coding sequence
  source 1..5655: mol_type = other DNA
atgcactgcaccaaccccgccctgatcttcctgatcgacgagctgagccccgagcagcacaacctgagcctgtacagcatggagctggtgctgaagaagagcaccggccacagcgccgcccaggtggccctgaccgagaccgcccccggcagccagcacagcagccccctgcacgtgaccgccccccccagcgccaccaccttcgacaccgccttcttcaaccagggcaagcagaccaagagcaccgccgaccccagcatcttcgtggccacctacgtgagcgtgaccagcaaggaggtggccgtgaacgacgacgagatggacaacttcctgcccgacacccactggaccacccccagaatggtgagccccatccagtacatcaccgtgagcccccccggcctgcccagagaggccctggagcccatgctgacccccagcctgcccatggtgagcctgcaggacgaggaggtgaccagcggctggcagaacaccaccagacagcccgccgcctacgccgagagcgccagccacttccacaccttcagaagcgccttcagaaccagcgagggcatcgtgcccacccccggcagaaacctggtgctgtaccccaccgacgcctacagccacctgagcagcagaaccctgcccgagatcgtggccagcctgaccgagggcgtggagaccaccctgttcctgagcagcagaagcctgatgccccagcccctgggcgacggcatcaccatccccctgcccagcctgggcgaggtgagccagccccccgaggaggtgtgggccaccagcgccgacagatacaccgacgtgaccaccgtgctgagccagagcctggaggagaccatcagccccagaacctaccccaccgtgaccgccagccacgccgccctggccttcagcagaacccacagccccctgctgagcacccccctggccttcgccagcagcgccagccccaccgacgtgagcagcaaccccttcctgcccagcgacagcagcaagaccagcgagctgcacagcaacagcgccctgcccggccccgtggacaacacccacatcctgagccccgtgagcagcttcagaccctacacctggtgcgccgcctgcaccgtgcccagcccccagcaggtgctggccaccagcctgatggagaaggacgtgggcagcggcgacggcgccgagaccctgtgcatgaccgtgctggaggagagcagcatcagcctgatgagcagcgtggtggccgacttcagcgagttcgaggaggacccccaggtgttcaacaccctgttccccagcagacccatcgtgcccctgagcagcagaagcatggagatcagcgagaccagcgtgggcatcagcgccgaggtggacatgagcagcgtgaccaccacccaggtgccccccgcccacggcagactgagcgtgcccgccagcctggaccccaccgccggcagcctgagcgtggccgagacccaggtgacccccagcagcgtgaccaccgccttcttcagcgtgatcaccagcatcctgctggacagcagcttcagcgtgatcgccaacaagaacacccccagcctggccgtgagagaccccagcgtgttcaccccctacagcctggtgcccagcgtggagagcagcctgttcagcgaccaggagagaagcagcttcagcgagcacaagcccagaggcgccctggacttcgccagcagcttcttcagcaccccccccctggagctgagcggcagcatcagcagccccagcgaggcccccgccagcctgagcctgatgcccagcgacctgagccccttcaccagccagagcttcagccccctggtggagaccttcaccctgttcgacagcagcgacctgcagagcagccagctgagcctgcccagcagcaccaacctggagttcagccagctgcagcccagcagcgagctgcccctgaacaccatcatgctgctgcccagcagaagcgaggtgagcccctggagcagcttccccagcgacagcctggagttcgtggaggccagcaccgtgagcctgaccgacagcgaggcccacttcaccagcgccttcatcgagaccaccagctacctggagagcagcctgatcagccacgagagcgccgtgaccgccctggtgccccccggcagcgagagcttcgacatcctgaccgccggcatccaggccaccagccccctgaccaccgtgcacaccacccccatcctgaccgagagcagcctgttcagcaccctgaccccccccgacgaccagatcagcgccctggacggccacgtgagcgtgctggccagcttcagcaaggccatccccaccggcaccgtgctgatcaccgacgcctacctgcccagcggcagcagcttcgtgagcgaggccacccccttccccctgcccaccgagctgaccgtggtgggccccagcctgacccccaccgaggtgcccctgaacaccagcaccgaggtgagcaccaccagcaccggcgccgccaccggcggccccctggacagcaccctgatgggcgacgccgccagccagagcccccccgagagcagcgccgccccccccctgcccagcctgagacccgtgaccgccttcaccctggaggccaccgtggacacccccaccctggccaccgccaagcccccctacgtgtgcgacatcaccgtgcccgacgcctacctgatcaccaccgtgctggccagaagagccgtgcaggagtacatcatcaccgccatcaaggaggtgctgagaatccacttcaacagagccgtggagctgaaggtgtacgagctgttcaccgacttcaccttcctggtgaccagcggccccttcgtgtacaccgccatcagcgtgatcaacgtgctgatcaacagcaagctggtgagagaccagacccccctgatcctgagcgtgaagcccagcttcctggtgcccgagagcagattccaggtgcagaccgtgctgcagttcgtgccccccagcgtggacaccggcttctgcaacttcacccagagaatcgagaagggcctgatgaccgccctgttcgaggtgagaaagcaccaccagggcacctacaacctgaccgtgcagatcctgaacatcaccatcagcagcagcagagtgacccccagaagaggccccgtgaacatcatcttcgccgtgaagagcacccagggcttcctgaacggcagcgaggtgagcgagctgctgagaaacctgagcgtggtggagttcagcttctacctgggctaccccgtgctgcagatcgccgagcccttccagtacccccagctgaacctgagccagctgctgaagagcagctgggtgagaaccgtgctgctgggcgtgatggagaagcagctgcagaacgaggtgttccaggccgagatggagagaaagctggcccagctgctgagcgaggtgagcaccagaagaagaatgtggagaagagccaccgtggccgccggcaacagcgtggtgcaggtggtgaacgtgagcagactggagggcgacgacaaccccgtgcagctgatctacttcgtggaggaccaggacggcgagagactgagcgccgtgaagagcagcgacctgatcaacaagatggacctgcagagagccgccatcatcctgggctacagaatccagggcgtgatcgcccagcccgtggacagagtgaagagacccagccccgagagccagagcaacaacctgtgggtgatcgtgggcgtggtgatccccgtgctggtggtgatggtgatcgtggtgatcctgtactggaagctgtgcagaaccgacaagctggacttccagcccgacaccgtggccaacatccagcagagacagaagctgcagatccccagcgtgaagggcttcgacttcgccaagcagcacctgggccagcacaacaaggacgacatcctgatcatccacgagcccgcccccctgcccggccccctgaaggaccacaccacccccagcgagaacggcgacgtgcccagccccaagagcaagatccccagcaagaacgtgagacacagaggcagagtgagccccagcgacgccgacagcaccgtgagcgaggagagcagcgagagagacgccggcgacaagacccccggcgccgtgaacgacggcagaagccacagagccccccagagcggcccccccctgcccagcagcggcaacgagcagcacagcagcgccagcatcttcgagcacgtggacagaatcagcagaccccccgaggccagcagaagagtgcccagcaagatccagctgatcgccatgcagcccatccccgccccccccgtgcagagacccagccccgccgacagagtggccgagagcaacaagatcaacaaggagatccagaccgccctgagacacaagagcgagatcgagcaccacagaaacaagatcagactgagagccaagagaagaggccactacgagttccccgtggtggacgacctgagcagcggcgacaccaaggagagacacagagtgtacagaagagcccagatgcagatcgacaagatcctggaccccaccgccagcgtgcccagcgtgttcatcgagcccagaaagagcagcagaatcaagagaagccccaagcccagaagaaagcaccaggtgaacggctgccccgccgacgccgagaaggacagactgatcaccaccgacagcgacggcacctacagaagaccccccggcgtgcacaacagcgcctacatcggctgccccagcgaccccgacctgcccgccgacgtgcagacccccagcagcgtggagctgggcagataccccgccctgcccttccccgccagccagtacatccccccccagcccagcatcgaggaggccagacagaccatgcacagcctgctggacgacgccttcgccctggtggcccccagcagccagcccgccagcaccgccggcgtgggccccggcgtgccccccggcctgcccgccaacagcacccccagccaggaggagagaagagccacccagtggggcagcttctacagccccgcccagaccgccaacaacccctgcagcagatacgaggactacggcatgaccccccccaccggccccctgcccagacccggcttcggccccggcctgctgcagagcaccgagctggtgccccccgacccccagcagccccaggccagcgccgaggcccccttcgccgccagaggcatctacagcgaggagatgcccagcgtggccagacccagacccgtgggcggcaccaccggcagccagatccagcacctgacccaggtgggcatcgccagcagaatcggcgcccagcccgtggagatcccccccagcagaggcagccagtacggcggccccggctggcccagctacggcgaggacgaggccggcagaagagaggccgtgcccagaaccagcggcagagagcccagcgcccccagcggcaacctgccccacagaggcctgcagggccccggcctgggctaccccaccagcagcaccgaggacctgcagcccggccacagcagcgccagcctgatcaaggccatcagagaggagctgctgagactgagccagaagcagagcaccgtgcagaacttccacagctag

SEQ ID NO: 95030 - DNA, 1236 bp, synthetic construct
  misc_feature 1..1236: note = Description of Artificial Sequence: Synthetic coding sequence
  source 1..1236: mol_type = other DNA
atggagacccccgaggtgcccgtgggcagcctgatcgacttcggccccgaggcccccaccagcagccccctggaggcccccccccccgtgctgcaggacggcgacggcagcctgggcgacggcgccagcgagagcgagaccaccgagagcgccgacagcgagaacgacatgggcgagagccccagccaccccagctgggaccaggacagaagaagcagcagcaacgagagcttcagcagcaaccagagcaccgagagcacccaggacgaggagaccctggccctgagagacttcatgagaggctacgtggagaagatcttcagcggcggcgaggacctggaccaggaggagaaggccaagttcggcgagtactgcagcagcgagaacggcaagggcagagagtggttcgccagatacgtgagcgcccagagatgcaacagcaagtgcgtgagcgaggccaccttctacagactggtgcagagcttcgccgtggtgctgttcgagtgccaccagatggacgacttcggccccgccaagaacctgatgaccatgtgcttcacctactaccacatcggcaagccccagctgctgccccccgagagcagagagaagcccgccggcagcatcgacagctacctgaagagcgccaacagctggctggccgagaagaaggacatcgccgagagactgctgaagaacaccagcgccagaaccgagaacgtgaagggcttcttcggcggcctggagaccaagctgaagggccccctggccagaagaaacgaggaggacgagaacaagccccaggagaagagacccagagccgtgaccgcctacagccccgaggacgagaagaagggcgagaagatctacctgtacacccacctgaagcagcagcccatctggcacaccctgagattctggaacgccgccttcttcgacgccgtgcactgcgagagaaccaagagaagccccaccaccagaggcgacgccggcgaggaggaggagaagagagagaagtggtgccacatgacccaggaggagagagacgacagcctgagattcaacgagaacatcaccttcggccagctgggcaccttcacccacaacatgctggccttcggcctgaacaagaagctgtgcaacgacttcctgaagaagcaggccgtgatcggcaacctggacgaggagcagtacaagctgctgagcgaccacatcgagcagatggccaccgagtag

SEQ ID NO: 95031 - DNA, 15018 bp, synthetic construct
  misc_feature 1..15018: note = Description of Artificial Sequence: Synthetic coding sequence
  source 1..15018: mol_type = other DNA
atggaccagagaaagaacgagagcatcgtgcccagcatcacccagctggaggacttcctgaccgagcacaacagcaacgtggtgtggctgctggtggccaccatcctgagctgcggctggatcatctacctgacctactacaacagcagaaacgtgggcctgatcctgaccctggtgctgaacagactgtacaagcacggctacatccacatcggcagcttcagcttcagcgtgctgagcggcaaggtgatggtgagagagatctactacatcaccgaggacatgagcatcagaatccaggacggcttcatcatcttcagatggtggaagatgtacaaccccaagcagaagcagcacgaccccaaggccgagaccagactgtacatcaccgtgaacgacttcgagttccacgtgtacaacagaagcgacctgtacggcagactgcaggagctgttcggcctggagcccaccatcatcccccccaagaaggacgacgacaagaccagagagatcggcagaaccagaacccagagcaagatcgagagagtgaaggtgaagaccgagagccaggaccccaccagcagctggagaagcctgatccccgtgatcaaggtgaacgtgagcaccggcagactggccttcggcaaccactaccagccccagaccctgtgcatcaacttcgacgacgccttcctgacctacaccaccaagccccccagcagccacctggaccagttcatgcacatcgtgaagggcaagctggagaacgtgagagtgatgctggtgcccagccccagatacgtgggcctgcagaacgacgagccccccagactgatgggcgagggcttcgtggtgatgcagagcaacgacgtggacatctactactacatggacgagcccggcctggtgcccgaggagaccgaggagaacatcgagggcgagatgagcagcgaggactgcaagctgcaggacctgcccccctgctggggcctggacatcgtgtgcggcaagggcaccgacttcaactacggcccctgggccgacagacagagagactgcctgtggaagttcttcttcccccccgactaccaggtgctgaaggtgagcgagatcgcccagcccggcagacccagacagatcctggccttcgagctgagaatgaacatcatcgccgacgccaccatcgacctgctgttcaccaagaacagagagaccaacgccgtgcacgtgaacgtgggcgccggcagctacctggagatcaacatccccatgaccgtggaggagaacggctacacccccgccatcaagggccagctgctgcacgtggacgccaccaccagcatgcagtacagaaccctgctggaggccgagatgctggccttccacatcaacgccagctaccccagaatctggaacatgccccagacctggcagtgcgagctggaggtgtacaaggccacctaccacttcatcttcgcccagaagaacttcttcaccgacctgatccaggactggagcagcgacagcccccccgacatcttcagcttcgtgccctacacctggaacttcaagatcatgttccaccagttcgagatgatctgggccgccaaccagcacaactggatcgactgcagcaccaagcagcaggagaacgtgtacctggccgcctgcggcgagaccctgaacatcgacttcagcctgcccttcaccgacttcgtgcccgccacctgcaacaccaagttcagcctgagaggcgaggacgtggacctgcacctgttcctgcccgactgccaccccagcaagtacagcctgttcatgctggtgaagaactgccaccccaacaagatgatccacgacaccggcatccccgccgagtgccagagcggccagaagaccgtgaagcccaagtggagaaacgtgacccaggagaagagcggctgggtggagtgctggaccgtgcccagcgtgatgctgaccatcgactacacctggcaccccatctacccccagaaggccgacgagcagctgaagcagagcctgagcgagatggaggagaccatgctgagcgtgctgagacccagccagaagaccagcgacagagtggtgagcagccccagcaccagcagcagaccccccatcgaccccagcgagctgccccccgacaagctgcacgtggagatggagctgagccccgacagccagatcaccctgtacggccccctgctgaacgccttcctgtgcatcaaggagaactacttcggcgaggacgacatgtacatggacttcgaggaggtgatcagcagccccgtgctgagcctgagcaccagcagcagcagcggctggaccgccgtgggcatggagaacgacaagaaggagaacgagggcagcgccaagagcatccaccccctggccctgagaccctgggacatcaccgtgctggtgaacctgtacaaggtgcacggcagactgcccgtgcacggcaccaccgacggccccgagtgccccaccgccttcctggagagactgtgcttcgagatgaagaagggcttcagagagaccatgctgcagctgatcctgagccccctgaacgtgttcgtgagcgacaactaccagcagagaccccccgtggacgaggtgctgagagagggccacatcaacctgagcggcctgcagctgagagcccacgccatgttcagcgccgagggcctgcccctgggcagcgacagcctggagtacgcctggctgatcgacgtgcaggccggcagcctgaccgccaaggtgaccgccccccagctggcctgcctgctggagtggggccagaccttcgtgttccacgtggtgtgcagagagtacgagctggagagacccaagagcgtgatcatctgccagcacggcatcgacagaagattctgcgagagcaagctgagctgcatccccggcccctgccccaccagcgacgacctgaagtacaccatgatcagactggccgtggacggcgccgacatctacatcgtggagcacggctgcgccaccaacatcaagatgggcgccatcagagtggccaactgcaacctgcacaaccagagcgtgggcgagggcatcagcgccgccatccaggacttccaggtgagacagtacatcgagcagctgaacaactgcagaatcggcctgcagcccgccgtgctgagaagagcctactggctggaggccggcagcgccaacctgggcctgatcaccgtggacatcgccctggccgccgaccaccacagcaagcacgaggcccagagacacttcctggagacccacgacgccagaaccaagagactgtggttcctgtggcccgacgacatcctgaagaacaagagatgcagaaacaagtgcggctgcctgggcggctgcagattcttcggcggcaccgtgaccggcctggacttcttcaagctggaggagctgacccccagcagcagcagcgccttcagcagcaccagcgccgagagcgacatgtactacggccagagcctgctgcagcccggcgagtggatcatcaccaaggagatccccaagatcatcgacggcaacgtgaacggcatgaagagaaaggagtgggagaacaagagcgtgggcatcgaggtggagagaaagacccagcacctgagcctgcaggtgcccctgagaagccacagcagcagcagcagcagcgaggagaacagcagcagcagcgccgcccagcccctgctggccggcgagaaggagagccccagcagcgtggccgacgaccacctggtgcagaaggagttcctgcacggcaccaagagagacgacggccaggccagcatccccaccgagatcagcggcaacagccccgtgagccccaacacccaggacaagagcgtgggccagagccccctgagaagccccctgaagagacaggccagcgtgtgcagcaccagactgggcagcaccaagagcctgaccgccgccttctacggcgacaagcagcccgtgaccgtgggcgtgcagttcagcagcgacgtgagcagaagcgacgagaacgtgctggacagccccaagcagagaagaagcttcggcagcttcccctacacccccagcgccgacagcaacagcttccaccagtacagaagcatggacagcagcatgagcatggccgacagcgaggcctacttcagcgccgccgaggagttcgagcccatcagcagcgacgagggccccggcacctaccccggcagaaagaagaagaagaagcagacccagcagatcgactacagcagaggcagcatctaccacagcgtggagggccccctgaccggccacggcgagagcatccaggacagcagaaccctgcccttcaagacccaccccagccaggccagcttcgtgagcgccctgggcggcgaggacgacgtgatcgagcacctgtacatcgtggagggcgagaagaccgtggagagcgagcagatcaccccccagcagcccgtgatgaactgctaccagacctacctgacccagttccaggtgatcaactggagcgtgaagcaccccaccaacaagagaaccagcaagagcagcctgcacagacccctggacctggacacccccaccagcgaggagagcagcagcagcttcgagcagctgagcgtgcccaccttcaaggtgatcaagcagggcctgaccgccaacagcctgctggacagaggcatgcagctgagcggcagcaccagcaacaccccctacacccccctggagaagaagctggccgacaacaccgacgacgagaccctgaccgaggagtggaccctggaccagcccgtgagccagaccagaaccaccgccatcgtggaggtgaagggcaccgtggacatcgtgctgacccccctggtggccgaggccctggacagatacatcgaggccatggtgcactgcgccagcaccagacaccccgccgccatcgtggacgacctgcacgccaaggtgctgagagaggccgtgcagaacagcaagaccaccttcagcgagaacctgagcagcaagcaggacatcagaggcaccaagaccgagcagagcaccatcggcaccaccaaccagggccaggcccagaccaacctgaccatgaagcaggacaacgtgaccatcaagggcctgcagaccaacgtgagcatccccaaggtgaacctgtgcctgctgcaggccagcgtggaggagagccccaccaccgcccccagcagaagcgtgacccacgtgagcctggtggccctgtgcttcgacagaatcgccacccaggtgagaatgaacagaggcgtggtggaggagaccagcaacaacgccgagcccggcagaaccagcaacttcgacagatacgtgcacgccaccaagatgcagccccagagcagcggcagcctgagaagcaacgccggcgccgagaagggcaaggagatcgccgccaagctgaacatccacagagtgcacggccagctgagaggcctggacaccaccgacatcggcacctgcgccatcaccgccatccccttcgagaagagcaaggtgctgttcaccctggaggagctggacgagttcaccttcgtggacgagaccgaccagcaggccgtgcccgacgtgaccagaatcggccccagccaggagaagtggggctggatcatgttcgagtgcggcctggagaacctgaccatcaagggcggcagacagagcggcgccgtgctgtacaacagcttcggcatcatgggcaaggccagcgacaccgagagaggcggcgtgctgaccagcaacaacagcagcgacagccccaccggcagcggctacaacaccgacgtgagcgacgacaacctgccctgcgacagaaccagccccagcagcgacctgaacggcaacagcgtgagcgacgagcaggacgagggcgtggagagcgacgacctgaagaaggacctgcccctgatgccccccccccccgacagctgcagcatgaagctgaccatcaaggagatctggttcagcttcgccgcccccaccaacgtgagaagccacacccacgccttcagcagacagctgaacctgctgagcaccgccacccccgccgtgggcgcctggctggtgcccatcgaccagctgaagagcagcctgaacaagctggagaccgagggcaccctgagaatctgcgccgtgatgggctgcatcatgaccgaggccctggagaacaagagcgtgcacttccccctgagaagcaagtacaacagactgaccaaggtggccagattcctgcaggagaaccccagctgcctgctgtgcaacatcctgcaccactacctgcaccaggccaactacagcatcatcgacgacgccaccatgagcgacggcctgcccgccctggtgaccctgaagaagggcctggtggccctggccagacagtggatgaagttcatcgtggtgacccccgccttcaagggcgtgagcctgcacagacccgcccagcccctgaagccccagatcgccatggaccacgagcacgaggacggcctgggcctggacaacggcggcggcctgcagagcgacaccagcgccgacggcgccgagttcgagttcgacgccgccaccgtgagcgagcacaccatgctgctggagggcaccgccaacagacccccccccggcagcagcggccccgtgaccggcgccgagatcatgagaaagctgagcaagacccacacccacagcgacagcgccctgaagatcaagggcatccacccctaccacagcctgagctacaccagcggcgacaccgccaccgacagccccgtgcacgtgggcagagccggcatgcccgtgaaggacagccccagaaaggagagcctgctgagctacctgaccggcagcttccccagcctgcacaacctgctggagggcaccccccagagaagcagcgccgccgtgaagagcagcagcctgaccagaaccggcaacaccgtggccaccgacatgctgagcgagcaccccctgctgagcgagcccagcagcgtgagcttctacaactggatgagcaacgccgtgggcaacagaggcagcgtgctgcaggagagccccgtgaccaagagcggccacaacagcctgcccaccggcgtggcccccaacctgcccaccatccccagcgccagcgacttcaacaccgtgctgagcagcgaccagaacaccctggacggcacccacagccagcacagcaccagccaggacgacgtggccggcgtggaggaggccaaccagggcttccccgccgtgcagctggccgacgcccaggtggtgttcaagcccctgctgagccacaccggcatccagagccaggacaccatgcccttctgctacagaatgtacttcggcgagcacctgagcttcagcggcaccctggactgcctgagagccgacatcgtggacagcgacaccgccaaggagagaaagggcaagagagccagaagacagggccacgtgaacctgccccccctggagttcaagcccgccctgatgctgggcaccttcagcatcagcgccgtggtgatggagaagagcgtgtgcaccccccagaacagcaccagcgccctgagcttccacgacctgagcaagagatactacaacaccttccactgcaacttcaccatcagctgccagagcatcagccagcacgtggacatggccctggtgagactgatccaccagttcagcaccatgatcgacgacatcaaggccacccagaccgacatcaagctgagcagatacaccgccggcagcgccagccccacccccaccttcaagaccagaaagcacagagacttcagaagcagcgacttcagcagaagcagcagaggcagcctgaacggcggcaacagagtgaacaacgccaagaacaagagaaccaacaacgagaacaacaagaaggagagcagaaacaagaacagcctgggcagaagcgagagaagaaccagcaaggtgagcagaaagggcagcaaggacgtggtggaccacatgaccatccacatggacgacagcgacagcatcaccgtgagcgagcagagcgagcccagcgccgagtgctggcagaacatgtacaagctgctgaacttctacagcctgatcagcgaccccaccggcatcctggagaagagcagcgagaccttcggccccgccggcgtgagaagccccaccgagcccacctgcaaggtggtgttcgagaacgagcaggacaacagcagcctgaccaagacccagagaaagagaagcctggtgaccagcgagccccagcacgtgaccctgatcgtgttcggcatcggcatggtgaacagaacccacctggaggccgacatcggcggcctgaccatggagagcgagctgaagagaatccacggcagcttcaccctgaaggagaagatgaaggacgtgctgcaccagaagatgaccgagacctgcgccaccgcccacatcggcggcgtgaacatcgtgctgctggagggcatcacccccaacatccagctggaggacttccccaccagccccaccagcaccgccaagcaggagttcctgaccgtggtgaagtgcagcatcgccaagagccaggccctgtacagcgcccagagaggcctgaagaccaacaacgccgccgtgttcaaggtgggcgccatcagcatcaacatcccccagcaccccgccaccctgcacagcatgatggtgagaagcagccaccagctgagcaagcagatcagcgacctgatcagacagcccagcaccgccccccagcccgtgaaggaggacatcgccacccccctgcccagcgagaagacccccaccagcgtgaaccagacccccgtggagaccaacgagttcccccagctgcccgagggcctggagaagaagcccatcgtgctgaagttcagcgccatgctggacggcatcgccatcggcgccgccctgctgcccagcctgaaggccgagtacaagatgggcagaatgagaagccacggcatgaccggcgcccagaccagattcaccttcgagctgcccaaccacagactgagattcaccagcaaggtgagcgccaccgacatgagcaccatcccccccagcgccagcctgaacctgccccccgtgaccatgagcggcaagtacatcatggaggagcacgacagctacagcgaccaggtgtggagcatcgacgagctgcccagcaagcagggctactacctgcagggcaactacctgagatgcgtggccgaggtgggcagcttcgagcacaacctgaccaccgacctgctgaaccacctggtgttcgtgcagaaggtgttcatgaaggaggtgaacgaggtgatccagaaggtgagcggcggcgagcagcccatccccctgtggaacgagcacgacggcaccgccgacggcgacaagcccaagatcctgctgtacagcctgaacctgcagttcaagggcatccaggtgaccgccaccacccccagcatgagagccgtgagattcgagaccggcctgatcgagctggagctgagcaacagactgcagaccaaggccagccccggcagcagcagctacctgaagctgttcggcaagtgccaggtggacctgaacctggccctgggccagatcgtgaagcaccaggtgtacgaggaggccggcagcgacttccaccaggtggcctacttcaagaccagaatcggcctgagaaacgccctgagagaggagatcagcggcagcagcgacagagaggccgtgctgatcaccctgaacagacccatcgtgtacgcccagcccgtggccttcgacagagccgtgctgttctggctgaactacaaggccgcctacgacaactggaacgagcagagaatggccctgcacaaggacatccacatggccaccaaggaggtggtggacatgctgcccggcatccagcagaccagcgcccaggccttcggcaccctgttcctgcagctgaccgtgaacgacctgggcatctgcctgcccatcaccaacaccgcccagagcaaccacaccggcgacctggacaccggcagcgccctggtgctgaccatcgagagcaccctgatcaccgcctgcagcagcgagagcctggtgagcaagggccacttcaagaacttctgcatcagattcgccgacggcttcgagaccagctgggacgactggaagcccgagatccacggcgacctggtgatgaacgcctgcgtggtgcccgacggcacctacgaggtgtgcagcagaaccaccggccaggccgccgccgagagcagcagcgccggcacctggaccctgaacgtgctgtggaagatgtgcggcatcgacgtgcacatggaccccaacatcggcaagagactgaacgccctgggcaacaccctgaccaccctgaccggcgaggaggacatcgacgacatcgccgacctgaacagcgtgaacatcgccgacctgagcgacgaggacgaggtggacaccatgagccccaccatccacaccgaggccaccgactacagaagacaggccgccagcgccagccagcccggcgagctgagaggcagaaagatcatgaagagaatcgtggacatcagagagctgaacgagcaggccaaggtgatcgacgacctgaagaagctgggcgccagcgagggcaccatcaaccaggagatccagagataccagcagctggagagcgtggccgtgaacgacatcagaagagacgtgagaaagaagctgagaagaagcagcatgagagccgccagcctgaaggacaagtggggcctgagctacaagcccagctacagcagaagcaagagcatcagcgccagcggcagaccccccctgaagagaatggagagagccagcagcagagtgggcgagaccgaggagctgcccgagatcagagtggacgccgccagccccggccccagagtgaccttcaacatccaggacaccttccccgaggagaccgagctggacctgctgagcgtgaccatcgagggccccagccactacagcagcaacagcgagggcagctgcagcgtgttcagcagccccaagacccccggcggcttcagccccggcatccccttccagaccgaggagggcagaagagacgacagcctgagcagcaccagcgaggacagcgagaaggacgagaaggacgaggaccacgagagagagagattctacatctacagaaagcccagccacaccagcagaaagaaggccaccggcttcgccgccgtgcaccagctgttcaccgagagatggcccaccacccccgtgaacagaagcctgagcggcaccgccaccgagagaaacatcgacttcgagctggacatcagagtggagatcgacagcggcaagtgcgtgctgcaccccaccaccctgctgcaggagcacgacgacatcagcctgagaagaagctacgacagaagcagcagaagcctggaccaggacagccccagcaagaagaagaagttccagaccaactacgccagcaccacccacctgatgaccggcaagaaggtgcccagcagcctgcagaccaagcccagcgacctggagaccaccgtgttctacatccccggcgtggacgtgaagctgcactacaacagcaagaccctgaagaccgagagccccaacgccagcagaggcagcagcctgcccagaaccctgagcaaggagagcaagctgtacggcatgaaggacagcgccaccagcccccccagcccccccctgcccagcaccgtgcagagcaagaccaacaccctgctgcccccccagcccccccccatccccgccgccaagggcaagggcagcggcggcgtgaagaccgccaagctgtacgcctgggtggccctgcagagcctgcccgaggagatggtgatcagcccctgcctgctggacttcctggagaaggccctggagaccatccccatcacccccgtggagagaaactacaccgccgtgagcagccaggacgaggacatgggccacttcgagatccccgaccccatggaggagagcaccaccagcctggtgagcagcagcaccagcgcctacagcagcttccccgtggacgtggtggtgtacgtgagagtgcagcccagccagatcaagttcagctgcctgcccgtgagcagagtggagtgcatgctgaagctgcccagcctggacctggtgttcagcagcaacagaggcgagctggagaccctgggcaccacctaccccgccgagaccctgagccccggcggcaacgccacccagagcggcaccaagaccagcgccagcaagaccggcatccccggcagcagcggcctgggcagccccctgggcagaagcagacacagcagcagccagagcgacctgaccagcagcagcagcagcagcagcggcctgagcttcaccgcctgcatgagcgacttcagcctgtacgtgttccacccctacggcgccggcaagcagaagaccgccgtgagcggcctgacccccggcagcggcggcctgggcaacgtggacgaggagcccaccagcgtgaccggcagaaaggacagcctgagcatcaacctggagttcgtgaaggtgagcctgagcagaatcagaagaagcggcggcgccagcttcttcgagagccagagcgtgagcaagagcgccagcaagatggacaccaccctgatcaacatcagcgccgtgtgcgacatcggcagcgccagcttcaagtacgacatgagaagactgagcgagatcctggccttccccagagcctggtacagaagaagcatcgccagaagactgttcctgggcgaccagaccatcaacctgcccaccagcggccccggcacccccgacagcatcgagggcgtgagccagcacctgagccccgagagcagcagaaaggcctactgcaagacctgggagcagcccagccagagcgccagcttcacccacatgccccagagccccaacgtgttcaacgagcacatgaccaacagcaccatgagccccggcaccgtgggccagagcctgaagagccccgccagcatcagaagcagaagcgtgagcgacagcagcgtgcccagaagagacagcctgagcaagaccagcacccccttcaacaagagcaacaaggccgccagccagcagggcaccccctgggagaccctggtggtgttcgccatcaacctgaagcagctgaacgtgcagatgaacatgagcaacgtgatgggcaacaccacctggaccaccagcggcctgaagagccagggcagactgagcgtgggcagcaacagagacagagagatcagcatgagcgtgggcctgggcagaagccagctggacagcaagggcggcgtggtgggcggcaccatcgacgtgaacgccctggagatggtggcccacatcagcgagcaccccaaccagcagcccagccacaagatccagatcaccatgggcagcaccgaggccagagtggactacatgggcagcagcatcctgatgggcatcttcagcaacgccgacctgaagctgcaggacgagtggaaggtgaacctgtacaacaccctggacagcagcatcaccgacaagagcgagatcttcgtgcacggcgacctgaagtgggacatcttccaggtgatgatcagcagaagcaccacccccgacctgatcaagatcggcatgaagctgcaggagttcttcacccagcagttcgacaccagcaagagagccctgagcacctggggccccgtgccctacctgccccccaagaccatgaccagcaacctggagaagagcagccaggagcagctgctggacgccgcccaccacagacactggcccggcgtgctgaaggtggtgagcggctgccacatcagcctgttccagatccccctgcccgaggacggcatgcagttcggcggcagcatgagcctgcacggcaaccacatgaccctggcctgcttccacggccccaacttcagaagcaagagctgggccctgttccacctggaggagcccaacatcgccttctggaccgaggcccagaagatctgggaggacggcagcagcgaccacagcacctacatcgtgcagaccctggacttccacctgggccacaacaccatggtgaccaagccctgcggcgccctggagagccccatggccaccatcaccaagatcaccagaagaagacacgagaaccccccccacggcgtggccagcgtgaaggagtggttcaactacgtgaccgccaccagaaacgaggagctgaacctgctgagaaacgtggacgccaacaacaccgagaacagcaccaccgtgaagaacagcagcctgctgagcggcttcagaggcggcagcagctacaaccacgagaccgagaccatcttcgccctgcccagaatgcagctggacttcaagagcatccacgtgcaggagccccaggagcccagcctgcaggacgccagcctgaagcccaaggtggagtgcagcgtggtgaccgagttcaccgaccacatctgcgtgaccatggacgccgagctgatcatgttcctgcacgacctggtgagcgcctacctgaaggagaaggagaaggccatcttcccccccagaatcctgagcaccagacccggccagaagagccccatcatcatccacgacgacaacagcagcgacaaggacagagaggacagcatcacctacaccaccgtggactggagagacttcatgtgcaacacctggcacctggagcccaccctgagactgatcagctggaccggcagaaagatcgaccccgtgggcgtggactacatcctgcagaagctgggcttccaccacgccagaaccaccatccccaagtggctgcagagaggcgtgatggaccccctggacaaggtgctgagcgtgctgatcaagaagctgggcaccgccctgcaggacgagaaggagaagaagggcaaggacaaggaggagcactag

SEQ ID NO: 95032 - DNA, 1287 bp, synthetic construct
  misc_feature 1..1287: note = Description of Artificial Sequence: Synthetic coding sequence
  source 1..1287: mol_type = other DNA
atgggcggcctgttcagcagatggagaaccaagcccagcaccgtggaggtgctggagagcatcgacaaggagatccaggccctggaggagttcagagagaagaaccagagactgcagaagctgtgggtgggcagactgatcctgtacagcagcgtgctgtacctgttcacctgcctgatcgtgtacctgtggtacctgcccgacgagttcaccgccagactggccatgaccctgcccttcttcgccttccccctgatcatctggagcatcagaaccgtgatcatcttcttcttcagcaagagaaccgagagaaacaacgaggccctggacgacctgaagagccagagaaagaagatcctggaggaggtgatggagaaggagacctacaagaccgccaagctgatcctggagagattcgaccccgacagcaagaaggccaaggagtgcgagccccccagcgccggcgccgccgtgaccgccagacccggccaggagatcagacagagaaccgccgcccagagaaacctgagccccacccccgccagccccaaccagggcccccccccccaggtgcccgtgagccccggcccccccaaggacagcagcgcccccggcggcccccccgagagaaccgtgacccccgccctgagcagcaacgtgctgcccagacacctgggcagccccgccaccagcgtgcccggcatgggcctgcacccccccggcccccccctggccagacccatcctgcccagagagagaggcgccctggacagaatcgtggagtacctggtgggcgacggcccccagaacagatacgccctgatctgccagcagtgcttcagccacaacggcatggccctgaaggaggagttcgagtacatcgccttcagatgcgcctactgcttcttcctgaaccccgccagaaagaccagaccccaggcccccagactgcccgagttcagcttcgagaagagacaggtggtggagggcagcagcagcgtgggccccctgcccagcggcagcgtgctgagcagcgacaaccagttcaacgaggagagcctggagcacgacgtgctggacgacaacaccgagcagaccgacgacaagatccccgccaccgagcagaccaaccaggtgatcgagaaggccagcgacagcgaggagcccgaggagaagcaggagaccgagaacgaggaggccagcgtgatcgagaccaacagcaccgtgcccggcgccgacagcatccccgaccccgagctgagcggcgagagcctgaccgccgagtag

SEQ ID NO: 95033 - DNA, 2718 bp, synthetic construct
  misc_feature 1..2718: note = Description of Artificial Sequence: Synthetic coding sequence
  source 1..2718: mol_type = other DNA
atggacagcaccgcctgcctgaagagcctgctgctgaccgtgagccagtacaaggccgtgaagagcgaggccaacgccacccagctgctgagacacctggaggtgatcagcggccagaagctgaccagactgttcaccagcaaccagatcctgaccagcgagtgcctgagctgcctggtggagctgctggaggaccccaacatcagcgccagcctgatcctgagcatcatcggcctgctgagccagctggccgtggacatcgagaccagagactgcctgcagaacacctacaacctgaacagcgtgctggccggcgtggtgtgcagaagcagccacaccgacagcgtgttcctgcagtgcatccagctgctgcagaagctgacctacaacgtgaagatcttctacagcggcgccaacatcgacgagctgatcaccttcctgatcgaccacatccagagcagcgaggacgagctgaagatgccctgcctgggcctgctggccaacctgtgcagacacaacctgagcgtgcagacccacatcaagaccctgagcaacgtgaagagcttctacagaaccctgatcaccctgctggcccacagcagcctgaccgtggtggtgttcgccctgagcatcctgagcagcctgaccctgaacgaggaggtgggcgagaagctgttccacgccagaaacatccaccagaccttccagctgatcttcaacatcctgatcaacggcgacggcaccctgaccagaaagtacagcgtggacctgctgatggacctgctgaagaaccccaagatcgccgactacctgaccagatacgagcacttcagcagctgcctgcaccaggtgctgggcctgctgaacggcaaggaccccgacagcagcagcaaggtgctggagctgctgctggccttctgcagcgtgacccagctgagacacatgctgacccagatgatgttcgagcagagcccccccggcagcgccaccctgggcagccacaccaagtgcctggagcccaccgtggccctgctgagatggctgagccagcccctggacggcagcgagaactgcagcgtgctggccctggagctgttcaaggagatcttcgaggacgtgatcgacgccgccaactgcagcagcgccgacagattcgtgaccctgctgctgcccaccatcctggaccagctgcagttcaccgagcagaacctggacgaggccctgaccagaaagaagtgcgagagaatcgccaaggccatcgaggtgctgctgaccctgtgcggcgacgacaccctgaagatgcacatcgccaagatcctgaccaccgtgaagtgcaccaccctgatcgagcagcagttcacctacggcaagatcgacctgggcttcggcaccaaggtggccgacagcgagctgtgcaagctggccgccgacgtgatcctgaagaccctggacctgatcaacaagctgaagcccctggtgcccggcatggaggtgagcttctacaagatcctgcaggaccccagactgatcacccccctggccttcgccctgaccagcgacaacagagagcaggtgcagagcggcctgagaatcctgctggaggccgcccccctgcccgacttccccgccctggtgctgggcgagagcatcgccgccaacaacgcctacagacagcaggagaccgagcacatccccagaaagatgccctggcagagcagcaaccacagcttccccaccagcatcaagtgcctgaccccccacctgaaggacggcgtgcccggcctgaacatcgaggagctgatcgagaagctgcagagcggcatggtggtgaaggaccagatctgcgacgtgagaatcagcgacatcatggacgtgtacgagatgaagctgagcaccctggccagcaaggagagcagactgcaggacctgctggagaccaaggccctggccctggcccaggccgacagactgatcgcccagcacagatgccagagaacccaggccgagaccgaggccagaaccctggccagcatgctgagagaggtggagagaaagaacgaggagctgagcgtgctgctgaaggcccagcaggtggagagcgagagagcccagagcgacatcgagcacctgttccagcacaacagaaagctggagagcgtggccgaggagcacgagatcctgaccaagagctacatggagctgctgcagagaaacgagagcaccgagaagaagaacaaggacctgcagatcacctgcgacagcctgaacaagcagatcgagaccgtgaagaagctgaacgagagcctgaaggagcagaacgagaagagcatcgcccagctgatcgagaaggaggagcagagaaaggaggtgcagaaccagctggtggacagagagcacaagctggccaacctgcaccagaagaccaaggtgcaggaggagaagatcaagaccctgcagaaggagagagaggacaaggaggagaccatcgacatcctgagaaaggagctgagcagaaccgagcagatcagaaaggagctgagcatcaaggccagcagcctggaggtgcagaaggcccagctggagggcagactggaggagaaggagagcctggtgaagctgcagcaggaggagctgaacaagcacagccacatgatcgccatgatccacagcctgagcggcggcaagatcaaccccgagaccgtgaacctgagcatctag

SEQ ID NO: 95034 - DNA, 2370 bp, synthetic construct
  misc_feature 1..2370: note = Description of Artificial Sequence: Synthetic coding sequence
  source 1..2370: mol_type = other DNA
atgctggagggcaactaccaggtgatgctgaagagcggcaccaacatcctgtactggagaaccaccggcatcctgatgggcagcaaggccgtgaagcccgtgctggtgaagaacatcaccatcgagggcgtggcctacaccagcgagtgcttcccctgcaagcccggcaccttcagcaacaagcccggcagcttcaactgccaggtgtgccccagaaacacctacagcgagaagggcgccaaggagtgcatcagatgcaaggacgacagccagttcagcgaggagggcagcagcgagtgcaccgagagacccccctgcaccaccaaggactacttccagatccacaccccctgcgacgaggagggcaagacccagatcatgtacaagtggatcgagcccaagatctgcagagaggacctgaccgacgccatcagactgccccccagcggcgagaagaaggactgccccccctgcaaccccggcttctacaacaacggcagcagcagctgccacccctgcccccccggcaccttcagcgacggcaccaaggagtgcagaccctgccccgccggcaccgagcccgccctgggcttcgagtacaagtggtggaacgtgctgcccggcaacatgaagaccagctgcttcaacgtgggcaacagcaagtgcgacggcatgaacggctgggaggtggccggcgaccacatccagagcggcgccggcggcagcgacaacgactacctgatcctgaacctgcacatccccggcttcaagccccccaccagcatgaccggcgccaccggcagcgagctgggcagaatcaccttcgtgttcgagaccctgtgcagcgccgactgcgtgctgtacttcatggtggacatcaacagaaagagcaccaacgtggtggagagctggggcggcaccaaggagaagcaggcctacacccacatcatcttcaagaacgccaccttcaccttcacctgggccttccagagaaccaaccagggccaggacaacagaagattcatcaacgacatggtgaagatctacagcatcaccgccaccaacgccgtggacggcgtggccagcagctgcagagcctgcgccctgggcagcgagcagagcggcagcagctgcgtgccctgcccccccggccactacatcgagaaggagaccaaccagtgcaaggagtgcccccccgacacctacctgagcatccaccaggtgtacggcaaggaggcctgcatcccctgcggccccggcagcaagaacaaccaggaccacagcgtgtgctacagcgactgcttcttctaccacgagaaggagaaccagagcctgcactacgacttcagcaacctgagcagcgtgggcagcctgatgaacggccccagcttcaccagcaagggcaccaagtacttccacttcttcaacatcagcctgtgcggccacgagggcaagaagatggccctgtgcaccaacaacatcaccgacttcaccgtgaaggagatcgtggccggcagcgacgactacaccaacctggtgggcgccttcgtgtgccagagcaccatcatccccagcgagagcaagggcttcagagccgccctgagcagccagagcatcatcctggccgacaccttcatcggcgtgaccgtggagaccaccctgaagaacatcaacatcaaggaggacatgttccccgtgcccaccagccagatccccgacgtgcacttcttctacaagagcagcaccgccaccaccagctgcatcaacggcagaagcaccgccgtgaagatgagatgcaaccccaccaagagcggcgccggcgtgatcagcgtgcccagcaagtgccccgccggcacctgcgacggctgcaccttctacttcctgtgggagagcgccgaggcctgccccctgtgcaccgagcacgacttccacgagatcgagggcgcctgcaagagaggcttccaggagaccctgtacgtgtggaacgagcccaagtggtgcatcaagggcatcagcctgcccgagaagaagctggccacctgcgagaccgtggacttctggctgaaggtgggcgccggcgtgggcgccttcaccgccgtgctgctggtggccctgacctgctacttctggaagaagaaccagaagctggagtacaagtacagcaagctggtgatgaccaccaacagcaaggagtgcgagctgcccgccgccgacagctgcgccatcatggagggcgaggacaacgaggaggaggtggtgtacagcaacaagcagagcctgctgggcaagctgaagagcctggccaccaaggagaaggaggaccacttcgagagcgtgcagctgaagaccagcagaagccccaacatctag

SEQ ID NO: 95035 - DNA, 336 bp, synthetic construct
  misc_feature 1..336: note = Description of Artificial Sequence: Synthetic coding sequence
  source 1..336: mol_type = other DNA
atggtgagaaccaaggccgacagcgtgcccggcacctacagaaaggtggtggccgccagagcccccagaaaggtgctgggcagcagcaccagcgccaccaacagcaccagcgtgagcagcagaaaggccgagaacaagtacgccggcggcaaccccgtgtgcgtgagacccacccccaagtggcagaagggcatcggcgagttcttcagactgagccccaaggacagcgagaaggagaaccagatccccgaggaggccggcagcagcggcctgggcaaggccaagagaaaggcctgccccctgcagcccgaccacaccaacgacgagaaggagtag

SEQ ID NO: 95036 - DNA, 2772 bp, synthetic construct
  misc_feature 1..2772: note = Description of Artificial Sequence: Synthetic coding sequence
  source 1..2772: mol_type = other DNA
atgagccagttcaagagacagagaatcaaccccctgcccggcggcagaaacttcagcggcaccgccagcaccagcctgctgggccccccccccggcctgctgaccccccccgtggccaccgagctgagccagaacgccagacacctgcagggcggcgagaagcagagagtgttcaccggcatcgtgaccagcctgcacgactacttcggcgtggtggacgaggaggtgttcttccagctgagcgtggtgaagggcagactgccccagctgggcgagaaggtgctggtgaaggccgcctacaaccccggccaggccgtgccctggaacgccgtgaaggtgcagaccctgagcaaccagcccctgctgaagagccccgccccccccctgctgcacgtggccgccctgggccagaagcagggcatcctgggcgcccagccccagctgatcttccagccccacagaatcccccccctgttcccccagaagcccctgagcctgttccagaccagccacaccctgcacctgagccacctgaacagattccccgccagaggcccccacggcagactggaccagggcagaagcgacgactacgacagcaagaagagaaagcagagagccggcggcgagccctggggcgccaagaagcccagacacgacctgcccccctacagagtgcacctgaccccctacaccgtggacagccccatctgcgacttcctggagctgcagagaagatacagaagcctgctggtgcccagcgacttcctgagcgtgcacctgagctggctgagcgccttccccctgagccagcccttcagcctgcaccaccccagcagaatccaggtgagcagcgagaaggaggccgcccccgacgccggcgccgagcccatcaccgccgacagcgaccccgcctacagcagcaaggtgctgctgctgagcagccccggcctggaggagctgtacagatgctgcatgctgttcgtggacgacatggccgagcccagagagacccccgagcaccccctgaagcagatcaagttcctgctgggcagaaaggaggaggaggccgtgctggtgggcggcgagtggagccccagcctggacggcctggacccccaggccgacccccaggtgctggtgagaaccgccatcagatgcgcccaggcccagaccggcatcgacctgagcggctgcaccaagtggtggagattcgccgagttccagtacctgcagcccggcccccccagaagactgcagaccgtggtggtgtacctgcccgacgtgtggaccatcatgcccaccctggaggagtgggaggccctgtgccagcagaaggccgccgaggccgccccccccacccaggaggcccagggcgagaccgagcccaccgagcaggcccccgacgccctggagcaggccgccgacaccagcagaagaaacgccgagacccccgaggccaccacccagcaggagaccgacaccgacctgcccgaggccccccccccccccctggagcccgccgtgatcgccagacccggctgcgtgaacctgagcctgcacggcatcgtggaggacagaagacccaaggagagaatcagcttcgaggtgatggtgctggccgagctgttcctggagatgctgcagagagacttcggctacagagtgtacaagatgctgctgagcctgcccgagaaggtggtgagcccccccgagcccgagaaggaggaggccgccaaggaggaggccaccaaggaggaggaggccatcaaggaggaggtggtgaaggagcccaaggacgaggcccagaacgagggccccgccaccgagagcgaggcccccctgaaggaggacggcctgctgcccaagcccctgagcagcggcggcgaggaggaggagaagcccagaggcgaggccagcgaggacctgtgcgagatggccctggaccccgagctgctgctgctgagagacgacggcgaggaggagttcgccggcgccaagctggaggacagcgaggtgagaagcgtggccagcaaccagagcgagatggagttcagcagcctgcaggacatgcccaaggagctggaccccagcgccgtgctgcccctggactgcctgctggccttcgtgttcttcgacgccaactggtgcggctacctgcacagaagagacctggagagaatcctgctgaccctgggcatcagactgagcgccgagcaggccaagcagctggtgagcagagtggtgacccagaacatctgccagtacagaagcctgcagtacagcagacaggagggcctggacggcggcctgcccgaggaggtgctgttcggcaacctggacctgctgcccccccccggcaagagcaccaagcccggcgccgcccccaccgagcacaaggccctggtgagccacaacggcagcctgatcaacgtgggcagcctgctgcagagagccgagcagcaggacagcggcagactgtacctggagaacaagatccacaccctggagctgaagctggaggagagccacaacagattcagcgccaccgaggtgaccaacaagaccctggccgccgagatgcaggagctgagagtgagactggccgaggccgaggagaccgccagaaccgccgagagacagaagagccagctgcagagactgctgcaggagctgagaagaagactgacccccctgcagctggagatccagagagtggtggagaaggccgacagctgggtggagaaggaggagcccgcccccagcaactag

SEQ ID NO: 95037 - DNA, 3480 bp, synthetic construct
  misc_feature 1..3480: note = Description of Artificial Sequence: Synthetic coding sequence
  source 1..3480: mol_type = other DNA
atgctggacttcctggccgagaacaacctgtgcggccaggccatcctgagaatcgtgagctgcggcaacgccatcatcgccgagctgctgagactgagcgagttcatccccgccgtgttcagactgaaggacagagccgaccagcagaagtacggcgacatcatcttcgacttcagctacttcaagggccccgagctgtgggagagcaagctggacgccaagcccgagctgcaggacctggacgaggagttcagagagaacaacatcgagatcgtgaccagattctacctggccttccagagcgtgcacaagtacatcgtggacctgaacagatacctggacgacctgaacgagggcgtgtacatccagcagaccctggagaccgtgctgctgaacgaggacggcaagcagctgctgtgcgaggccctgtacctgtacggcgtgatgctgctggtgatcgaccagaagatcgagggcgaggtgagagagagaatgctggtgagctactacagatacagcgccgccagaagcagcgccgacagcaacatggacgacatctgcaagctgctgagaagcaccggctacagcagccagcccggcgccaagagacccagcaactaccccgagagctacttccagagagtgcccatcaacgagagcttcatcagcatggtgatcggcagactgagaagcgacgacatctacaaccaggtgagcgcctaccccctgcccgagcacagaagcaccgccctggccaaccaggccgccatgctgtacgtgatcctgtacttcgagcccagcatcctgcacacccaccaggccaagatgagagagatcgtggacaagtacttccccgacaactgggtgatcagcatctacatgggcatcaccgtgaacctggtggacgcctgggagccctacaaggccgccaagaccgccctgaacaacaccctggacctgagcaacgtgagagagcaggccagcagatacgccaccgtgagcgagagagtgcacgcccaggtgcagcagttcctgaaggagggctacctgagagaggagatggtgctggacaacatccccaagctgctgaactgcctgagagactgcaacgtggccatcagatggctgatgctgcacaccgccgacagcgcctgcgaccccaacaacaagagactgagacagatcaaggaccagatcctgaccgacagcagatacaaccccagaatcctgttccagctgctgctggacaccgcccagttcgagttcatcctgaaggagatgttcaagcagatgctgagcgagaagcagaccaagtgggagcactacaagaaggagggcagcgagagaatgaccgagctggccgacgtgttcagcggcgtgaagcccctgaccagagtggagaagaacgagaacctgcaggcctggttcagagagatcagcaagcagatcctgagcctgaactacgacgacagcaccgccgccggcagaaagaccgtgcagctgatccaggccctggaggaggtgcaggagttccaccagctggagagcaacctgcaggtgtgccagttcctggccgacaccagaaagttcctgcaccagatgatcagaaccatcaacatcaaggaggaggtgctgatcaccatgcagatcgtgggcgacctgagcttcgcctggcagctgatcgacagcttcaccagcatcatgcaggagagcatcagagtgaaccccagcatggtgaccaagctgagagccaccttcctgaagctggccagcgccctggacctgcccctgctgagaatcaaccaggccaacagccccgacctgctgagcgtgagccagtactacagcggcgagctggtgagctacgtgagaaaggtgctgcagatcatccccgagagcatgttcaccagcctgctgaagatcatcaagctgcagacccacgacatcatcgaggtgcccaccagactggacaaggacaagctgagagactacgcccagctgggccccagatacgaggtggccaagctgacccacgccatcagcatcttcaccgagggcatcctgatgatgaagaccaccctggtgggcatcatcaaggtggaccccaagcagctgctggaggacggcatcagaaaggagctggtgaagagagtggccttcgccctgcacagaggcctgatcttcaaccccagagccaagcccagcgagctgatgcccaagctgaaggagctgggcgccaccatggacggcttccacagaagcttcgagtacatccaggactacgtgaacatctacggcctgaagatctggcaggaggaggtgagcagaatcatcaactacaacgtggagcaggagtgcaacaacttcctgagaaccaagatccaggactggcagagcatgtaccagagcacccacatccccatccccaagttcacccccgtggacgagagcgtgaccttcatcggcagactgtgcagagagatcctgagaatcaccgaccccaagatgacctgccacatcgaccagctgaacacctggtacgacatgaagacccaccaggaggtgaccagcagcagactgttcagcgagatccagaccaccctgggcaccttcggcctgaacggcctggacagactgctgtgcttcatgatcgtgaaggagctgcagaacttcctgagcatgttccagaagatcatcctgagagacagaaccgtgcaggacaccctgaagaccctgatgaacgccgtgagccccctgaagagcatcgtggccaacagcaacaagatctacttcagcgccatcgccaagacccagaagatctggaccgcctacctggaggccatcatgaaggtgggccagatgcagatcctgagacagcagatcgccaacgagctgaactacagctgcagattcgacagcaagcacctggccgccgccctggagaacctgaacaaggccctgctggccgacatcgaggcccactaccaggaccccagcctgccctaccccaaggaggacaacaccctgctgtacgagatcaccgcctacctggaggccgccggcatccacaaccccctgaacaagatctacatcaccaccaagagactgccctacttccccatcgtgaacttcctgttcctgatcgcccagctgcccaagctgcagtacaacaagaacctgggcatggtgtgcagaaagcccaccgaccccgtggactggccccccctggtgctgggcctgctgaccctgctgaagcagttccacagcagatacaccgagcagttcctggccctgatcggccagttcatctgcagcaccgtggagcagtgcaccagccagaagatccccgagatccccgccgacgtggtgggcgccctgctgttcctggaggactacgtgagatacaccaagctgcccagaagagtggccgaggcccacgtgcccaacttcatcttcgacgagttcagaaccgtgctgtag

SEQ ID NO: 95038 - DNA, 2424 bp, synthetic construct
  misc_feature 1..2424: note = Description of Artificial Sequence: Synthetic coding sequence
  source 1..2424: mol_type = other DNA
atgttcagcgccggcgccgagagcctgctgcaccaggccagagagatccaggacgaggagctgaagaagttctgcagcagaatctgcaagctgctgcaggccgaggacctgggccccgacaccctggacagcctgcagagactgttcctgatcatcagcgccaccaagtacagcagaagactggagaagacctgcgtggacctgctgcaggccaccctgggcctgcccgcctgccccgagcagctgcaggtgctgtgcgccgccatcctgagagagatgagccccagcgacagcctgagcctggcctgggaccacacccagaacagcagacagctgagcctggtggccagcgtgctgctggcccagggcgacagaaacgaggaggtgagagccgtgggccagggcgtgctgagagccctggagagcagacagcccgagggccccagcctgagacacctgctgcccgtgatggccaaggtggtggtgctgagccccggcaccctgcaggaggaccaggccaccctgctgagcaagagactggtggactggctgagatacgccagcctgcagcagggcctgccccacagcggcggcttcttcagcacccccagagccagacagcccggccccgtgaccgaggtggacggcgccgtggccaccgacttcttcaccgtgctgagcagcggccacagattcaccgacgaccagtggctgaacgtgcaggccttcagcatgctgagagcctggctgctgcacagcggccccgagggccccggcaccctggacaccgacgacagaagcgagcaggagggcagcaccctgagcgtgatcagcgccaccagcagcgccggcagactgctgccccccagagagagactgagagaggtggccttcgagtactgccagagactgatcgagcagagcaacagaagagccctgagaaagggcgacagcgacctgcagaaggcctgcctggtggaggccgtgctggtgctggacgtgctgtgcagacaggaccccagcttcctgtacagaagcctgagctgcctgaaggccctgcacggcagagtgagaggcgaccccgccagcgtgagagtgctgctgcccctggcccacttcttcctgagccacggcgaggccgccgccgtggacagcgaggccgtgtaccagcacctgttcaccagaatccccgtggagcagttccacagccccatgctggccttcgagttcatccagttctgcagagacaacctgcacctgttcagcggccacctgagcaccctgagactgagcttccccaacctgttcaagttcctggcctggaacagcccccccctgaccagcgagttcgtggccctgctgcccgccctggtggacgccggcaccgccctggagatgctgcacgccctgctggacctgccctgcctgaccgccgtgctggacctgcagctgagaagcgcccccgccgccagcgagagacccctgtgggacaccagcctgagagcccccagctgcctggaggccttcagagacccccagttccagggcctgttccagtacctgctgagacccaaggccagcggcgccaccgagagactggcccccctgcaccagctgctgcagcccatggccggctgcgccagagtggcccagtgcgcccaggccgtgcccaccctgctgcaggccttcttcagcgccgtgacccaggtggccgacggcagcctgatcaaccagctggccctgctgctgctgggcagaagcgacagcctgtaccccgcccccggctacgccgccggcgtgcacagcgtgctgagcagccagttcctggccctgtgcaccctgaagcccagcctggtggtggagctggccagagacctgctggagttcctgggcagcgtgaacggcctgtgcagcagagccagcctggtgaccagcgtggtgtgggccatcggcgagtacctgagcgtgacctacgacagaagatgcaccgtggagcagatcaacaagttcttcgaggccctggaggccctgctgttcgaggtgacccagtgcagacccagcgccgccctgcccagatgccccccccaggtggtgaccgtgctgatgaccaccctgaccaagctggccagcagaagccaggacctgatccccagagccagcctgctgctgagcaagatgagaaccctggcccacagccccgccaccagcagcacccacagcgaggagggcgccgaggccatcagaaccagagccaccgagctgctgaccctgctgaagatgcccagcgtggcccagttcgtgctgacccccagcaccgaggtgtgcagccccagataccacagagacgccaacaccgccctgcccctggccctgagaaccgtgagcagactggtggagagagaggccggcctgatgcccggctag

SEQ ID NO: 95039 - DNA, 4086 bp, synthetic construct; identical to SEQ ID NO: 80223
  misc_feature 1..4086: note = Description of Artificial Sequence: Synthetic coding sequence
  source 1..4086: mol_type = other DNA

SEQ ID NO: 95040 - DNA, 1866 bp, synthetic construct
  misc_feature 1..1866: note = Description of Artificial Sequence: Synthetic coding sequence
  source 1..1866: mol_type = other DNA
atggccaacgtgccctgggccgaggtgtgcgagaagttccaggccgccctggccctgagcagagtggagctgcacaagaaccccgagaaggagccctacaagagcaagtacagcgccagagccctgctggaggaggtgaaggccctgctgggccccgcccccgaggacgaggacgagagacccgaggccgaggacggccccggcgccggcgaccacgccctgggcctgcccgccgaggtggtggagcccgagggccccgtggcccagagagccgtgagactggccgtgatcgagttccacctgggcgtgaaccacatcgacaccgaggagctgagcgccggcgaggagcacctggtgaagtgcctgagactgctgagaagatacagactgagccacgactgcatcagcctgtgcatccaggcccagaacaacctgggcatcctgtggagcgagagagaggagatcgagaccgcccaggcctacctggagagcagcgaggccctgtacaaccagtacatgaaggaggtgggcagcccccccctggaccccaccgagagattcctgcccgaggaggagaagctgaccgagcaggagagaagcaagagattcgagaaggtgtacacccacaacctgtactacctggcccaggtgtaccagcacctggagatgttcgagaaggccgcccactactgccacagcaccctgaagagacagctggagcacaacgcctaccaccccatcgagtgggccatcaacgccgccaccctgagccagttctacatcaacaagctgtgcttcatggaggccagacactgcctgagcgccgccaacgtgatcttcggccagaccggcaagatcagcgccaccgaggacacccccgaggccgagggcgaggtgcccgagctgtaccaccagagaaagggcgagatcgccagatgctggatcaagtactgcctgaccctgatgcagaacgcccagctgagcatgcaggacaacatcggcgagctggacctggacaagcagagcgagctgagagccctgagaaagaaggagctggacgaggaggagagcatcagaaagaaggccgtgcagttcggcaccggcgagctgtgcgacgccatcagcgccgtggaggagaaggtgagctacctgagacccctggacttcgaggaggccagagagctgttcctgctgggccagcactacgtgttcgaggccaaggagttcttccagatcgacggctacgtgaccgaccacatcgaggtggtgcaggaccacagcgccctgttcaaggtgctggccttcttcgagaccgacatggagagaagatgcaagatgcacaagagaagaatcgccatgctggagcccctgaccgtggacctgaacccccagtactacctgctggtgaacagacagatccagttcgagatcgcccacgcctactacgacatgatggacctgaaggtggccatcgccgacagactgagagaccccgacagccacatcgtgaagaagatcaacaacctgaacaagagcgccctgaagtactaccagctgttcctggacagcctgagagaccccaacaaggtgttccccgagcacatcggcgaggacgtgctgagacccgccatgctggccaagttcagagtggccagactgtacggcaagatcatcaccgccgaccccaagaaggagctggagaacctggccaccagcctggagcactacaagttcatcgtggactactgcgagaagcaccccgaggccgcccaggagatcgaggtggagctggagctgagcaaggagatggtgagcctgctgcccaccaagatggagagattcagaaccaagatggccctgacctag

SEQ ID NO: 95041 - DNA, 4551 bp, synthetic construct; identical to SEQ ID NO: 95027
  misc_feature 1..4551: note = Description of Artificial Sequence: Synthetic coding sequence
  source 1..4551: mol_type = other DNA

SEQ ID NO: 95042 - DNA, 4080 bp, synthetic construct
  misc_feature 1..4080: note = Description of Artificial Sequence: Synthetic coding sequence
  source 1..4080: mol_type = other DNA
atgtacagcgtggaggacctgctgatcagccacggctacaagctgagcagagacccccccgccagcagagaggacaaccccaagggcagacaggccgccagaaccggcaccagagccggccagggcctgcagaacggccacgaggacggccccgccgccctggcccacagaaagaccagcgccggcaagggccacgtgagcgacagcgagagcagaagaagcacccccagaggccacggcgagccccagagcaccagcgccagcagaaccagcgaggccggcttctgcaaccagccccccagcgcctggagcagccacccccccaccggcaacgaccaggcctacagaagaagaggcagacaggaggccagaagccagaagcccagagagcacgagaacctggaggccagaggcatggcccaggcccacagcctgcccgtgcacgtgagagagggcccctgggaggtgggcggcagaagcgagcacgtgatgaagaagcccgtgtgggaggaggagctgagaatgagcggccccgccaagtggcagaacgtgagcctggagagctggaaccagcccagaaagctgggcagacagatgagcgacggcgacggcgagagactgttccaggacctgtaccccttcatccagggcgagcacgtgctgaacagccagaacaagggcaagagcagaagcctgcccagagtgctgagccccgagagcctgagctgcaccgagatccccatccccctgaacgagagacacagccccaagatgcccccctacccccccacctgcgcccccaacctggacagcaccagaaacagcgagaagagcggctgcagcgcccccttccccagacccaagttcggcagacccctgaagccccccagctacagcagccaccagcagagcagaggcggcgccgacagcagcgacagccaggacagccagcagatggacgcctacgtgcccagacacgagctgtgcctgagcgaccccggcctggagccccccgtgtacgtgcccccccccagctacagaagccccccccagaacatccccaacccctacctggaggacaccgtgcccatcaacgtgtgcggcggccacagccagcagcagagccccaccgagaaggccggcgccagcggccagccccccagcggcccccccggcaccggcaacgagtacggcgtgagccccagactgccccagggcctgcccgcccaccccagacccgtgaccgcctacgacggcttcgtgcagtacatccccttcgacgaccccagactgagacacttcaagctggcccagccccagggcttctgcgaggacatcaagctggacgacaagagctacaacagcagccccgtgaccgcccaggagcccgcccacggcggcatgcagcccgacggcgccatctggaacccccagagcctgatcccccccagcggcgacgagagaggcctggtgctggccgacagcagccccagatggctgtggggccagccccccggcgacggcgagaacagcggcctgcccaaccagagagacagatgcgtggccagaggccagtggcccgacgtgagaggcagccagcacggccacaccggcagacaggtgagcagcccctacagccagggcgagagcacctgcgagacccagaccaagctgaagaagttccagaccggcaccagaaccaagaagagcagcaagaagaagatgaacgagaccatcttctgcctggtgagcatccccgtgaagagcgagagccacctgcccgacagagacatggacaacaacgacctgaagcccagcgccgaccagaagaacggcagcgacaagagccccgccctgcaggagcagagcctgctgagcatgagcagcaccgacctggagctgcaggccctgaccggcagcatgggcggcagaaccgagttccagaagcaggacctgggcgagcccgaggaggacagacagaccaacgacctgagcttcatccacctgaccaagcacagagagctgaagcacagcggcagctggcccggccacagatacagagaccagcagacccagaccagcttcagcgaggagccccagagcagccagctgctgcccggcgccaagctgggcggccccagcagagccgccctgagccccaagtgcagcgaccccgccgccagcgaggcccagacccacaccgccttccccaccggcgaccacaagcagagacccagcgccagaaacctgaagggccacagaagcctgagccccagcagcaacagcgccttcagcagaaccagcctgagcgtggaccaggcccccacccccaaggccggcagaagccagccctgcgtggacgtgcacggcctgggcgcccaccccggccccaagagagaggtggtgaagggcgagcccaccggcccctgcaacagcaagcagctgttcggccagttcctgctgaagcccgtgagcagaagaccctgggacctgatcagccagctggagagcttcaacaaggagctgcaggaggaggaggagagcagcagcagcagcagcagcagcagcagcagcagcgaggagagcgaggccgagccccagcaggagaacagagcccactgcagacaggaggacgtgggcttcagaggcaacagccccgagatgagagtggagccccagcccagaatgtgggtgcccgagagccccgtgtgcagaagcggcagaggcgagagcaagagcgagagctggagcgaggagctgcagcccggccaccccagagcctggccccccagccccggcagattcagagtggaggagggcggcggcgcccccttctgcagcgccgacggcagcaccagcgccgagaagagacacctggaggtgagcaacggcatggacgagctggccggcagccccttccccgtgaccagaatgagcagcagaagcagcgacgccaagcccctgcccgccagctaccccgccgagcccagagagccccaggagagccccaagatcaccagcgccttcagcagcgtgaagcccagcgaggccgtgcccagaaagttcgacagcggcggcgagagaggcgccggcctgcccctgagcctgagcaacaagaacagaggcctgagcgcccccgacctgagaagcgtgggcctgacccccggccaggagcagggcgccagcgagctggagggcagcctgggcgaggccagcaccatcgagatcccccccggcgagagcctgcaggccagagccgccagaatcctgggcatcgaggtggccgtggagagcctgctgcccggcatcagaagagccggccagaaccagcccgccgagcccgacgccagcgcctgcacccccgagagcccccaggaggagctgctgagcagacccgcccccgccgacgtgcccagagtgagcaccgacgccttctacggcagaagaaagtgcggctggaccaagagccccctgttcgtgggcgacagagacagcgccagaagagccccccaggccttcgagcacagcgacgtggacggcgtggtgaccagcaccgaccccgtgcccgagcccgagcccagccccctggagagcaagttcttcgagcagaaggacgtggagaccaagccccccttcagaagcaccctgttccacttcgtggagagaacccccagcgtggccggcagcgagaagagactgagaagccccagcaaggtgatcgagagcctgcaggagaagctggccagcccccccagaagagccgaccccgacagactgatgagaatgaaggaggtgagcagcgtgagcagaatgagagtgctgagcttcagaaacgccgacagccaggaggacgccgaggagctgaaggccaccaccagaggccaggccggcctgcccggcggcctggtgagccccggcagcggcgacagagcccagagactgggccacagcctgagcgtgagcaaggacagcatcagcagagaggagaaggagcaccccgccgcccagaaggagaagagcatggaccaggacttctggtgccccgacagctacgaccccagcagagtggagagagtgtag

SEQ ID NO: 95043 - DNA, 3219 bp, synthetic construct
  misc_feature 1..3219: note = Description of Artificial Sequence: Synthetic coding sequence
  source 1..3219: mol_type = other DNA
atggccccccccaccggcgtgctgagcagcctgctgctgctggtgaccatcgccggctgcgccagaaagcagtgcagcgagggcagaacctacagcaacgccgtgatcagccccaacctggagaccaccagaatcatgagagtgagccacaccttccccgtggtggactgcaccgccgcctgctgcgacctgagcagctgcgacctggcctggtggttcgagggcagatgctacctggtgagctgcccccacaaggagaactgcgagcccaagaagatgggccccatcagaagctacctgaccttcgtgctgagacccgtgcagagacccgcccagctgctggactacggcgacatgatgctgaacagaggcagccccagcggcatctggggcgacagccccgaggacatcagaaaggacctgaccttcctgggcaaggactggggcctggaggagatgagcgagtacagcgacgactacagagagctggagaaggacctgctgcagcccagcggcaagcaggagcccagaggcagcgccgagtacaccgactggggcctgctgcccggcagcgagggcgccttcaacagcagcgtgggcgacagccccgccgtgcccgccgagacccagcaggaccccgagctgcactacctgaacgagagcgccagcacccccgcccccaagctgcccgagagaagcgtgctgctgcccctgcccaccacccccagcagcggcgaggtgctggagaaggagaaggccagccagctgcaggagcagagcagcaacagcagcggcaaggaggtgctgatgcccagccacagcctgccccccgccagcctggagctgagcagcgtgaccgtggagaagagccccgtgctgaccgtgacccccggcagcaccgagcacagcatccccaccccccccaccagcgccgcccccagcgagagcacccccagcgagctgcccatcagccccaccaccgcccccagaaccgtgaaggagctgaccgtgagcgccggcgacaacctgatcatcaccctgcccgacaacgaggtggagctgaaggccttcgtggcccccgccccccccgtggagaccacctacaactacgagtggaacctgatcagccaccccaccgactaccagggcgagatcaagcagggccacaagcagaccctgaacctgagccagctgagcgtgggcctgtacgtgttcaaggtgaccgtgagcagcgagaacgccttcggcgagggcttcgtgaacgtgaccgtgaagcccgccagaagagtgaacctgccccccgtggccgtggtgagcccccagctgcaggagctgaccctgcccctgaccagcgccctgatcgacggcagccagagcaccgacgacaccgagatcgtgagctaccactgggaggagatcaacggccccttcatcgaggagaagaccagcgtggacagccccgtgctgagactgagcaacctggaccccggcaactacagcttcagactgaccgtgaccgacagcgacggcgccaccaacagcaccaccgccgccctgatcgtgaacaacgccgtggactacccccccgtggccaacgccggccccaaccacaccatcaccctgccccagaacagcatcaccctgaacggcaaccagagcagcgacgaccaccagatcgtgctgtacgagtggagcctgggccccggcagcgagggcaagcacgtggtgatgcagggcgtgcagaccccctacctgcacctgagcgccatgcaggagggcgactacaccttccagctgaaggtgaccgacagcagcagacagcagagcaccgccgtggtgaccgtgatcgtgcagcccgagaacaacagaccccccgtggccgtggccggccccgacaaggagctgatcttccccgtggagagcgccaccctggacggcagcagcagcagcgacgaccacggcatcgtgttctaccactgggagcacgtgagaggccccagcgccgtggagatggagaacatcgacaaggccatcgccaccgtgaccggcctgcaggtgggcacctaccacttcagactgaccgtgaaggaccagcagggcctgagcagcaccagcaccctgaccgtggccgtgaagaaggagaacaacagcccccccagagccagagccggcggcagacacgtgctggtgctgcccaacaacagcatcaccctggacggcagcagaagcaccgacgaccagagaatcgtgagctacctgtggatcagagacggccagagccccgccgccggcgacgtgatcgacggcagcgaccacagcgtggccctgcagctgaccaacctggtggagggcgtgtacaccttccacctgagagtgaccgacagccagggcgccagcgacaccgacaccgccaccgtggaggtgcagcccgaccccagaaagagcggcctggtggagctgaccctgcaggtgggcgtgggccagctgaccgagcagagaaaggacaccctggtgagacagctggccgtgctgctgaacgtgctggacagcgacatcaaggtgcagaagatcagagcccacagcgacctgagcaccgtgatcgtgttctacgtgcagagcagaccccccttcaaggtgctgaaggccgccgaggtggccagaaacctgcacatgagactgagcaaggagaaggccgacttcctgctgttcaaggtgctgagagtggacaccgccggctgcctgctgaagtgcagcggccacggccactgcgaccccctgaccaagagatgcatctgcagccacctgtggatggagaacctgatccagagatacatctgggacggcgagagcaactgcgagtggagcatcttctacgtgaccgtgctggccttcaccctgatcgtgctgaccggcggcttcacctggctgtgcatctgctgctgcaagagacagaagagaaccaagatcagaaagaagaccaagtacaccatcctggacaacatggacgagcaggagagaatggagctgagacccaagtacggcatcaagcacagaagcaccgagcacaacagcagcctgatggtgagcgagagcgagttcgacagcgaccaggacaccatcttcagcagagagaagatggagagaggcaaccccaaggtgagcatgaacggcagcatcagaaacggcgccagcttcagctactgcagcaaggacagatag

SEQ ID NO: 95044 - DNA, 918 bp, synthetic construct
  misc_feature 1..918: note = Description of Artificial Sequence: Synthetic coding sequence
  source 1..918: mol_type = other DNA
agccagctgcccgtgagagccgaggagagaaccgagagctgcctgtggggctgctgggccagcagcagagtgagaagaaccagcgacgcctgcagcagccccctggccaccagcagaagcgccagaagctgcggcgtgctgaccgcccccgtgaagggcgccagcagcagcctggtggtgaagctggccgacaccgacagagagagagccctgagaagaatgcagcagatggccggccacctgggcgccttccaccccgcccccctgcccctgggcgcctgcggcgcctacaccaccgccatcctgcagcaccaggccgccctgctggccgccgcccagggccccggcctgggccccgtggccgccgtggccgcccagatgcagcacgtggccgccttcagcctggtggccgcccccctgctgcccgccgccgccgccaacagcccccccggcagcggccccggcaccctgcccggcctgcccgcccccatcggcgtgaacggcttcggccccctgaccccccagaccaacggccagcccggcagcgacaccctgtacaacaacggcctgagcccctaccccgcccagagccccggcgtggccgaccccctgcagcaggcctacgccggcatgcaccactacgccggccccgagggctgcaacctgttcatctaccacctgccccaggagttcggcgacgccgagctgatccagaccttcctgcccttcggcgccgtggtgagcgccaaggtgttcgtggacagagccaccaaccagagcaagtgcttcggcttcgtgagcttcgacaaccccaccagcgcccagaccgccatccaggccatgaacggcttccagatcggcatgaagagactgaaggtgcagctgaagagacccaaggacgccaacagaccctactag

SEQ ID NO: 95045 - DNA, 198 bp, synthetic construct
  misc_feature 1..198: note = Description of Artificial Sequence: Synthetic coding sequence
  source 1..198: mol_type = other DNA
atggtgagaaccaaggccgacagcgtgcccggcacctacagaaaggtggtggccgccagagcccccagaaaggtgctgggcagcagcaccagcgccaccaacagcaccagcgtgagcagcagaaaggagcacgtgctgtgcaacctgatcacccagatgatgaagaagaacagaaccttcagcttcatcttcgagtag

SEQ ID NO: 95046 - DNA, 15018 bp, synthetic construct; identical to SEQ ID NO: 95031
  misc_feature 1..15018: note = Description of Artificial Sequence: Synthetic coding sequence
  source 1..15018: mol_type = other DNA

SEQ ID NO: 95047 - DNA, 2772 bp, synthetic construct; identical to SEQ ID NO: 95036
  misc_feature 1..2772: note = Description of Artificial Sequence: Synthetic coding sequence
  source 1..2772: mol_type = other DNA

SEQ ID NO: 95048 - DNA, 2982 bp, synthetic construct
  misc_feature 1..2982: note = Description of Artificial Sequence: Synthetic coding sequence
  source 1..2982: mol_type = other DNA
atgggcgccgccggcagacaggacttcctgttcaaggccatgctgaccatcagctggctgaccctgacctgcttccccggcgccaccagcaccgtggccgccggctgccccgaccagagccccgagctgcagccctggaaccccggccacgaccaggaccaccacgtgcacatcggccagggcaagaccctgctgctgaccagcagcgccaccgtgtacagcatccacatcagcgagggcggcaagctggtgatcaaggaccacgacgagcccatcgtgctgagaaccagacacatcctgatcgacaacggcggcgagctgcacgccggcagcgccctgtgccccttccagggcaacttcaccatcatcctgtacggcagagccgacgagggcatccagcccgacccctactacggcctgaagtacatcggcgtgggcaagggcggcgccctggagctgcacggccagaagaagctgagctggaccttcctgaacaagaccctgcaccccggcggcatggccgagggcggctacttcttcgagagaagctggggccacagaggcgtgatcgtgcacgtgatcgaccccaagagcggcaccgtgatccacagcgacagattcgacacctacagaagcaagaaggagagcgagagactggtgcagtacctgaacgccgtgcccgacggcagaatcctgagcgtggccgtgaacgacgagggcagcagaaacctggacgacatggccagaaaggccatgaccaagctgggcagcaagcacttcctgcacctgggcttcagacacccctggagcttcctgaccgtgaagggcaaccccagcagcagcgtggaggaccacatcgagtaccacggccacagaggcagcgccgccgccagagtgttcaagctgttccagaccgagcacggcgagtacttcaacgtgagcctgagcagcgagtgggtgcaggacgtggagtggaccgagtggttcgaccacgacaaggtgagccagaccaagggcggcgagaagatcagcgacctgtggaaggcccaccccggcaagatctgcaacagacccatcgacatccaggccaccaccatggacggcgtgaacctgagcaccgaggtggtgtacaagaagggccaggactacagattcgcctgctacgacagaggcagagcctgcagaagctacagagtgagattcctgtgcggcaagcccgtgagacccaagctgaccgtgaccatcgacaccaacgtgaacagcaccatcctgaacctggaggacaacgtgcagagctggaagcccggcgacaccctggtgatcgccagcaccgactacagcatgtaccaggccgaggagttccaggtgctgccctgcagaagctgcgcccccaaccaggtgaaggtggccggcaagcccatgtacctgcacatcggcgaggagatcgacggcgtggacatgagagccgaggtgggcctgctgagcagaaacatcatcgtgatgggcgagatggaggacaagtgctacccctacagaaaccacatctgcaacttcttcgacttcgacaccttcggcggccacatcaagttcgccctgggcttcaaggccgcccacctggagggcaccgagctgaagcacatgggccagcagctggtgggccagtaccccatccacttccacctggccggcgacgtggacgagagaggcggctacgacccccccacctacatcagagacctgagcatccaccacaccttcagcagatgcgtgaccgtgcacggcagcaacggcctgctgatcaaggacgtggtgggctacaacagcctgggccactgcttcttcaccgaggacggccccgaggagagaaacaccttcgaccactgcctgggcctgctggtgaagagcggcaccctgctgcccagcgacagagacagcaagatgtgcaagatgatcaccgaggacagctaccccggctacatccccaagcccagacaggactgcaacgccgtgagcaccttctggatggccaaccccaacaacaacctgatcaactgcgccgccgccggcagcgaggagaccggcttctggttcatcttccaccacgtgcccaccggccccagcgtgggcatgtacagccccggctacagcgagcacatccccctgggcaagttctacaacaacagagcccacagcaactacagagccggcatgatcatcgacaacggcgtgaagaccaccgaggccagcgccaaggacaagagacccttcctgagcatcatcagcgccagatacagcccccaccaggacgccgaccccctgaagcccagagagcccgccatcatcagacacttcatcgcctacaagaaccaggaccacggcgcctggctgagaggcggcgacgtgtggctggacagctgcagattcgccgacaacggcatcggcctgaccctggccagcggcggcaccttcccctacgacgacggcagcaagcaggagatcaagaacagcctgttcgtgggcgagagcggcaacgtgggcaccgagatgatggacaacagaatctggggccccggcggcctggaccacagcggcagaaccctgcccatcggccagaacttccccatcagaggcatccagctgtacgacggccccatcaacatccagaactgcaccttcagaaagttcgtggccctggagggcagacacaccagcgccctggccttcagactgaacaacgcctggcagagctgcccccacaacaacgtgaccggcatcgccttcgaggacgtgcccatcaccagcagagtgttcttcggcgagcccggcccctggttcaaccagctggacatggacggcgacaagaccagcgtgttccacgacgtggacggcagcgtgagcgagtaccccggcagctacctgaccaagaacgacaacaagtggcacagcctggccagcaaggccgccagcggccccagcggctag

SEQ ID NO: 95049 - DNA, 4086 bp, synthetic construct; identical to SEQ ID NO: 80223
  misc_feature 1..4086: note = Description of Artificial Sequence: Synthetic coding sequence
  source 1..4086: mol_type = other DNA

SEQ ID NO: 95050 - DNA, 1947 bp, synthetic construct
  misc_feature 1..1947: note = Description of Artificial Sequence: Synthetic coding sequence
  source 1..1947: mol_type = other DNA
atggaggtgaagggcaagaagcagttcaccggcaagagcaccaagaccgcccaggagaagaacagattccacaagaacagcgacagcggcagcagcaagaccttccccaccagaaaggtggccaaggagggcggccccaaggtgaccagcagaaacttcgagaagagcatcaccaagctgggcaagaagggcgtgaagcagttcaagaacaagcagcagggcgacaagagccccaagaacaagttccagcccgccaacaagttcaacaagaagagaaagttccagcccgacggcagaagcgacgagagcgccgccaagaagcccaagtgggacgacttcaagaagaagaagaaggagctgaagcagagcagacagctgagcgacaagaccaactacgacatcgtggtgagagccaagcagatgtgggagatcctgagaagaaaggactgcgacaaggagaagagagtgaagctgatgagcgacctgcagaagctgatccagggcaagatcaagaccatcgccttcgcccacgacagcaccagagtgatccagtgctacatccagtacggcaacgaggagcagagaaagcaggccttcgaggagctgagagacgacctggtggagctgagcaaggccaagtacagcagaaacatcgtgaagaagttcctgatgtacggcagcaagccccagatcgccgagatcatcagaagcttcaagggccacgtgagaaagatgctgagacacgccgaggccagcgccatcgtggagtacgcctacaacgacaaggccatcctggagcagagaaacatgctgaccgaggagctgtacggcaacaccttccagctgtacaagagcgccgaccacagaaccctggacaaggtgctggaggtgcagcccgagaagctggagctgatcatggacgagatgaagcagatcctgacccccatggcccagaaggaggccgtgatcaagcacagcctggtgcacaaggtgttcctggacttcttcacctacgccccccccaagctgagaagcgagatgatcgaggccatcagagaggccgtggtgtacctggcccacacccacgacggcgccagagtggccatgcactgcctgtggcacggcacccccaaggacagaaaggtgatcgtgaagaccatgaagacctacgtggagaaggtggccaacggccagtacagccacctggtgctgctggccgccttcgactgcatcgacgacaccaagctggtgaagcagatcatcatcagcgagatcatcagcagcctgcccagcatcgtgaacgacaagtacggcagaaaggtgctgctgtacctgctgagccccagagaccccgcccacaccgtgagagagatcatcgaggtgctgcagaagggcgacggcaacgcccacagcaagaaggacaccgaggtgagaagaagagagctgctggagagcatcagccccgccctgctgagctacctgcaggagcacgcccaggaggtggtgctggacaagagcgcctgcgtgctggtgagcgacatcctgggcagcgccaccggcgacgtgcagcccaccatgaacgccatcgccagcctggccgccaccggcctgcaccccggcggcaaggacggcgagctgcacatcgccgagcaccccgccggccacctggtgctgaagtggctgatcgagcaggacaagaagatgaaggagaacggcagagagggctgcttcgccaagaccctggtggagcacgtgggcatgaagaacctgaagagctgggccagcgtgaacagaggcgccatcatcctgagcagcctgctgcagagctgcgacctggaggtggccaacaaggtgaaggccgccctgaagagcctgatccccaccctggagaagaccaagagcaccagcaagggcatcgagatcctgctggagaagctgagcacctag

SEQ ID NO: 95051 - DNA, 339 bp, synthetic construct
  misc_feature 1..339: note = Description of Artificial Sequence: Synthetic coding sequence
  source 1..339: mol_type = other DNA
atgaagaaccaggtgtgcagcaagtgcggcgagggcacctacagcctgggcagcggcatcaagttcgacgagtgggacgagctgcccgccggcttcagcaacatcgccaccttcatggacaccgtggtgggccccagcgacagcagacccgacggctgcaacaacagcagctggatccccagaggcaactacatcgagagcaacagagacgactgcaccgtgagcctgatctacgccgtgcacctgaagaagagcggctacgtgttcttcgagtaccagtacgtggacaacaacatcttcttcgagttcttcatccagaacgaccagtgccaggagtag

SEQ ID NO: 95052 - DNA, 1842 bp, synthetic construct
  misc_feature 1..1842: note = Description of Artificial Sequence: Synthetic coding sequence
  source 1..1842: mol_type = other DNA
atgttcagcgccggcgccgagagcctgctgcaccaggccagagagatccaggacgaggagctgaagaagttctgcagcagaatctgcaagctgctgcaggccgaggacctgggccccgacaccctggacagcctgcagagactgttcctgatcatcagcgccaccaagtacagcagaagactggagaagacctgcgtggacctgctgcaggccaccctgggcctgcccgcctgccccgagcagctgcaggtgctgtgcgccgccatcctgagagagatgagccccagcgacagcctgagcctggcctgggaccacacccagaacagcagacagctgagcctggtggccagcgtgctgctggcccagggcgacagaaacgaggaggtgagagccgtgggccagggcgtgctgagagccctggagagcagacagcccgagggccccagcctgagacacctgctgcccgtgatggccaaggtggtggtgctgagccccggcaccctgcaggaggaccaggccaccctgctgagcaagagactggtggactggctgagatacgccagcctgcagcagggcctgccccacagcggcggcttcttcagcacccccagagccagacagcccggccccgtgaccgaggtggacggcgccgtggccaccgacttcttcaccgtgctgagcagcggccacagattcaccgacgaccagtggctgaacgtgcaggccttcagcatgctgagagcctggctgctgcacagcggccccgagggccccggcaccctggacaccgacgacagaagcgagcaggagggcagcaccctgagcgtgatcagcgccaccagcagcgccggcagactgctgccccccagagagagactgagagaggtggccttcgagtactgccagagactgatcgagcagagcaacagaagagccctgagaaagggcgacagcgacctgcagaaggcctgcctggtggaggccgtgctggtgctggacgtgctgtgcagacaggaccccagcttcctgtacagaagcctgagctgcctgaaggccctgcacggcagagtgagaggcgaccccgccagcgtgagagtgctgctgcccctggcccacttcttcctgagccacggcgaggccgccgccgtggacagcgaggccgtgtaccagcacctgttcaccagaatccccgtggagcagttccacagccccatgctggccttcgagttcatccagttctgcagagacaacctgcacctgttcagcggccacctgagcaccctgagactgagcttccccaacctgttcaagttcctggcctggaacagcccccccctgaccagcgagttcgtggccctgctgcccgccctggtggacgccggcaccgccctggagatgctgcacgccctgctggacctgccctgcctgaccgccgtgctggacctgcagctgagaagcgcccccgccgccagcgagagacccctgtgggacaccagcctgagagcccccagctgcctggaggccttcagagacccccagttccagggcctgttccagtacctgctgagacccaaggccagcggcgccaccgagagactggcccccctgcaccagctgctgcagcccatggccggctgcgccagagtggcccagtgcgcccaggccgtgcccaccctgctgcaggccttcttcagcgccgtgacccaggtggccgacggcagcctgatcaaccagctggccctgctgctgctgggcagaagcgacagcctgtaccccgcccccggctacgccgccggcgtgcacagacccgacgcctgcagacccatcctggtgcccctgtag

SEQ ID NO: 95053 - DNA, 918 bp, synthetic construct
  misc_feature 1..918: note = Description of Artificial Sequence: Synthetic coding sequence
  source 1..918: mol_type = other DNA
atggagaaggagacctacaagaccgccaagctgatcctggagagattcgaccccgacagcaagaaggccaaggagtgcgagccccccagcgccggcgccgccgtgaccgccagacccggccaggagatcagacagagaaccgccgcccagagaaacctgagccccacccccgccagccccaaccagggcccccccccccaggtgcccgtgagccccggcccccccaaggacagcagcgcccccggcggcccccccgagagaaccgtgacccccgccctgagcagcaacgtgctgcccagacacctgggcagccccgccaccagcgtgcccggcatgggcctgcacccccccggcccccccctggccagacccatcctgcccagagagagaggcgccctggacagaatcgtggagtacctggtgggcgacggcccccagaacagatacgccctgatctgccagcagtgcttcagccacaacggcatggccctgaaggaggagttcgagtacatcgccttcagatgcgcctactgcttcttcctgaaccccgccagaaagaccagaccccaggcccccagactgcccgagttcagcttcgagaagagacaggtggtggagggcagcagcagcgtgggccccctgcccagcggcagcgtgctgagcagcgacaaccagttcaacgaggagagcctggagcacgacgtgctggacgacaacaccgagcagaccgacgacaagatccccgccaccgagcagaccaaccaggtgatcgagaaggccagcgacagcgaggagcccgaggagaagcaggagaccgagaacgaggaggccagcgtgatcgagaccaacagcaccgtgcccggcgccgacagcatccccgaccccgagctgagcggcgagagcctgaccgccgagtag

SEQ ID NO: 95054 - DNA, 2589 bp, synthetic construct
  misc_feature 1..2589: note = Description of Artificial Sequence: Synthetic coding sequence
  source 1..2589: mol_type = other DNA
atgcacagcagctggatccccagaggcaactacatcgagagcaacagagacgactgcaccgtgagcctgatctacgccgtgcacctgaagaagagcggctacgtgttcttcgagtaccagtacgtggacaacaacatcttcttcgagttcttcatccagaacgaccagtgccaggagatggacaccaccaccgacaagtgggtgaagctgaccgacaacggcgagtggggcagccacagcgtgatgctgaagagcggcaccaacatcctgtactggagaaccaccggcatcctgatgggcagcaaggccgtgaagcccgtgctggtgaagaacatcaccatcgagggcgtggcctacaccagcgagtgcttcccctgcaagcccggcaccttcagcaacaagcccggcagcttcaactgccaggtgtgccccagaaacacctacagcgagaagggcgccaaggagtgcatcagatgcaaggacgacagccagttcagcgaggagggcagcagcgagtgcaccgagagacccccctgcaccaccaaggactacttccagatccacaccccctgcgacgaggagggcaagacccagatcatgtacaagtggatcgagcccaagatctgcagagaggacctgaccgacgccatcagactgccccccagcggcgagaagaaggactgccccccctgcaaccccggcttctacaacaacggcagcagcagctgccacccctgcccccccggcaccttcagcgacggcaccaaggagtgcagaccctgccccgccggcaccgagcccgccctgggcttcgagtacaagtggtggaacgtgctgcccggcaacatgaagaccagctgcttcaacgtgggcaacagcaagtgcgacggcatgaacggctgggaggtggccggcgaccacatccagagcggcgccggcggcagcgacaacgactacctgatcctgaacctgcacatccccggcttcaagccccccaccagcatgaccggcgccaccggcagcgagctgggcagaatcaccttcgtgttcgagaccctgtgcagcgccgactgcgtgctgtacttcatggtggacatcaacagaaagagcaccaacgtggtggagagctggggcggcaccaaggagaagcaggcctacacccacatcatcttcaagaacgccaccttcaccttcacctgggccttccagagaaccaaccagggccaggacaacagaagattcatcaacgacatggtgaagatctacagcatcaccgccaccaacgccgtggacggcgtggccagcagctgcagagcctgcgccctgggcagcgagcagagcggcagcagctgcgtgccctgcccccccggccactacatcgagaaggagaccaaccagtgcaaggagtgcccccccgacacctacctgagcatccaccaggtgtacggcaaggaggcctgcatcccctgcggccccggcagcaagaacaaccaggaccacagcgtgtgctacagcgactgcttcttctaccacgagaaggagaaccagagcctgcactacgacttcagcaacctgagcagcgtgggcagcctgatgaacggccccagcttcaccagcaagggcaccaagtacttccacttcttcaacatcagcctgtgcggccacgagggcaagaagatggccctgtgcaccaacaacatcaccgacttcaccgtgaaggagatcgtggccggcagcgacgactacaccaacctggtgggcgccttcgtgtgccagagcaccatcatccccagcgagagcaagggcttcagagccgccctgagcagccagagcatcatcctggccgacaccttcatcggcgtgaccgtggagaccaccctgaagaacatcaacatcaaggaggacatgttccccgtgcccaccagccagatccccgacgtgcacttcttctacaagagcagcaccgccaccaccagctgcatcaacggcagaagcaccgccgtgaagatgagatgcaaccccaccaagagcggcgccggcgtgatcagcgtgcccagcaagtgccccgccggcacctgcgacggctgcaccttctacttcctgtgggagagcgccgaggcctgccccctgtgcaccgagcacgacttccacgagatcgagggcgcctgcaagagaggcttccaggagaccctgtacgtgtggaacgagcccaagtggtgcatcaagggcatcagcctgcccgagaagaagctggccacctgcgagaccgtggacttctggctgaaggtgggcgccggcgtgggcgccttcaccgccgtgctgctggtggccctgacctgctacttctggaagaagaaccagaagctggagtacaagtacagcaagctggtgatgaccaccaacagcaaggagtgcgagctgcccgccgccgacagctgcgccatcatggagggcgaggacaacgaggaggaggtggtgtacagcaacaagcagagcctgctgggcaagctgaagagcctggccaccaaggagaaggaggaccacttcgagagcgtgcagctgaagaccagcagaagccccaacatctag

SEQ ID NO: 95055 - DNA, 5853 bp, synthetic construct
  misc_feature 1..5853: note = Description of Artificial Sequence: Synthetic coding sequence
  source 1..5853: mol_type = other DNA
atgcccggcgccagaagaagaagaagaggcgccgccatggagggcaagcccagagccggcgtggccctggcccccggccccagcggcagaagacccagcgccagatgcgccagaagaagaagacccggcctgctgctgcccggcctgtggctgctgctgctggccagacccgccagctgcgcccccgacgagctgagccccgagcagcacaacctgagcctgtacagcatggagctggtgctgaagaagagcaccggccacagcgccgcccaggtggccctgaccgagaccgcccccggcagccagcacagcagccccctgcacgtgaccgccccccccagcgccaccaccttcgacaccgccttcttcaaccagggcaagcagaccaagagcaccgccgaccccagcatcttcgtggccacctacgtgagcgtgaccagcaaggaggtggccgtgaacgacgacgagatggacaacttcctgcccgacacccactggaccacccccagaatggtgagccccatccagtacatcaccgtgagcccccccggcctgcccagagaggccctggagcccatgctgacccccagcctgcccatggtgagcctgcaggacgaggaggtgaccagcggctggcagaacaccaccagacagcccgccgcctacgccgagagcgccagccacttccacaccttcagaagcgccttcagaaccagcgagggcatcgtgcccacccccggcagaaacctggtgctgtaccccaccgacgcctacagccacctgagcagcagaaccctgcccgagatcgtggccagcctgaccgagggcgtggagaccaccctgttcctgagcagcagaagcctgatgccccagcccctgggcgacggcatcaccatccccctgcccagcctgggcgaggtgagccagccccccgaggaggtgtgggccaccagcgccgacagatacaccgacgtgaccaccgtgctgagccagagcctggaggagaccatcagccccagaacctaccccaccgtgaccgccagccacgccgccctggccttcagcagaacccacagccccctgctgagcacccccctggccttcgccagcagcgccagccccaccgacgtgagcagcaaccccttcctgcccagcgacagcagcaagaccagcgagctgcacagcaacagcgccctgcccggccccgtggacaacacccacatcctgagccccgtgagcagcttcagaccctacacctggtgcgccgcctgcaccgtgcccagcccccagcaggtgctggccaccagcctgatggagaaggacgtgggcagcggcgacggcgccgagaccctgtgcatgaccgtgctggaggagagcagcatcagcctgatgagcagcgtggtggccgacttcagcgagttcgaggaggacccccaggtgttcaacaccctgttccccagcagacccatcgtgcccctgagcagcagaagcatggagatcagcgagaccagcgtgggcatcagcgccgaggtggacatgagcagcgtgaccaccacccaggtgccccccgcccacggcagactgagcgtgcccgccagcctggaccccaccgccggcagcctgagcgtggccgagacccaggtgacccccagcagcgtgaccaccgccttcttcagcgtgatcaccagcatcctgctggacagcagcttcagcgtgatcgccaacaagaacacccccagcctggccgtgagagaccccagcgtgttcaccccctacagcctggtgcccagcgtggagagcagcctgttcagcgaccaggagagaagcagcttcagcgagcacaagcccagaggcgccctggacttcgccagcagcttcttcagcaccccccccctggagctgagcggcagcatcagcagccccagcgaggcccccgccagcctgagcctgatgcccagcgacctgagccccttcaccagccagagcttcagccccctggtggagaccttcaccctgttcgacagcagcgacctgcagagcagccagctgagcctgcccagcagcaccaacctggagttcagccagctgcagcccagcagcgagctgcccctgaacaccatcatgctgctgcccagcagaagcgaggtgagcccctggagcagcttccccagcgacagcctggagttcgtggaggccagcaccgtgagcctgaccgacagcgaggcccacttcaccagcgccttcatcgagaccaccagctacctggagagcagcctgatcagccacgagagcgccgtgaccgccctggtgccccccggcagcgagagcttcgacatcctgaccgccggcatccaggccaccagccccctgaccaccgtgcacaccacccccatcctgaccgagagcagcctgttcagcaccctgaccccccccgacgaccagatcagcgccctggacggccacgtgagcgtgctggccagcttcagcaaggccatccccaccggcaccgtgctgatcaccgacgcctacctgcccagcggcagcagcttcgtgagcgaggccacccccttccccctgcccaccgagctgaccgtggtgggccccagcctgacccccaccgaggtgcccctgaacaccagcaccgaggtgagcaccaccagcaccggcgccgccaccggcggccccctggacagcaccctgatgggcgacgccgccagccagagcccccccgagagcagcgccgccccccccctgcccagcctgagacccgtgaccgccttcaccctggaggccaccgtggacacccccaccctggccaccgccaagcccccctacgtgtgcgacatcaccgtgcccgacgcctacctgatcaccaccgtgctggccagaagagccgtgcaggagtacatcatcaccgccatcaaggaggtgctgagaatccacttcaacagagccgtggagctgaaggtgtacgagctgttcaccgacttcaccttcctggtgaccagcggccccttcgtgtacaccgccatcagcgtgatcaacgtgctgatcaacagcaagctggtgagagaccagacccccctgatcctgagcgtgaagcccagcttcctggtgcccgagagcagattccaggtgcagaccgtgctgcagttcgtgccccccagcgtggacaccggcttctgcaacttcacccagagaatcgagaagggcctgatgaccgccctgttcgaggtgagaaagcaccaccagggcacctacaacctgaccgtgcagatcctgaacatcaccatcagcagcagcagagtgacccccagaagaggccccgtgaacatcatcttcgccgtgaagagcacccagggcttcctgaacggcagcgaggtgagcgagctgctgagaaacctgagcgtggtggagttcagcttctacctgggctaccccgtgctgcagatcgccgagcccttccagtacccccagctgaacctgagccagctgctgaagagcagctgggtgagaaccgtgctgctgggcgtgatggagaagcagctgcagaacgaggtgttccaggccgagatggagagaaagctggcccagctgctgagcgaggtgagcaccagaagaagaatgtggagaagagccaccgtggccgccggcaacagcgtggtgcaggtggtgaacgtgagcagactggagggcgacgacaaccccgtgcagctgatctacttcgtggaggaccaggacggcgagagactgagcgccgtgaagagcagcgacctgatcaacaagatggacctgcagagagccgccatcatcctgggctacagaatccagggcgtgatcgcccagcccgtggacagagtgaagagacccagccccgagagccagagcaacaacctgtgggtgatcgtgggcgtggtgatccccgtgctggtggtgatggtgatcgtggtgatcctgtactggaagctgtgcagaaccgacaagctggacttccagcccgacaccgtggccaacatccagcagagacagaagctgcagatccccagcgtgaagggcttcgacttcgccaagcagcacctgggccagcacaacaaggacgacatcctgatcatccacgagcccgcccccctgcccggccccctgaaggaccacaccacccccagcgagaacggcgacgtgcccagccccaagagcaagatccccagcaagaacgtgagacacagaggcagagtgagccccagcgacgccgacagcaccgtgagcgaggagagcagcgagagagacgccggcgacaagacccccggcgccgtgaacgacggcagaagccacagagccccccagagcggcccccccctgcccagcagcggcaacgagcagcacagcagcgccagcatcttcgagcacgtggacagaatcagcagaccccccgaggccagcagaagagtgcccagcaagatccagctgatcgccatgcagcccatccccgccccccccgtgcagagacccagccccgccgacagagtggccgagagcaacaagatcaacaaggagatccagaccgccctgagacacaagagcgagatcgagcaccacagaaacaagatcagactgagagccaagagaagaggccactacgagttccccgtggtggacgacctgagcagcggcgacaccaaggagagacacagagtgtacagaagagcccagatgcagatcgacaagatcctggaccccaccgccagcgtgcccagcgtgttcatcgagcccagaaagagcagcagaatcaagagaagccccaagcccagaagaaagcaccaggtgaacggctgccccgccgacgccgagaaggacagactgatcaccaccgacagcgacggcacctacagaagaccccccggcgtgcacaacagcgcctacatcggctgccccagcgaccccgacctgcccgccgacgtgcagacccccagcagcgtggagctgggcagataccccgccctgcccttccccgccagccagtacatccccccccagcccagcatcgaggaggccagacagaccatgcacagcctgctggacgacgccttcgccctggtggcccccagcagccagcccgccagcaccgccggcgtgggccccggcgtgccccccggcctgcccgccaacagcacccccagccaggaggagagaagagccacccagtggggcagcttctacagccccgcccagaccgccaacaacccctgcagcagatacgaggactacggcatgaccccccccaccggccccctgcccagacccggcttcggccccggcctgctgcagagcaccgagctggtgccccccgacccccagcagccccaggccagcgccgaggcccccttcgccgccagaggcatctacagcgaggagatgcccagcgtggccagacccagacccgtgggcggcaccaccggcagccagatccagcacctgacccaggtgggcatcgccagcagaatcggcgcccagcccgtggagatcccccccagcagaggcagccagtacggcggccccggctggcccagctacggcgaggacgaggccggcagaagagaggccacccacatgctgggccaccaggagtacagcagcagccccctgttccaggtgcccagaaccagcggcagagagcccagcgcccccagcggcaacctgccccacagaggcctgcagggccccggcctgggctaccccaccagcagcaccgaggacctgcagcccggccacagcagcgccagcctgatcaaggccatcagagaggagctgctgagactgagccagaagcagagcaccgtgcagaacttccacagctag

SEQ ID NO: 95056 - DNA, 357 bp, synthetic construct
  misc_feature 1..357: note = Description of Artificial Sequence: Synthetic coding sequence
  source 1..357: mol_type = other DNA
tgaaagagcaacggcaagaccgccatcggcgaccccggcagagccaacatgcccggctacaacgaggacagcagaagcaccttcttcgacaagaagtacagcaacatgagcaccctgggcaacaacggccccacccacaagaagctgtacagacacaagagcagcagcaaggccctgagagacgagaagtgcaagggcaagcacatggagagagagcaggtgcacaaggacgagagcggcaccgccagcttcgagaagctgagagacagcgactacaacctgctgaaggccgagaccaccttctgggtgctgcccgtgttcgaggaggagaccagaatcttccagaaggacatctag

SEQ ID NO: 95057 - DNA, 3084 bp, synthetic construct
  misc_feature 1..3084: note = Description of Artificial Sequence: Synthetic coding sequence
  source 1..3084: mol_type = other DNA
atgagagtgagccacaccttccccgtggtggactgcaccgccgcctgctgcgacctgagcagctgcgacctggcctggtggttcgagggcagatgctacctggtgagctgcccccacaaggagaactgcgagcccaagaagatgggccccatcagaagctacctgaccttcgtgctgagacccgtgcagagacccgcccagctgctggactacggcgacatgatgctgaacagaggcagccccagcggcatctggggcgacagccccgaggacatcagaaaggacctgaccttcctgggcaaggactggggcctggaggagatgagcgagtacagcgacgactacagagagctggagaaggacctgctgcagcccagcggcaagcaggagcccagaggcagcgccgagtacaccgactggggcctgctgcccggcagcgagggcgccttcaacagcagcgtgggcgacagccccgccgtgcccgccgagacccagcaggaccccgagctgcactacctgaacgagagcgccagcacccccgcccccaagctgcccgagagaagcgtgctgctgcccctgcccaccacccccagcagcggcgaggtgctggagaaggagaaggccagccagctgcaggagcagagcagcaacagcagcggcaaggaggtgctgatgcccagccacagcctgccccccgccagcctggagctgagcagcgtgaccgtggagaagagccccgtgctgaccgtgacccccggcagcaccgagcacagcatccccaccccccccaccagcgccgcccccagcgagagcacccccagcgagctgcccatcagccccaccaccgcccccagaaccgtgaaggagctgaccgtgagcgccggcgacaacctgatcatcaccctgcccgacaacgaggtggagctgaaggccttcgtggcccccgccccccccgtggagaccacctacaactacgagtggaacctgatcagccaccccaccgactaccagggcgagatcaagcagggccacaagcagaccctgaacctgagccagctgagcgtgggcctgtacgtgttcaaggtgaccgtgagcagcgagaacgccttcggcgagggcttcgtgaacgtgaccgtgaagcccgccagaagagtgaacctgccccccgtggccgtggtgagcccccagctgcaggagctgaccctgcccctgaccagcgccctgatcgacggcagccagagcaccgacgacaccgagatcgtgagctaccactgggaggagatcaacggccccttcatcgaggagaagaccagcgtggacagccccgtgctgagactgagcaacctggaccccggcaactacagcttcagactgaccgtgaccgacagcgacggcgccaccaacagcaccaccgccgccctgatcgtgaacaacgccgtggactacccccccgtggccaacgccggccccaaccacaccatcaccctgccccagaacagcatcaccctgaacggcaaccagagcagcgacgaccaccagatcgtgctgtacgagtggagcctgggccccggcagcgagggcaagcacgtggtgatgcagggcgtgcagaccccctacctgcacctgagcgccatgcaggagggcgactacaccttccagctgaaggtgaccgacagcagcagacagcagagcaccgccgtggtgaccgtgatcgtgcagcccgagaacaacagaccccccgtggccgtggccggccccgacaaggagctgatcttccccgtggagagcgccaccctggacggcagcagcagcagcgacgaccacggcatcgtgttctaccactgggagcacgtgagaggccccagcgccgtggagatggagaacatcgacaaggccatcgccaccgtgaccggcctgcaggtgggcacctaccacttcagactgaccgtgaaggaccagcagggcctgagcagcaccagcaccctgaccgtggccgtgaagaaggagaacaacagcccccccagagccagagccggcggcagacacgtgctggtgctgcccaacaacagcatcaccctggacggcagcagaagcaccgacgaccagagaatcgtgagctacctgtggatcagagacggccagagccccgccgccggcgacgtgatcgacggcagcgaccacagcgtggccctgcagctgaccaacctggtggagggcgtgtacaccttccacctgagagtgaccgacagccagggcgccagcgacaccgacaccgccaccgtggaggtgcagcccgaccccagaaagagcggcctggtggagctgaccctgcaggtgggcgtgggccagctgaccgagcagagaaaggacaccctggtgagacagctggccgtgctgctgaacgtgctggacagcgacatcaaggtgcagaagatcagagcccacagcgacctgagcaccgtgatcgtgttctacgtgcagagcagaccccccttcaaggtgctgaaggccgccgaggtggccagaaacctgcacatgagactgagcaaggagaaggccgacttcctgctgttcaaggtgctgagagtggacaccgccggctgcctgctgaagtgcagcggccacggccactgcgaccccctgaccaagagatgcatctgcagccacctgtggatggagaacctgatccagagatacatctgggacggcgagagcaactgcgagtggagcatcttctacgtgaccgtgctggccttcaccctgatcgtgctgaccggcggcttcacctggctgtgcatctgctgctgcaagagacagaagagaaccaagatcagaaagaagaccaagtacaccatcctggacaacatggacgagcaggagagaatggagctgagacccaagtacggcatcaagcacagaagcaccgagcacaacagcagcctgatggtgagcgagagcgagttcgacagcgaccaggacaccatcttcagcagagagaagatggagagaggcaaccccaaggtgagcatgaacggcagcatcagaaacggcgccagcttcagctactgcagcaaggacagatag

SEQ ID NO: 95058 - DNA, 1821 bp, synthetic construct
  misc_feature 1..1821: note = Description of Artificial Sequence: Synthetic coding sequence
  source 1..1821: mol_type = other DNA
atgggcaacacctgcagagtgtgctaccagctggaggccatcaagagaagcaacgagatgagcaacgtgatgggcaacaccacctggaccaccagcggcctgaagagccagggcagactgagcgtgggcagcaacagagacagagagatcagcatgagcgtgggcctgggcagaagccagctggacagcaagggcggcgtggtgggcggcaccatcgacgtgaacgccctggagatggtggcccacatcagcgagcaccccaaccagcagcccagccacaagatccagatcaccatgggcagcaccgaggccagagtggactacatgggcagcagcatcctgatgggcatcttcagcaacgccgacctgaagctgcaggacgagtggaaggtgaacctgtacaacaccctggacagcagcatcaccgacaagagcgagatcttcgtgcacggcgacctgaagtgggacatcttccaggtgatgatcagcagaagcaccacccccgacctgatcaagatcggcatgaagctgcaggagttcttcacccagcagttcgacaccagcaagagagccctgagcacctggggccccgtgccctacctgccccccaagaccatgaccagcaacctggagaagagcagccaggagcagctgctggacgccgcccaccacagacactggcccggcgtgctgaaggtggtgagcggctgccacatcagcctgttccagatccccctgcccgaggacggcatgcagttcggcggcagcatgagcctgcacggcaaccacatgaccctggcctgcttccacggccccaacttcagaagcaagagctgggccctgttccacctggaggagcccaacatcgccttctggaccgaggcccagaagatctgggaggacggcagcagcgaccacagcacctacatcgtgcagaccctggacttccacctgggccacaacaccatggtgaccaagccctgcggcgccctggagagccccatggccaccatcaccaagatcaccagaagaagacacgagaaccccccccacggcgtggccagcgtgaaggagtggttcaactacgtgaccgccaccagaaacgaggagctgaacctgctgagaaacgtggacgccaacaacaccgagaacagcaccaccgtgaagaacagcagcctgctgagcggcttcagaggcggcagcagctacaaccacgagaccgagaccatcttcgccctgcccagaatgcagctggacttcaagagcatccacgtgcaggagccccaggagcccagcctgcaggacgccagcctgaagcccaaggtggagtgcagcgtggtgaccgagttcaccgaccacatctgcgtgaccatggacgccgagctgatcatgttcctgcacgacctggtgagcgcctacctgaaggagaaggagaaggccatcttcccccccagaatcctgagcaccagacccggccagaagagccccatcatcatccacgacgacaacagcagcgacaaggacagagaggacagcatcacctacaccaccgtggactggagagacttcatgtgcaacacctggcacctggagcccaccctgagactgatcagctggaccggcagaaagatcgaccccgtgggcgtggactacatcctgcagaagctgggcttccaccacgccagaaccaccatccccaagtggctgcagagaggcgtgatggaccccctggacaaggtgctgagcgtgctgatcaagaagctgggcaccgccctgcaggacgagaaggagaagaagggcaaggacaaggaggagcactag

SEQ ID NO: 95059 - DNA, 5805 bp, synthetic construct
  misc_feature 1..5805: note = Description of Artificial Sequence: Synthetic coding sequence
  source 1..5805: mol_type = other DNA
atgcccggcgccagaagaagaagaagaggcgccgccatggagggcaagcccagagccggcgtggccctggcccccggccccagcggcagaagacccagcgccagatgcgccagaagaagaagacccggcctgctgctgcccggcctgtggctgctgctgctggccagacccgccagctgcgcccccgacgagctgagccccgagcagcacaacctgagcctgtacagcatggagctggtgctgaagaagagcaccggccacagcgccgcccaggtggccctgaccgagaccgcccccggcagccagcacagcagccccctgcacgtgaccgccccccccagcgccaccaccttcgacaccgccttcttcaaccagggcaagcagaccaagagcaccgccgaccccagcatcttcgtggccacctacgtgagcgtgaccagcaaggaggtggccgtgaacgacgacgagatggacaacttcctgcccgacacccactggaccacccccagaatggtgagccccatccagtacatcaccgtgagcccccccggcctgcccagagaggccctggagcccatgctgacccccagcctgcccatggtgagcctgcaggacgaggaggtgaccagcggctggcagaacaccaccagacagcccgccgcctacgccgagagcgccagccacttccacaccttcagaagcgccttcagaaccagcgagggcatcgtgcccacccccggcagaaacctggtgctgtaccccaccgacgcctacagccacctgagcagcagaaccctgcccgagatcgtggccagcctgaccgagggcgtggagaccaccctgttcctgagcagcagaagcctgatgccccagcccctgggcgacggcatcaccatccccctgcccagcctgggcgaggtgagccagccccccgaggaggtgtgggccaccagcgccgacagatacaccgacgtgaccaccgtgctgagccagagcctggaggagaccatcagccccagaacctaccccaccgtgaccgccagccacgccgccctggccttcagcagaacccacagccccctgctgagcacccccctggccttcgccagcagcgccagccccaccgacgtgagcagcaaccccttcctgcccagcgacagcagcaagaccagcgagctgcacagcaacagcgccctgcccggccccgtggacaacacccacatcctgagccccgtgagcagcttcagaccctacacctggtgcgccgcctgcaccgtgcccagcccccagcaggtgctggccaccagcctgatggagaaggacgtgggcagcggcgacggcgccgagaccctgtgcatgaccgtgctggaggagagcagcatcagcctgatgagcagcgtggtggccgacttcagcgagttcgaggaggacccccaggtgttcaacaccctgttccccagcagacccatcgtgcccctgagcagcagaagcatggagatcagcgagaccagcgtgggcatcagcgccgaggtggacatgagcagcgtgaccaccacccaggtgccccccgcccacggcagactgagcgtgcccgccagcctggaccccaccgccggcagcctgagcgtggccgagacccaggtgacccccagcagcgtgaccaccgccttcttcagcgtgatcaccagcatcctgctggacagcagcttcagcgtgatcgccaacaagaacacccccagcctggccgtgagagaccccagcgtgttcaccccctacagcctggtgcccagcgtggagagcagcctgttcagcgaccaggagagaagcagcttcagcgagcacaagcccagaggcgccctggacttcgccagcagcttcttcagcaccccccccctggagctgagcggcagcatcagcagccccagcgaggcccccgccagcctgagcctgatgcccagcgacctgagccccttcaccagccagagcttcagccccctggtggagaccttcaccctgttcgacagcagcgacctgcagagcagccagctgagcctgcccagcagcaccaacctggagttcagccagctgcagcccagcagcgagctgcccctgaacaccatcatgctgctgcccagcagaagcgaggtgagcccctggagcagcttccccagcgacagcctggagttcgtggaggccagcaccgtgagcctgaccgacagcgaggcccacttcaccagcgccttcatcgagaccaccagctacctggagagcagcctgatcagccacgagagcgccgtgaccgccctggtgccccccggcagcgagagcttcgacatcctgaccgccggcatccaggccaccagccccctgaccaccgtgcacaccacccccatcctgaccgagagcagcctgttcagcaccctgaccccccccgacgaccagatcagcgccctggacggccacgtgagcgtgctggccagcttcagcaaggccatccccaccggcaccgtgctgatcaccgacgcctacctgcccagcggcagcagcttcgtgagcgaggccacccccttccccctgcccaccgagctgaccgtggtgggccccagcctgacccccaccgaggtgcccctgaacaccagcaccgaggtgagcaccaccagcaccggcgccgccaccggcggccccctggacagcaccctgatgggcgacgccgccagccagagcccccccgagagcagcgccgccccccccctgcccagcctgagacccgtgaccgccttcaccctggaggccaccgtggacacccccaccctggccaccgccaagcccccctacgtgtgcgacatcaccgtgcccgacgcctacctgatcaccaccgtgctggccagaagagccgtgcaggagtacatcatcaccgccatcaaggaggtgctgagaatccacttcaacagagccgtggagctgaaggtgtacgagctgttcaccgacttcaccttcctggtgaccagcggccccttcgtgtacaccgccatcagcgtgatcaacgtgctgatcaacagcaagctggtgagagaccagacccccctgatcctgagcgtgaagcccagcttcctggtgcccgagagcagattccaggtgcagaccgtgctgcagttcgtgccccccagcgtggacaccggcttctgcaacttcacccagagaatcgagaagggcctgatgaccgccctgttcgaggtgagaaagcaccaccagggcacctacaacctgaccgtgcagatcctgaacatcaccatcagcagcagcagagtgacccccagaagaggccccgtgaacatcatcttcgccgtgaagagcacccagggcttcctgaacggcagcgaggtgagcgagctgctgagaaacctgagcgtggtggagttcagcttctacctgggctaccccgtgctgcagatcgccgagcccttccagtacccccagctgaacctgagccagctgctgaagagcagctgggtgagaaccgtgctgctgggcgtgatggagaagcagctgcagaacgaggtgttccaggccgagatggagagaaagctggcccagctgctgagcgaggtgagcaccagaagaagaatgtggagaagagccaccgtggccgccggcaacagcgtggtgcaggtggtgaacgtgagcagactggagggcgacgacaaccccgtgcagctgatctacttcgtggaggaccaggacggcgagagactgagcgccgtgaagagcagcgacctgatcaacaagatggacctgcagagagccgccatcatcctgggctacagaatccagggcgtgatcgcccagcccgtggacagagtgaagagacccagccccgagagccagagcaacaacctgtgggtgatcgtgggcgtggtgatccccgtgctggtggtgatggtgatcgtggtgatcctgtactggaagctgtgcagaaccgacaagctggacttccagcccgacaccgtggccaacatccagcagagacagaagctgcagatccccagcgtgaagggcttcgacttcgccaagcagcacctgggccagcacaacaaggacgacatcctgatcatccacgagcccgcccccctgcccggccccctgaaggaccacaccacccccagcgagaacggcgacgtgcccagccccaagagcaagatccccagcaagaacgtgagacacagaggcagagtgagccccagcgacgccgacagcaccgtgagcgaggagagcagcgagagagacgccggcgacaagacccccggcgccgtgaacgacggcagaagccacagagccccccagagcggcccccccctgcccagcagcggcaacgagcagcacagcagcgccagcatcttcgagcacgtggacagaatcagcagaccccccgaggccagcagaagagtgcccagcaagatccagctgatcgccatgcagcccatccccgccccccccgtgcagagacccagccccgccgacagagtggccgagagcaacaagatcaacaaggagatccagaccgccctgagacacaagagcgagatcgagcaccacagaaacaagatcagactgagagccaagagaagaggccactacgagttccccgtggtggacgacctgagcagcggcgacaccaaggagagacacagagtgtacagaagagcccagatgcagatcgacaagatcctggaccccaccgccagcgtgcccagcgtgttcatcgagcccagaaagagcagcagaatcaagagaagccccaagcccagaagaaagcaccaggtgaacggctgccccgccgacgccgagaaggacagactgatcaccaccgacagcgacggcacctacagaagaccccccggcgtgcacaacagcgcctacatcggctgccccagcgaccccgacctgcccgccgacgtgcagacccccagcagcgtggagctgggcagataccccgccctgcccttccccgccagccagtacatccccccccagcccagcatcgaggaggccagacagaccatgcacagcctgctggacgacgccttcgccctggtggcccccagcagccagcccgccagcaccgccggcgtgggccccggcgtgccccccggcctgcccgccaacagcacccccagccaggaggagagaagagccacccagtggggcagcttctacagccccgcccagaccgccaacaacccctgcagcagatacgaggactacggcatgaccccccccaccggccccctgcccagacccggcttcggccccggcctgctgcagagcaccgagctggtgccccccgacccccagcagccccaggccagcgccgaggcccccttcgccgccagaggcatctacagcgaggagatgcccagcgtggccagacccagacccgtgggcggcaccaccggcagccagatccagcacctgacccaggtgggcatcgccagcagaatcggcgcccagcccgtggagatcccccccagcagaggcagccagtacggcggccccggctggcccagctacggcgaggacgaggccggcagaagagaggccgtgcccagaaccagcggcagagagcccagcgcccccagcggcaacctgccccacagaggcctgcagggccccggcctgggctaccccaccagcagcaccgaggacctgcagcccggccacagcagcgccagcctgatcaaggccatcagagaggagctgctgagactgagccagaagcagagcaccgtgcagaacttccacagctag

SEQ ID NO: 95060 - DNA, 252 bp, synthetic construct
  misc_feature 1..252: note = Description of Artificial Sequence: Synthetic coding sequence
  source 1..252: mol_type = other DNA
atgggcggcctgttcagcagatggagaaccaagcccagcaccgtggaggtgctggagagcatcgacaaggagatccaggccctggaggagttcagagagaagaaccagagactgcagaagctgtgggtgggcagactgatcctgtacagcagcgtgctgtacctgttcacctgcctgatcgtgtacctgtggtacctgcccgacgagttcaccgccagactggccatgaccctgcccttcttcgccttctag

SEQ ID NO: 95061 - DNA, 3090 bp, synthetic construct
  misc_feature 1..3090: note = Description of Artificial Sequence: Synthetic coding sequence
  source 1..3090: mol_type = other DNA
atgctgttcagagccagaggccccgtgagaggcagaggctggggcagacccgccgaggcccccagaagaggcagaagccccccctggagccccgcctggatctgctgctgggccctggccggctgccaggccgcctgggccggcgacctgcccagcagcagcagcagacccctgcccccctgccaggagaaggactaccacttcgagtacaccgagtgcgacagcagcggcagcagatggagagtggccatccccaacagcgccgtggactgcagcggcctgcccgaccccgtgagaggcaaggagtgcaccttcagctgcgccagcggcgagtacctggagatgaagaaccaggtgtgcagcaagtgcggcgagggcacctacagcctgggcagcggcatcaagttcgacgagtgggacgagctgcccgccggcttcagcaacatcgccaccttcatggacaccgtggtgggccccagcgacagcagacccgacggctgcaacaacagcagctggatccccagaggcaactacatcgagagcaacagagacgactgcaccgtgagcctgatctacgccgtgcacctgaagaagagcggctacgtgttcttcgagtaccagtacgtggacaacaacatcttcttcgagttcttcatccagaacgaccagtgccaggagatggacaccaccaccgacaagtgggtgaagctgaccgacaacggcgagtggggcagccacagcgtgatgctgaagagcggcaccaacatcctgtactggagaaccaccggcatcctgatgggcagcaaggccgtgaagcccgtgctggtgaagaacatcaccatcgagggcgtggcctacaccagcgagtgcttcccctgcaagcccggcaccttcagcaacaagcccggcagcttcaactgccaggtgtgccccagaaacacctacagcgagaagggcgccaaggagtgcatcagatgcaaggacgacagccagttcagcgaggagggcagcagcgagtgcaccgagagacccccctgcaccaccaaggactacttccagatccacaccccctgcgacgaggagggcaagacccagatcatgtacaagtggatcgagcccaagatctgcagagaggacctgaccgacgccatcagactgccccccagcggcgagaagaaggactgccccccctgcaaccccggcttctacaacaacggcagcagcagctgccacccctgcccccccggcaccttcagcgacggcaccaaggagtgcagaccctgccccgccggcaccgagcccgccctgggcttcgagtacaagtggtggaacgtgctgcccggcaacatgaagaccagctgcttcaacgtgggcaacagcaagtgcgacggcatgaacggctgggaggtggccggcgaccacatccagagcggcgccggcggcagcgacaacgactacctgatcctgaacctgcacatccccggcttcaagccccccaccagcatgaccggcgccaccggcagcgagctgggcagaatcaccttcgtgttcgagaccctgtgcagcgccgactgcgtgctgtacttcatggtggacatcaacagaaagagcaccaacgtggtggagagctggggcggcaccaaggagaagcaggcctacacccacatcatcttcaagaacgccaccttcaccttcacctgggccttccagagaaccaaccagggccaggacaacagaagattcatcaacgacatggtgaagatctacagcatcaccgccaccaacgccgtggacggcgtggccagcagctgcagagcctgcgccctgggcagcgagcagagcggcagcagctgcgtgccctgcccccccggccactacatcgagaaggagaccaaccagtgcaaggagtgcccccccgacacctacctgagcatccaccaggtgtacggcaaggaggcctgcatcccctgcggccccggcagcaagaacaaccaggaccacagcgtgtgctacagcgactgcttcttctaccacgagaaggagaaccagagcctgcactacgacttcagcaacctgagcagcgtgggcagcctgatgaacggccccagcttcaccagcaagggcaccaagtacttccacttcttcaacatcagcctgtgcggccacgagggcaagaagatggccctgtgcaccaacaacatcaccgacttcaccgtgaaggagatcgtggccggcagcgacgactacaccaacctggtgggcgccttcgtgtgccagagcaccatcatccccagcgagagcaagggcttcagagccgccctgagcagccagagcatcatcctggccgacaccttcatcggcgtgaccgtggagaccaccctgaagaacatcaacatcaaggaggacatgttccccgtgcccaccagccagatccccgacgtgcacttcttctacaagagcagcaccgccaccaccagctgcatcaacggcagaagcaccgccgtgaagatgagatgcaaccccaccaagagcggcgccggcgtgatcagcgtgcccagcaagtgccccgccggcacctgcgacggctgcaccttctacttcctgtgggagagcgccgaggcctgccccctgtgcaccgagcacgacttccacgagatcgagggcgcctgcaagagaggcttccaggagaccctgtacgtgtggaacgagcccaagtggtgcatcaagggcatcagcctgcccgagaagaagctggccacctgcgagaccgtggacttctggctgaaggtgggcgccggcgtgggcgccttcaccgccgtgctgctggtggccctgacctgctacttctggaagaagaaccagaagctggagtacaagtacagcaagctggtgatgaccaccaacagcaaggagtgcgagctgcccgccgccgacagctgcgccatcatggagggcgaggacaacgaggaggaggtggtgtacagcaacaagcagagcctgctgggcaagctgaagagcctggccaccaaggagaaggaggaccacttcgagagcgtgcagctgaagaccagcagaagccccaacatctag

SEQ ID NO: 95062 - DNA, 11043 bp, synthetic construct
  misc_feature 1..11043: note = Description of Artificial Sequence: Synthetic coding sequence
  source 1..11043: mol_type = other DNA
atggaccagagaaagaacgagagcatcgtgcccagcatcacccagctggaggacttcctgaccgagcacaacagcaacgtggtgtggctgctggtggccaccatcctgagctgcggctggatcatctacctgacctactacaacagcagaaacgtgggcctgatcctgaccctggtgctgaacagactgtacaagcacggctacatccacatcggcagcttcagcttcagcgtgctgagcggcaaggtgatggtgagagagatctactacatcaccgaggacatgagcatcagaatccaggacggcttcatcatcttcagatggtggaagatgtacaaccccaagcagaagcagcacgaccccaaggccgagaccagactgtacatcaccgtgaacgacttcgagttccacgtgtacaacagaagcgacctgtacggcagactgcaggagctgttcggcctggagcccaccatcatcccccccaagaaggacgacgacaagaccagagagatcggcagaaccagaacccagagcaagatcgagagagtgaaggtgaagaccgagagccaggaccccaccagcagctggagaagcctgatccccgtgatcaaggtgaacgtgagcaccggcagactggccttcggcaaccactaccagccccagaccctgtgcatcaacttcgacgacgccttcctgacctacaccaccaagccccccagcagccacctggaccagttcatgcacatcgtgaagggcaagctggagaacgtgagagtgatgctggtgcccagccccagatacgtgggcctgcagaacgacgagccccccagactgatgggcgagggcttcgtggtgatgcagagcaacgacgtggacatctactactacatggacgagcccggcctggtgcccgaggagaccgaggagaacatcgagggcgagatgagcagcgaggactgcaagctgcaggacctgcccccctgctggggcctggacatcgtgtgcggcaagggcaccgacttcaactacggcccctgggccgacagacagagagactgcctgtggaagttcttcttcccccccgactaccaggtgctgaaggtgagcgagatcgcccagcccggcagacccagacagatcctggccttcgagctgagaatgaacatcatcgccgacgccaccatcgacctgctgttcaccaagaacagagagaccaacgccgtgcacgtgaacgtgggcgccggcagctacctggagatcaacatccccatgaccgtggaggagaacggctacacccccgccatcaagggccagctgctgcacgtggacgccaccaccagcatgcagtacagaaccctgctggaggccgagatgctggccttccacatcaacgccagctaccccagaatctggaacatgccccagacctggcagtgcgagctggaggtgtacaaggccacctaccacttcatcttcgcccagaagaacttcttcaccgacctgatccaggactggagcagcgacagcccccccgacatcttcagcttcgtgccctacacctggaacttcaagatcatgttccaccagttcgagatgatctgggccgccaaccagcacaactggatcgactgcagcaccaagcagcaggagaacgtgtacctggccgcctgcggcgagaccctgaacatcgacttcagcctgcccttcaccgacttcgtgcccgccacctgcaacaccaagttcagcctgagaggcgaggacgtggacctgcacctgttcctgcccgactgccaccccagcaagtacagcctgttcatgctggtgaagaactgccaccccaacaagatgatccacgacaccggcatccccgccgagtgccagagcggccagaagaccgtgaagcccaagtggagaaacgtgacccaggagaagagcggctgggtggagtgctggaccgtgcccagcgtgatgctgaccatcgactacacctggcaccccatctacccccagaaggccgacgagcagctgaagcagagcctgagcgagatggaggagaccatgctgagcgtgctgagacccagccagaagaccagcgacagagtggtgagcagccccagcaccagcagcagaccccccatcgaccccagcgagctgccccccgacaagctgcacgtggagatggagctgagccccgacagccagatcaccctgtacggccccctgctgaacgccttcctgtgcatcaaggagaactacttcggcgaggacgacatgtacatggacttcgaggaggtgatcagcagccccgtgctgagcctgagcaccagcagcagcagcggctggaccgccgtgggcatggagaacgacaagaaggagaacgagggcagcgccaagagcatccaccccctggccctgagaccctgggacatcaccgtgctggtgaacctgtacaaggtgcacggcagactgcccgtgcacggcaccaccgacggccccgagtgccccaccgccttcctggagagactgtgcttcgagatgaagaagggcttcagagagaccatgctgcagctgatcctgagccccctgaacgtgttcgtgagcgacaactaccagcagagaccccccgtggacgaggtgctgagagagggccacatcaacctgagcggcctgcagctgagagcccacgccatgttcagcgccgagggcctgcccctgggcagcgacagcctggagtacgcctggctgatcgacgtgcaggccggcagcctgaccgccaaggtgaccgccccccagctggcctgcctgctggagtggggccagaccttcgtgttccacgtggtgtgcagagagtacgagctggagagacccaagagcgtgatcatctgccagcacggcatcgacagaagattctgcgagagcaagctgagctgcatccccggcccctgccccaccagcgacgacctgaagtacaccatgatcagactggccgtggacggcgccgacatctacatcgtggagcacggctgcgccaccaacatcaagatgggcgccatcagagtggccaactgcaacctgcacaaccagagcgtgggcgagggcatcagcgccgccatccaggacttccaggtgagacagtacatcgagcagctgaacaactgcagaatcggcctgcagcccgccgtgctgagaagagcctactggctggaggccggcagcgccaacctgggcctgatcaccgtggacatcgccctggccgccgaccaccacagcaagcacgaggcccagagacacttcctggagacccacgacgccagaaccaagagactgtggttcctgtggcccgacgacatcctgaagaacaagagatgcagaaacaagtgcggctgcctgggcggctgcagattcttcggcggcaccgtgaccggcctggacttcttcaagctggaggagctgacccccagcagcagcagcgccttcagcagcaccagcgccgagagcgacatgtactacggccagagcctgctgcagcccggcgagtggatcatcaccaaggagatccccaagatcatcgacggcaacgtgaacggcatgaagagaaaggagtgggagaacaagagcgtgggcatcgaggtggagagaaagacccagcacctgagcctgcaggtgcccctgagaagccacagcagcagcagcagcagcgaggagaacagcagcagcagcgccgcccagcccctgctggccggcgagaaggagagccccagcagcgtggccgacgaccacctggtgcagaaggagttcctgcacggcaccaagagagacgacggccaggccagcatccccaccgagatcagcggcaacagccccgtgagccccaacacccaggacaagagcgtgggccagagccccctgagaagccccctgaagagacaggccagcgtgtgcagcaccagactgggcagcaccaagagcctgaccgccgccttctacggcgacaagcagcccgtgaccgtgggcgtgcagttcagcagcgacgtgagcagaagcgacgagaacgtgctggacagccccaagcagagaagaagcttcggcagcttcccctacacccccagcgccgacagcaacagcttccaccagtacagaagcatggacagcagcatgagcatggccgacagcgaggcctacttcagcgccgccgaggagttcgagcccatcagcagcgacgagggccccggcacctaccccggcagaaagaagaagaagaagcagacccagcagatcgactacagcagaggcagcatctaccacagcgtggagggccccctgaccggccacggcgagagcatccaggacagcagaaccctgcccttcaagacccaccccagccaggccagcttcgtgagcgccctgggcggcgaggacgacgtgatcgagcacctgtacatcgtggagggcgagaagaccgtggagagcgagcagatcaccccccagcagcccgtgatgaactgctaccagacctacctgacccagttccaggtgatcaactggagcgtgaagcaccccaccaacaagagaaccagcaagagcagcctgcacagacccctggacctggacacccccaccagcgaggagagcagcagcagcttcgagcagctgagcgtgcccaccttcaaggtgatcaagcagggcctgaccgccaacagcctgctggacagaggcatgcagctgagcggcagcaccagcaacaccccctacacccccctggagaagaagctggccgacaacaccgacgacgagaccctgaccgaggagtggaccctggaccagcccgtgagccagaccagaaccaccgccatcgtggaggtgaagggcaccgtggacatcgtgctgacccccctggtggccgaggccctggacagatacatcgaggccatggtgcactgcgccagcaccagacaccccgccgccatcgtggacgacctgcacgccaaggtgctgagagaggccgtgcagaacagcaagaccaccttcagcgagaacctgagcagcaagcaggacatcagaggcaccaagaccgagcagagcaccatcggcaccaccaaccagggccaggcccagaccaacctgaccatgaagcaggacaacgtgaccatcaagggcctgcagaccaacgtgagcatccccaaggtgaacctgtgcctgctgcaggccagcgtggaggagagccccaccaccgcccccagcagaagcgtgacccacgtgagcctggtggccctgtgcttcgacagaatcgccacccaggtgagaatgaacagaggcgtggtggaggagaccagcaacaacgccgagcccggcagaaccagcaacttcgacagatacgtgcacgccaccaagatgcagccccagagcagcggcagcctgagaagcaacgccggcgccgagaagggcaaggagatcgccgccaagctgaacatccacagagtgcacggccagctgagaggcctggacaccaccgacatcggcacctgcgccatcaccgccatccccttcgagaagagcaaggtgctgttcaccctggaggagctggacgagttcaccttcgtggacgagaccgaccagcaggccgtgcccgacgtgaccagaatcggccccagccaggagaagtggggctggatcatgttcgagtgcggcctggagaacctgaccatcaagggcggcagacagagcggcgccgtgctgtacaacagcttcggcatcatgggcaaggccagcgacaccgagagaggcggcgtgctgaccagcaacaacagcagcgacagccccaccggcagcggctacaacaccgacgtgagcgacgacaacctgccctgcgacagaaccagccccagcagcgacctgaacggcaacagcgtgagcgacgagcaggacgagggcgtggagagcgacgacctgaagaaggacctgcccctgatgccccccccccccgacagctgcagcatgaagctgaccatcaaggagatctggttcagcttcgccgcccccaccaacgtgagaagccacacccacgccttcagcagacagctgaacctgctgagcaccgccacccccgccgtgggcgcctggctggtgcccatcgaccagctgaagagcagcctgaacaagctggagaccgagggcaccctgagaatctgcgccgtgatgggctgcatcatgaccgaggccctggagaacaagagcgtgcacttccccctgagaagcaagtacaacagactgaccaaggtggccagattcctgcaggagaaccccagctgcctgctgtgcaacatcctgcaccactacctgcaccaggccaactacagcatcatcgacgacgccaccatgagcgacggcctgcccgccctggtgaccctgaagaagggcctggtggccctggccagacagtggatgaagttcatcgtggtgacccccgccttcaagggcgtgagcctgcacagacccgcccagcccctgaagccccagatcgccatggaccacgagcacgaggacggcctgggcctggacaacggcggcggcctgcagagcgacaccagcgccgacggcgccgagttcgagttcgacgccgccaccgtgagcgagcacaccatgctgctggagggcaccgccaacagacccccccccggcagcagcggccccgtgaccggcgccgagatcatgagaaagctgagcaagacccacacccacagcgacagcgccctgaagatcaagggcatccacccctaccacagcctgagctacaccagcggcgacaccgccaccgacagccccgtgcacgtgggcagagccggcatgcccgtgaaggacagccccagaaaggagagcctgctgagctacctgaccggcagcttccccagcctgcacaacctgctggagggcaccccccagagaagcagcgccgccgtgaagagcagcagcctgaccagaaccggcaacaccgtggccaccgacatgctgagcgagcaccccctgctgagcgagcccagcagcgtgagcttctacaactggatgagcaacgccgtgggcaacagaggcagcgtgctgcaggagagccccgtgaccaagagcggccacaacagcctgcccaccggcgtggcccccaacctgcccaccatccccagcgccagcgacttcaacaccgtgctgagcagcgaccagaacaccctggacggcacccacagccagcacagcaccagccaggacgacgtggccggcgtggaggaggccaaccagggcttccccgccgtgcagctggccgacgcccaggtggtgttcaagcccctgctgagccacaccggcatccagagccaggacaccatgcccttctgctacagaatgtacttcggcgagcacctgagcttcagcggcaccctggactgcctgagagccgacatcgtggacagcgacaccgccaaggagagaaagggcaagagagccagaagacagggccacgtgaacctgccccccctggagttcaagcccgccctgatgctgggcaccttcagcatcagcgccgtggtgatggagaagagcgtgtgcaccccccagaacagcaccagcgccctgagcttccacgacctgagcaagagatactacaacaccttccactgcaacttcaccatcagctgccagagcatcagccagcacgtggacatggccctggtgagactgatccaccagttcagcaccatgatcgacgacatcaaggccacccagaccgacatcaagctgagcagatacaccgccggcagcgccagccccacccccaccttcaagaccagaaagcacagagacttcagaagcagcgacttcagcagaagcagcagaggcagcctgaacggcggcaacagagtgaacaacgccaagaacaagagaaccaacaacgagaacaacaagaaggagagcagaaacaagaacagcctgggcagaagcgagagaagaaccagcaaggtgagcagaaagggcagcaaggacgtggtggaccacatgaccatccacatggacgacagcgacagcatcaccgtgagcgagcagagcgagcccagcgccgagtgctggcagaacatgtacaagctgctgaacttctacagcctgatcagcgaccccaccggcatcctggagaagagcagcgagaccttcggccccgccggcgtgagaagccccaccgagcccacctgcaaggtggtgttcgagaacgagcaggacaacagcagcctgaccaagacccagagaaagagaagcctggtgaccagcgagccccagcacgtgaccctgatcgtgttcggcatcggcatggtgaacagaacccacctggaggccgacatcggcggcctgaccatggagagcgagctgaagagaatccacggcagcttcaccctgaaggagaagatgaaggacgtgctgcaccagaagatgaccgagacctgcgccaccgcccacatcggcggcgtgaacatcgtgctgctggagggcatcacccccaacatccagctggaggacttccccaccagccccaccagcaccgccaagcaggagttcctgaccgtggtgaagtgcagcatcgccaagagccaggccctgtacagcgcccagagaggcctgaagaccaacaacgccgccgtgttcaaggtgggcgccatcagcatcaacatcccccagcaccccgccaccctgcacagcatgatggtgagaagcagccaccagctgagcaagcagatcagcgacctgatcagacagcccagcaccgccccccagcccgtgaaggaggacatcgccacccccctgcccagcgagaagacccccaccagcgtgaaccagacccccgtggagaccaacgagttcccccagctgcccgagggcctggagaagaagcccatcgtgctgaagttcagcgccatgctggacggcatcgccatcggcgccgccctgctgcccagcctgaaggccgagtacaagatgggcagaatgagaagccacggcatgaccggcgcccagaccagattcaccttcgagctgcccaaccacagactgagattcaccagcaaggtgagcgccaccgacatgagcaccatcccccccagcgccagcctgaacctgccccccgtgaccatgagcggcaagtacatcatggaggagcacgacagctacagcgaccaggtgtggagcatcgacgagctgcccagcaagcagggctactacctgcagggcaactacctgagatgcgtggccgaggtgggcagcttcgagcacaacctgaccaccgacctgctgaaccacctggtgttcgtgcagaaggtgttcatgaaggaggtgaacgaggtgatccagaaggtgagcggcggcgagcagcccatccccctgtggaacgagcacgacggcaccgccgacggcgacaagcccaagatcctgctgtacagcctgaacctgcagttcaagggcatccaggtgaccgccaccacccccagcatgagagccgtgagattcgagaccggcctgatcgagctggagctgagcaacagactgcagaccaaggccagccccggcagcagcagctacctgaagctgttcggcaagtgccaggtggacctgaacctggccctgggccagatcgtgaagcaccaggtgtacgaggaggccggcagcgacttccaccaggtggcctacttcaagaccagaatcggcctgagaaacgccctgagagaggagatcagcggcagcagcgacagagaggccgtgctgatcaccctgaacagacccatcgtgtacgcccagcccgtggccttcgacagagccgtgctgttctggctgaactacaaggccgcctacgacaactggaacgagcagagaatggccctgcacaaggacatccacatggccaccaaggaggtggtggacatgctgcccggcatccagcagaccagcgcccaggccttcggcaccctgttcctgcagctgaccgtgaacgacctgggcatctgcctgcccatcaccaacaccgcccagagcaaccacaccggcgacctggacaccggcagcgccctggtgctgaccatcgagagcaccctgatcaccgcctgcagcagcgagagcctggtgagcaagggccacttcaagaacttctgcatcagattcgccgacggcttcgagaccagctgggacgactggaagcccgagatccacggcgacctggtgatgaacgcctgcgtggtgcccgacggcacctacgaggtgtgcagcagaaccaccggccaggccgccgccgagagcagcagcgccggcacctggaccctgaacgtgctgtggaagatgtgcggcatcgacgtgcacatggaccccaacatcggcaagagactgaacgccctgggcaacaccctgaccaccctgaccggcgaggaggacatcgacgacatcgccgacctgaacagcgtgaacatcgccgacctgagcgacgaggacgaggtggacaccatgagccccaccatccacaccgaggccaccgactacagaagacaggccgccagcgccagccagcccggcgagctgagaggcagaaagatcatgaagagaatcgtggacatcagagagctgaacgagcaggccaaggtgatcgacgacctgaagaagctgggcgccagcgagggcaccatcaaccaggagatccagagataccagcagctggagagcgtggccgtgaacgacatcagaagagacgtgagaaagaagctgagaagaagcagcatgagagccgccagcctgaaggacaagtggggcctgagctacaagcccagctacagcagaagcaagagcatcagcgccagcggcagaccccccctgaagagaatggagagagccagcagcagagtgggcgagaccgaggagctgcccgagatcagagtggacgccgccagccccggccccagagtgaccttcaacatccaggacaccatcgccgagatcagaagaaagaagatcagcttcaaggtggtgttctag

SEQ ID NO: 95063 - DNA, 2241 bp, synthetic construct
  misc_feature 1..2241: note = Description of Artificial Sequence: Synthetic coding sequence
  source 1..2241: mol_type = other DNA
atgccctgcctgggcctgctggccaacctgtgcagacacaacctgagcgtgcagacccacatcaagaccctgagcaacgtgaagagcttctacagaaccctgatcaccctgctggcccacagcagcctgaccgtggtggtgttcgccctgagcatcctgagcagcctgaccctgaacgaggaggtgggcgagaagctgttccacgccagaaacatccaccagaccttccagctgatcttcaacatcctgatcaacggcgacggcaccctgaccagaaagtacagcgtggacctgctgatggacctgctgaagaaccccaagatcgccgactacctgaccagatacgagcacttcagcagctgcctgcaccaggtgctgggcctgctgaacggcaaggaccccgacagcagcagcaaggtgctggagctgctgctggccttctgcagcgtgacccagctgagacacatgctgacccagatgatgttcgagcagagcccccccggcagcgccaccctgggcagccacaccaagtgcctggagcccaccgtggccctgctgagatggctgagccagcccctggacggcagcgagaactgcagcgtgctggccctggagctgttcaaggagatcttcgaggacgtgatcgacgccgccaactgcagcagcgccgacagattcgtgaccctgctgctgcccaccatcctggaccagctgcagttcaccgagcagaacctggacgaggccctgaccagaaagaagtgcgagagaatcgccaaggccatcgaggtgctgctgaccctgtgcggcgacgacaccctgaagatgcacatcgccaagatcctgaccaccgtgaagtgcaccaccctgatcgagcagcagttcacctacggcaagatcgacctgggcttcggcaccaaggtggccgacagcgagctgtgcaagctggccgccgacgtgatcctgaagaccctggacctgatcaacaagctgaagcccctggtgcccggcatggaggtgagcttctacaagatcctgcaggaccccagactgatcacccccctggccttcgccctgaccagcgacaacagagagcaggtgcagagcggcctgagaatcctgctggaggccgcccccctgcccgacttccccgccctggtgctgggcgagagcatcgccgccaacaacgcctacagacagcaggagaccgagcacatccccagaaagatgccctggcagagcagcaaccacagcttccccaccagcatcaagtgcctgaccccccacctgaaggacggcgtgcccggcctgaacatcgaggagctgatcgagaagctgcagagcggcatggtggtgaaggaccagatctgcgacgtgagaatcagcgacatcatggacgtgtacgagatgaagctgagcaccctggccagcaaggagagcagactgcaggacctgctggagaccaaggccctggccctggcccaggccgacagactgatcgcccagcacagatgccagagaacccaggccgagaccgaggccagaaccctggccagcatgctgagagaggtggagagaaagaacgaggagctgagcgtgctgctgaaggcccagcaggtggagagcgagagagcccagagcgacatcgagcacctgttccagcacaacagaaagctggagagcgtggccgaggagcacgagatcctgaccaagagctacatggagctgctgcagagaaacgagagcaccgagaagaagaacaaggacctgcagatcacctgcgacagcctgaacaagcagatcgagaccgtgaagaagctgaacgagagcctgaaggagcagaacgagaagagcatcgcccagctgatcgagaaggaggagcagagaaaggaggtgcagaaccagctggtggacagagagcacaagctggccaacctgcaccagaagaccaaggtgcaggaggagaagatcaagaccctgcagaaggagagagaggacaaggaggagaccatcgacatcctgagaaaggagctgagcagaaccgagcagatcagaaaggagctgagcatcaaggccagcagcctggaggtgcagaaggcccagctggagggcagactggaggagaaggagagcctggtgaagctgcagcaggaggagctgaacaagcacagccacatgatcgccatgatccacagcctgagcggcggcaagatcaaccccgagaccgtgaacctgagcatctag

SEQ ID NO: 95064 - DNA, 840 bp, synthetic construct
  misc_feature 1..840: note = Description of Artificial Sequence: Synthetic coding sequence
  source 1..840: mol_type = other DNA
atgaccctgcccttcttcgccttccccctgatcatctggagcatcagaaccgtgatcatcttcttcttcagcaagagaaccgagagaaacaacgaggccctggacgacctgaagagccagagaaagaagatcctggaggaggtgatggagaaggagacctacaagaccgccaagctgatcctggagagattcgaccccgacagcaagaaggccaaggagtgcgagccccccagcgccggcgccgccgtgaccgccagacccggccaggagatcagacagagaaccgccgcccagagaaacctgagccccacccccgccagccccaaccagggcccccccccccaggtgcccgtgagccccggcccccccaaggacagcagcgcccccggcggcccccccgagagaaccgtgacccccgccctgagcagcaacgtgctgcccagacacctgggcagccccgccaccagcgtgcccggcatgggcctgcacccccccggcccccccctggccagacccatcctgcccagagagagaggcgccctggacagaatcgtggagtacctggtgggcgacggcccccagaacagatacgccctgatctgccagcagtgcttcagccacaacggcatggccctgaaggaggagttcgagtacatcgccttcagatgcgcctactgcttcttcctgaaccccgccagaaagaccagaccccaggcccccagactgcccgagttcagcttcgagaagagacaggtggtggagggcagcagcagcgtgggccccctgcccagcggcagcgtgctgagcagcgacaaccagttcaacgaggtgcagtactag

SEQ ID NO: 95065 - DNA, 3192 bp, synthetic construct
  misc_feature 1..3192: note = Description of Artificial Sequence: Synthetic coding sequence
  source 1..3192: mol_type = other DNA
atgaccagactgggctggcccagcccctgctgcgccagaaagcagtgcagcgagggcagaacctacagcaacgccgtgatcagccccaacctggagaccaccagaatcatgagagtgagccacaccttccccgtggtggactgcaccgccgcctgctgcgacctgagcagctgcgacctggcctggtggttcgagggcagatgctacctggtgagctgcccccacaaggagaactgcgagcccaagaagatgggccccatcagaagctacctgaccttcgtgctgagacccgtgcagagacccgcccagctgctggactacggcgacatgatgctgaacagaggcagccccagcggcatctggggcgacagccccgaggacatcagaaaggacctgaccttcctgggcaaggactggggcctggaggagatgagcgagtacagcgacgactacagagagctggagaaggacctgctgcagcccagcggcaagcaggagcccagaggcagcgccgagtacaccgactggggcctgctgcccggcagcgagggcgccttcaacagcagcgtgggcgacagccccgccgtgcccgccgagacccagcaggaccccgagctgcactacctgaacgagagcgccagcacccccgcccccaagctgcccgagagaagcgtgctgctgcccctgcccaccacccccagcagcggcgaggtgctggagaaggagaaggccagccagctgcaggagcagagcagcaacagcagcggcaaggaggtgctgatgcccagccacagcctgccccccgccagcctggagctgagcagcgtgaccgtggagaagagccccgtgctgaccgtgacccccggcagcaccgagcacagcatccccaccccccccaccagcgccgcccccagcgagagcacccccagcgagctgcccatcagccccaccaccgcccccagaaccgtgaaggagctgaccgtgagcgccggcgacaacctgatcatcaccctgcccgacaacgaggtggagctgaaggccttcgtggcccccgccccccccgtggagaccacctacaactacgagtggaacctgatcagccaccccaccgactaccagggcgagatcaagcagggccacaagcagaccctgaacctgagccagctgagcgtgggcctgtacgtgttcaaggtgaccgtgagcagcgagaacgccttcggcgagggcttcgtgaacgtgaccgtgaagcccgccagaagagtgaacctgccccccgtggccgtggtgagcccccagctgcaggagctgaccctgcccctgaccagcgccctgatcgacggcagccagagcaccgacgacaccgagatcgtgagctaccactgggaggagatcaacggccccttcatcgaggagaagaccagcgtggacagccccgtgctgagactgagcaacctggaccccggcaactacagcttcagactgaccgtgaccgacagcgacggcgccaccaacagcaccaccgccgccctgatcgtgaacaacgccgtggactacccccccgtggccaacgccggccccaaccacaccatcaccctgccccagaacagcatcaccctgaacggcaaccagagcagcgacgaccaccagatcgtgctgtacgagtggagcctgggccccggcagcgagggcaagcacgtggtgatgcagggcgtgcagaccccctacctgcacctgagcgccatgcaggagggcgactacaccttccagctgaaggtgaccgacagcagcagacagcagagcaccgccgtggtgaccgtgatcgtgcagcccgagaacaacagaccccccgtggccgtggccggccccgacaaggagctgatcttccccgtggagagcgccaccctggacggcagcagcagcagcgacgaccacggcatcgtgttctaccactgggagcacgtgagaggccccagcgccgtggagatggagaacatcgacaaggccatcgccaccgtgaccggcctgcaggtgggcacctaccacttcagactgaccgtgaaggaccagcagggcctgagcagcaccagcaccctgaccgtggccgtgaagaaggagaacaacagcccccccagagccagagccggcggcagacacgtgctggtgctgcccaacaacagcatcaccctggacggcagcagaagcaccgacgaccagagaatcgtgagctacctgtggatcagagacggccagagccccgccgccggcgacgtgatcgacggcagcgaccacagcgtggccctgcagctgaccaacctggtggagggcgtgtacaccttccacctgagagtgaccgacagccagggcgccagcgacaccgacaccgccaccgtggaggtgcagcccgaccccagaaagagcggcctggtggagctgaccctgcaggtgggcgtgggccagctgaccgagcagagaaaggacaccctggtgagacagctggccgtgctgctgaacgtgctggacagcgacatcaaggtgcagaagatcagagcccacagcgacctgagcaccgtgatcgtgttctacgtgcagagcagaccccccttcaaggtgctgaaggccgccgaggtggccagaaacctgcacatgagactgagcaaggagaaggccgacttcctgctgttcaaggtgctgagagtggacaccgccggctgcctgctgaagtgcagcggccacggccactgcgaccccctgaccaagagatgcatctgcagccacctgtggatggagaacctgatccagagatacatctgggacggcgagagcaactgcgagtggagcatcttctacgtgaccgtgctggccttcaccctgatcgtgctgaccggcggcttcacctggctgtgcatctgctgctgcaagagacagaagagaaccaagatcagaaagaagaccaagtacaccatcctggacaacatggacgagcaggagagaatggagctgagacccaagtacggcatcaagcacagaagcaccgagcacaacagcagcctgatggtgagcgagagcgagttcgacagcgaccaggacaccatcttcagcagagagaagatggagagaggcaaccccaaggtgagcatgaacggcagcatcagaaacggcgccagcttcagctactgcagcaaggacagatag

SEQ ID NO: 95066 - DNA, 1293 bp, synthetic construct
  misc_feature 1..1293: note = Description of Artificial Sequence: Synthetic coding sequence
  source 1..1293: mol_type = other DNA
atgggcagaagctggcccggcctgagcctgtgccagtggagactgctgcccgccctggaggccggctgggccgtggccgccgagaccggcggcggcggcagacccggcagagccgcccccgccagctgcagctgcgagttcctgtggaccatcgacgacatctaccactgcgcccagttcctgcagatcaaggacggctggatcatcttcagcatggaggccagactggccatgaccctgcccttcttcgccttccccctgatcatctggagcatcagaaccgtgatcatcttcttcttcagcaagagaaccgagagaaacaacgaggccctggacgacctgaagagccagagaaagaagatcctggaggaggtgatggagaaggagacctacaagaccgccaagctgatcctggagagattcgaccccgacagcaagaaggccaaggagtgcgagccccccagcgccggcgccgccgtgaccgccagacccggccaggagatcagacagagaaccgccgcccagagaaacctgagccccacccccgccagccccaaccagggcccccccccccaggtgcccgtgagccccggcccccccaaggacagcagcgcccccggcggcccccccgagagaaccgtgacccccgccctgagcagcaacgtgctgcccagacacctgggcagccccgccaccagcgtgcccggcatgggcctgcacccccccggcccccccctggccagacccatcctgcccagagagagaggcgccctggacagaatcgtggagtacctggtgggcgacggcccccagaacagatacgccctgatctgccagcagtgcttcagccacaacggcatggccctgaaggaggagttcgagtacatcgccttcagatgcgcctactgcttcttcctgaaccccgccagaaagaccagaccccaggcccccagactgcccgagttcagcttcgagaagagacaggtggtggagggcagcagcagcgtgggccccctgcccagcggcagcgtgctgagcagcgacaaccagttcaacgaggagagcctggagcacgacgtgctggacgacaacaccgagcagaccgacgacaagatccccgccaccgagcagaccaaccaggtgatcgagaaggccagcgacagcgaggagcccgaggagaagcaggagaccgagaacgaggaggccagcgtgatcgagaccaacagcaccgtgcccggcgccgacagcatccccgaccccgagctgagcggcgagagcctgaccgccgagtag

SEQ ID NO: 95067 - DNA, 3036 bp, synthetic construct
  misc_feature 1..3036: note = Description of Artificial Sequence: Synthetic coding sequence
  source 1..3036: mol_type = other DNA
atggccccccccaccggcgtgctgagcagcctgctgctgctggtgaccatcgccggctgcgccagaaagcagtgcagcgagggcagaacctacagcaacgccgtgatcagccccaacctggagaccaccagaatcatgagagtgagccacaccttccccgtggtggactgcaccgccgcctgctgcgacctgagcagctgcgacctggcctggtggttcgagggcagatgctacctggtgagctgcccccacaaggagaactgcgagcccaagaagatgggccccatcagaagctacctgaccttcgtgctgagacccgtgcagagacccgcccagctgctggactacggcgacatgatgctgaacagaggcagccccagcggcatctggggcgacagccccgaggacatcagaaaggacctgaccttcctgggcaaggactggggcctggaggagatgagcgagtacagcgacgactacagagagctggagaaggacctgctgcagcccagcggcaagcaggagcccagaggcagcgccgagtacaccgactggggcctgctgcccggcagcgagggcgccttcaacagcagcgtgggcgacagccccgccgtgcccgccgagacccagcaggaccccgagctgcactacctgaacgagagcgccagcacccccgcccccaagctgcccgagagaagcgtgctgctgcccctgcccaccacccccagcagcggcgaggtgctggagaaggagaaggccagccagctgcaggagcagagcagcaacagcagcggcaaggaggtgctgatgcccagccacagcctgccccccgccagcctggagctgagcagcgtgaccgtggagaagagccccgtgctgaccgtgacccccggcagcaccgagcacagcatccccaccccccccaccagcgccgcccccagcgagagcacccccagcgagctgcccatcagccccaccaccgcccccagaaccgtgaaggagctgaccgtgagcgccggcgacaacctgatcatcaccctgcccgacaacgaggtggagctgaaggccttcgtggcccccgccccccccgtggagaccacctacaactacgagtggaacctgatcagccaccccaccgactaccagggcgagatcaagcagggccacaagcagaccctgaacctgagccagctgagcgtgggcctgtacgtgttcaaggtgaccgtgagcagcgagaacgccttcggcgagggcttcgtgaacgtgaccgtgaagcccgccagaagagtgaacctgccccccgtggccgtggtgagcccccagctgcaggagctgaccctgcccctgaccagcgccctgatcgacggcagccagagcaccgacgacaccgagatcgtgagctaccactgggaggagatcaacggccccttcatcgaggagaagaccagcgtggacagccccgtgctgagactgagcaacctggaccccggcaactacagcttcagactgaccgtgaccgacagcgacggcgccaccaacagcaccaccgccgccctgatcgtgaacaacgccgtggactacccccccgtggccaacgccggccccaaccacaccatcaccctgccccagaacagcatcaccctgaacggcaaccagagcagcgacgaccaccagatcgtgctgtacgagtggagcctgggccccggcagcgagggcaagcacgtggtgatgcagggcgtgcagaccccctacctgcacctgagcgccatgcaggagggcgactacaccttccagctgaaggtgaccgacagcagcagacagcagagcaccgccgtggtgaccgtgatcgtgcagcccgagaacaacagaccccccgtggccgtggccggccccgacaaggagctgatcttccccgtggagagcgccaccctggacggcagcagcagcagcgacgaccacggcatcgtgttctaccactgggagcacgtgagaggccccagcgccgtggagatggagaacatcgacaaggccatcgccaccgtgaccggcctgcaggtgggcacctaccacttcagactgaccgtgaaggaccagcagggcctgagcagcaccagcaccctgaccgtggccgtgaagaaggagaacaacagcccccccagagccagagccggcggcagacacgtgctggtgctgcccaacaacagcatcaccctggacggcagcagaagcaccgacgaccagagaatcgtgagctacctgtggatcagagacggccagagccccgccgccggcgacgtgatcgacggcagcgaccacagcgtggccctgcagctgaccaacctggtggagggcgtgtacaccttccacctgagagtgaccgacagccagggcgccagcgacaccgacaccgccaccgtggaggtgcagcccgaccccagaaagagcggcctggtggagctgaccctgcaggtgggcgtgggccagctgaccgagcagagaaaggacaccctggtgagacagctggccgtgctgctgaacgtgctggacagcgacatcaaggtgcagaagatcagagcccacagcgacctgagcaccgtgatcgtgttctacgtgcagagcagaccccccttcaaggtgctgaaggccgccgaggtggccagaaacctgcacatgagactgagcaaggagaaggccgacttcctgctgttcaaggtgctgagagtggacaccgccggctgcctgctgaagtgcagcggccacggccactgcgaccccctgaccaagagatgcatctgcagccacctgtggatggagaacctgatccagagatacatctgggacggcgagagcaactgcggcatcaagcacagaagcaccgagcacaacagcagcctgatggtgagcgagagcgagttcgacagcgaccaggacaccatcttcagcagagagaagatggagagaggcaaccccaaggtgagcatgaacggcagcatcagaaacggcgccagcttcagctactgcagcaaggacagatag

SEQ ID NO: 95068 - DNA, 1206 bp, synthetic construct
  misc_feature 1..1206: note = Description of Artificial Sequence: Synthetic coding sequence
  source 1..1206: mol_type = other DNA
atggagacccccgaggtgcccgtgggcagcctgatcgacttcggccccgaggcccccaccagcagccccctggaggcccccccccccgtgctgcaggacggcgacggcagcctgggcgacggcgccagcgagagcgagaccaccgagagcgccgacagcgagaacgacatgggcgagagccccagccaccccagctgggaccaggacagaagaagcagcagcaacgagagcttcagcagcaaccagagcaccgagagcacccaggacgaggagaccctggccctgagagacttcatgagaggctacgtggagaagatcttcagcggcggcgaggacctggaccaggaggagaaggccaagttcggcgagtactgcagcagcgagaacggcaagggcagagagtggttcgccagatacgtgagcgcccagagatgcaacagcaagtgcgtgagcgaggccaccttctacagactggtgcagagcttcgccgtggtgctgttcgagtgccaccagatggacgacttcggccccgccaagaacctgatgaccatgtgcttcacctactaccacatcggcaagccccagctgctgccccccgagagcagagagaagcccgccggcagcatcgacagctacctgaagagcgccaacagctggctggccgagaagaaggacatcgccgagagactgctgaagaacaccagcgccagaaccgagaacgtgaagggcttcttcggcggcctggagaccaagctgaagggccccctggccagaagaaacgaggaggacgagaacaagccccaggagaagagacccagagccgtgaccgcctacagccccgaggacgagaagaagggcgagaagatctacctgtacacccacctgaagcagcagcccatctggcacaccctgagattctggaacgccgccttcttcgacgccgtgcactgcgagagaaccaagagaagccccaccaccagagagaagtggtgccacatgacccaggaggagagagacgacagcctgagattcaacgagaacatcaccttcggccagctgggcaccttcacccacaacatgctggccttcggcctgaacaagaagctgtgcaacgacttcctgaagaagcaggccgtgatcggcaacctggacgaggagcagtacaagctgctgagcgaccacatcgagcagatggccaccgagtag

SEQ ID NO: 95069 - DNA, 3219 bp, synthetic construct; identical to SEQ ID NO: 95043
  misc_feature 1..3219: note = Description of Artificial Sequence: Synthetic coding sequence
  source 1..3219: mol_type = other DNA

SEQ ID NO: 95070 - DNA, 1380 bp, synthetic construct
  misc_feature 1..1380: note = Description of Artificial Sequence: Synthetic coding sequence
  source 1..1380: mol_type = other DNA
atgggcggcctgttcagcagatggagaaccaagcccagcaccgtggaggtgctggagagcatcgacaaggagatccaggccctggaggagttcagagagaagaaccagagactgcagaagctgtgggtgggcagactgatcctgtacagcagcgtgctgtacctgttcacctgcctgatcgtgtacctgtggtacctgcccgacgagttcaccgccagactggccatgaccctgcccttcttcgccttccccctgatcatctggagcatcagaaccgtgatcatcttcttcttcagcaagagaaccgagagaaacaacgaggccctggacgacctgaagagccagagaaagaagatcctggaggaggtgatggagaaggagacctacaagaccgccaagctgatcctggagagattcgaccccgacagcaagaaggccaaggagtgcgagccccccagcgccggcgccgccgtgaccgccagacccggccaggagatcagacagagaaccgccgcccagagaaacctgagccccacccccgccagccccaaccagggcccccccccccaggtgcccgtgagccccggcccccccaaggacagcagcgcccccggcggcccccccgagagaaccgtgacccccgccctgagcagcaacgtgctgcccagacacctgggcagccccgccaccagcgtgcccggcatggagatgggcctgccccacatcgcccaggccggcctggagcacctgagcagcagcgacctgagcaccagcaccagccagagcgccggcatcaccggcctgcacccccccggcccccccctggccagacccatcctgcccagagagagaggcgccctggacagaatcgtggagtacctggtgggcgacggcccccagaacagatacgccctgatctgccagcagtgcttcagccacaacggcatggccctgaaggaggagttcgagtacatcgccttcagatgcgcctactgcttcttcctgaaccccgccagaaagaccagaccccaggcccccagactgcccgagttcagcttcgagaagagacaggtggtggagggcagcagcagcgtgggccccctgcccagcggcagcgtgctgagcagcgacaaccagttcaacgaggagagcctggagcacgacgtgctggacgacaacaccgagcagaccgacgacaagatccccgccaccgagcagaccaaccaggtgatcgagaaggccagcgacagcgaggagcccgaggagaagcaggagaccgagaacgaggaggccagcgtgatcgagaccaacagcaccgtgcccggcgccgacagcatccccgaccccgagctgagcggcgagagcctgaccgccgagtag

SEQ ID NO: 95071 - DNA, 240 bp, synthetic construct
  misc_feature 1..240: note = Description of Artificial Sequence: Synthetic coding sequence
  source 1..240: mol_type = other DNA
atgcaccccgacctgagcccccacctgcacaccgaggagtgcaacgtgctgatcaacctgctgaaggagtgccacaagaaccacaacatcctgaagttcttcggctactgcaacgacgtggacagagagctgagaaagtgcctgaagaacgagtacgtggagaacagaaccaagagcagagagcacggcatcgccatgagaaagaagctgttcaacccccccgaggagagcgagaagtag

SEQ ID NO: 95072 - DNA, 1569 bp, synthetic construct
  misc_feature 1..1569: note = Description of Artificial Sequence: Synthetic coding sequence
  source 1..1569: mol_type = other DNA
atgagcagacagctgctgcccgtgctgctgctgctgctgctgagagccagctgcccctggggccaggagcagggcgccagaagccccagcgaggagccccccgaggaggagatccccaaggaggacggcatcctggtgctgagcagacacaccctgggcctggccctgagagagcaccccgccctgctggtggagttctacgccccctggtgcggccactgccaggccctggcccccgagtacagcaaggccgccgccgtgctggccgccgagagcatggtggtgaccctggccaaggtggacggccccgcccagagagagctggccgaggagttcggcgtgaccgagtaccccaccctgaagttcttcagaaacggcaacagaacccaccccgaggagtacaccggccccagagacgccgagggcatcgccgagtggctgagaagaagagtgggccccagcgccatgagactggaggacgaggccgccgcccaggccctgatcggcggcagagacctggtggtgatcggcttcttccaggacgaggacgtggccaccttcctggccctggcccaggacgccctggacatgaccttcggcctgaccgacagacccagactgttccagcagttcggcctgaccaaggacaccgtggtgctgttcaagaagttcgacgagggcagagccgacttccccgtggacgaggagctgggcctggacctgggcgacctgagcagattcctggtgacccacagcatgagactggtgaccgagttcaacagccagaccagcgccaagatcttcgccgccagaatcctgaaccacctgctgctgttcgtgaaccagaccctggccgcccacagagagctgctggccggcttcggcgaggccgcccccagattcagaggccaggtgctgttcgtggtggtggacgtggccgccgacaacgagcacgtgctgcagtacttcggcctgaaggccgaggccgcccccaccctgagactggtgaacctggagaccaccaagaagtacgcccccgtggacggcggccccgtgaccgccgccagcatcaccgccttctgccacgccgtgctgaacggccaggtgaagccctacctgctgagccaggagatcccccccgactgggaccagagacccgtgaagaccctggtgggcaagaacttcgagcaggtggccttcgacgagaccaagaacgtgttcgtgaagttctacgccccctggtgcacccactgcaaggagatggcccccgcctgggaggccctggccgagaagtaccaggaccacgaggacatcatcatcgccgagctggacgccaccgccaacgagctggacgccttcgccgtgcacggcttccccaccctgaagtacttccccgccggccccggcagaaaggtgatcgagtacaagagcaccagagacctggagaccttcagcaagttcctggacaacggcggcgtgctgcccaccgaggagccccccgaggagcccgccgcccccttccccgagccccccgccaacagcaccatgggcagcaaggaggagctgtag

SEQ ID NO: 95073 - DNA, 1485 bp, synthetic construct
  misc_feature 1..1485: note = Description of Artificial Sequence: Synthetic coding sequence
  source 1..1485: mol_type = other DNA
atgggcagcggcaccggcagcgaggagcccctgggcggcgccagcagaggcggcaacccccagggcggctgggacctgggcgccgagcccccccaccccggccccggccccgccggcgccccctgccccgccggcggcatcctgtgccccgtggtgtgggccctgcccggccccggccccagagtgcagcagggcagctgcagagccagaggcagagtgaacggcggccacgccgaggagttcggcgtgaccgagtaccccaccctgaagttcttcagaaacggcaacagaacccaccccgaggagtacaccggccccagagacgccgagggcatcgccgagtggctgagaagaagagtgggccccagcgccatgagactggaggacgaggccgccgcccaggccctgatcggcggcagagacctggtggtgatcggcttcttccaggacctgcaggacgaggacgtggccaccttcctggccctggcccaggacgccctggacatgaccttcggcctgaccgacagacccagactgttccagcagttcggcctgaccaaggacaccgtggtgctgttcaagaagttcgacgagggcagagccgacttccccgtggacgaggagctgggcctggacctgggcgacctgagcagattcctggtgacccacagcatgagactggtgaccgagttcaacagccagaccagcgccaagatcttcgccgccagaatcctgaaccacctgctgctgttcgtgaaccagaccctggccgcccacagagagctgctggccggcttcggcgaggccgcccccagattcagaggccaggtgctgttcgtggtggtggacgtggccgccgacaacgagcacgtgctgcagtacttcggcctgaaggccgaggccgcccccaccctgagactggtgaacctggagaccaccaagaagtacgcccccgtggacggcggccccgtgaccgccgccagcatcaccgccttctgccacgccgtgctgaacggccaggtgaagccctacctgctgagccaggagatcccccccgactgggaccagagacccgtgaagaccctggtgggcaagaacttcgagcaggtggccttcgacgagaccaagaacgtgttcgtgaagttctacgccccctggtgcacccactgcaaggagatggcccccgcctgggaggccctggccgagaagtaccaggaccacgaggacatcatcatcgccgagctggacgccaccgccaacgagctggacgccttcgccgtgcacggcttccccaccctgaagtacttccccgccggccccggcagaaaggtgatcgagtacaagagcaccagagacctggagaccttcagcaagttcctggacaacggcggcgtgctgcccaccgaggagccccccgaggagcccgccgcccccttccccgagccccccgccaacagcaccatgggcagcaaggaggagctgtag

SEQ ID NO: 95074 - DNA, 1323 bp, synthetic construct
  misc_feature 1..1323: note = Description of Artificial Sequence: Synthetic coding sequence
  source 1..1323: mol_type = other DNA
atggccctgctggtgctgggcctggtgagctgcaccttcttcctggccgtgaacggcctgtacagcagcagcgacgacgtgatcgagctgacccccagcaacttcaacagagaggtgatccagagcgacagcctgtggctggtggagttctacgccccctggtgcggccactgccagagactgacccccgagtggaagaaggccgccaccgccctgaaggacgtggtgaaggtgggcgccgtggacgccgacaagcaccacagcctgggcggccagtacggcgtgcagggcttccccaccatcaagatcttcggcagcaacaagaacagacccgaggactaccagggcggcagaaccggcgaggccatcgtggacgccgccctgagcgccctgagacagctggtgaaggacagactgggcggcagaagcggcggctacagcagcggcaagcagggcagaagcgacagcagcagcaagaaggacgtgatcgagctgaccgacgacagcttcgacaagaacgtgctggacagcgaggacgtgtggatggtggagttctacgccccctggtgcggccactgcaagaacctggagcccgagtgggccgccgccgccagcgaggtgaaggagcagaccaagggcaaggtgaagctggccgccgtggacgccaccgtgaaccaggtgctggccagcagatacggcatcagaggcttccccaccatcaagatcttccagaagggcgagagccccgtggactacgacggcggcagaaccagaagcgacatcgtgagcagagccctggacctgttcagcgacaacgcccccccccccgagctgctggagatcatcaacgaggacatcgccaagagaacctgcgaggagcaccagctgtgcgtggtggccgtgctgccccacatcctggacaccggcgccgccggcagaaacagctacctggaggtgctgctgaagctggccgacaagtacaagaagaagatgtggggctggctgtggaccgaggccggcgcccagagcgagctggagaccgccctgggcatcggcggcttcggctaccccgccatggccgccatcaacgccagaaagatgaagttcgccctgctgaagggcagcttcagcgagcagggcatcaacgagttcctgagagagctgagcttcggcagaggcagcaccgcccccgtgggcggcggcgccttccccaccatcgtggagagagagccctgggacggcagagacggcgagctgcccgtggaggacgacatcgacctgagcgacgtggagctggacgacctgggcaaggacgagctgtag

SEQ ID NO: 95075 - DNA, 1338 bp, synthetic construct
  misc_feature 1..1338: note = Description of Artificial Sequence: Synthetic coding sequence
  source 1..1338: mol_type = other DNA
atgtaccccagcaccaccatggccaacgcccccggcctggtgagctgcaccttcttcctggccgtgaacggcctgtacagcagcagcgacgacgtgatcgagctgacccccagcaacttcaacagagaggtgatccagagcgacagcctgtggctggtggagttctacgccccctggtgcggccactgccagagactgacccccgagtggaagaaggccgccaccgccctgaaggacgtggtgaaggtgggcgccgtggacgccgacaagcaccacagcctgggcggccagtacggcgtgcagggcttccccaccatcaagatcttcggcagcaacaagaacagacccgaggactaccagggcggcagaaccggcgaggccatcgtggacgccgccctgagcgccctgagacagctggtgaaggacagactgggcggcagaagcggcggctacagcagcggcaagcagggcagaagcgacagcagcagcaagaaggacgtgatcgagctgaccgacgacagcttcgacaagaacgtgctggacagcgaggacgtgtggatggtggagttctacgccccctggtgcggccactgcaagaacctggagcccgagtgggccgccgccgccagcgaggtgaaggagcagaccaagggcaaggtgaagctggccgccgtggacgccaccgtgaaccaggtgctggccagcagatacggcatcagaggcttccccaccatcaagatcttccagaagggcgagagccccgtggactacgacggcggcagaaccagaagcgacatcgtgagcagagccctggacctgttcagcgacaacgcccccccccccgagctgctggagatcatcaacgaggacatcgccaagagaacctgcgaggagcaccagctgtgcgtggtggccgtgctgccccacatcctggacaccggcgccgccggcagaaacagctacctggaggtgctgctgaagctggccgacaagtacaagaagaagatgtggggctggctgtggaccgaggccggcgcccagagcgagctggagaccgccctgggcatcggcggcttcggctaccccgccatggccgccatcaacgccagaaagatgaagttcgccctgctgaagggcagcttcagcgagcagggcatcaacgagttcctgagagagctgagcttcggcagaggcagcaccgcccccgtgggcggcggcgccttccccaccatcgtggagagagagccctgggacggcagagacggcgagctgcccgtggaggacgacatcgacctgagcgacgtggagctggacgacctgggcaaggacgagctgtag

SEQ ID NO: 95076 - DNA, 36 bp, synthetic construct
  misc_feature 1..36: note = Description of Artificial Sequence: Synthetic coding sequence
  source 1..36: mol_type = other DNA
atgtaccccagcaccaccatggccaacgccccctag

SEQ ID NO: 95077 - DNA, 1314 bp, synthetic construct
  misc_feature 1..1314: note = Description of Artificial Sequence: Synthetic coding sequence
  source 1..1314: mol_type = other DNA
atgatcctgggcctggtgagctgcaccttcttcctggccgtgaacggcctgtacagcagcagcgacgacgtgatcgagctgacccccagcaacttcaacagagaggtgatccagagcgacagcctgtggctggtggagttctacgccccctggtgcggccactgccagagactgacccccgagtggaagaaggccgccaccgccctgaaggacgtggtgaaggtgggcgccgtggacgccgacaagcaccacagcctgggcggccagtacggcgtgcagggcttccccaccatcaagatcttcggcagcaacaagaacagacccgaggactaccagggcggcagaaccggcgaggccatcgtggacgccgccctgagcgccctgagacagctggtgaaggacagactgggcggcagaagcggcggctacagcagcggcaagcagggcagaagcgacagcagcagcaagaaggacgtgatcgagctgaccgacgacagcttcgacaagaacgtgctggacagcgaggacgtgtggatggtggagttctacgccccctggtgcggccactgcaagaacctggagcccgagtgggccgccgccgccagcgaggtgaaggagcagaccaagggcaaggtgaagctggccgccgtggacgccaccgtgaaccaggtgctggccagcagatacggcatcagaggcttccccaccatcaagatcttccagaagggcgagagccccgtggactacgacggcggcagaaccagaagcgacatcgtgagcagagccctggacctgttcagcgacaacgcccccccccccgagctgctggagatcatcaacgaggacatcgccaagagaacctgcgaggagcaccagctgtgcgtggtggccgtgctgccccacatcctggacaccggcgccgccggcagaaacagctacctggaggtgctgctgaagctggccgacaagtacaagaagaagatgtggggctggctgtggaccgaggccggcgcccagagcgagctggagaccgccctgggcatcggcggcttcggctaccccgccatggccgccatcaacgccagaaagatgaagttcgccctgctgaagggcagcttcagcgagcagggcatcaacgagttcctgagagagctgagcttcggcagaggcagcaccgcccccgtgggcggcggcgccttccccaccatcgtggagagagagccctgggacggcagagacggcgagctgcccgtggaggacgacatcgacctgagcgacgtggagctggacgacctgggcaaggacgagctgtag

SEQ ID NO: 95078 - DNA, 1956 bp, synthetic construct
  misc_feature 1..1956: note = Description of Artificial Sequence: Synthetic coding sequence
  source 1..1956: mol_type = other DNA
atggccgacagcgccgagctgaagcagatggtgatgagcctgagagtgagcgagctgcaggtgctgctgggctacgccggcagaaacaagcacggcagaaagcacgagctgctgaccaaggccctgcacctgctgaaggccggctgcagccccgccgtgcagatgaagatcaaggagctgtacagaagaagattcccccagaagatcatgacccccgccgacctgagcatccccaacgtgcacagcagccccatgcccgccaccctgagccccagcaccatcccccagctgacctacgacggccaccccgccagcagccccctgctgcccgtgagcctgctgggccccaagcacgagctggagctgccccacctgaccagcgccctgcaccccgtgcaccccgacatcaagctgcagaagctgcccttctacgacctgctggacgagctgatcaagcccaccagcctggccagcgacaacagccagagattcagagagacctgcttcgccttcgccctgaccccccagcaggtgcagcagatcagcagcagcatggacatcagcggcaccaagtgcgacttcaccgtgcaggtgcagctgagattctgcctgagcgagaccagctgcccccaggaggaccacttcccccccaacctgtgcgtgaaggtgaacaccaagccctgcagcctgcccggctacctgccccccaccaagaacggcgtggagcccaagagacccagcagacccatcaacatcaccagcctggtgagactgagcaccaccgtgcccaacaccatcgtggtgagctggaccgccgagatcggcagaaactacagcatggccgtgtacctggtgaagcagctgagcagcaccgtgctgctgcagagactgagagccaagggcatcagaaaccccgaccacagcagagccctgatcaaggagaagctgaccgccgaccccgacagcgagatcgccaccaccagcctgagagtgagcctgctgtgccccctgggcaagatgagactgaccatcccctgcagagccctgacctgcagccacctgcagtgcttcgacgccaccctgtacatccagatgaacgagaagaagcccacctgggtgtgccccgtgtgcgacaagaaggccccctacgagcacctgatcatcgacggcctgttcatggagatcctgaagtactgcaccgactgcgacgagatccagttcaaggaggacggcacctgggcccccatgagaagcaagaaggaggtgcaggaggtgagcgccagctacaacggcgtggacggctgcctgagcagcaccctggagcaccaggtggccagccaccaccagagcagcaacaagaacaagaaggtggaggtgatcgacctgaccatcgacagcagcagcgacgaggaggaggaggagcccagcgccaagagaacctgccccagcctgagccccaccagccccctgaacaacaagggcatcctgagcctgccccaccaggccagccccgtgagcagaacccccagcctgcccgccgtggacaccagctacatcaacaccagcctgatccaggactacagacaccccttccacatgacccccatgccctacgacctgcagggcctggacttcttccccttcctgagcggcgacaaccagcactacaacaccagcctgctggccgccgccgccgccgccgtgagcgacgaccaggacctgctgcacagcagcagattcttcccctacaccagcagccagatgttcctggaccagctgagcgccggcggcagcaccagcctgcccaccaccaacggcagcagcagcggcagcaacagcagcctggtgagcagcaacagcctgagagagagccacagccacaccgtgaccaacagaagcagcaccgacaccgccagcatcttcggcatcatccccgacatcatcagcctggactag

SEQ ID NO: 95079 - DNA, 1962 bp, synthetic construct
  misc_feature 1..1962: note = Description of Artificial Sequence: Synthetic coding sequence
  source 1..1962: mol_type = other DNA
atgttcaccctgcaggacagctacgtgaagcagatggtgatgagcctgagagtgagcgagctgcaggtgctgctgggctacgccggcagaaacaagcacggcagaaagcacgagctgctgaccaaggccctgcacctgctgaaggccggctgcagccccgccgtgcagatgaagatcaaggagctgtacagaagaagattcccccagaagatcatgacccccgccgacctgagcatccccaacgtgcacagcagccccatgcccgccaccctgagccccagcaccatcccccagctgacctacgacggccaccccgccagcagccccctgctgcccgtgagcctgctgggccccaagcacgagctggagctgccccacctgaccagcgccctgcaccccgtgcaccccgacatcaagctgcagaagctgcccttctacgacctgctggacgagctgatcaagcccaccagcctggccagcgacaacagccagagattcagagagacctgcttcgccttcgccctgaccccccagcaggtgcagcagatcagcagcagcatggacatcagcggcaccaagtgcgacttcaccgtgcaggtgcagctgagattctgcctgagcgagaccagctgcccccaggaggaccacttcccccccaacctgtgcgtgaaggtgaacaccaagccctgcagcctgcccggctacctgccccccaccaagaacggcgtggagcccaagagacccagcagacccatcaacatcaccagcctggtgagactgagcaccaccgtgcccaacaccatcgtggtgagctggaccgccgagatcggcagaaactacagcatggccgtgtacctggtgaagcagctgagcagcaccgtgctgctgcagagactgagagccaagggcatcagaaaccccgaccacagcagagccctgatcaaggagaagctgaccgccgaccccgacagcgagatcgccaccaccagcctgagagtgagcctgctgtgccccctgggcaagatgagactgaccatcccctgcagagccctgacctgcagccacctgcagtgcttcgacgccaccctgtacatccagatgaacgagaagaagcccacctgggtgtgccccgtgtgcgacaagaaggccccctacgagcacctgatcatcgacggcctgttcatggagatcctgaagtactgcaccgactgcgacgagatccagttcaaggaggacggcacctgggcccccatgagaagcaagaaggaggtgcaggaggtgagcgccagctacaacggcgtggacggctgcctgagcagcaccctggagcaccaggtggccagccaccaccagagcagcaacaagaacaagaaggtggaggtgatcgacctgaccatcgacagcagcagcgacgaggaggaggaggagcccagcgccaagagaacctgccccagcctgagccccaccagccccctgaacaacaagggcatcctgagcctgccccaccaggccagccccgtgagcagaacccccagcctgcccgccgtggacaccagctacatcaacaccagcctgatccaggactacagacaccccttccacatgacccccatgccctacgacctgcagggcctggacttcttccccttcctgagcggcgacaaccagcactacaacaccagcctgctggccgccgccgccgccgccgtgagcgacgaccaggacctgctgcacagcagcagattcttcccctacaccagcagccagatgttcctggaccagctgagcgccggcggcagcaccagcctgcccaccaccaacggcagcagcagcggcagcaacagcagcctggtgagcagcaacagcctgagagagagccacagccacaccgtgaccaacagaagcagcaccgacaccgccagcatcttcggcatcatccccgacatcatcagcctggactag

SEQ ID NO: 95080 - DNA, 1782 bp, synthetic construct
  misc_feature 1..1782: note = Description of Artificial Sequence: Synthetic coding sequence
  source 1..1782: mol_type = other DNA
atggccgagctgggcgagctgaagcacatggtgatgagcttcagagtgagcgagctgcaggtgctgctgggcttcgccggcagaaacaagagcggcagaaagcacgagctgctggccaaggccctgcacctgctgaagagcagctgcgcccccagcgtgcagatgaagatcaaggagctgtacagaagaagattccccagaaagaccctgggccccagcgacctgagcctgctgagcctgccccccggcaccagcccccccgtgcaccccgacgtgaccatgaagcccctgcccttctacgaggtgtacggcgagctgatcagacccaccaccctggccagcaccagcagccagagattcgaggaggcccacttcaccttcgccctgaccccccagcaggtgcagcagatcctgaccagcagagaggtgctgcccggcgccaagtgcgactacaccatccaggtgcagctgagattctgcctgtgcgagaccagctgcccccaggaggactacttcccccccaacctgttcgtgaaggtgaacggcaagctgtgccccctgcccggctacctgccccccaccaagaacggcgccgagcccaagagacccagcagacccatcaacatcacccccctggccagactgagcgccaccgtgcccaacaccatcgtggtgaactggagcagcgagttcggcagaaactacagcctgagcgtgtacctggtgagacagctgaccgccggcaccctgctgcagaagctgagagccaagggcatcagaaaccccgaccacagcagagccctgatcaaggagaagctgaccgccgaccccgacagcgaggtggccaccaccagcctgagagtgagcctgatgtgccccctgggcaagatgagactgaccgtgccctgcagagccctgacctgcgcccacctgcagagcttcgacgccgccctgtacctgcagatgaacgagaagaagcccacctggacctgccccgtgtgcgacaagaaggccccctacgagagcctgatcatcgacggcctgttcatggagatcctgagcagctgcagcgactgcgacgagatccagttcatggaggacggcagctggtgccccatgaagcccaagaaggaggccagcgaggtgtgccccccccccggctacggcctggacggcctgcagtacagccccgtgcagggcggcgaccccagcgagaacaagaagaaggtggaggtgatcgacctgaccatcgagagcagcagcgacgaggaggacctgccccccaccaagaagcactgcagcgtgaccagcgccgccatccccgccctgcccggcagcaagggcgtgctgaccagcggccaccagcccagcagcgtgctgagaagccccgccatgggcaccctgggcggcgacttcctgagcagcctgcccctgcacgagtacccccccgccttccccctgggcgccgacatccagggcctggacctgttcagcttcctgcagaccgagagccagcactacggccccagcgtgatcaccagcctggacgagcaggacgccctgggccacttcttccagtacagaggcacccccagccacttcctgggccccctggcccccaccctgggcagcagccactgcagcgccacccccgcccccccccccggcagagtgagcagcatcgtggcccccggcggcgccctgagagagggccacggcggccccctgcccagcggccccagcctgaccggctgcagaagcgacatcatcagcctggactag

SEQ ID NO: 95081 - DNA, 873 bp, synthetic construct
  misc_feature 1..873: note = Description of Artificial Sequence: Synthetic coding sequence
  source 1..873: mol_type = other DNA
atggtgatgagcttcagagtgagcgagctgcaggtgctgctgggcttcgccggcagaaacaagagcggcagaaagcacgagctgctggccaaggccctgcacctgctgaagagcagctgcgcccccagcgtgcagatgaagatcaaggagctgtacagaagaagattccccagaaagaccctgggccccagcgacctgagcctgctgagcctgccccccggcaccagccccgtgggcagccccggccccctggcccccatcccccccaccctgctggcccccggcaccctgctgggccccaagagagaggtggacatgcacccccccctgccccagcccgtgcaccccgacgtgaccatgaagcccctgcccttctacgaggtgtacggcgagctgatcagacccaccaccctggccagcaccagcagccagagattcgaggaggcccacttcaccttcgccctgaccccccagcaggtgcagcagatcctgaccagcagagaggtgctgcccggcgccaagtgcgactacaccatccaggtgcagctgagattctgcctgtgcgagaccagctgcccccaggaggactacttcccccccaacctgttcgtgaaggtgaacggcaagctgtgccccctgcccggctacctgccccccaccaagaacggcgccgagcccaagagacccagcagacccatcaacatcacccccctggccagactgagcgccaccgtgcccaacaccatcgtggtgaactggagcagcgagttcggcagagtgagcaccgccaaggccggcgcctggaagagcctgctgagagtgaagggcaaccaccccgtgagctgggtgggcgaggccttcagcagcctgtag

SEQ ID NO: 95082 - DNA, 1887 bp, synthetic construct
  misc_feature 1..1887: note = Description of Artificial Sequence: Synthetic coding sequence
  source 1..1887: mol_type = other DNA
atggccgagctgggcgagctgaagcacatggtgatgagcttcagagtgagcgagctgcaggtgctgctgggcttcgccggcagaaacaagagcggcagaaagcacgagctgctggccaaggccctgcacctgctgaagagcagctgcgcccccagcgtgcagatgaagatcaaggagctgtacagaagaagattccccagaaagaccctgggccccagcgacctgagcctgctgagcctgccccccggcaccagccccgtgggcagccccggccccctggcccccatcccccccaccctgctggcccccggcaccctgctgggccccaagagagaggtggacatgcacccccccctgccccagcccgtgcaccccgacgtgaccatgaagcccctgcccttctacgaggtgtacggcgagctgatcagacccaccaccctggccagcaccagcagccagagattcgaggaggcccacttcaccttcgccctgaccccccagcaggtgcagcagatcctgaccagcagagaggtgctgcccggcgccaagtgcgactacaccatccaggtgcagctgagattctgcctgtgcgagaccagctgcccccaggaggactacttcccccccaacctgttcgtgaaggtgaacggcaagctgtgccccctgcccggctacctgccccccaccaagaacggcgccgagcccaagagacccagcagacccatcaacatcacccccctggccagactgagcgccaccgtgcccaacaccatcgtggtgaactggagcagcgagttcggcagaaactacagcctgagcgtgtacctggtgagacagctgaccgccggcaccctgctgcagaagctgagagccaagggcatcagaaaccccgaccacagcagagccctgatcaaggagaagctgaccgccgaccccgacagcgaggtggccaccaccagcctgagagtgagcctgatgtgccccctgggcaagatgagactgaccgtgccctgcagagccctgacctgcgcccacctgcagagcttcgacgccgccctgtacctgcagatgaacgagaagaagcccacctggacctgccccgtgtgcgacaagaaggccccctacgagagcctgatcatcgacggcctgttcatggagatcctgagcagctgcagcgactgcgacgagatccagttcatggaggacggcagctggtgccccatgaagcccaagaaggaggccagcgaggtgtgccccccccccggctacggcctggacggcctgcagtacagccccgtgcagggcggcgaccccagcgagaacaagaagaaggtggaggtgatcgacctgaccatcgagagcagcagcgacgaggaggacctgccccccaccaagaagcactgcagcgtgaccagcgccgccatccccgccctgcccggcagcaagggcgtgctgaccagcggccaccagcccagcagcgtgctgagaagccccgccatgggcaccctgggcggcgacttcctgagcagcctgcccctgcacgagtacccccccgccttccccctgggcgccgacatccagggcctggacctgttcagcttcctgcagaccgagagccagcactacggccccagcgtgatcaccagcctggacgagcaggacgccctgggccacttcttccagtacagaggcacccccagccacttcctgggccccctggcccccaccctgggcagcagccactgcagcgccacccccgcccccccccccggcagagtgagcagcatcgtggcccccggcggcgccctgagagagggccacggcggccccctgcccagcggccccagcctgaccggctgcagaagcgacatcatcagcctggactag

SEQ ID NO: 95083 - DNA, 780 bp, synthetic construct
  misc_feature 1..780: note = Description of Artificial Sequence: Synthetic coding sequence
  source 1..780: mol_type = other DNA
atggtgatgagcttcagagtgagcgagctgcaggtgctgctgggcttcgccggcagaaacaagagcggcagaaagcacgagctgctggccaaggccctgcacctgctgaagagcagctgcgcccccagcgtgcagatgaagatcaaggagctgtacagaagaagattccccagaaagaccctgggccccagcgacctgagcctgctgagcctgccccccggcaccagccccgtgggcagccccggccccctggcccccatcccccccaccctgctggcccccggcaccctgctgggccccaagagagaggtggacatgcacccccccctgccccagcccgtgcaccccgacgtgaccatgaagcccctgcccttctacgaggtgtacggcgagctgatcagacccaccaccctggccagcaccagcagccagagattcgaggaggcccacttcaccttcgccctgaccccccagcaggtgcagcagatcctgaccagcagagaggtgctgcccggcgccaagtgcgactacaccatccaggtgcagctgagattctgcctgtgcgagaccagctgcccccaggaggactacttcccccccaacctgttcgtgaaggtgaacggcaagctgtgccccctgcccggctacctgccccccaccaagaacggcgccgagcccaagagacccagcagacccatcaacatcacccccctggccagactgagcgccaccgtgcccaacaccatcgtggtgaactggagcagcgagttcggcagatag

SEQ ID NO: 95084 - DNA, 1248 bp, synthetic construct
  misc_feature 1..1248: note = Description of Artificial Sequence: Synthetic coding sequence
  source 1..1248: mol_type = other DNA
atgttcgccgacctggactacgacatcgaggaggacaagctgggcatccccaccgtgcccggcaaggtgaccctgcagaaggacgcccagaacctgatcggcatcagcatcggcggcggcgcccagtactgcccctgcctgtacatcgtgcaggtgttcgacaacacccccgccgccctggacggcaccgtggccgccggcgacgagatcaccggcgtgaacggcagaagcatcaagggcaagaccaaggtggaggtggccaagatgatccaggaggtgaagggcgaggtgaccatccactacaacaagctgcaggccgaccccaagcagggcatgagcctggacatcgtgctgaagaaggtgaagcacagactggtggagaacatgagcagcggcaccgccgacgccctgggcctgagcagagccatcctgtgcaacgacggcctggtgaagagactggaggagctggagagaaccgccgagctgtacaagggcatgaccgagcacaccaagaacctgctgagagccttctacgagctgagccagacccacagagccttcggcgacgtgttcagcgtgatcggcgtgagagagccccagcccgccgccagcgaggccttcgtgaagttcgccgacgcccacagaagcatcgagaagttcggcatcagactgctgaagaccatcaagcccatgctgaccgacctgaacacctacctgaacaaggccatccccgacaccagactgaccatcaagaagtacctggacgtgaagttcgagtacctgagctactgcctgaaggtgaaggagatggacgacgaggagtacagctgcatcgccctgggcgagcccctgtacagagtgagcaccggcaactacgagtacagactgatcctgagatgcagacaggaggccagagccagattcagccagatgagaaaggacgtgctggagaagatggagctgctggaccagaagcacgtgcaggacatcgtgttccagctgcagagactggtgagcaccatgagcaagtactacaacgactgctacgccgtgctgagagacgccgacgtgttccccatcgaggtggacctggcccacaccaccctggcctacggcctgaaccaggaggagttcaccgacggcgaggaggaggaggaggaggaggacaccgccgccggcgagcccagcagagacaccagaggcgccgccggccccctggacaagggcggcagctggtgcgacagctag

SEQ ID NO: 95085 - DNA, 1248 bp, synthetic construct; identical to SEQ ID NO: 95084
  misc_feature 1..1248: note = Description of Artificial Sequence: Synthetic coding sequence
  source 1..1248: mol_type = other DNA

SEQ ID NO: 95086 - DNA, 690 bp, synthetic construct
  misc_feature 1..690: note = Description of Artificial Sequence: Synthetic coding sequence
  source 1..690: mol_type = other DNA
atgttcgccgacctggactacgacatcgaggaggacaagctgggcatccccaccgtgcccggcaaggtgaccctgcagaaggacgcccagaacctgatcggcatcagcatcggcggcggcgcccagtactgcccctgcctgtacatcgtgcaggtgttcgacaacacccccgccgccctggacggcaccgtggccgccggcgacgagatcaccggcgtgaacggcagaagcatcaagggcaagaccaaggtggaggtggccaagatgatccaggaggtgaagggcgaggtgaccatccactacaacaagctgcaggccgaccccaagcagggcatgagcctggacatcgtgctgaagaaggtgaagcacagactggtggagaacatgagcagcggcaccgccgacgccctgggcctgagcagagccatcctgtgcaacgacggcctggtgaagagactggaggagctggagagaaccgccgagctgtacaagggcatgaccgagcacaccaagaacctgctgagagccttctacgagctgagccagacccacagagccttcggcgacgtgttcagcgtgatcggcgtgagagagccccagcccgccgccagcgaggccttcgtgaagttcgccgacgcccacagaagcatcgagaagttcggcatcagactgctgaagaccatcaagtag

SEQ ID NO: 95087 - DNA, 405 bp, synthetic construct
  misc_feature 1..405: note = Description of Artificial Sequence: Synthetic coding sequence
  source 1..405: mol_type = other DNA
atgttcgccgacctggactacgacatcgaggaggacaagctgggcatccccaccgtgcccggcaaggtgaccctgcagaaggacgcccagaacctgatcggcatcagcatcggcggcggcgcccagtactgcccctgcctgtacatcgtgcaggtgttcgacaacacccccgccgccctggacggcaccgtggccgccggcgacgagatcaccggcgtgaacggcagaagcatcaagggcaagaccaaggtggaggtggccaagatgatccaggaggtgaagggcgaggtgaccatccactacaacaagctgcaggccgaccccaagcagggcatgagcctggacatcgtgctgaagaaggtgaagcacagactggtggagaacatgagcagcggcaccgcctag

SEQ ID NO: 95088 - DNA, 393 bp, synthetic construct
  misc_feature 1..393: note = Description of Artificial Sequence: Synthetic coding sequence
  source 1..393: mol_type = other DNA
atgttcgccgacctggactacgacatcgaggaggacaagctgggcatccccaccgtgcccggcaaggtgaccctgcagaaggacgcccagaacctgatcggcatcagcatcggcggcggcgcccagtactgcccctgcctgtacatcgtgcaggtgttcgacaacacccccgccgccctggacggcaccgtggccgccggcgacgagatcaccggcgtgaacggcagaagcatcaagggcaagaccaaggtggaggtggccaagatgatccaggaggtgaagggcgaggtgaccatccactacaacaagctgcaggccgaccccaagcagggcatgagcctggacatcggccagagactgggcttccacggccccggcccccacagcagctag

SEQ ID NO: 95089 - DNA, 117 bp, synthetic construct
  misc_feature 1..117: note = Description of Artificial Sequence: Synthetic coding sequence
  source 1..117: mol_type = other DNA
atgttcgccgacctggactacgacatcgaggaggacaagctgggcatccccaccgtgcccggcaaggtgaccctgcagaaggacgcccagaacctgatcggcatcagcatcggctag

SEQ ID NO: 95090 - DNA, 231 bp, synthetic construct
  misc_feature 1..231: note = Description of Artificial Sequence: Synthetic coding sequence
  source 1..231: mol_type = other DNA
atgaccgacgtggagaccacctacgccgacttcatcgccagcggcagaaccggcagaagaaacgccatccacgacatcctggtgagcagcgccagcggcaacagcaacgagctggccctgaagctggccggcctggacatcaacaagaccgagggcgaggaggacgcccagagaagcagcaccgagcagagcggcgaggcccagggcgaggccgccaagagcgagagctag

SEQ ID NO: 95091 - DNA, 231 bp, synthetic construct; identical to SEQ ID NO: 95090
  misc_feature 1..231: note = Description of Artificial Sequence: Synthetic coding sequence
  source 1..231: mol_type = other DNA

SEQ ID NO: 95092 - DNA, 231 bp, synthetic construct; identical to SEQ ID NO: 95090
  misc_feature 1..231: note = Description of Artificial Sequence: Synthetic coding sequence
  source 1..231: mol_type = other DNA

SEQ ID NO: 95093 - DNA, 258 bp, synthetic construct
  misc_feature 1..258: note = Description of Artificial Sequence: Synthetic coding sequence
  source 1..258: mol_type = other DNA
atgagccaccaggacgtggccatgagaaccgacagcagcaagatgaccgacgtggagagcggcgtggccaacttcgccagcagcgccagagccggcagaagaaacgccctgcccgacatccagagcagcgccgccaccgacggcaccagcgacctgcccctgaagctggaggccctgagcgtgaaggaggacgccaaggagaaggacgagaagaccacccaggaccagctggagaagccccagaacgaggagaagtag

SEQ ID NO: 95094 - DNA, 237 bp, synthetic construct
  misc_feature 1..237: note = Description of Artificial Sequence: Synthetic coding sequence
  source 1..237: mol_type = other DNA
atgagaaccgacagcagcaagatgaccgacgtggagagcggcgtggccaacttcgccagcagcgccagagccggcagaagaaacgccctgcccgacatccagagcagcgccgccaccgacggcaccagcgacctgcccctgaagctggaggccctgagcgtgaaggaggacgccaaggagaaggacgagaagaccacccaggaccagctggagaagccccagaacgaggagaagtag

SEQ ID NO: 95095 - DNA, 264 bp, synthetic construct
  misc_feature 1..264: note = Description of Artificial Sequence: Synthetic coding sequence
  source 1..264: mol_type = other DNA
atgcacatcctgttcgtggacgtggccatgagaaccgacagcagcaagatgaccgacgtggagagcggcgtggccaacttcgccagcagcgccagagccggcagaagaaacgccctgcccgacatccagagcagcgccgccaccgacggcaccagcgacctgcccctgaagctggaggccctgagcgtgaaggaggacgccaaggagaaggacgagaagaccacccaggaccagctggagaagccccagaacgaggagaagtag

SEQ ID NO: 95096 - DNA, 237 bp, synthetic construct; identical to SEQ ID NO: 95094
  misc_feature 1..237: note = Description of Artificial Sequence: Synthetic coding sequence
  source 1..237: mol_type = other DNA

SEQ ID NO: 95097 - DNA, 237 bp, synthetic construct; identical to SEQ ID NO: 95094
  misc_feature 1..237: note = Description of Artificial Sequence: Synthetic coding sequence
  source 1..237: mol_type = other DNA

SEQ ID NO: 95098 - DNA, 237 bp, synthetic construct; identical to SEQ ID NO: 95094
  misc_feature 1..237: note = Description of Artificial Sequence: Synthetic coding sequence
  source 1..237: mol_type = other DNA

SEQ ID NO: 95099 - DNA, 237 bp, synthetic construct; identical to SEQ ID NO: 95094
  misc_feature 1..237: note = Description of Artificial Sequence: Synthetic coding sequence
  source 1..237: mol_type = other DNA

SEQ ID NO: 95100 - DNA, 231 bp, synthetic construct
  misc_feature 1..231: note = Description of Artificial Sequence: Synthetic coding sequence
  source 1..231: mol_type = other DNA
atgatggaggtggagagcagctacagcgacttcatcagctgcgacagaaccggcagaagaaacgccgtgcccgacatccagggcgacagcgaggccgtgagcgtgagaaagctggccggcgacatgggcgagctggccctggagggcgccgagggccaggtggagggcagcgcccccgacaaggaggccggcaaccagccccagagcagcgacggcaccaccagcagctag

SEQ ID NO: 95101 - DNA, 195 bp, synthetic construct
  misc_feature 1..195: note = Description of Artificial Sequence: Synthetic coding sequence
  source 1..195: mol_type = other DNA
atgatggaggtggagagcagctacagcgacttcatcagctgcgacagaaccggcagaagaaacgccgtgcccgacatccagggcgacagcgaggccgtgagcgtgagaaagctggccggcgacatgggcgagctggccctggagggcgccgagatggacctgaccatgctgccctggctggtgagcaacagctag

SEQ ID NO: 95102 - DNA, 231 bp, synthetic construct; identical to SEQ ID NO: 95100
  misc_feature 1..231: note = Description of Artificial Sequence: Synthetic coding sequence
  source 1..231: mol_type = other DNA

SEQ ID NO: 95103 - DNA, 231 bp, synthetic construct; identical to SEQ ID NO: 95100
  misc_feature 1..231: note = Description of Artificial Sequence: Synthetic coding sequence
  source 1..231: mol_type = other DNA

SEQ ID NO: 95104 - DNA, 231 bp, synthetic construct; identical to SEQ ID NO: 95100
  misc_feature 1..231: note = Description of Artificial Sequence: Synthetic coding sequence
  source 1..231: mol_type = other DNA

SEQ ID NO: 95105 - DNA, 231 bp, synthetic construct; identical to SEQ ID NO: 95100
  misc_feature 1..231: note = Description of Artificial Sequence: Synthetic coding sequence
  source 1..231: mol_type = other DNA

SEQ ID NO: 95106 - DNA, 231 bp, synthetic construct; identical to SEQ ID NO: 95100
  misc_feature 1..231: note = Description of Artificial Sequence: Synthetic coding sequence
  source 1..231: mol_type = other DNA

SEQ ID NO: 95107 - DNA, 1578 bp, synthetic construct
  misc_feature 1..1578: note = Description of Artificial Sequence: Synthetic coding sequence
  source 1..1578: mol_type = other DNA
atgcccctgctggacggcgacctggagggcagcggcaagcacagcagcagaaaggtggacagccccttcggccccggcagccccagcaagggcttcttcagcagaggcccccagcccagacccagcagccccatgagcgcccccgtgagacccaagaccagccccggcagccccaagaccgtgttccccttcagctaccaggagagcccccccagaagccccagaagaatgagcttcagcggcatcttcagaagcagcagcaaggagagcagccccaacagcaaccccgccaccagccccggcggcatcagattcttcagcagaagcagaaagaccagcggcctgagcagcagccccagcacccccacccaggtgaccaagcagcacaccttccccctggagagctacaagcacgagcccgagagactggagaacagaatctacgccagcagcagcccccccgacaccggccagagattctgccccagcagcttccagagccccaccagaccccccctggccagccccacccactacgcccccagcaaggccgccgccctggccgccgccctgggccccgccgaggccggcatgctggagaagctggagttcgaggacgaggccgtggaggacagcgagagcggcgtgtacatgagattcatgagaagccacaagtgctacgacatcgtgcccaccagcagcaagctggtggtgttcgacaccaccctgcaggtgaagaaggccttcttcgccctggtggccaacggcgtgagagccgcccccctgtgggagagcaagaagcagagcttcgtgggcatgctgaccatcaccgacttcatcaacatcctgcacagatactacaagagccccatggtgcagatctacgagctggaggagcacaagatcgagacctggagagagctgtacctgcaggagaccttcaagcccctggtgaacatcagccccgacgccagcctgttcgacgccgtgtacagcctgatcaagaacaagatccacagactgcccgtgatcgaccccatcagcggcaacgccctgtacatcctgacccacaagagaatcctgaagttcctgcagctgttcatgagcgacatgcccaagcccgccttcatgaagcagaacctggacgagctgggcatcggcacctaccacaacatcgccttcatccaccccgacacccccatcatcaaggccctgaacatcttcgtggagagaagaatcagcgccctgcccgtggtggacgagagcggcaaggtggtggacatctacagcaagttcgacgtgatcaacctggccgccgagaagacctacaacaacctggacatcaccgtgacccaggccctgcagcacagaagccagtacttcgagggcgtggtgaagtgcaacaagctggagatcctggagaccatcgtggacagaatcgtgagagccgaggtgcacagactggtggtggtgaacgaggccgacagcatcgtgggcatcatcagcctgagcgacatcctgcaggccctgatcctgacccccgccggcgccaagcagaaggagaccgagaccgagtag

SEQ ID NO: 95108 - DNA, 987 bp, synthetic construct
  misc_feature 1..987: note = Description of Artificial Sequence: Synthetic coding sequence
  source 1..987: mol_type = other DNA
atgctggagaagctggagttcgaggacgaggccgtggaggacagcgagagcggcgtgtacatgagattcatgagaagccacaagtgctacgacatcgtgcccaccagcagcaagctggtggtgttcgacaccaccctgcaggtgaagaaggccttcttcgccctggtggccaacggcgtgagagccgcccccctgtgggagagcaagaagcagagcttcgtgggcatgctgaccatcaccgacttcatcaacatcctgcacagatactacaagagccccatggtgcagatctacgagctggaggagcacaagatcgagacctggagagagctgtacctgcaggagaccttcaagcccctggtgaacatcagccccgacgccagcctgttcgacgccgtgtacagcctgatcaagaacaagatccacagactgcccgtgatcgaccccatcagcggcaacgccctgtacatcctgacccacaagagaatcctgaagttcctgcagctgttcatgagcgacatgcccaagcccgccttcatgaagcagaacctggacgagctgggcatcggcacctaccacaacatcgccttcatccaccccgacacccccatcatcaaggccctgaacatcttcgtggagagaagaatcagcgccctgcccgtggtggacgagagcggcaaggtggtggacatctacagcaagttcgacgtgatcaacctggccgccgagaagacctacaacaacctggacatcaccgtgacccaggccctgcagcacagaagccagtacttcgagggcgtggtgaagtgcaacaagctggagatcctggagaccatcgtggacagaatcgtgagagccgaggtgcacagactggtggtggtgaacgaggccgacagcatcgtgggcatcatcagcctgagcgacatcctgcaggccctgatcctgacccccgccggcgccaagcagaaggagaccgagaccgagtag

SEQ ID NO: 95109 - DNA, 1335 bp, synthetic construct
  misc_feature 1..1335: note = Description of Artificial Sequence: Synthetic coding sequence
  source 1..1335: mol_type = other DNA
atgagcagcagctacgacgaggccagcctggcccccgaggagaccaccgacagcttctgggaggtgggcaactacaagagaaccgtgaagagaatcgacgacggccacagactgtgcaacgacctgatgaactgcgtgcaggagagagccaagatcgagaaggcctacggccagcagctgaccgactgggccaagagatggagacagctgatcgagaagggcccccagtacggcagcctggagagagcctggggcgccatcatgaccgaggccgacaaggtgagcgagctgcaccaggaggtgaagaacaacctgctgaacgaggacctggagaaggtgaagaactggcagaaggacgcctaccacaagcagatcatgggcggcttcaaggagaccaaggaggccgaggacggcttcagaaaggcccagaagccctgggccaagaagatgaaggagctggaggccgccaagaaggcctaccacctggcctgcaaggaggagaagctggccatgaccagagagatgaacagcaagaccgagcagagcgtgacccccgagcagcagaagaagctgcaggacaaggtggacaagtgcaagcaggacgtgcagaagacccaggagaagtacgagaaggtgctggaggacgtgggcaagaccaccccccagtacatggagaacatggagcaggtgttcgagcagtgccagcagttcgaggagaagagactggtgttcctgaaggaggtgctgctggacatcaagagacacctgaacctggccgagaacagcagctacatccacgtgtacagagagctggagcaggccatcagaggcgccgacgcccaggaggacctgagatggttcagaagcaccagcggccccggcatgcccatgaactggccccagttcgaggagtggaaccccgacctgccccacaccaccaccaagaaggagaagcagcccaagaaggccgagggcgtggccctgaccaacgccaccggcgccgtggagagcaccagccaggccggcgacagaggcagcgtgagcagctacgacagaggccagccctacgccaccgagtggagcgacgacgagagcggcaaccccttcggcggcagcgagaccaacggcggcgccaaccccttcgaggacgacagcaagggcgtgagagtgagagccctgtacgactacgacggccaggagcaggacgagctgagcttcaaggccggcgacgagctgaccaagctgggcgaggaggacgagcagggctggtgcagaggcagactggacagcggccagctgggcctgtaccccgccaactacgtggaggccatctag

SEQ ID NO: 95110 - DNA, 1281 bp, synthetic construct
  misc_feature 1..1281: note = Description of Artificial Sequence: Synthetic coding sequence
  source 1..1281: mol_type = other DNA
atgagcagcagctacgacgaggccagcctggcccccgaggagaccaccgacagcttctgggaggtgggcaactacaagagaaccgtgaagagaatcgacgacggccacagactgtgcaacgacctgatgaactgcgtgcaggagagagccaagatcgagaaggcctacggccagcagctgaccgactgggccaagagatggagacagctgatcgagaagggcccccagtacggcagcctggagagagcctggggcgccatcatgaccgaggccgacaaggtgagcgagctgcaccaggaggtgaagaacaacctgctgaacgaggacctggagaaggtgaagaactggcagaaggacgcctaccacaagcagatcatgggcggcttcaaggagaccaaggaggccgaggacggcttcagaaaggcccagaagccctgggccaagaagatgaaggagctggaggccgccaagaaggcctaccacctggcctgcaaggaggagaagctggccatgaccagagagatgaacagcaagaccgagcagagcgtgacccccgagcagcagaagaagctgcaggacaaggtggacaagtgcaagcaggacgtgcagaagacccaggagaagtacgagaaggtgctggaggacgtgggcaagaccaccccccagtacatggagaacatggagcaggtgttcgagcagtgccagcagttcgaggagaagagactggtgttcctgaaggaggtgctgctggacatcaagagacacctgaacctggccgagaacagcagctacatccacgtgtacagagagctggagcaggccatcagaggcgccgacgcccaggaggacctgagatggttcagaagcaccagcggccccggcatgcccatgaactggccccagttcgaggagtggaaccccgacctgccccacaccaccaccaagaaggagaagcagcccaagaaggccgagggcgtggccctgaccaacgccaccggcgccgtggagagcaccagccaggccggcgacagaggcagcgtgagcagctacgacagaggccagccctacgccaccgagtggagcgacgacgagagcggcaaccccttcggcggcagcgagaccaacggcggcgccaaccccttcgaggacgacagcaagggcgtgagagtgagagccctgtacgactacgacggccaggagcaggacgagctgagcttcaaggccggcgacgagctgaccaagctgggcctgtaccccgccaactacgtggaggccatctag

SEQ ID NO: 95111 - DNA, 1335 bp, synthetic construct; identical to SEQ ID NO: 95109
  misc_feature 1..1335: note = Description of Artificial Sequence: Synthetic coding sequence
  source 1..1335: mol_type = other DNA

SEQ ID NO: 95112 - DNA, 1275 bp, synthetic construct
  misc_feature 1..1275: note = Description of Artificial Sequence: Synthetic coding sequence
  source 1..1275: mol_type = other DNA
atggcccccgaggaggacgccggcggcgaggccctgggcggcagcttctgggaggccggcaactacagaagaaccgtgcagagagtggaggacggccacagactgtgcggcgacctggtgagctgcttccaggagagagccagaatcgagaaggcctacgcccagcagctggccgactgggccagaaagtggagaggcaccgtggagaagggcccccagtacggcaccctggagaaggcctggcacgccttcttcaccgccgccgagagactgagcgccctgcacctggaggtgagagagaagctgcagggccaggacagcgagagagtgagagcctggcagagaggcgccttccacagacccgtgctgggcggcttcagagagagcagagccgccgaggacggcttcagaaaggcccagaagccctggctgaagagactgaaggaggtggaggccagcaagaagagctaccacgccgccagaaaggacgagaagaccgcccagaccagagagagccacgccaaggccgacagcgccgtgagccaggagcagctgagaaagctgcaggagagagtggagagatgcgccaaggaggccgagaagaccaaggcccagtacgagcagaccctggccgagctgcacagatacacccccagatacatggaggacatggagcaggccttcgagacctgccaggccgccgagagacagagactgctgttcttcaaggacatgctgctgaccctgcaccagcacctggacctgagcagcagcgagaagttccacgagctgcacagagacctgcaccagggcatcgaggccgccagcgacgaggaggacctgagatggtggagaagcacccacggccccggcatggccatgaactggccccagttcgaggagtggagcctggacacccagagaaccatcagcagaaaggagaagggcggcagaagccccgacgaggtgaccctgaccagcatcgtgcccaccagagacggcaccgccccccccccccagagccccggcagccccggcaccggccaggacgaggagtggagcgacgaggagagccccagaaaggccgccaccggcgtgagagtgagagccctgtacgactacgccggccaggaggccgacgagctgagcttcagagccggcgaggagctgctgaagatgagcgaggaggacgagcagggctggtgccagggccagctgcagagcggcagaatcggcctgtaccccgccaactacgtggagtgcgtgggcgcctag

SEQ ID NO: 95113 - DNA, 879 bp, synthetic construct
  misc_feature 1..879: note = Description of Artificial Sequence: Synthetic coding sequence
  source 1..879: mol_type = other DNA
atggcccccgaggaggacgccggcggcgaggccctgggcggcagcttctgggaggccggcaactacagaagaaccgtgcagagagtggaggacggccacagactgtgcggcgacctggtgagctgcttccaggagagagccagaatcgagaaggcctacgcccagcagctggccgactgggccagaaagtggagaggcaccgtggagaagggcccccagtacggcaccctggagaaggcctggcacgccttcttcaccgccgccgagagactgagcgccctgcacctggaggtgagagagaagctgcagggccaggacagcgagagagtgagagcctggcagagaggcgccttccacagacccgtgctgggcggcttcagagagagcagagccgccgaggacggcttcagaaaggcccagaagccctggctgaagagactgaaggaggtggaggccagcaagaagagctaccacgccgccagaaaggacgagaagaccgcccagaccagagagacccagagacagaccgcccccagccccagaagcagctgcgccaactgcagaaacggctggaacgccgtgcccagaagacccagaagacagaagctgagcatgagcagaagatggcagagctgcatcgccaccctgcacgccacctggagaacctggaacagacccctgagacccgccagaccccccagcgccagcggcttcttcagcagcagaatctgctgcagcccctacaccagcacctggaccttccccgccgtgagaagcagcatgaacagcaccgtgacctgcaccagagccctgagacagcccgtgaccaagagaatctgcgccggcggcgccgcccccaccggccaggcctggccctag

SEQ ID NO: 95114 - DNA, 210 bp, synthetic construct
  misc_feature 1..210: note = Description of Artificial Sequence: Synthetic coding sequence
  source 1..210: mol_type = other DNA
atggcccccgaggaggacgccggcggcgaggccctgggcggcagcttctgggaggccggcaactacagaagaaccgtgcagagagtggaggacggccacagactgtgcggcgacctggtgagctgcttccaggagagagccagaatcgagaaggcctacgcccagcagctggccgactgggccagaaagtggagaggcaccgtggagtag

SEQ ID NO: 95115 - DNA, 429 bp, synthetic construct
  misc_feature 1..429: note = Description of Artificial Sequence: Synthetic coding sequence
  source 1..429: mol_type = other DNA
atggcccccgaggaggacgccggcggcgaggccctgggcggcagcttctgggaggccggcaactacagaagaaccgtgcagagagtggaggacggccacagactgtgcggcgacctggtgagctgcttccaggagagagccagaatcgagaaggcctacgcccagcagctggccgactgggccagaaagtggagaggcaccgtggagaagggcccccagtacggcaccctggagaaggcctggcacgccttcttcaccgccgccgagagactgagcgccctgcacctggaggtgagagagaagctgcagggccaggacagcgagagagtgagagcctggcagagaggcgccttccacagacccgtgctgggcggcttcagagagagcagagccgccgaggacggcttcagaaaggcccagaagccctag

SEQ ID NO: 95116 - DNA, 1218 bp, synthetic construct
  misc_feature 1..1218: note = Description of Artificial Sequence: Synthetic coding sequence
  source 1..1218: mol_type = other DNA
atggcccccgaggaggacgccggcggcgaggccctgggcggcagcttctgggaggccggcaactacagaagaaccgtgcagagagtggaggacggccacagactgtgcggcgacctggtgagctgcttccaggagagagccagaatcgagaaggcctacgcccagcagctggccgactgggccagaaagtggagaggcaccgtggagaagggcccccagtacggcaccctggagaaggcctggcacgccttcttcaccgccgccgagagactgagcgccctgcacctggaggtgagagagaagctgcagggccaggacagcgagagagtgagagcctggcagagaggcgccttccacagacccgtgctgggcggcttcagagagagcagagccgccgaggacggcttcagaaaggcccagaagccctggctgaagagactgaaggaggtggaggccagcaagaagagctaccacgccgccagaaaggacgagaagaccgcccagaccagagagagccacgccaaggccgacagcgccgtgagccaggagcagctgagaaagctgcaggagagagtggagagatgcgccaaggaggccgagaagaccaaggcccagtacgagcagaccctggccgagctgcacagatacacccccagatacatggaggacatggagcaggccttcgagacctgccaggccgccgagagacagagactgctgttcttcaaggacatgctgctgaccctgcaccagcacctggacctgagcagcagcgagaagttccacgagctgcacagagacctgcaccagggcatcgaggccgccagcgacgaggaggacctgagatggtggagaagcacccacggccccggcatggccatgaactggccccagttcgaggagtggagcctggacacccagagaaccatcagcagaaaggagaagggcggcagaagccccgacgaggtgaccctgaccagcatcgtgcccaccagagacggcaccgccccccccccccagagccccggcagccccggcaccggccaggacgaggagtggagcgacgaggagagccccagaaaggccgccaccggcgtgagagtgagagccctgtacgactacgccggccaggaggccgacgagctgagcttcagagccggcgaggagctgctgaagatgagcgaggaggacgagcagggctggtgccagggccagtag

SEQ ID NO: 95117 - DNA, 210 bp, synthetic construct; identical to SEQ ID NO: 95114
  misc_feature 1..210: note = Description of Artificial Sequence: Synthetic coding sequence
  source 1..210: mol_type = other DNA

SEQ ID NO: 95118 - DNA, 447 bp, synthetic construct
  misc_feature 1..447: note = Description of Artificial Sequence: Synthetic coding sequence
  source 1..447: mol_type = other DNA
atggcccccgaggaggacgccggcggcgaggccctgggcggcagcttctgggaggccggcaactacagaagaaccgtgcagagagtggaggacggccacagactgtgcggcgacctggtgagctgcttccaggagagagccagaatcgagaaggcctacgcccagcagctggccgactgggccagaaagtggagaggcaccgtggagaagggcccccagtacggcaccctggagaaggcctggcacgccttcttcaccgccgccgagagactgagcgccctgcacctggaggtgagagagaagctgcagggccaggacagcgagagagtgagagcctggcagagaggcgccttccacagacccgtgctgggcggcttcagagagagcagagccgccgaggacggcttcagaaaggcccagaagccctggctgaagagactgaagtag

SEQ ID NO: 95119 - DNA, 1275 bp, synthetic construct; identical to SEQ ID NO: 95112
  misc_feature 1..1275: note = Description of Artificial Sequence: Synthetic coding sequence
  source 1..1275: mol_type = other DNA

SEQ ID NO: 95120 - DNA, 1587 bp, synthetic construct
  misc_feature 1..1587: note = Description of Artificial Sequence: Synthetic coding sequence
  source 1..1587: mol_type = other DNA
atgctgctgcccctgctgctgctgctgcccatgtgctgggccgtggaggtgaagagacccagaggcgtgagcctgaccaaccaccacttctacgacgagagcaagcccttcacctgcctggacggcagcgccaccatccccttcgaccaggtgaacgacgactactgcgactgcaaggacggcagcgacgagcccggcaccgccgcctgccccaacggcagcttccactgcaccaacaccggctacaagcccctgtacatccccagcaacagagtgaacgacggcgtgtgcgactgctgcgacggcaccgacgagtacaacagcggcgtgatctgcgagaacacctgcaaggagaagggcagaaaggagagagagagcctgcagcagatggccgaggtgaccagagagggcttcagactgaagaagatcctgatcgaggactggaagaaggccagagaggagaagcagaagaagctgatcgagctgcaggccggcaagaagagcctggaggaccaggtggagatgctgagaaccgtgaaggaggaggccgagaagcccgagagagaggccaaggagcagcaccagaagctgtgggaggagcagctggccgccgccaaggcccagcaggagcaggagctggccgccgacgccttcaaggagctggacgacgacatggacggcaccgtgagcgtgaccgagctgcagacccaccccgagctggacaccgacggcgacggcgccctgagcgaggccgaggcccaggccctgctgagcggcgacacccagaccgacgccaccagcttctacgacagagtgtgggccgccatcagagacaagtacagaagcgaggccctgcccaccgacctgcccgcccccagcgcccccgacctgaccgagcccaaggaggagcagccccccgtgcccagcagccccaccgaggaggaggaggaggaggaggaggaggaggaggaggaggccgaggaggaggaggaggaggaggacagcgaggaggcccccccccccctgagccccccccagcccgccagccccgccgaggaggacaagatgcccccctacgacgagcagacccaggccttcatcgacgccgcccaggaggccagaaacaagttcgaggaggccgagagaagcctgaaggacatggaggagagcatcagaaacctggagcaggagatcagcttcgacttcggccccaacggcgagttcgcctacctgtacagccagtgctacgagctgaccaccaacgagtacgtgtacagactgtgccccttcaagctggtgagccagaagcccaagctgggcggcagccccaccagcctgggcacctggggcagctggatcggccccgaccacgacaagttcagcgccatgaagtacgagcagggcaccggctgctggcagggccccaacagaagcaccaccgtgagactgctgtgcggcaaggagaccatggtgaccagcaccaccgagcccagcagatgcgagtacctgatggagctgatgacccccgccgcctgccccgagcccccccccgaggcccccaccgaggacgaccacgacgagctgtag

SEQ ID NO: 95121 - DNA, 1578 bp, synthetic construct
  misc_feature 1..1578: note = Description of Artificial Sequence: Synthetic coding sequence
  source 1..1578: mol_type = other DNA
atgctgctgcccctgctgctgctgctgcccatgtgctgggccgtggaggtgaagagacccagaggcgtgagcctgaccaaccaccacttctacgacgagagcaagcccttcacctgcctggacggcagcgccaccatccccttcgaccaggtgaacgacgactactgcgactgcaaggacggcagcgacgagcccggcaccgccgcctgccccaacggcagcttccactgcaccaacaccggctacaagcccctgtacatccccagcaacagagtgaacgacggcgtgtgcgactgctgcgacggcaccgacgagtacaacagcggcgtgatctgcgagaacacctgcaaggagaagggcagaaaggagagagagagcctgcagcagatggccgaggtgaccagagagggcttcagactgaagaagatcctgatcgaggactggaagaaggccagagaggagaagcagaagaagctgatcgagctgcaggccggcaagaagagcctggaggaccaggtggagatgctgagaaccgtgaaggaggaggccgagaagcccgagagagaggccaaggagcagcaccagaagctgtgggaggagcagctggccgccgccaaggcccagcaggagcaggagctggccgccgacgccttcaaggagctggacgacgacatggacggcaccgtgagcgtgaccgagctgcagacccaccccgagctggacaccgacggcgacggcgccctgagcgaggccgaggcccaggccctgctgagcggcgacacccagaccgacgccaccagcttctacgacagagtgtgggccgccatcagagacaagtacagaagcgaggccctgcccaccgacctgcccgcccccagcgcccccgacctgaccgagcccaaggaggagcagccccccgtgcccagcagccccaccgaggaggaggaggaggaggaggaggaggaggaggaggaggccgaggaggaggaggaggaggaggacagcgaggtgcagggcgagcagcccaagcccgccagccccgccgaggaggacaagatgcccccctacgacgagcagacccaggccttcatcgacgccgcccaggaggccagaaacaagttcgaggaggccgagagaagcctgaaggacatggaggagagcatcagaaacctggagcaggagatcagcttcgacttcggccccaacggcgagttcgcctacctgtacagccagtgctacgagctgaccaccaacgagtacgtgtacagactgtgccccttcaagctggtgagccagaagcccaagctgggcggcagccccaccagcctgggcacctggggcagctggatcggccccgaccacgacaagttcagcgccatgaagtacgagcagggcaccggctgctggcagggccccaacagaagcaccaccgtgagactgctgtgcggcaaggagaccatggtgaccagcaccaccgagcccagcagatgcgagtacctgatggagctgatgacccccgccgcctgccccgagcccccccccgaggcccccaccgaggacgaccacgacgagctgtag

SEQ ID NO: 95122 - DNA, 2031 bp, synthetic construct
  misc_feature 1..2031: note = Description of Artificial Sequence: Synthetic coding sequence
  source 1..2031: mol_type = other DNA
atggcccccttcctgagaatcgccttcaacagctacgagctgggcagcctgcaggccgaggacgaggccaaccagcccttctgcgccgtgaagatgaaggaggccctgagcaccgagagaggcaagaccctggtgcagaagaagcccaccatgtaccccgagtggaagagcaccttcgacgcccacatctacgagggcagagtgatccagatcgtgctgatgagagccgccgaggagcccgtgagcgaggtgaccgtgggcgtgagcgtgctggccgagagatgcaagaagaacaacggcaaggccgagttctggctggacctgcagccccaggccaaggtgctgatgagcgtgcagtacttcctggaggacgtggactgcaagcagagcatgagaagcgaggacgaggccaagttccccaccatgaacagaagaggcgccatcaagcaggccaagatccactacatcaagaaccacgagttcatcgccaccttcttcggccagcccaccttctgcagcgtgtgcaaggacttcgtgtggggcctgaacaagcagggctacaagtgcagacagtgcaacgccgccatccacaagaagtgcatcgacaagatcatcggcagatgcaccggcaccgccgccaacagcagagacaccatcttccagaaggagagattcaacatcgacatgccccacagattcaaggtgcacaactacatgagccccaccttctgcgaccactgcggcagcctgctgtggggcctggtgaagcagggcctgaagtgcgaggactgcggcatgaacgtgcaccacaagtgcagagagaaggtggccaacctgtgcggcatcaaccagaagctgctggccgaggccctgaaccaggtgacccagagagccagcagaagaagcgacagcgccagcagcgagcccgtgggcatctaccagggcttcgagaagaagaccggcgtggccggcgaggacatgcaggacaacagcggcacctacggcaagatctgggagggcagcagcaagtgcaacatcaacaacttcatcttccacaaggtgctgggcaagggcagcttcggcaaggtgctgctgggcgagctgaagggcagaggcgagtacttcgccatcaaggccctgaagaaggacgtggtgctgatcgacgacgacgtggagtgcaccatggtggagaagagagtgctgaccctggccgccgagaaccccttcctgacccacctgatctgcaccttccagaccaaggaccacctgttcttcgtgatggagttcctgaacggcggcgacctgatgtaccacatccaggacaagggcagattcgagctgtacagagccaccttctacgccgccgagatcatgtgcggcctgcagttcctgcacagcaagggcatcatctacagagacctgaagctggacaacgtgctgctggacagagacggccacatcaagatcgccgacttcggcatgtgcaaggagaacatcttcggcgagagcagagccagcaccttctgcggcacccccgactacatcgcccccgagatcctgcagggcctgaagtacaccttcagcgtggactggtggagcttcggcgtgctgctgtacgagatgctgatcggccagagccccttccacggcgacgacgaggacgagctgttcgagagcatcagagtggacaccccccactaccccagatggatcaccaaggagagcaaggacatcctggagaagctgttcgagagagagcccaccaagagactgggcgtgaccggcaacatcaagatccaccccttcttcaagaccatcaactggaccctgctggagaagagaagactggagccccccttcagacccaaggtgaagagccccagagactacagcaacttcgaccaggagttcctgaacgagaaggccagactgagctacagcgacaagaacctgatcgacagcatggaccagagcgccttcgccggcttcagcttcgtgaaccccaagttcgagcacctgctggaggactag

SEQ ID NO: 95123 - DNA, 2031 bp, synthetic construct; identical to SEQ ID NO: 95122
  misc_feature 1..2031: note = Description of Artificial Sequence: Synthetic coding sequence
  source 1..2031: mol_type = other DNA

SEQ ID NO: 95124 - DNA, 234 bp, synthetic construct
  misc_feature 1..234: note = Description of Artificial Sequence: Synthetic coding sequence
  source 1..234: mol_type = other DNA
atggcccccttcctgagaatcgccttcaacagctacgagctgggcagcctgcaggccgaggacgaggccaaccagcccttctgcgccgtgaagatgaaggaggccctgagcaccgagagaggcaagaccctggtgcagaagaagcccaccatgtaccccgagtggaagagcaccttcgacgcccacatctacgagggcagagtgatccagatcgtgctgatgagagccgcctag

SEQ ID NO: 95125 - DNA, 378 bp, synthetic construct
  misc_feature 1..378: note = Description of Artificial Sequence: Synthetic coding sequence
  source 1..378: mol_type = other DNA
atggcccccttcctgagaatcgccttcaacagctacgagctgggcagcctgcaggccgaggacgaggccaaccagcccttctgcgccgtgaagatgaaggaggccctgagcaccgagagaggcaagaccctggtgcagaagaagcccaccatgtaccccgagtggaagagcaccttcgacgcccacatctacgagggcagagtgatccagatcgtgctgatgagagccgccgaggagcccgtgagcgaggtgaccgtgggcgtgagcgtgctggccgagagatgcaagaagaacaacggcaaggccgagttctggctggacctgcagccccaggccaaggtgctgatgagcgtgcagtacttcctggaggacgtgtag

SEQ ID NO: 95126 - DNA, 2052 bp, synthetic construct
  misc_feature 1..2052: note = Description of Artificial Sequence: Synthetic coding sequence
  source 1..2052: mol_type = other DNA
atgagcagcggcaccatgaagttcaacggctacctgagagtgagaatcggcgaggccgtgggcctgcagcccaccagatggagcctgagacacagcctgttcaagaagggccaccagctgctggacccctacctgaccgtgagcgtggaccaggtgagagtgggccagaccagcaccaagcagaagaccaacaagcccacctacaacgaggagttctgcgccaacgtgaccgacggcggccacctggagctggccgtgttccacgagacccccctgggctacgaccacttcgtggccaactgcaccctgcagttccaggagctgctgagaaccaccggcgccagcgacaccttcgagggctgggtggacctggagcccgagggcaaggtgttcgtggtgatcaccctgaccggcagcttcaccgaggccaccctgcagagagacagaatcttcaagcacttcaccagaaagagacagagagccatgagaagaagagtgcaccagatcaacggccacaagttcatggccacctacctgagacagcccacctactgcagccactgcagagagttcatctggggcgtgttcggcaagcagggctaccagtgccaggtgtgcacctgcgtggtgcacaagagatgccaccacctgatcgtgaccgcctgcacctgccagaacaacatcaacaaggtggacagcaagatcgccgagcagagattcggcatcaacatcccccacaagttcagcatccacaactacaaggtgcccaccttctgcgaccactgcggcagcctgctgtggggcatcatgagacagggcctgcagtgcaagatctgcaagatgaacgtgcacatcagatgccaggccaacgtggcccccaactgcggcgtgaacgccgtggagctggccaagaccctggccggcatgggcctgcagcccggcaacatcagccccaccagcaagctggtgagcagaagcaccctgagaagacagggcaaggagagcagcaaggagggcaacggcatcggcgtgaacagcagcaacagactgggcatcgacaacttcgagttcatcagagtgctgggcaagggcagcttcggcaaggtgatgctggccagagtgaaggagaccggcgacctgtacgccgtgaaggtgctgaagaaggacgtgatcctgcaggacgacgacgtggagtgcaccatgaccgagaagagaatcctgagcctggccagaaaccaccccttcctgacccagctgttctgctgcttccagacccccgacagactgttcttcgtgatggagttcgtgaacggcggcgacctgatgttccacatccagaagagcagaagattcgacgaggccagagccagattctacgccgccgagatcatcagcgccctgatgttcctgcacgacaagggcatcatctacagagacctgaagctggacaacgtgctgctggaccacgagggccactgcaagctggccgacttcggcatgtgcaaggagggcatctgcaacggcgtgaccaccgccaccttctgcggcacccccgactacatcgcccccgagatcctgcaggagatgctgtacggccccgccgtggactggtgggccatgggcgtgctgctgtacgagatgctgtgcggccacgcccccttcgaggccgagaacgaggacgacctgttcgaggccatcctgaacgacgaggtggtgtaccccacctggctgcacgaggacgccaccggcatcctgaagagcttcatgaccaagaaccccaccatgagactgggcagcctgacccagggcggcgagcacgccatcctgagacaccccttcttcaaggagatcgactgggcccagctgaaccacagacagatcgagccccccttcagacccagaatcaagagcagagaggacgtgagcaacttcgaccccgacttcatcaaggaggagcccgtgctgacccccatcgacgagggccacctgcccatgatcaaccaggacgagttcagaaacttcagctacgtgagccccgagctgcagccctag

SEQ ID NO: 95127 - DNA, 357 bp, synthetic construct
  misc_feature 1..357: note = Description of Artificial Sequence: Synthetic coding sequence
  source 1..357: mol_type = other DNA
atgagcagcggcaccatgaagttcaacggctacctgagagtgagaatcggcgaggccgtgggcctgcagcccaccagatggagcctgagacacagcctgttcaagaagggccaccagctgctggacccctacctgaccgtgagcgtggaccaggtgagagtgggccagaccagcaccaagcagaagaccaacaagcccacctacaacgaggagttctgcgccaacgtgaccgacggcggccacctggagctggccgtgttccacgagacccccctgggctacgaccacttcgtggccaactgcaccctgcagttccaggagctgctgagaaccaccggcgccagcgacaccttctag

SEQ ID NO: 95128 - DNA, 1791 bp, synthetic construct
  misc_feature 1..1791: note = Description of Artificial Sequence: Synthetic coding sequence
  source 1..1791: mol_type = other DNA
atgcccacccagagagacagcagcaccatgagccacaccgtggccggcggcggcagcggcgaccacagccaccaggtgagagtgaaggcctactacagaggcgacatcatgatcacccacttcgagcccagcatcagcttcgagggcctgtgcaacgaggtgagagacatgtgcagcttcgacaacgagcagctgttcaccatgaagtggatcgacgaggagggcgacccctgcaccgtgagcagccagctggagctggaggaggccttcagactgtacgagctgaacaaggacagcgagctgctgatccacgtgttcccctgcgtgcccgagagacccggcatgccctgccccggcgaggacaagagcatctacagaagaggcgccagaagatggagaaagctgtactgcgccaacggccacaccttccaggccaagagattcaacagaagagcccactgcgccatctgcaccgacagaatctggggcctgggcagacagggctacaagtgcatcaactgcaagctgctggtgcacaagaagtgccacaagctggtgaccatcgagtgcggcagacacagcctgccccaggagcccgtgatgcccatggaccagagcagcatgcacagcgaccacgcccagaccgtgatcccctacaaccccagcagccacgagagcctggaccaggtgggcgaggagaaggaggccatgaacaccagagagagcggcaaggccagcagcagcctgggcctgcaggacttcgacctgctgagagtgatcggcagaggcagctacgccaaggtgctgctggtgagactgaagaagaccgacagaatctacgccatgaaggtggtgaagaaggagctggtgaacgacgacgaggacatcgactgggtgcagaccgagaagcacgtgttcgagcaggccagcaaccaccccttcctggtgggcctgcacagctgcttccagaccgagagcagactgttcttcgtgatcgagtacgtgaacggcggcgacctgatgttccacatgcagagacagagaaagctgcccgaggagcacgccagattctacagcgccgagatcagcctggccctgaactacctgcacgagagaggcatcatctacagagacctgaagctggacaacgtgctgctggacagcgagggccacatcaagctgaccgactacggcatgtgcaaggagggcctgagacccggcgacaccaccagcaccttctgcggcacccccaactacatcgcccccgagatcctgagaggcgaggactacggcttcagcgtggactggtgggccctgggcgtgctgatgttcgagatgatggccggcagaagccccttcgacatcgtgggcagcagcgacaaccccgaccagaacaccgaggactacctgttccaggtgatcctggagaagcagatcagaatccccagaagcctgagcgtgaaggccgccagcgtgctgaagagcttcctgaacaaggaccccaaggagagactgggctgccacccccagaccggcttcgccgacatccagggccaccccttcttcagaaacgtggactgggacatgatggagcagaagcaggtggtgccccccttcaagcccaacatcagcggcgagttcggcctggacaacttcgacagccagttcaccaacgagcccgtgcagctgacccccgacgacgacgacatcgtgagaaagatcgaccagagcgagttcgagggcttcgagtacatcaaccccctgctgatgagcgccgaggagtgcgtgtag

SEQ ID NO: 95129 - DNA, 2121 bp, synthetic construct
  misc_feature 1..2121: note = Description of Artificial Sequence: Synthetic coding sequence
  source 1..2121: mol_type = other DNA
atgagccccttcctgagaatcggcctgagcaacttcgactgcggcagctgccagagctgccagggcgaggccgtgaacccctactgcgccgtgctggtgaaggagtacgtggagagcgagaacggccagatgtacatccagaagaagcccaccatgtaccccccctgggacagcaccttcgacgcccacatcaacaagggcagagtgatgcagatcatcgtgaagggcaagaacgtggacctgatcagcgagaccaccgtggagctgtacagcctggccgagagatgcagaaagaacaacggcaagaccgagatctggctggagctgaagccccagggcagaatgctgatgaacgccagatacttcctggagatgagcgacaccaaggacatgaacgagttcgagaccgagggcttcttcgccctgcaccagagaagaggcgccatcaagcaggccaaggtgcaccacgtgaagtgccacgagttcaccgccaccttcttcccccagcccaccttctgcagcgtgtgccacgagttcgtgtggggcctgaacaagcagggctaccagtgcagacagtgcaacgccgccatccacaagaagtgcatcgacaaggtgatcgccaagtgcaccggcagcgccatcaacagcagagagaccatgttccacaaggagagattcaagatcgacatgccccacagattcaaggtgtacaactacaagagccccaccttctgcgagcactgcggcaccctgctgtggggcctggccagacagggcctgaagtgcgacgcctgcggcatgaacgtgcaccacagatgccagaccaaggtggccaacctgtgcggcatcaaccagaagctgatggccgaggccctggccatgatcgagagcacccagcaggccagatgcctgagagacaccgagcagatcttcagagagggccccgtggagatcggcctgccctgcagcatcaagaacgaggccagacccccctgcctgcccacccccggcaagagagagccccagggcatcagctgggagagccccctggacgaggtggacaagatgtgccacctgcccgagcccgagctgaacaaggagagacccagcctgcagatcaagctgaagatcgaggacttcatcctgcacaagatgctgggcaagggcagcttcggcaaggtgttcctggccgagttcaagaagaccaaccagttcttcgccatcaaggccctgaagaaggacgtggtgctgatggacgacgacgtggagtgcaccatggtggagaagagagtgctgagcctggcctgggagcaccccttcctgacccacatgttctgcaccttccagaccaaggagaacctgttcttcgtgatggagtacctgaacggcggcgacctgatgtaccacatccagagctgccacaagttcgacctgagcagagccaccttctacgccgccgagatcatcctgggcctgcagttcctgcacagcaagggcatcgtgtacagagacctgaagctggacaacatcctgctggacaaggacggccacatcaagatcgccgacttcggcatgtgcaaggagaacatgctgggcgacgccaagaccaacaccttctgcggcacccccgactacatcgcccccgagatcctgctgggccagaagtacaaccacagcgtggactggtggagcttcggcgtgctgctgtacgagatgctgatcggccagagccccttccacggccaggacgaggaggagctgttccacagcatcagaatggacaaccccttctaccccagatggctggagaaggaggccaaggacctgctggtgaagctgttcgtgagagagcccgagaagagactgggcgtgagaggcgacatcagacagcaccccctgttcagagagatcaactgggaggagctggagagaaaggagatcgacccccccttcagacccaaggtgaagagccccttcgactgcagcaacttcgacaaggagttcctgaacgagaagcccagactgagcttcgccgacagagccctgatcaacagcatggaccagaacatgttcagaaacttcagcttcatgaaccccggcatggagagactgatcagctag

SEQ ID NO: 95130 - DNA, 1932 bp, synthetic construct
  misc_feature 1..1932: note = Description of Artificial Sequence: Synthetic coding sequence
  source 1..1932: mol_type = other DNA
atgagccccttcctgagaatcggcctgagcaacttcgactgcggcagctgccagagctgccagggcgaggccgtgaacccctactgcgccgtgctggtgaaggagtacgtggagagcgagaacggccagatgtacatccagaagaagcccaccatgtaccccccctgggacagcaccttcgacgcccacatcaacaagggcagagtgatgcagatcatcgtgaagggcaagaacgtggacctgatcagcgagaccaccgtggagctgtacagcctggccgagagatgcagaaagaacaacggcaagaccgagatctggctggagctgaagccccagggcagaatgctgatgaacgccagatacttcctggagatgagcgacaccaaggacatgaacgagttcgagaccgagggcttcttcgccctgcaccagagaagaggcgccatcaagcaggccaaggtgcaccacgtgaagtgccacgagttcaccgccaccttcttcccccagcccaccttctgcagcgtgtgccacgagttcgtgtggggcctgaacaagcagggctaccagtgcagacagtgcaacgccgccatccacaagaagtgcatcgacaaggtgatcgccaagtgcaccggcagcgccatcaacagcagagagaccatgttccacaaggagagattcaagatcgacatgccccacagattcaaggtgtacaactacaagagccccaccttctgcgagcactgcggcaccctgctgtggggcctggccagacagggcctgaagtgcgacgcctgcggcatgaacgtgcaccacagatgccagaccaaggtggccaacctgtgcggcatcaaccagaagctgatggccgaggccctggccatgatcgagagcacccagcaggccagatgcctgagagacaccgagcagatcttcagagagggccccgtggagatcggcctgccctgcagcatcaagaacgaggccagacccccctgcctgcccacccccggcaagagagagccccagggcatcagctgggagagccccctggacgaggtggacaagatgtgccacctgcccgagcccgagctgaacaaggagagacccagcctgcagatcaagctgaagatcgaggacttcatcctgcacaagatgctgggcaagggcagcttcggcaaggtgttcctggccgagttcaagaagaccaaccagttcttcgccatcaaggccctgaagaaggacgtggtgctgatggacgacgacgtggagtgcaccatggtggagaagagagtgctgagcctggcctgggagcaccccttcctgacccacatgttctgcaccttccagaccaaggagaacctgttcttcgtgatggagtacctgaacggcggcgacctgatgtaccacatccagagctgccacaagttcgacctgagcagagccaccttctacgccgccgagatcatcctgggcctgcagttcctgcacagcaagggcatcgtgtacagagacctgaagctggacaacatcctgctggacaaggacggccacatcaagatcgccgacttcggcatgtgcaaggagaacatgctgggcgacgccaagaccaacaccttctgcggcacccccgactacatcgcccccgagctgttcgtgagagagcccgagaagagactgggcgtgagaggcgacatcagacagcaccccctgttcagagagatcaactgggaggagctggagagaaaggagatcgacccccccttcagacccaaggtgaagagccccttcgactgcagcaacttcgacaaggagttcctgaacgagaagcccagactgagcttcgccgacagagccctgatcaacagcatggaccagaacatgttcagaaacttcagcttcatgaaccccggcatggagagactgatcagctag

SEQ ID NO: 95131 - DNA, 1440 bp, synthetic construct
  misc_feature 1..1440: note = Description of Artificial Sequence: Synthetic coding sequence
  source 1..1440: mol_type = other DNA
tgactgagcctgctgccctgcctgctgttcctgcccaccatcatccccaagaagatcgtgatccagagagacagcctgcccagcaagaagctgagctacggcctgatcgcctgcggcatgaacgtgcaccacagatgccagaccaaggtggccaacctgtgcggcatcaaccagaagctgatggccgaggccctggccatgatcgagagcacccagcaggccagatgcctgagagacaccgagcagatcttcagagagggccccgtggagatcggcctgccctgcagcatcaagaacgaggccagacccccctgcctgcccacccccggcaagagagagccccagggcatcagctgggagagccccctggacgaggtggacaagatgtgccacctgcccgagcccgagctgaacaaggagagacccagcctgcagatcaagctgaagatcgaggacttcatcctgcacaagatgctgggcaagggcagcttcggcaaggtgttcctggccgagttcaagaagaccaaccagttcttcgccatcaaggccctgaagaaggacgtggtgctgatggacgacgacgtggagtgcaccatggtggagaagagagtgctgagcctggcctgggagcaccccttcctgacccacatgttctgcaccttccagaccaaggagaacctgttcttcgtgatggagtacctgaacggcggcgacctgatgtaccacatccagagctgccacaagttcgacctgagcagagccaccttctacgccgccgagatcatcctgggcctgcagttcctgcacagcaagggcatcgtgtacagagacctgaagctggacaacatcctgctggacaaggacggccacatcaagatcgccgacttcggcatgtgcaaggagaacatgctgggcgacgccaagaccaacaccttctgcggcacccccgactacatcgcccccgagatcctgctgggccagaagtacaaccacagcgtggactggtggagcttcggcgtgctgctgtacgagatgctgatcggccagagccccttccacggccaggacgaggaggagctgttccacagcatcagaatggacaaccccttctaccccagatggctggagaaggaggccaaggacctgctggtgaagctgttcgtgagagagcccgagaagagactgggcgtgagaggcgacatcagacagcaccccctgttcagagagatcaactgggaggagctggagagaaaggagatcgacccccccttcagacccaaggtgaagagccccttcgactgcagcaacttcgacaaggagttcctgaacgagaagcccagactgagcttcgccgacagagccctgatcaacagcatggaccagaacatgttcagaaacttcagcttcatgaaccccggcatggagagactgatcagctag

SEQ ID NO: 95132 - DNA, 1746 bp, synthetic construct
  misc_feature 1..1746: note = Description of Artificial Sequence: Synthetic coding sequence
  source 1..1746: mol_type = other DNA
atggacaccaaggacatgaacgagttcgagaccgagggcttcttcgccctgcaccagagaagaggcgccatcaagcaggccaaggtgcaccacgtgaagtgccacgagttcaccgccaccttcttcccccagcccaccttctgcagcgtgtgccacgagttcgtgtggggcctgaacaagcagggctaccagtgcagacagtgcaacgccgccatccacaagaagtgcatcgacaaggtgatcgccaagtgcaccggcagcgccatcaacagcagagagaccatgttccacaaggagagattcaagatcgacatgccccacagattcaaggtgtacaactacaagagccccaccttctgcgagcactgcggcaccctgctgtggggcctggccagacagggcctgaagtgcgacgcctgcggcatgaacgtgcaccacagatgccagaccaaggtggccaacctgtgcggcatcaaccagaagctgatggccgaggccctggccatgatcgagagcacccagcaggccagatgcctgagagacaccgagcagatcttcagagagggccccgtggagatcggcctgccctgcagcatcaagaacgaggccagacccccctgcctgcccacccccggcaagagagagccccagggcatcagctgggagagccccctggacgaggtggacaagatgtgccacctgcccgagcccgagctgaacaaggagagacccagcctgcagatcaagctgaagatcgaggacttcatcctgcacaagatgctgggcaagggcagcttcggcaaggtgttcctggccgagttcaagaagaccaaccagttcttcgccatcaaggccctgaagaaggacgtggtgctgatggacgacgacgtggagtgcaccatggtggagaagagagtgctgagcctggcctgggagcaccccttcctgacccacatgttctgcaccttccagaccaaggagaacctgttcttcgtgatggagtacctgaacggcggcgacctgatgtaccacatccagagctgccacaagttcgacctgagcagagccaccttctacgccgccgagatcatcctgggcctgcagttcctgcacagcaagggcatcgtgtacagagacctgaagctggacaacatcctgctggacaaggacggccacatcaagatcgccgacttcggcatgtgcaaggagaacatgctgggcgacgccaagaccaacaccttctgcggcacccccgactacatcgcccccgagatcctgctgggccagaagtacaaccacagcgtggactggtggagcttcggcgtgctgctgtacgagatgctgatcggccagagccccttccacggccaggacgaggaggagctgttccacagcatcagaatggacaaccccttctaccccagatggctggagaaggaggccaaggacctgctggtgaagctgttcgtgagagagcccgagaagagactgggcgtgagaggcgacatcagacagcaccccctgttcagagagatcaactgggaggagctggagagaaaggagatcgacccccccttcagacccaaggtgaagagccccttcgactgcagcaacttcgacaaggagttcctgaacgagaagcccagactgagcttcgccgacagagccctgatcaacagcatggaccagaacatgttcagaaacttcagcttcatgaaccccggcatggagagactgatcagctag

SEQ ID NO: 95133 - DNA, 1032 bp, synthetic construct
  misc_feature 1..1032: note = Description of Artificial Sequence: Synthetic coding sequence
  source 1..1032: mol_type = other DNA
atggccagcaacagcagcgacgtgaaggagttcctggccaaggccaaggaggacttcctgaagaagtgggagagccccgcccagaacaccgcccacctggaccagttcgagagaatcaagaccctgggcaccggcagcttcggcagagtgatgctggtgaagcacaaggagaccggcaaccactacgccatgaagatcctggacaagcagaaggtggtgaagctgaagcagatcgagcacaccctgaacgagaagagaatcctgcaggccgtgaacttccccttcctggtgaagctggagttcagcttcaaggacaacagcaacctgtacatggtgatggagtacgtgcccggcggcgagatgttcagccacctgagaagaatcggcagattcagcgagccccacgccagattctacgccgcccagatcgtgctgaccttcgagtacctgcacagcctggacctgatctacagagacctgaagcccgagaacctgctgatcgaccagcagggctacatccaggtgaccgacttcggcttcgccaagagagtgaagggcagaacctggaccctgtgcggcacccccgagtacctggcccccgagatcatcctgagcaagggctacaacaaggccgtggactggtgggccctgggcgtgctgatctacgagatggccgccggctacccccccttcttcgccgaccagcccatccagatctacgagaagatcgtgagcggcaaggtgagattccccagccacttcagcagcgacctgaaggacctgctgagaaacctgctgcaggtggacctgaccaagagattcggcaacctgaagaacggcgtgaacgacatcaagaaccacaagtggttcgccaccaccgactggatcgccatctaccagagaaaggtggaggcccccttcatccccaagttcaagggccccggcgacaccagcaacttcgacgactacgaggaggaggagatcagagtgagcatcaacgagaagtgcggcaaggagttcagcgagttctag

SEQ ID NO: 95134 - DNA, 1146 bp, synthetic construct
  misc_feature 1..1146: note = Description of Artificial Sequence: Synthetic coding sequence
  source 1..1146: mol_type = other DNA
atggagagcggcagcaccgccgccagcgaggaggccagaagcctgagagagtgcgagctgtacgtgcagaagcacaacatccaggccctgctgaaggacagcatcgtgcagctgtgcaccgccagacccgagagacccatggccttcctgagagagtacttcgagagactggagaaggaggaggccaagcagatccagaacctgcagaaggccggcaccagaaccgacagcagagaggacgagatcagcccccccccccccaaccccgtggtgaagggcagaagaagaagaggcgccatcagcgccgaggtgtacaccgaggaggacgccgccagctacgtgagaaaggtgatccccaaggactacaagaccatggccgccctggccaaggccatcgagaagaacgtgctgttcagccacctggacgacaacgagagaagcgacatcttcgacgccatgttcagcgtgagcttcatcgccggcgagaccgtgatccagcagggcgacgagggcgacaacttctacgtgatcgaccagggcgagaccgacgtgtacgtgaacaacgagtgggccaccagcgtgggcgagggcggcagcttcggcgagctggccctgatctacggcacccccagagccgccaccgtgaaggccaagaccaacgtgaagctgtggggcatcgacagagacagctacagaagaatcctgatgggcagcaccctgagaaagagaaagatgtacgaggagttcctgagcaaggtgagcatcctggagagcctggacaagtgggagagactgaccgtggccgacgccctggagcccgtgcagttcgaggacggccagaagatcgtggtgcagggcgagcccggcgacgagttcttcatcatcctggagggcagcgccgccgtgctgcagagaagaagcgagaacgaggagttcgtggaggtgggcagactgggccccagcgactacttcggcgagatcgccctgctgatgaacagacccagagccgccaccgtggtggccagaggccccctgaagtgcgtgaagctggacagacccagattcgagagagtgctgggcccctgcagcgacatcctgaagagaaacatccagcagtacaacagcttcgtgagcctgagcgtgtag

SEQ ID NO: 95135 - DNA, 2739 bp, synthetic construct
  misc_feature 1..2739: note = Description of Artificial Sequence: Synthetic coding sequence
  source 1..2739: mol_type = other DNA
atgagcgccccccccgtgctgagaccccccagccccctgctgcccgtggccgccgccgccgccgccgccgccgccgccctggtgcccggcagcggccccggccccgcccccttcctggcccccgtggccgcccccgtgggcggcatcagcttccacctgcagatcggcctgagcagagagcccgtgctgctgctgcaggacagcagcggcgactacagcctggcccacgtgagagagatggcctgcagcatcgtggaccagaagttccccgagtgcggcttctacggcatgtacgacaagatcctgctgttcagacacgaccccaccagcgagaacatcctgcagctggtgaaggccgccagcgacatccaggagggcgacctgatcgaggtggtgctgagcgccagcgccaccttcgaggacttccagatcagaccccacgccctgttcgtgcacagctacagagcccccgccttctgcgaccactgcggcgagatgctgtggggcctggtgagacagggcctgaagtgcgagggctgcggcctgaactaccacaagagatgcgccttcaagatccccaacaactgcagcggcgtgagaagaagaagactgagcaacgtgagcctgaccggcgtgagcaccatcagaaccagcagcgccgagctgagcaccagcgcccccgacgagcccctgctgcagaagagccccagcgagagcttcatcggcagagagaagagaagcaacagccagagctacatcggcagacccatccacctggacaagatcctgatgagcaaggtgaaggtgccccacaccttcgtgatccacagctacaccagacccaccgtgtgccagtactgcaagaagctgctgaagggcctgttcagacagggcctgcagtgcaaggactgcagattcaactgccacaagagatgcgcccccaaggtgcccaacaactgcctgggcgaggtgaccatcaacggcgacctgctgagccccggcgccgagagcgacgtggtgatggaggagggcagcgacgacaacgacagcgagagaaacagcggcctgatggacgacatggaggaggccatggtgcaggacgccgagatggccatggccgagtgccagaacgacagcggcgagatgcaggaccccgaccccgaccacgaggacgccaacagaaccatcagccccagcaccagcaacaacatccccctgatgagagtggtgcagagcgtgaagcacaccaagagaaagagcagcaccgtgatgaaggagggctggatggtgcactacaccagcaaggacaccctgagaaagagacactactggagactggacagcaagtgcatcaccctgttccagaacgacaccggcagcagatactacaaggagatccccctgagcgagatcctgagcctggagcccgtgaagaccagcgccctgatccccaacggcgccaacccccactgcttcgagatcaccaccgccaacgtggtgtactacgtgggcgagaacgtggtgaaccccagcagccccagccccaacaacagcgtgctgaccagcggcgtgggcgccgacgtggccagaatgtgggagatcgccatccagcacgccctgatgcccgtgatccccaagggcagcagcgtgggcaccggcaccaacctgcacagagacatcagcgtgagcatcagcgtgagcaactgccagatccaggagaacgtggacatcagcaccgtgtaccagatcttccccgacgaggtgctgggcagcggccagttcggcatcgtgtacggcggcaagcacagaaagaccggcagagacgtggccatcaagatcatcgacaagctgagattccccaccaagcaggagagccagctgagaaacgaggtggccatcctgcagaacctgcaccaccccggcgtggtgaacctggagtgcatgttcgagacccccgagagagtgttcgtggtgatggagaagctgcacggcgacatgctggagatgatcctgagcagcgagaagggcagactgcccgagcacatcaccaagttcctgatcacccagatcctggtggccctgagacacctgcacttcaagaacatcgtgcactgcgacctgaagcccgagaacgtgctgctggccagcgccgaccccttcccccaggtgaagctgtgcgacttcggcttcgccagaatcatcggcgagaagagcttcagaagaagcgtggtgggcacccccgcctacctggcccccgaggtgctgagaaacaagggctacaacagaagcctggacatgtggagcgtgggcgtgatcatctacgtgagcctgagcggcaccttccccttcaacgaggacgaggacatccacgaccagatccagaacgccgccttcatgtacccccccaacccctggaaggagatcagccacgaggccatcgacctgatcaacaacctgctgcaggtgaagatgagaaagagatacagcgtggacaagaccctgagccacccctggctgcaggactaccagacctggctggacctgagagagctggagtgcaagatcggcgagagatacatcacccacgagagcgacgacctgagatgggagaagtacgccggcgagcagggcctgcagtaccccacccacctgatcaaccccagcgccagccacagcgacacccccgagaccgaggagaccgagatgaaggccctgggcgagagagtgagcatcctgtag

SEQ ID NO: 95136 - DNA, 2637 bp, synthetic construct
  misc_feature 1..2637: note = Description of Artificial Sequence: Synthetic coding sequence
  source 1..2637: mol_type = other DNA
atggccaccgcccccagctaccccgccggcctgcccggcagccccggccccggcagcccccccccccccggcggcctggagctgcagagccccccccccctgctgccccagatccccgcccccggcagcggcgtgagcttccacatccagatcggcctgaccagagagttcgtgctgctgcccgccgccagcgagctggcccacgtgaagcagctggcctgcagcatcgtggaccagaagttccccgagtgcggcttctacggcctgtacgacaagatcctgctgttcaagcacgaccccaccagcgccaacctgctgcagctggtgagaagcagcggcgacatccaggagggcgacctggtggaggtggtgctgagcgccagcgccaccttcgaggacttccagatcagaccccacgccctgaccgtgcacagctacagagcccccgccttctgcgaccactgcggcgagatgctgttcggcctggtgagacagggcctgaagtgcgacggctgcggcctgaactaccacaagagatgcgccttcagcatccccaacaactgcagcggcgccagaaagagaagactgagcagcaccagcctggccagcggccacagcgtgagactgggcaccagcgagagcctgccctgcaccgccgaggagctgagcagaagcaccaccgagctgctgcccagaagaccccccagcagcagcagcagcagcagcgccagcagctacaccggcagacccatcgagctggacaagatgctgctgagcaaggtgaaggtgccccacaccttcctgatccacagctacaccagacccaccgtgtgccaggcctgcaagaagctgctgaagggcctgttcagacagggcctgcagtgcaaggactgcaagttcaactgccacaagagatgcgccaccagagtgcccaacgactgcctgggcgaggccctgatcaacggcgacgtgcccatggaggaggccaccgacttcagcgaggccgacaagagcgccctgatggacgagagcgaggacagcggcgtgatccccggcagccacagcgagaacgccctgcacgccagcgaggaggaggagggcgagggcggcaaggcccagagcagcctgggctacatccccctgatgagagtggtgcagagcgtgagacacaccaccagaaagagcagcaccaccctgagagagggctgggtggtgcactacagcaacaaggacaccctgagaaagagacactactggagactggactgcaagtgcatcaccctgttccagaacaacaccaccaacagatactacaaggagatccccctgagcgagatcctgaccgtggagagcgcccagaacttcagcctggtgccccccggcaccaacccccactgcttcgagatcgtgaccgccaacgccacctacttcgtgggcgagatgcccggcggcacccccggcggccccagcggccagggcgccgaggccgccagaggctgggagaccgccatcagacaggccctgatgcccgtgatcctgcaggacgcccccagcgcccccggccacgccccccacagacaggccagcctgagcatcagcgtgagcaacagccagatccaggagaacgtggacatcgccaccgtgtaccagatcttccccgacgaggtgctgggcagcggccagttcggcgtggtgtacggcggcaagcacagaaagaccggcagagacgtggccgtgaaggtgatcgacaagctgagattccccaccaagcaggagagccagctgagaaacgaggtggccatcctgcagagcctgagacaccccggcatcgtgaacctggagtgcatgttcgagacccccgagaaggtgttcgtggtgatggagaagctgcacggcgacatgctggagatgatcctgagcagcgagaagggcagactgcccgagagactgaccaagttcctgatcacccagatcctggtggccctgagacacctgcacttcaagaacatcgtgcactgcgacctgaagcccgagaacgtgctgctggccagcgccgaccccttcccccaggtgaagctgtgcgacttcggcttcgccagaatcatcggcgagaagagcttcagaagaagcgtggtgggcacccccgcctacctggcccccgaggtgctgctgaaccagggctacaacagaagcctggacatgtggagcgtgggcgtgatcatgtacgtgagcctgagcggcaccttccccttcaacgaggacgaggacatcaacgaccagatccagaacgccgccttcatgtaccccgccagcccctggagccacatcagcgccggcgccatcgacctgatcaacaacctgctgcaggtgaagatgagaaagagatacagcgtggacaagagcctgagccacccctggctgcaggagtaccagacctggctggacctgagagagctggagggcaagatgggcgagagatacatcacccacgagagcgacgacgtgagatgggagcagttcgccgccgagcaccccctgcccggcagcggcctgcccaccgacagagacctgggcggcgcctgccccccccaggaccacgacatgcagggcctggccgagagaatcagcgtgctgtag

SEQ ID NO: 95137 - DNA, 2637 bp, synthetic construct; identical to SEQ ID NO: 95136
  misc_feature 1..2637: note = Description of Artificial Sequence: Synthetic coding sequence
  source 1..2637: mol_type = other DNA

SEQ ID NO: 95138 - DNA, 2166 bp, synthetic construct
  misc_feature 1..2166: note = Description of Artificial Sequence: Synthetic coding sequence
  source 1..2166: mol_type = other DNA
atgctgttcggcctggtgagacagggcctgaagtgcgacggctgcggcctgaactaccacaagagatgcgccttcagcatccccaacaactgcagcggcgccagaaagagaagactgagcagcaccagcctggccagcggccacagcgtgagactgggcaccagcgagagcctgccctgcaccgccgaggagctgagcagaagcaccaccgagctgctgcccagaagaccccccagcagcagcagcagcagcagcgccagcagctacaccggcagacccatcgagctggacaagatgctgctgagcaaggtgaaggtgccccacaccttcctgatccacagctacaccagacccaccgtgtgccaggcctgcaagaagctgctgaagggcctgttcagacagggcctgcagtgcaaggactgcaagttcaactgccacaagagatgcgccaccagagtgcccaacgactgcctgggcgaggccctgatcaacggcgacgtgcccatggaggaggccaccgacttcagcgaggccgacaagagcgccctgatggacgagagcgaggacagcggcgtgatccccggcagccacagcgagaacgccctgcacgccagcgaggaggaggagggcgagggcggcaaggcccagagcagcctgggctacatccccctgatgagagtggtgcagagcgtgagacacaccaccagaaagagcagcaccaccctgagagagggctgggtggtgcactacagcaacaaggacaccctgagaaagagacactactggagactggactgcaagtgcatcaccctgttccagaacaacaccaccaacagatactacaaggagatccccctgagcgagatcctgaccgtggagagcgcccagaacttcagcctggtgccccccggcaccaacccccactgcttcgagatcgtgaccgccaacgccacctacttcgtgggcgagatgcccggcggcacccccggcggccccagcggccagggcgccgaggccgccagaggctgggagaccgccatcagacaggccctgatgcccgtgatcctgcaggacgcccccagcgcccccggccacgccccccacagacaggccagcctgagcatcagcgtgagcaacagccagatccaggagaacgtggacatcgccaccgtgtaccagatcttccccgacgaggtgctgggcagcggccagttcggcgtggtgtacggcggcaagcacagaaagaccggcagagacgtggccgtgaaggtgatcgacaagctgagattccccaccaagcaggagagccagctgagaaacgaggtggccatcctgcagagcctgagacaccccggcatcgtgaacctggagtgcatgttcgagacccccgagaaggtgttcgtggtgatggagaagctgcacggcgacatgctggagatgatcctgagcagcgagaagggcagactgcccgagagactgaccaagttcctgatcacccagatcctggtggccctgagacacctgcacttcaagaacatcgtgcactgcgacctgaagcccgagaacgtgctgctggccagcgccgaccccttcccccaggtgaagctgtgcgacttcggcttcgccagaatcatcggcgagaagagcttcagaagaagcgtggtgggcacccccgcctacctggcccccgaggtgctgctgaaccagggctacaacagaagcctggacatgtggagcgtgggcgtgatcatgtacgtgagcctgagcggcaccttccccttcaacgaggacgaggacatcaacgaccagatccagaacgccgccttcatgtaccccgccagcccctggagccacatcagcgccggcgccatcgacctgatcaacaacctgctgcaggtgaagatgagaaagagatacagcgtggacaagagcctgagccacccctggctgcaggagtaccagacctggctggacctgagagagctggagggcaagatgggcgagagatacatcacccacgagagcgacgacgtgagatgggagcagttcgccgccgagcaccccctgcccggcagcggcctgcccaccgacagagacctgggcggcgcctgccccccccaggaccacgacatgcagggcctggccgagagaatcagcgtgctgtag

SEQ ID NO: 95139 - DNA, 1482 bp, synthetic construct
  misc_feature 1..1482: note = Description of Artificial Sequence: Synthetic coding sequence
  source 1..1482: mol_type = other DNA
atgagaagaagaagagccgccgtggccgccggcttctgcgccagcttcctgctgggcagcgtgctgaacgtgctgttcgcccccggcagcgagccccccagacccggccagagccccgagcccagccccgcccccggccccggcagaagaggcggcagaggcgagctggccagacagatcagagccagatacgaggaggtgcagagatacagcagaggcggccccggccccggcgccggcagacccgagagaagaagactgatggacctggcccccggcggccccggcctgcccagacccagacccccctgggccagacccctgagcgacggcgcccccggctggccccccgcccccggccccggcagccccggccccggccccagactgggctgcgccgccctgagaaacgtgagcggcgcccagtacatgggcagcggctacaccaaggccgtgtacagagtgagactgcccggcggcgccgccgtggccctgaaggccgtggacttcagcggccacgacctgggcagctgcgtgagagagttcggcgtgagaagaggctgctacagactggccgcccacaagctgctgaaggagatggtgctgctggagagactgagacaccccaacgtgctgcagctgtacggctactgctaccaggacagcgaggacatccccgacaccctgaccaccatcaccgagctgggcgcccccgtggagatgatccagctgctgcagaccagctgggaggacagattcagaatctgcctgagcctgggcagactgctgcaccacctggcccacagccccctgggcagcgtgaccctgctggacttcagacccagacagttcgtgctggtggacggcgagctgaaggtgaccgacctggacgacgccagagtggaggagaccccctgcgccggcagcaccgactgcatcctggagttccccgccagaaacttcaccctgccctgcagcgcccagggctggtgcgagggcatgaacgagaagagaaacctgtacaacgcctacagattcttcttcacctacctgctgccccacagcgccccccccagcctgagacccctgctggacagcatcgtgaacgccaccggcgagctggcctggggcgtggacgagaccctggcccagctggagaaggtgctgcacctgtacagaagcggccagtacctgcagaacagcaccgccagcagcagcaccgagtaccagtgcatccccgacagcaccatcccccaggaggactacagatgctggcccagctaccaccacggcagctgcctgctgagcgtgttcaacctggccgaggccgtggacgtgtgcgagagccacgcccagtgcagagccttcgtggtgaccaaccagaccacctggaccggcagacagctggtgttcttcaagaccggctggagccaggtggtgcccgaccccaacaagaccacctacgtgaaggccagcggctag

SEQ ID NO: 95140 - DNA, 2829 bp, synthetic construct
  misc_feature 1..2829: note = Description of Artificial Sequence: Synthetic coding sequence
  source 1..2829: mol_type = other DNA
atggccagcgacgccgtgcagagcgagcccagaagctggagcctgctggagcagctgggcctggccggcgccgacctggccgcccccggcgtgcagcagcagctggagctggagagagagagactgagaagagagatcagaaaggagctgaagctgaaggagggcgccgagaacctgagaagagccaccaccgacctgggcagaagcctgggccccgtggagctgctgctgagaggcagcagcagaagactggacctgctgcaccagcagctgcaggagctgcacgcccacgtggtgctgcccgaccccgccgccacccacgacggcccccagagccccggcgccggcggccccacctgcagcgccaccaacctgagcagagtggccggcctggagaagcagctggccatcgagctgaaggtgaagcagggcgccgagaacatgatccagacctacagcaacggcagcaccaaggacagaaagctgctgctgaccgcccagcagatgctgcaggacagcaagaccaagatcgacatcatcagaatgcagctgagaagagccctgcaggccggccagctggagaaccaggccgcccccgacgacacccagggcagccccgacctgggcgccgtggagctgagaatcgaggagctgagacaccacttcagagtggagcacgccgtggccgagggcgccaagaacgtgctgagactgctgagcgccgccaaggcccccgacagaaaggccgtgagcgaggcccaggagaagctgaccgagagcaaccagaagctgggcctgctgagagaggccctggagagaagactgggcgagctgcccgccgaccaccccaagggcagactgctgagagaggagctggccgccgccagcagcgccgccttcagcaccagactggccggccccttccccgccacccactacagcaccctgtgcaagcccgcccccctgaccggcaccctggaggtgagagtggtgggctgcagagacctgcccgagaccatcccctggaaccccacccccagcatgggcggccccggcacccccgacagcagaccccccttcctgagcagacccgccagaggcctgtacagcagaagcggcagcctgagcggcagaagcagcctgaaggccgaggccgagaacaccagcgaggtgagcaccgtgctgaagctggacaacaccgtggtgggccagaccagctggaagccctgcggccccaacgcctgggaccagagcttcaccctggagctggagagagccagagagctggagctggccgtgttctggagagaccagagaggcctgtgcgccctgaagttcctgaagctggaggacttcctggacaacgagagacacgaggtgcagctggacatggagccccagggctgcctggtggccgaggtgaccttcagaaaccccgtgatcgagagaatccccagactgagaagacagaagaagatcttcagcaagcagcagggcaaggccttccagagagccagacagatgaacatcgacgtggccacctgggtgagactgctgagaagactgatccccaacgccaccggcaccggcaccttcagccccggcgccagccccggcagcgaggccagaaccaccggcgacatcagcgtggagaagctgaacctgggcaccgacagcgacagcagcccccagaagagcagcagagacccccccagcagccccagcagcctgagcagccccatccaggagagcaccgcccccgagctgcccagcgagacccaggagacccccggccccgccctgtgcagccccctgagaaagagccccctgaccctggaggacttcaagttcctggccgtgctgggcagaggccacttcggcaaggtgctgctgagcgagttcagacccagcggcgagctgttcgccatcaaggccctgaagaagggcgacatcgtggccagagacgaggtggagagcctgatgtgcgagaagagaatcctggccgccgtgaccagcgccggccaccccttcctggtgaacctgttcggctgcttccagacccccgagcacgtgtgcttcgtgatggagtacagcgccggcggcgacctgatgctgcacatccacagcgacgtgttcagcgagcccagagccatcttctacagcgcctgcgtggtgctgggcctgcagttcctgcacgagcacaagatcgtgtacagagacctgaagctggacaacctgctgctggacaccgagggctacgtgaagatcgccgacttcggcctgtgcaaggagggcatgggctacggcgacagaaccagcaccttctgcggcacccccgagttcctggcccccgaggtgctgaccgacaccagctacaccagagccgtggactggtggggcctgggcgtgctgctgtacgagatgctggtgggcgagagccccttccccggcgacgacgaggaggaggtgttcgacagcatcgtgaacgacgaggtgagataccccagattcctgagcgccgaggccatcggcatcatgagaagactgctgagaagaaaccccgagagaagactgggcagcagcgagagagacgccgaggacgtgaagaagcagcccttcttcagaaccctgggctgggaggccctgctggccagaagactgcccccccccttcgtgcccaccctgagcggcagaaccgacgtgagcaacttcgacgaggagttcaccggcgaggcccccaccctgagcccccccagagacgccagacccctgaccgccgccgagcaggccgccttcctggacttcgacttcgtggccggcggctgctag

SEQ ID NO: 95141 - DNA, 2847 bp, synthetic construct
  misc_feature 1..2847: note = Description of Artificial Sequence: Synthetic coding sequence
  source 1..2847: mol_type = other DNA
atggccgaggccaacaaccccagcgagcaggagctggagagcgagcccagaagctggagcctgctggagcagctgggcctggccggcgccgacctggccgcccccggcgtgcagcagcagctggagctggagagagagagactgagaagagagatcagaaaggagctgaagctgaaggagggcgccgagaacctgagaagagccaccaccgacctgggcagaagcctgggccccgtggagctgctgctgagaggcagcagcagaagactggacctgctgcaccagcagctgcaggagctgcacgcccacgtggtgctgcccgaccccgccgccacccacgacggcccccagagccccggcgccggcggccccacctgcagcgccaccaacctgagcagagtggccggcctggagaagcagctggccatcgagctgaaggtgaagcagggcgccgagaacatgatccagacctacagcaacggcagcaccaaggacagaaagctgctgctgaccgcccagcagatgctgcaggacagcaagaccaagatcgacatcatcagaatgcagctgagaagagccctgcaggccggccagctggagaaccaggccgcccccgacgacacccagggcagccccgacctgggcgccgtggagctgagaatcgaggagctgagacaccacttcagagtggagcacgccgtggccgagggcgccaagaacgtgctgagactgctgagcgccgccaaggcccccgacagaaaggccgtgagcgaggcccaggagaagctgaccgagagcaaccagaagctgggcctgctgagagaggccctggagagaagactgggcgagctgcccgccgaccaccccaagggcagactgctgagagaggagctggccgccgccagcagcgccgccttcagcaccagactggccggccccttccccgccacccactacagcaccctgtgcaagcccgcccccctgaccggcaccctggaggtgagagtggtgggctgcagagacctgcccgagaccatcccctggaaccccacccccagcatgggcggccccggcacccccgacagcagaccccccttcctgagcagacccgccagaggcctgtacagcagaagcggcagcctgagcggcagaagcagcctgaaggccgaggccgagaacaccagcgaggtgagcaccgtgctgaagctggacaacaccgtggtgggccagaccagctggaagccctgcggccccaacgcctgggaccagagcttcaccctggagctggagagagccagagagctggagctggccgtgttctggagagaccagagaggcctgtgcgccctgaagttcctgaagctggaggacttcctggacaacgagagacacgaggtgcagctggacatggagccccagggctgcctggtggccgaggtgaccttcagaaaccccgtgatcgagagaatccccagactgagaagacagaagaagatcttcagcaagcagcagggcaaggccttccagagagccagacagatgaacatcgacgtggccacctgggtgagactgctgagaagactgatccccaacgccaccggcaccggcaccttcagccccggcgccagccccggcagcgaggccagaaccaccggcgacatcagcgtggagaagctgaacctgggcaccgacagcgacagcagcccccagaagagcagcagagacccccccagcagccccagcagcctgagcagccccatccaggagagcaccgcccccgagctgcccagcgagacccaggagacccccggccccgccctgtgcagccccctgagaaagagccccctgaccctggaggacttcaagttcctggccgtgctgggcagaggccacttcggcaaggtgctgctgagcgagttcagacccagcggcgagctgttcgccatcaaggccctgaagaagggcgacatcgtggccagagacgaggtggagagcctgatgtgcgagaagagaatcctggccgccgtgaccagcgccggccaccccttcctggtgaacctgttcggctgcttccagacccccgagcacgtgtgcttcgtgatggagtacagcgccggcggcgacctgatgctgcacatccacagcgacgtgttcagcgagcccagagccatcttctacagcgcctgcgtggtgctgggcctgcagttcctgcacgagcacaagatcgtgtacagagacctgaagctggacaacctgctgctggacaccgagggctacgtgaagatcgccgacttcggcctgtgcaaggagggcatgggctacggcgacagaaccagcaccttctgcggcacccccgagttcctggcccccgaggtgctgaccgacaccagctacaccagagccgtggactggtggggcctgggcgtgctgctgtacgagatgctggtgggcgagagccccttccccggcgacgacgaggaggaggtgttcgacagcatcgtgaacgacgaggtgagataccccagattcctgagcgccgaggccatcggcatcatgagaagactgctgagaagaaaccccgagagaagactgggcagcagcgagagagacgccgaggacgtgaagaagcagcccttcttcagaaccctgggctgggaggccctgctggccagaagactgcccccccccttcgtgcccaccctgagcggcagaaccgacgtgagcaacttcgacgaggagttcaccggcgaggcccccaccctgagcccccccagagacgccagacccctgaccgccgccgagcaggccgccttcctggacttcgacttcgtggccggcggctgctag

SEQ ID NO: 95142 - DNA, 1815 bp, synthetic construct
  misc_feature 1..1815: note = Description of Artificial Sequence: Synthetic coding sequence
  source 1..1815: mol_type = other DNA
atggccagcaaccccgagagaggcgagatcctgctgaccgagctgcagggcgacagcagaagcctgcccttcagcgagaacgtgagcgccgtgcagaagctggacttcagcgacaccatggtgcagcagaagctggacgacatcaaggacagaatcaagagagagatcagaaaggagctgaagatcaaggagggcgccgagaacctgagaaaggtgaccaccgacaagaagagcctggcctacgtggacaacatcctgaagaagagcaacaagaagctggaggagctgcaccacaagctgcaggagctgaacgcccacatcgtggtgagcgaccccgaggacatcaccgactgccccagaacccccgacacccccaacaacgaccccagatgcagcaccagcaacaacagactgaaggccctgcagaagcagctggacatcgagctgaaggtgaagcagggcgccgagaacatgatccagatgtacagcaacggcagcagcaaggacagaaagctgcacggcaccgcccagcagctgctgcaggacagcaagaccaagatcgaggtgatcagaatgcagatcctgcaggccgtgcagaccaacgagctggccttcgacaacgccaagcccgtgatcagccccctggagctgagaatggaggagctgagacaccacttcagaatcgagttcgccgtggccgagggcgccaagaacgtgatgaagctgctgggcagcggcaaggtgaccgacagaaaggccctgagcgaggcccaggccagattcaacgagagcagccagaagctggacctgctgaagtacagcctggagcagagactgaacgaggtgcccaagaaccaccccaagagcagaatcatcatcgaggagctgagcctggtggccgccagccccaccctgagccccagacagagcatgatcagcacccagaaccagtacagcaccctgagcaagcccgccgccctgaccggcaccctggaggtgagactgatgggctgccaggacatcctggagaacgtgcccggcagaagcaaggccaccagcgtggccctgcccggctggagccccagcgagaccagaagcagcttcatgagcagaaccagcaagagcaagagcggcagcagcagaaacctgctgaagaccgacgacctgagcaacgacgtgtgcgccgtgctgaagctggacaacaccgtggtgggccagaccagctggaagcccatcagcaaccagagctgggaccagaagttcaccctggagctggacagaagcagagagctggagatcagcgtgtactggagagactggagaagcctgtgcgccgtgaagttcctgagactggaggacttcctggacaaccagagacacggcatgtgcctgtacctggagccccagggcaccctgttcgccgaggtgaccttcttcaaccccgtgatcgagagaagacccaagctgcagagacagaagaagatcttcagcaagcagcagggcaagaccttcctgagagccccccagatgaacatcaacatcgccacctggggcagactggtgagaagagccatccccaccgtgaaccacagcggcaccttcagcccccaggcccccgtgcccaccaccgtgcccgtggtggacgtgagaatcccccagctggccccccccgccagatacgtgagcgagatcctgagcatcagctacaccaagctgctgggccacagctacgtgctgatcatcgccggcgtgctgagcctggccttcttccccagcagcatcctgaaggtggtgttctgcctgctgaagaagtag

SEQ ID NO: 95143 - DNA, 2484 bp, synthetic construct
  misc_feature 1..2484: note = Description of Artificial Sequence: Synthetic coding sequence
  source 1..2484: mol_type = other DNA
atgatccagatgtacagcaacggcagcagcaaggacagaaagctgcacggcaccgcccagcagctgctgcaggacagcaagaccaagatcgaggtgatcagaatgcagatcctgcaggccgtgcagaccaacgagctggccttcgacaacgccaagcccgtgatcagccccctggagctgagaatggaggagctgagacaccacttcagaatcgagttcgccgtggccgagggcgccaagaacgtgatgaagctgctgggcagcggcaaggtgaccgacagaaaggccctgagcgaggcccaggccagattcaacgagagcagccagaagctggacctgctgaagtacagcctggagcagagactgaacgaggtgcccaagaaccaccccaagagcagaatcatcatcgaggagctgagcctggtggccgccagccccaccctgagccccagacagagcatgatcagcacccagaaccagtacagcaccctgagcaagcccgccgccctgaccggcaccctggaggtgagactgatgggctgccaggacatcctggagaacgtgcccggcagaagcaaggccaccagcgtggccctgcccggctggagccccagcgagaccagaagcagcttcatgagcagaaccagcaagagcaagagcggcagcagcagaaacctgctgaagaccgacgacctgagcaacgacgtgtgcgccgtgctgaagctggacaacaccgtggtgggccagaccagctggaagcccatcagcaaccagagctgggaccagaagttcaccctggagctggacagaagcagagagctggagatcagcgtgtactggagagactggagaagcctgtgcgccgtgaagttcctgagactggaggacttcctggacaaccagagacacggcatgtgcctgtacctggagccccagggcaccctgttcgccgaggtgaccttcttcaaccccgtgatcgagagaagacccaagctgcagagacagaagaagatcttcagcaagcagcagggcaagaccttcctgagagccccccagatgaacatcaacatcgccacctggggcagactggtgagaagagccatccccaccgtgaaccacagcggcaccttcagcccccaggcccccgtgcccaccaccgtgcccgtggtggacgtgagaatcccccagctggccccccccgccagcgacagcaccgtgaccaagctggacttcgacctggagcccgagcccccccccgccccccccagagccagcagcctgggcgagatcgacgagagcagcgagctgagagtgctggacatccccggccaggacagcgagaccgtgttcgacatccagaacgacagaaacagcatcctgcccaagagccagagcgagtacaagcccgacaccccccagagcggcctggagtacagcggcatccaggagctggaggacagaagaagccagcagagattccagttcaacctgcaggacttcagatgctgcgccgtgctgggcagaggccacttcggcaaggtgctgctggccgagtacaagaacaccaacgagatgttcgccatcaaggccctgaagaagggcgacatcgtggccagagacgaggtggacagcctgatgtgcgagaagagaatcttcgagaccgtgaacagcgtgagacaccccttcctggtgaacctgttcgcctgcttccagaccaaggagcacgtgtgcttcgtgatggagtacgccgccggcggcgacctgatgatgcacatccacaccgacgtgttcagcgagcccagagccgtgttctacgccgcctgcgtggtgctgggcctgcagtacctgcacgagcacaagatcgtgtacagagacctgaagctggacaacctgctgctggacaccgagggcttcgtgaagatcgccgacttcggcctgtgcaaggagggcatgggctacggcgacagaaccagcaccttctgcggcacccccgagttcctggcccccgaggtgctgaccgagaccagctacaccagagccgtggactggtggggcctgggcgtgctgatctacgagatgctggtgggcgagagccccttccccggcgacgacgaggaggaggtgttcgacagcatcgtgaacgacgaggtgagataccccagattcctgagcaccgaggccatcagcatcatgagaagactgctgagaagaaaccccgagagaagactgggcgccagcgagaaggacgccgaggacgtgaagaagcaccccttcttcagactgatcgactggagcgccctgatggacaagaaggtgaagccccccttcatccccaccatcagaggcagagaggacgtgagcaacttcgacgacgagttcaccagcgaggcccccatcctgaccccccccagagagcccagaatcctgagcgaggaggagcaggagatgttcagagacttcgactacatcgccgactggtgctag

SEQ ID NO: 95144 - DNA, 2811 bp, synthetic construct
  misc_feature 1..2811: note = Description of Artificial Sequence: Synthetic coding sequence
  source 1..2811: mol_type = other DNA
atggccagcaaccccgagagaggcgagatcctgctgaccgagctgcagggcgacagcagaagcctgcccttcagcgagaacgtgagcgccgtgcagaagctggacttcagcgacaccatggtgcagcagaagctggacgacatcaaggacagaatcaagagagagatcagaaaggagctgaagatcaaggagggcgccgagaacctgagaaaggtgaccaccgacaagaagagcctggcctacgtggacaacatcctgaagaagagcaacaagaagctggaggagctgcaccacaagctgcaggagctgaacgcccacatcgtggtgagcgaccccgaggacatcaccgactgccccagaacccccgacacccccaacaacgaccccagatgcagcaccagcaacaacagactgaaggccctgcagaagcagctggacatcgagctgaaggtgaagcagggcgccgagaacatgatccagatgtacagcaacggcagcagcaaggacagaaagctgcacggcaccgcccagcagctgctgcaggacagcaagaccaagatcgaggtgatcagaatgcagatcctgcaggccgtgcagaccaacgagctggccttcgacaacgccaagcccgtgatcagccccctggagctgagaatggaggagctgagacaccacttcagaatcgagttcgccgtggccgagggcgccaagaacgtgatgaagctgctgggcagcggcaaggtgaccgacagaaaggccctgagcgaggcccaggccagattcaacgagagcagccagaagctggacctgctgaagtacagcctggagcagagactgaacgaggtgcccaagaaccaccccaagagcagaatcatcatcgaggagctgagcctggtggccgccagccccaccctgagccccagacagagcatgatcagcacccagaaccagtacagcaccctgagcaagcccgccgccctgaccggcaccctggaggtgagactgatgggctgccaggacatcctggagaacgtgcccggcagaagcaaggccaccagcgtggccctgcccggctggagccccagcgagaccagaagcagcttcatgagcagaaccagcaagagcaagagcggcagcagcagaaacctgctgaagaccgacgacctgagcaacgacgtgtgcgccgtgctgaagctggacaacaccgtggtgggccagaccagctggaagcccatcagcaaccagagctgggaccagaagttcaccctggagctggacagagtgaccttcttcaaccccgtgatcgagagaagacccaagctgcagagacagaagaagatcttcagcaagcagcagggcaagaccttcctgagagccccccagatgaacatcaacatcgccacctggggcagactggtgagaagagccatccccaccgtgaaccacagcggcaccttcagcccccaggcccccgtgcccaccaccgtgcccgtggtggacgtgagaatcccccagctggccccccccgccagcgacagcaccgtgaccaagctggacttcgacctggagcccgagcccccccccgccccccccagagccagcagcctgggcgagatcgacgagagcagcgagctgagagtgctggacatccccggccaggacagcgagaccgtgttcgacatccagaacgacagaaacagcatcctgcccaagagccagagcgagtacaagcccgacaccccccagagcggcctggagtacagcggcatccaggagctggaggacagaagaagccagcagagattccagttcaacctgcaggacttcagatgctgcgccgtgctgggcagaggccacttcggcaaggtgctgctggccgagtacaagaacaccaacgagatgttcgccatcaaggccctgaagaagggcgacatcgtggccagagacgaggtggacagcctgatgtgcgagaagagaatcttcgagaccgtgaacagcgtgagacaccccttcctggtgaacctgttcgcctgcttccagaccaaggagcacgtgtgcttcgtgatggagtacgccgccggcggcgacctgatgatgcacatccacaccgacgtgttcagcgagcccagagccgtgttctacgccgcctgcgtggtgctgggcctgcagtacctgcacgagcacaagatcgtgtacagagacctgaagctggacaacctgctgctggacaccgagggcttcgtgaagatcgccgacttcggcctgtgcaaggagggcatgggctacggcgacagaaccagcaccttctgcggcacccccgagttcctggcccccgaggtgctgaccgagaccagctacaccagagccgtggactggtggggcctgggcgtgctgatctacgagatgctggtgggcgagagccccttccccggcgacgacgaggaggaggtgttcgacagcatcgtgaacgacgaggtgagataccccagattcctgagcaccgaggccatcagcatcatgagaagactgctgagaagaaaccccgagagaagactgggcgccagcgagaaggacgccgaggacgtgaagaagcaccccttcttcagactgatcgactggagcgccctgatggacaagaaggtgaagccccccttcatccccaccatcagaggcagagaggacgtgagcaacttcgacgacgagttcaccagcgaggcccccatcctgaccccccccagagagcccagaatcctgagcgaggaggagcaggagatgttcagagacttcgactacatcgccgactggtgctag

SEQ ID NO: 95145 - DNA, 2955 bp, synthetic construct
  misc_feature 1..2955: note = Description of Artificial Sequence: Synthetic coding sequence
  source 1..2955: mol_type = other DNA
atggccagcaaccccgagagaggcgagatcctgctgaccgagctgcagggcgacagcagaagcctgcccttcagcgagaacgtgagcgccgtgcagaagctggacttcagcgacaccatggtgcagcagaagctggacgacatcaaggacagaatcaagagagagatcagaaaggagctgaagatcaaggagggcgccgagaacctgagaaaggtgaccaccgacaagaagagcctggcctacgtggacaacatcctgaagaagagcaacaagaagctggaggagctgcaccacaagctgcaggagctgaacgcccacatcgtggtgagcgaccccgaggacatcaccgactgccccagaacccccgacacccccaacaacgaccccagatgcagcaccagcaacaacagactgaaggccctgcagaagcagctggacatcgagctgaaggtgaagcagggcgccgagaacatgatccagatgtacagcaacggcagcagcaaggacagaaagctgcacggcaccgcccagcagctgctgcaggacagcaagaccaagatcgaggtgatcagaatgcagatcctgcaggccgtgcagaccaacgagctggccttcgacaacgccaagcccgtgatcagccccctggagctgagaatggaggagctgagacaccacttcagaatcgagttcgccgtggccgagggcgccaagaacgtgatgaagctgctgggcagcggcaaggtgaccgacagaaaggccctgagcgaggcccaggccagattcaacgagagcagccagaagctggacctgctgaagtacagcctggagcagagactgaacgaggtgcccaagaaccaccccaagagcagaatcatcatcgaggagctgagcctggtggccgccagccccaccctgagccccagacagagcatgatcagcacccagaaccagtacagcaccctgagcaagcccgccgccctgaccggcaccctggaggtgagactgatgggctgccaggacatcctggagaacgtgcccggcagaagcaaggccaccagcgtggccctgcccggctggagccccagcgagaccagaagcagcttcatgagcagaaccagcaagagcaagagcggcagcagcagaaacctgctgaagaccgacgacctgagcaacgacgtgtgcgccgtgctgaagctggacaacaccgtggtgggccagaccagctggaagcccatcagcaaccagagctgggaccagaagttcaccctggagctggacagaagcagagagctggagatcagcgtgtactggagagactggagaagcctgtgcgccgtgaagttcctgagactggaggacttcctggacaaccagagacacggcatgtgcctgtacctggagccccagggcaccctgttcgccgaggtgaccttcttcaaccccgtgatcgagagaagacccaagctgcagagacagaagaagatcttcagcaagcagcagggcaagaccttcctgagagccccccagatgaacatcaacatcgccacctggggcagactggtgagaagagccatccccaccgtgaaccacagcggcaccttcagcccccaggcccccgtgcccaccaccgtgcccgtggtggacgtgagaatcccccagctggccccccccgccagcgacagcaccgtgaccaagctggacttcgacctggagcccgagcccccccccgccccccccagagccagcagcctgggcgagatcgacgagagcagcgagctgagagtgctggacatccccggccaggacagcgagaccgtgttcgacatccagaacgacagaaacagcatcctgcccaagagccagagcgagtacaagcccgacaccccccagagcggcctggagtacagcggcatccaggagctggaggacagaagaagccagcagagattccagttcaacctgcaggacttcagatgctgcgccgtgctgggcagaggccacttcggcaaggtgctgctggccgagtacaagaacaccaacgagatgttcgccatcaaggccctgaagaagggcgacatcgtggccagagacgaggtggacagcctgatgtgcgagaagagaatcttcgagaccgtgaacagcgtgagacaccccttcctggtgaacctgttcgcctgcttccagaccaaggagcacgtgtgcttcgtgatggagtacgccgccggcggcgacctgatgatgcacatccacaccgacgtgttcagcgagcccagagccgtgttctacgccgcctgcgtggtgctgggcctgcagtacctgcacgagcacaagatcgtgtacagagacctgaagctggacaacctgctgctggacaccgagggcttcgtgaagatcgccgacttcggcctgtgcaaggagggcatgggctacggcgacagaaccagcaccttctgcggcacccccgagttcctggcccccgaggtgctgaccgagaccagctacaccagagccgtggactggtggggcctgggcgtgctgatctacgagatgctggtgggcgagagccccttccccggcgacgacgaggaggaggtgttcgacagcatcgtgaacgacgaggtgagataccccagattcctgagcaccgaggccatcagcatcatgagaagactgctgagaagaaaccccgagagaagactgggcgccagcgagaaggacgccgaggacgtgaagaagcaccccttcttcagactgatcgactggagcgccctgatggacaagaaggtgaagccccccttcatccccaccatcagaggcagagaggacgtgagcaacttcgacgacgagttcaccagcgaggcccccatcctgaccccccccagagagcccagaatcctgagcgaggaggagcaggagatgttcagagacttcgactacatcgccgactggtgctag

SEQ ID NO: 95146 - DNA, 636 bp, synthetic construct
  misc_feature 1..636: note = Description of Artificial Sequence: Synthetic coding sequence
  source 1..636: mol_type = other DNA
tgagaggagctgagacaccacttcagaatcgagttcgccgtggccgagggcgccaagaacgtgatgaagctgctgggcagcggcaaggtgaccgacagaaaggccctgagcgaggcccaggccagattcaacgagagcagccagaagctggacctgctgaagtacagcctggagcagagactgaacgaggtgcccaagaaccaccccaagagcagaatcatcatcgaggagctgagcctggtggccgccagccccaccctgagccccagacagagcatgatcagcacccagaaccagtacagcaccctgagcaagcccgccgccctgaccgacgacgtgtgcgccgtgctgaagctggacaacaccgtggtgggccagaccagctggaagcccatcagcaaccagagctgggaccagaagttcaccctggagctggacagaagcagagagctggagatcagcgtgtactggagagactggagaagcctgtgcgccgtgaagttcctgagactggaggacttcctggacaaccagagacacggcatgtgcctgtacctggagccccagggcaccctgttcgccgaggtgaccttcttcaaccccgtgatcgagagaagacccaagctgcagagatag

SEQ ID NO: 95147 - DNA, 198 bp, synthetic construct
  misc_feature 1..198: note = Description of Artificial Sequence: Synthetic coding sequence
  source 1..198: mol_type = other DNA
tgaggcttcgtgaagatcgccgacttcggcctgtgcaaggagggcatgggctacggcgacagaaccagcaccttctgcggcacccccgagttcctggcccccgaggtgctgaccgagaccagctacaccagagccgtggactggtggggcctgggcgtgctgatctacgagatgctggtgggcgagaccagcgtgtag

SEQ ID NO: 95148 - DNA, 1977 bp, synthetic construct
  misc_feature 1..1977: note = Description of Artificial Sequence: Synthetic coding sequence
  source 1..1977: mol_type = other DNA
atgaacagcaccctggaggtgagactgatgggctgccaggacatcctggagaacgtgcccggcagaagcaaggccaccagcgtggccctgcccggctggagccccagcgagaccagaagcagcttcatgagcagaaccagcaagagcaagagcggcagcagcagaaacctgctgaagaccgacgacctgagcaacgacgtgtgcgccgtgctgaagctggacaacaccgtggtgggccagaccagctggaagcccatcagcaaccagagctgggaccagaagttcaccctggagctggacagaagcagagagctggagatcagcgtgtactggagagactggagaagcctgtgcgccgtgaagttcctgagactggaggacttcctggacaaccagagacacggcatgtgcctgtacctggagccccagggcaccctgttcgccgaggtgaccttcttcaaccccgtgatcgagagaagacccaagctgcagagacagaagaagatcttcagcaagcagcagggcaagaccttcctgagagccccccagatgaacatcaacatcgccacctggggcagactggtgagaagagccatccccaccgtgaaccacagcggcaccttcagcccccaggcccccgtgcccaccaccgtgcccgtggtggacgtgagaatcccccagctggccccccccgccagcgacagcaccgtgaccaagctggacttcgacctggagcccgagcccccccccgccccccccagagccagcagcctgggcgagatcgacgagagcagcgagctgagagtgctggacatccccggccaggacagcgagaccgtgttcgacatccagaacgacagaaacagcatcctgcccaagagccagagcgagtacaagcccgacaccccccagagcggcctggagtacagcggcatccaggagctggaggacagaagaagccagcagagattccagttcaacctgcaggacttcagatgctgcgccgtgctgggcagaggccacttcggcaaggtgctgctggccgagtacaagaacaccaacgagatgttcgccatcaaggccctgaagaagggcgacatcgtggccagagacgaggtggacagcctgatgtgcgagaagagaatcttcgagaccgtgaacagcgtgagacaccccttcctggtgaacctgttcgcctgcttccagaccaaggagcacgtgtgcttcgtgatggagtacgccgccggcggcgacctgatgatgcacatccacaccgacgtgttcagcgagcccagagccgtgttctacgccgcctgcgtggtgctgggcctgcagtacctgcacgagcacaagatcgtgtacagagacctgaagctggacaacctgctgctggacaccgagggcttcgtgaagatcgccgacttcggcctgtgcaaggagggcatgggctacggcgacagaaccagcaccttctgcggcacccccgagttcctggcccccgaggtgctgaccgagaccagctacaccagagccgtggactggtggggcctgggcgtgctgatctacgagatgctggtgggcgagagccccttccccggcgacgacgaggaggaggtgttcgacagcatcgtgaacgacgaggtgagataccccagattcctgagcaccgaggccatcagcatcatgagaagactgctgagaagaaaccccgagagaagactgggcgccagcgagaaggacgccgaggacgtgaagaagcaccccttcttcagactgatcgactggagcgccctgatggacaagaaggtgaagccccccttcatccccaccatcagaggcagagaggacgtgagcaacttcgacgacgagttcaccagcgaggcccccatcctgaccccccccagagagcccagaatcctgagcgaggaggagcaggagatgttcagagacttcgactacatcgccgactggtgctag

SEQ ID NO: 95149 - DNA, 336 bp, synthetic construct
  misc_feature 1..336: note = Description of Artificial Sequence: Synthetic coding sequence
  source 1..336: mol_type = other DNA
atgcacatccacaccgacgtgttcagcgagcccagagccgtgttctacgccgcctgcgtggtgctgggcctgcagtacctgcacgagcacaagatcgtgtacagagacctgaagctggacaacctgctgctggacaccgagggcttcgtgaagatcgccgacttcggcctgtgcaaggagggcatgggctacggcgacagaaccagcaccttctgcggcacccccgagttcctggcccccgaggtgctgaccgagaccagctacaccagagccgtggactggtggggcctgggcgtgctgatctacgagatgctggtgggcgagaccagcgtgtag

SEQ ID NO: 95150 - DNA, 2670 bp, synthetic construct
  misc_feature 1..2670: note = Description of Artificial Sequence: Synthetic coding sequence
  source 1..2670: mol_type = other DNA
atggaggagggcgcccccagacagcccggccccagccagtggccccccgaggacgagaaggaggtgatcagaagagccatccagaaggagctgaagatcaaggagggcgtggagaacctgagaagagtggccaccgacagaagacacctgggccacgtgcagcagctgctgagaagcagcaacagaagactggagcagctgcacggcgagctgagagagctgcacgccagaatcctgctgcccggccccggccccggccccgccgagcccgtggccagcggccccagaccctgggccgagcagctgagagccagacacctggaggccctgagaagacagctgcacgtggagctgaaggtgaagcagggcgccgagaacatgacccacacctgcgccagcggcacccccaaggagagaaagctgctggccgccgcccagcagatgctgagagacagccagctgaaggtggccctgctgagaatgaagatcagcagcctggaggccagcggcagccccgagcccggccccgagctgctggccgaggagctgcagcacagactgcacgtggaggccgccgtggccgagggcgccaagaacgtggtgaagctgctgagcagcagaagaacccaggacagaaaggccctggccgaggcccaggcccagctgcaggagagcagccagaagctggacctgctgagactggccctggagcagctgctggagcagctgccccccgcccaccccctgagaagcagagtgaccagagagctgagagccgccgtgcccggctacccccagcccagcggcacccccgtgaagcccaccgccctgaccggcaccctgcaggtgagactgctgggctgcgagcagctgctgaccgccgtgcccggcagaagccccgccgccgccctggccagcagccccagcgagggctggctgagaaccaaggccaagcaccagagaggcagaggcgagctggccagcgaggtgctggccgtgctgaaggtggacaacagagtggtgggccagaccggctggggccaggtggccgagcagagctgggaccagaccttcgtgatccccctggagagagccagagagctggagatcggcgtgcactggagagactggagacagctgtgcggcgtggccttcctgagactggaggacttcctggacaacgcctgccaccagctgagcctgagcctggtgccccagggcctgctgttcgcccaggtgaccttctgcgaccccgtgatcgagagaagacccagactgcagagacaggagagaatcttcagcaagagaagaggccaggacttcctgagagccagccagatgaacctgggcatggccgcctggggcagactggtgatgaacctgctgcccccctgcagcagccccagcaccatcagcccccccaagggctgccccagaacccccaccaccctgagagaggccagcgaccccgccacccccagcaacttcctgcccaagaagacccccctgggcgaggagatgacccccccccccaagccccccagactgtacctgccccaggagcccaccagcgaggagacccccagaaccaagagaccccacatggagcccagaaccagaagaggccccagcccccccgccagccccaccagaaagccccccagactgcaggacttcagatgcctggccgtgctgggcagaggccacttcggcaaggtgctgctggtgcagttcaagggcaccggcaagtactacgccatcaaggccctgaagaagcaggaggtgctgagcagagacgagatcgagagcctgtactgcgagaagagaatcctggaggccgtgggctgcaccggccaccccttcctgctgagcctgctggcctgcttccagaccagcagccacgcctgcttcgtgaccgagttcgtgcccggcggcgacctgatgatgcagatccacgaggacgtgttccccgagccccaggccagattctacgtggcctgcgtggtgctgggcctgcagttcctgcacgagaagaagatcatctacagagacctgaagctggacaacctgctgctggacgcccagggcttcctgaagatcgccgacttcggcctgtgcaaggagggcatcggcttcggcgacagaaccagcaccttctgcggcacccccgagttcctggcccccgaggtgctgacccaggaggcctacaccagagccgtggactggtggggcctgggcgtgctgctgtacgagatgctggtgggcgagtgccccttccccggcgacaccgaggaggaggtgttcgactgcatcgtgaacatggacgccccctaccccggcttcctgagcgtgcagggcctggagttcatccagaagctgctgcagaagtgccccgagaagagactgggcgccggcgagcaggacgccgaggagatcaaggtgcagcccttcttcagaaccaccaactggcaggccctgctggccagaaccatccagccccccttcgtgcccaccctgtgcggccccgccgacctgagatacttcgagggcgagttcaccggcctgccccccgccctgaccccccccgccccccacagcctgctgaccgccagacagcaggccgccttcagagacttcgacttcgtgagcgagagattcctggagccctag

SEQ ID NO: 95151 - DNA, 1725 bp, synthetic construct
  misc_feature 1..1725: note = Description of Artificial Sequence: Synthetic coding sequence
  source 1..1725: mol_type = other DNA
atgagaagactgagcagctggagaaagatggccaccgccgagaagcagaagcacgacggcagagtgaagatcggccactacatcctgggcgacaccctgggcgtgggcaccttcggcaaggtgaaggtgggcaagcacgagctgaccggccacaaggtggccgtgaagatcctgaacagacagaagatcagaagcctggacgtggtgggcaagatcagaagagagatccagaacctgaagctgttcagacacccccacatcatcaagctgtaccaggtgatcagcacccccagcgacatcttcatggtgatggagtacgtgagcggcggcgagctgttcgactacatctgcaagaacggcagaaagagcgacgtgcccggcgtggtgaagaccggcagcaccaaggagctggacgagaaggagagcagaagactgttccagcagatcctgagcggcgtggactactgccacagacacatggtggtgcacagagacctgaagcccgagaacgtgctgctggacgcccacatgaacgccaagatcgccgacttcggcctgagcaacatgatgagcgacggcgagttcctgagaaccagctgcggcagccccaactacgccgcccccgaggtgatcagcggcagactgtacgccggccccgaggtggacatctggagcagcggcgtgatcctgtacgccctgctgtgcggcaccctgcccttcgacgacgaccacgtgcccaccctgttcaagaagatctgcgacggcatcttctacaccccccagtacctgaaccccagcgtgatcagcctgctgaagcacatgctgcaggtggaccccatgaagagagccaccatcaaggacatcagagagcacgagtggttcaagcaggacctgcccaagtacctgttccccgaggaccccagctacagcagcaccatgatcgacgacgaggccctgaaggaggtgtgcgagaagttcgagtgcagcgaggaggaggtgctgagctgcctgtacaacagaaaccaccaggaccccctggccgtggcctaccacctgatcatcgacaacagaagaatcatgaacgaggccaaggacttctacctggccaccagcccccccgacagcttcctggacgaccaccacctgaccagaccccaccccgagagagtgcccttcctggtggccgagacccccagagccagacacaccctggacgagctgaacccccagaagagcaagcaccagggcgtgagaaaggccaagtggcacctgggcatcagaagccagagcagacccaacgacatcatggccgaggtgtgcagagccatcaagcagctggactacgagtggaaggtggtgaacccctactacctgagagtgagaagaaagaaccccgtgaccagcacctacagcaagatgagcctgcagctgtaccaggtggacagcagaacctacctgctggacttcagaagcatcgacgacgagatcaccgaggccaagagcggcaccgccaccccccagagaagcggcagcgtgagcaactacagaagctgccagagaagcgacagcgacgccgaggcccagggcaagagcagcgaggtgagcctgaccagcagcgtgaccagcctggacagcagccccgtggacctgacccccagacccggcagccacaccatcgagttcttcgagatgtgcgccaacctgatcaagatcctggcccagtag

SEQ ID NO: 95152 - DNA, 1680 bp, synthetic construct
  misc_feature 1..1680: note = Description of Artificial Sequence: Synthetic coding sequence
  source 1..1680: mol_type = other DNA
atgagaagactgagcagctggagaaagatggccaccgccgagaagcagaagcacgacggcagagtgaagatcggccactacatcctgggcgacaccctgggcgtgggcaccttcggcaaggtgaaggtgggcaagcacgagctgaccggccacaaggtggccgtgaagatcctgaacagacagaagatcagaagcctggacgtggtgggcaagatcagaagagagatccagaacctgaagctgttcagacacccccacatcatcaagctgtaccaggtgatcagcacccccagcgacatcttcatggtgatggagtacgtgagcggcggcgagctgttcgactacatctgcaagaacggcagactggacgagaaggagagcagaagactgttccagcagatcctgagcggcgtggactactgccacagacacatggtggtgcacagagacctgaagcccgagaacgtgctgctggacgcccacatgaacgccaagatcgccgacttcggcctgagcaacatgatgagcgacggcgagttcctgagaaccagctgcggcagccccaactacgccgcccccgaggtgatcagcggcagactgtacgccggccccgaggtggacatctggagcagcggcgtgatcctgtacgccctgctgtgcggcaccctgcccttcgacgacgaccacgtgcccaccctgttcaagaagatctgcgacggcatcttctacaccccccagtacctgaaccccagcgtgatcagcctgctgaagcacatgctgcaggtggaccccatgaagagagccaccatcaaggacatcagagagcacgagtggttcaagcaggacctgcccaagtacctgttccccgaggaccccagctacagcagcaccatgatcgacgacgaggccctgaaggaggtgtgcgagaagttcgagtgcagcgaggaggaggtgctgagctgcctgtacaacagaaaccaccaggaccccctggccgtggcctaccacctgatcatcgacaacagaagaatcatgaacgaggccaaggacttctacctggccaccagcccccccgacagcttcctggacgaccaccacctgaccagaccccaccccgagagagtgcccttcctggtggccgagacccccagagccagacacaccctggacgagctgaacccccagaagagcaagcaccagggcgtgagaaaggccaagtggcacctgggcatcagaagccagagcagacccaacgacatcatggccgaggtgtgcagagccatcaagcagctggactacgagtggaaggtggtgaacccctactacctgagagtgagaagaaagaaccccgtgaccagcacctacagcaagatgagcctgcagctgtaccaggtggacagcagaacctacctgctggacttcagaagcatcgacgacgagatcaccgaggccaagagcggcaccgccaccccccagagaagcggcagcgtgagcaactacagaagctgccagagaagcgacagcgacgccgaggcccagggcaagagcagcgaggtgagcctgaccagcagcgtgaccagcctggacagcagccccgtggacctgacccccagacccggcagccacaccatcgagttcttcgagatgtgcgccaacctgatcaagatcctggcccagtag

SEQ ID NO: 95153 - DNA, 1659 bp, synthetic construct
  misc_feature 1..1659: note = Description of Artificial Sequence: Synthetic coding sequence
  source 1..1659: mol_type = other DNA
atggccgagaagcagaagcacgacggcagagtgaagatcggccactacgtgctgggcgacaccctgggcgtgggcaccttcggcaaggtgaagatcggcgagcaccagctgaccggccacaaggtggccgtgaagatcctgaacagacagaagatcagaagcctggacgtggtgggcaagatcaagagagagatccagaacctgaagctgttcagacacccccacatcatcaagctgtaccaggtgatcagcacccccaccgacttcttcatggtgatggagtacgtgagcggcggcgagctgttcgactacatctgcaagcacggcagagtggaggagatggaggccagaagactgttccagcagatcctgagcgccgtggactactgccacagacacatggtggtgcacagagacctgaagcccgagaacgtgctgctggacgcccacatgaacgccaagatcgccgacttcggcctgagcaacatgatgagcgacggcgagttcctgagaaccagctgcggcagccccaactacgccgcccccgaggtgatcagcggcagactgtacgccggccccgaggtggacatctggagctgcggcgtgatcctgtacgccctgctgtgcggcaccctgcccttcgacgacgagcacgtgcccaccctgttcaagaagatcagaggcggcgtgttctacatccccgagtacctgaacagaagcgtggccaccctgctgatgcacatgctgcaggtggaccccctgaagagagccaccatcaaggacatcagagagcacgagtggttcaagcaggacctgcccagctacctgttccccgaggaccccagctacgacgccaacgtgatcgacgacgaggccgtgaaggaggtgtgcgagaagttcgagtgcaccgagagcgaggtgatgaacagcctgtacagcggcgacccccaggaccagctggccgtggcctaccacctgatcatcgacaacagaagaatcatgaaccaggccagcgagttctacctggccagcagcccccccagcggcagcttcatggacgacagcgccatgcacatcccccccggcctgaagccccaccccgagagaatgccccccctgatcgccgacagccccaaggccagatgccccctggacgccctgaacaccaccaagcccaagagcctggccgtgaagaaggccaagtggcacctgggcatcagaagccagagcaagccctacgacatcatggccgaggtgtacagagccatgaagcagctggacttcgagtggaaggtggtgaacgcctaccacctgagagtgagaagaaagaaccccgtgaccggcaactacgtgaagatgagcctgcagctgtacctggtggacaacagaagctacctgctggacttcaagagcatcgacgacgaggtggtggagcagagaagcggcagcagcaccccccagagaagctgcagcgccgccggcctgcacagacccagaagcagcttcgacagcaccaccgccgagagccacagcctgagcggcagcctgaccggcagcctgaccggcagcaccctgagcagcgtgagccccagactgggcagccacaccatggacttcttcgagatgtgcgccagcctgatcaccaccctggccagatag

SEQ ID NO: 95154 - DNA, 744 bp, synthetic construct
  misc_feature 1..744: note = Description of Artificial Sequence: Synthetic coding sequence
  source 1..744: mol_type = other DNA
atgctgaccatcaccgacttcatcaacatcctgcacagatactacaagagcgccctggtgcagatctacgagctggaggagcacaagatcgagacctggagagaggtgtacctgcaggacagcttcaagcccctggtgtgcatcagccccaacgccagcctgttcgacgccgtgagcagcctgatcagaaacaagatccacagactgcccgtgatcgaccccgagagcggcaacaccctgtacatcctgacccacaagagaatcctgaagttcctgaagctgttcatcaccgagttccccaagcccgagttcatgagcaagagcctggaggagctgcagatcggcacctacgccaacatcgccatggtgagaaccaccacccccgtgtacgtggccctgggcatcttcgtgcagcacagagtgagcgccctgcccgtggtggacgagaagggcagagtggtggacatctacagcaagttcgacgtgatcaacctggccgccgagaagacctacaacaacctggacgtgagcgtgaccaaggccctgcagcacagaagccactacttcgagggcgtgctgaagtgctacctgcacgagaccctggagaccatcatcaacagactggtggaggccgaggtgcacagactggtggtggtggacgagaacgacgtggtgaagggcatcgtgagcctgagcgacatcctgcaggccctggtgctgaccggcggcgagaagaagccctag

SEQ ID NO: 95155 - DNA, 996 bp, synthetic construct
  misc_feature 1..996: note = Description of Artificial Sequence: Synthetic coding sequence
  source 1..996: mol_type = other DNA
atggagaccgtgatcagcagcgacagcagccccgccgtggagaacgagcacccccaggagacccccgagagcaacaacagcgtgtacaccagcttcatgaagagccacagatgctacgacctgatccccaccagcagcaagctggtggtgttcgacaccagcctgcaggtgaagaaggccttcttcgccctggtgaccaacggcgtgagagccgcccccctgtgggacagcaagaagcagagcttcgtgggcatgctgaccatcaccgacttcatcaacatcctgcacagatactacaagagcgccctggtgcagatctacgagctggaggagcacaagatcgagacctggagagaggtgtacctgcaggacagcttcaagcccctggtgtgcatcagccccaacgccagcctgttcgacgccgtgagcagcctgatcagaaacaagatccacagactgcccgtgatcgaccccgagagcggcaacaccctgtacatcctgacccacaagagaatcctgaagttcctgaagctgttcatcaccgagttccccaagcccgagttcatgagcaagagcctggaggagctgcagatcggcacctacgccaacatcgccatggtgagaaccaccacccccgtgtacgtggccctgggcatcttcgtgcagcacagagtgagcgccctgcccgtggtggacgagaagggcagagtggtggacatctacagcaagttcgacgtgatcaacctggccgccgagaagacctacaacaacctggacgtgagcgtgaccaaggccctgcagcacagaagccactacttcgagggcgtgctgaagtgctacctgcacgagaccctggagaccatcatcaacagactggtggaggccgaggtgcacagactggtggtggtggacgagaacgacgtggtgaagggcatcgtgagcctgagcgacatcctgcaggccctggtgctgaccggcggcgagaagaagccctag

SEQ ID NO: 95156 - DNA, 1710 bp, synthetic construct
  misc_feature 1..1710: note = Description of Artificial Sequence: Synthetic coding sequence
  source 1..1710: mol_type = other DNA
atgggcagcgccgtgatggacaccaagaagaagaaggacgtgagcagccccggcggcagcggcggcaagaagaacgccagccagaagagaagaagcctgagagtgcacatccccgacctgagcagcttcgccatgcccctgctggacggcgacctggagggcagcggcaagcacagcagcagaaaggtggacagccccttcggccccggcagccccagcaagggcttcttcagcagaggcccccagcccagacccagcagccccatgagcgcccccgtgagacccaagaccagccccggcagccccaagaccgtgttccccttcagctaccaggagagcccccccagaagccccagaagaatgagcttcagcggcatcttcagaagcagcagcaaggagagcagccccaacagcaaccccgccaccagccccggcggcatcagattcttcagcagaagcagaaagaccagcggcctgagcagcagccccagcacccccacccaggtgaccaagcagcacaccttccccctggagagctacaagcacgagcccgagagactggagaacagaatctacgccagcagcagcccccccgacaccggccagagattctgccccagcagcttccagagccccaccagaccccccctggccagccccacccactacgcccccagcaaggccgccgccctggccgccgccctgggccccgccgaggccggcatgctggagaagctggagttcgaggacgaggccgtggaggacagcgagagcggcgtgtacatgagattcatgagaagccacaagtgctacgacatcgtgcccaccagcagcaagctggtggtgttcgacaccaccctgcaggtgaagaaggccttcttcgccctggtggccaacggcgtgagagccgcccccctgtgggagagcaagaagcagagcttcgtgggcatgctgaccatcaccgacttcatcaacatcctgcacagatactacaagagccccatggtgcagatctacgagctggaggagcacaagatcgagacctggagagagctgtacctgcaggagaccttcaagcccctggtgaacatcagccccgacgccagcctgttcgacgccgtgtacagcctgatcaagaacaagatccacagactgcccgtgatcgaccccatcagcggcaacgccctgtacatcctgacccacaagagaatcctgaagttcctgcagctgttcatgagcgacatgcccaagcccgccttcatgaagcagaacctggacgagctgggcatcggcacctaccacaacatcgccttcatccaccccgacacccccatcatcaaggccctgaacatcttcgtggagagaagaatcagcgccctgcccgtggtggacgagagcggcaaggtggtggacatctacagcaagttcgacgtgatcaacctggccgccgagaagacctacaacaacctggacatcaccgtgacccaggccctgcagcacagaagccagtacttcgagggcgtggtgaagtgcaacaagctggagatcctggagaccatcgtggacagaatcgtgagagccgaggtgcacagactggtggtggtgaacgaggccgacagcatcgtgggcatcatcagcctgagcgacatcctgcaggccctgatcctgacccccgccggcgccaagcagaaggagaccgagaccgagtag

SEQ ID NO: 95157 - DNA, 1335 bp, synthetic construct
  misc_feature 1..1335: note = Description of Artificial Sequence: Synthetic coding sequence
  source 1..1335: mol_type = other DNA
atgaagagattcggcagcctgagaagcaacaagaagcacaaggaccagaacagaagcaccgagagaagacagagcgagccccacggcctgttcgccagcggcctgagcagcagccccagcacccccacccaggtgaccaagcagcacaccttccccctggagagctacaagcacgagcccgagagactggagaacagaatctacgccagcagcagcccccccgacaccggccagagattctgccccagcagcttccagagccccaccagaccccccctggccagccccacccactacgcccccagcaaggccgccgccctggccgccgccctgggccccgccgaggccggcatgctggagaagctggagttcgaggacgaggtggaggacagcgagagcggcgtgtacatgagattcatgagaagccacaagtgctacgacatcgtgcccaccagcagcaagctggtggtgttcgacaccaccctgcaggtgaagaaggccttcttcgccctggtggccaacggcgtgagagccgcccccctgtgggagagcaagaagcagagcttcgtgggcatgctgaccatcaccgacttcatcaacatcctgcacagatactacaagagccccatggtgcagatctacgagctggaggagcacaagatcgagacctggagagagctgtacctgcaggagaccttcaagcccctggtgaacatcagccccgacgccagcctgttcgacgccgtgtacagcctgatcaagaacaagatccacagactgcccgtgatcgaccccatcagcggcaacgccctgtacatcctgacccacaagagaatcctgaagttcctgcagctgttcatgagcgacatgcccaagcccgccttcatgaagcagaacctggacgagctgggcatcggcacctaccacaacatcgccttcatccaccccgacacccccatcatcaaggccctgaacatcttcgtggagagaagaatcagcgccctgcccgtggtggacgagagcggcaaggtggtggacatctacagcaagttcgacgtgatcaacctggccgccgagaagacctacaacaacctggacatcaccgtgacccaggccctgcagcacagaagccagtacttcgagggcgtggtgaagtgcaacaagctggagatcctggagaccatcgtggacagaatcgtgagagccgaggtgcacagactggtggtggtgaacgaggccgacagcatcgtgggcatcatcagcctgagcgacatcctgcaggccctgatcctgacccccgccggcgccaagcagaaggagaccgagaccgagtag

SEQ ID NO: 95158 - DNA, 309 bp, synthetic construct
  misc_feature 1..309: note = Description of Artificial Sequence: Synthetic coding sequence
  source 1..309: mol_type = other DNA
atggccggccaggccttcagaaagttcctgcccctgttcgacagagtgctggtggagagaagcgccgccgagaccgtgaccaagggcggcatcatgctgcccgagaagagccagggcaaggtgctgcaggccaccgtggtggccgtgggcagcggcagcaagggcaagggcggcgagatccagcccgtgagcgtgaaggtgggcgacaaggtgctgctgcccgagtacggcggcaccaaggtggtgctggacgacaaggactacttcctgttcagagacggcgacatcctgggcaagtacgtggactag

SEQ ID NO: 95159 - DNA, 1062 bp, synthetic construct
  misc_feature 1..1062: note = Description of Artificial Sequence: Synthetic coding sequence
  source 1..1062: mol_type = other DNA
atggagcccggcctggagcacgccctgagaagaacccccagctggagcagcctgggcggcagcgagcaccaggagatgagcttcctggagcaggagaacagcagcagctggcccagccccgccgtgaccagcagcagcgagagaatcagaggcaagagaagagccaaggccctgagatggaccagacagaagagcgtggaggagggcgagccccccggccagggcgagggccccagaagcagacccgccgccgagagcaccggcctggaggccaccttccccaagaccacccccctggcccaggccgaccccgccggcgtgggcaccccccccaccggctgggactgcctgcccagcgactgcaccgccagcgccgccggcagcagcaccgacgacgtggagctggccaccgagttccccgccaccgaggcctgggagtgcgagctggagggcctgctggaggagagacccgccctgtgcctgagcccccaggcccccttccccaagctgggctgggacgacgagctgagaaagcccggcgcccagatctacatgagattcatgcaggagcacacctgctacgacgccatggccaccagcagcaagctggtgatcttcgacaccatgctggagatcaagaaggccttcttcgccctggtggccaacggcgtgagagccgcccccctgtgggacagcaagaagcagagcttcgtgggcatgctgaccatcaccgacttcatcctggtgctgcacagatactacagaagccccctgagaagcacctgcaaggccgccagcagcctgtggagccccagcctgctgatgatcgcctgcctgaagctgagcacccccagcagcagaaccggcagcatcgcctgcctgttcctgaccagatgccaggccacctacagcaccagcagccacaccaacgcctgcagcagcagctgcaccagcctggtgccctgctgccccggcccccccagcagcaccgccctgagcaagatctgggccagcgcccacagcgagacctggctgtggtgctggagacagcaccccagctag

SEQ ID NO: 95160 - DNA, 1395 bp, synthetic construct
  misc_feature 1..1395: note = Description of Artificial Sequence: Synthetic coding sequence
  source 1..1395: mol_type = other DNA
atgagcttcctggagcaggagaacagcagcagctggcccagccccgccgtgaccagcagcagcgagagaatcagaggcaagagaagagccaaggccctgagatggaccagacagaagagcgtggaggagggcgagccccccggccagggcgagggccccagaagcagacccgccgccgagagcaccggcctggaggccaccttccccaagaccacccccctggcccaggccgaccccgccggcgtgggcaccccccccaccggctgggactgcctgcccagcgactgcaccgccagcgccgccggcagcagcaccgacgacgtggagctggccaccgagttccccgccaccgaggcctgggagtgcgagctggagggcctgctggaggagagacccgccctgtgcctgagcccccaggcccccttccccaagctgggctgggacgacgagctgagaaagcccggcgcccagatctacatgagattcatgcaggagcacacctgctacgacgccatggccaccagcagcaagctggtgatcttcgacaccatgctggagatcaagaaggccttcttcgccctggtggccaacggcgtgagagccgcccccctgtgggacagcaagaagcagagcttcgtgggcatgctgaccatcaccgacttcatcctggtgctgcacagatactacagaagccccctggtgcagatctacgagatcgagcagcacaagatcgagacctggagagagatctacctgcagggctgcttcaagcccctggtgagcatcagccccaacgacagcctgttcgaggccgtgtacaccctgatcaagaacagaatccacagactgcccgtgctggaccccgtgagcggcaacgtgctgcacatcctgacccacaagagactgctgaagttcctgcacatcttcggcagcctgctgcccagacccagcttcctgtacagaaccatccaggacctgggcatcggcaccttcagagacctggccgtggtgctggagaccgcccccatcctgaccgccctggacatcttcgtggacagaagagtgagcgccctgcccgtggtgaacgagtgcggccaggtggtgggcctgtacagcagattcgacgtgatccacctggccgcccagcagacctacaaccacctggacatgagcgtgggcgaggccctgagacagagaaccctgtgcctggagggcgtgctgagctgccagccccacgagagcctgggcgaggtgatcgacagaatcgccagagagcaggtgcacagactggtgctggtggacgagacccagcacctgctgggcgtggtgagcctgagcgacatcctgcaggccctggtgctgagccccgccggcatcgacgccctgggcgcctag

SEQ ID NO: 95161 - DNA, 1470 bp, synthetic construct
  misc_feature 1..1470: note = Description of Artificial Sequence: Synthetic coding sequence
  source 1..1470: mol_type = other DNA
atggagcccggcctggagcacgccctgagaagaacccccagctggagcagcctgggcggcagcgagcaccaggagatgagcttcctggagcaggagaacagcagcagctggcccagccccgccgtgaccagcagcagcgagagaatcagaggcaagagaagagccaaggccctgagatggaccagacagaagagcgtggaggagggcgagccccccggccagggcgagggccccagaagcagacccgccgccgagagcaccggcctggaggccaccttccccaagaccacccccctggcccaggccgaccccgccggcgtgggcaccccccccaccggctgggactgcctgcccagcgactgcaccgccagcgccgccggcagcagcaccgacgacgtggagctggccaccgagttccccgccaccgaggcctgggagtgcgagctggagggcctgctggaggagagacccgccctgtgcctgagcccccaggcccccttccccaagctgggctgggacgacgagctgagaaagcccggcgcccagatctacatgagattcatgcaggagcacacctgctacgacgccatggccaccagcagcaagctggtgatcttcgacaccatgctggagatcaagaaggccttcttcgccctggtggccaacggcgtgagagccgcccccctgtgggacagcaagaagcagagcttcgtgggcatgctgaccatcaccgacttcatcctggtgctgcacagatactacagaagccccctggtgcagatctacgagatcgagcagcacaagatcgagacctggagagagatctacctgcagggctgcttcaagcccctggtgagcatcagccccaacgacagcctgttcgaggccgtgtacaccctgatcaagaacagaatccacagactgcccgtgctggaccccgtgagcggcaacgtgctgcacatcctgacccacaagagactgctgaagttcctgcacatcttcggcagcctgctgcccagacccagcttcctgtacagaaccatccaggacctgggcatcggcaccttcagagacctggccgtggtgctggagaccgcccccatcctgaccgccctggacatcttcgtggacagaagagtgagcgccctgcccgtggtgaacgagtgcggccaggtggtgggcctgtacagcagattcgacgtgatccacctggccgcccagcagacctacaaccacctggacatgagcgtgggcgaggccctgagacagagaaccctgtgcctggagggcgtgctgagctgccagccccacgagagcctgggcgaggtgatcgacagaatcgccagagagcaggtgcacagactggtgctggtggacgagacccagcacctgctgggcgtggtgagcctgagcgacatcctgcaggccctggtgctgagccccgccggcatcgacgccctgggcgcctag

SEQ ID NO: 95162 - DNA, 918 bp, synthetic construct
  misc_feature 1..918: note = Description of Artificial Sequence: Synthetic coding sequence
  source 1..918: mol_type = other DNA
atgagattcatgcaggagcacacctgctacgacgccatggccaccagcagcaagctggtgatcttcgacaccatgctggagatcaagaaggccttcttcgccctggtggccaacggcgtgagagccgcccccctgtgggacagcaagaagcagagcttcgtgggcatgctgaccatcaccgacttcatcctggtgctgcacagatactacagaagccccctggtgcagatctacgagatcgagcagcacaagatcgagacctggagagagatctacctgcagggctgcttcaagcccctggtgagcatcagccccaacgacagcctgttcgaggccgtgtacaccctgatcaagaacagaatccacagactgcccgtgctggaccccgtgagcggcaacgtgctgcacatcctgacccacaagagactgctgaagttcctgcacatcttcggcagcctgctgcccagacccagcttcctgtacagaaccatccaggacctgggcatcggcaccttcagagacctggccgtggtgctggagaccgcccccatcctgaccgccctggacatcttcgtggacagaagagtgagcgccctgcccgtggtgaacgagtgcggccaggtggtgggcctgtacagcagattcgacgtgatccacctggccgcccagcagacctacaaccacctggacatgagcgtgggcgaggccctgagacagagaaccctgtgcctggagggcgtgctgagctgccagccccacgagagcctgggcgaggtgatcgacagaatcgccagagagcaggtgcacagactggtgctggtggacgagacccagcacctgctgggcgtggtgagcctgagcgacatcctgcaggccctggtgctgagccccgccggcatcgacgccctgggcgcctag

SEQ ID NO: 95163 - DNA, 1056 bp, synthetic construct
  misc_feature 1..1056: note = Description of Artificial Sequence: Synthetic coding sequence
  source 1..1056: mol_type = other DNA
atgggcaacgccgccgccgccaagaagggcagcgagcaggagagcgtgaaggagttcctggccaaggccaaggaggacttcctgaagaagtgggagagccccgcccagaacaccgcccacctggaccagttcgagagaatcaagaccctgggcaccggcagcttcggcagagtgatgctggtgaagcacaaggagaccggcaaccactacgccatgaagatcctggacaagcagaaggtggtgaagctgaagcagatcgagcacaccctgaacgagaagagaatcctgcaggccgtgaacttccccttcctggtgaagctggagttcagcttcaaggacaacagcaacctgtacatggtgatggagtacgtgcccggcggcgagatgttcagccacctgagaagaatcggcagattcagcgagccccacgccagattctacgccgcccagatcgtgctgaccttcgagtacctgcacagcctggacctgatctacagagacctgaagcccgagaacctgctgatcgaccagcagggctacatccaggtgaccgacttcggcttcgccaagagagtgaagggcagaacctggaccctgtgcggcacccccgagtacctggcccccgagatcatcctgagcaagggctacaacaaggccgtggactggtgggccctgggcgtgctgatctacgagatggccgccggctacccccccttcttcgccgaccagcccatccagatctacgagaagatcgtgagcggcaaggtgagattccccagccacttcagcagcgacctgaaggacctgctgagaaacctgctgcaggtggacctgaccaagagattcggcaacctgaagaacggcgtgaacgacatcaagaaccacaagtggttcgccaccaccgactggatcgccatctaccagagaaaggtggaggcccccttcatccccaagttcaagggccccggcgacaccagcaacttcgacgactacgaggaggaggagatcagagtgagcatcaacgagaagtgcggcaaggagttcagcgagttctag

SEQ ID NO: 95164 - DNA, 1032 bp, synthetic construct; identical to SEQ ID NO: 95133
  misc_feature 1..1032: note = Description of Artificial Sequence: Synthetic coding sequence
  source 1..1032: mol_type = other DNA

SEQ ID NO: 95165 - DNA, 1056 bp, synthetic construct; identical to SEQ ID NO: 95163
  misc_feature 1..1056: note = Description of Artificial Sequence: Synthetic coding sequence
  source 1..1056: mol_type = other DNA

SEQ ID NO: 95166 - DNA, 693 bp, synthetic construct
  misc_feature 1..693: note = Description of Artificial Sequence: Synthetic coding sequence
  source 1..693: mol_type = other DNA
atgctggtgaagcacaaggagaccggcaaccactacgccatgaagatcctggacaagcagaaggtggtgaagctgaagcagatcgagcacaccctgaacgagaagagaatcctgcaggccgtgaacttccccttcctggtgaagctggagttcagcttcaaggacaacagcaacctgtacatggtgatggagtacgtgcccggcggcgagatgttcagccacctgagaagaatcggcagattcagcgagccccacgccagattctacgccgcccagatcgtgctgaccttcgagtacctgcacagcctggacctgatctacagagacctgaagcccgagaacctgctgatcgaccagcagggctacatccaggtgaccgacttcggcttcgccaagagagtgaagggcagaacctggaccctgtgcggcacccccgagtacctggcccccgagatcatcctgagcaagggctacaacaaggccgtggactggtgggccctgggcgtgctgatctacgagatggccgccggctacccccccttcttcgccgaccagcccatccagatctacgagaagatcgtgagcggcaaggtgagaagcggctgcggcgacaccgccctggaggagaccgacagaagcctgctgacccaccccatcccctggggcgccctgctggtggtgagaatcatctag

SEQ ID NO: 95167 - DNA, 1074 bp, synthetic construct
  misc_feature 1..1074: note = Description of Artificial Sequence: Synthetic coding sequence
  source 1..1074: mol_type = other DNA
atgggcctgagcagaaagagcagcgacgccagcgcctgcagcagcagcgagatcagcgacttcgtgaaggagttcctggccaaggccaaggaggacttcctgaagaagtgggagaaccccacccagaacaacgccggcctggaggacttcgagagaaagaagaccctgggcaccggcagcttcggcagagtgatgctggtgaagcacaaggccaccgagcagtactacgccatgaagatcctggacaagcagaaggtggtgaagctgaagcagatcgagcacaccctgaacgagaagagaatcctgcaggccgtgaacttccccttcctggtgagactggagtacgccttcaaggacaacagcaacctgtacatggtgatggagtacgtgcccggcggcgagatgttcagccacctgagaagaatcggcagattcagcgagccccacgccagattctacgccgcccagatcgtgctgaccttcgagtacctgcacagcctggacctgatctacagagacctgaagcccgagaacctgctgatcgaccaccagggctacatccaggtgaccgacttcggcttcgccaagagagtgaagggcagaacctggaccctgtgcggcacccccgagtacctggcccccgagatcatcctgagcaagggctacaacaaggccgtggactggtgggccctgggcgtgctgatctacgagatggccgccggctacccccccttcttcgccgaccagcccatccagatctacgagaagatcgtgagcggcaaggtgagattccccagccacttcagcagcgacctgaaggacctgctgagaaacctgctgcaggtggacctgaccaagagattcggcaacctgaagaacggcgtgagcgacatcaagacccacaagtggttcgccaccaccgactggatcgccatctaccagagaaaggtggaggcccccttcatccccaagttcagaggcagcggcgacaccagcaacttcgacgactacgaggaggaggacatcagagtgagcatcaccgagaagtgcgccaaggagttcggcgagttctag

SEQ ID NO: 95168 - DNA, 795 bp, synthetic construct
  misc_feature 1..795: note = Description of Artificial Sequence: Synthetic coding sequence
  source 1..795: mol_type = other DNA
atgagcgccagaaagagcagcgacgccagcgcctgcagcagcagcgagatcagcgacagcttcgtgaaggagttcctggccaaggccaaggaggacttcctgaagaagtgggagaaccccacccagaacaacgccggcctggaggacttcgagagaaagaagaccctgggcaccggcagcttcggcagagtgatgctggtgaagcacaaggccaccgagcagtactacgccatgaagatcctggacaagcagaaggtggtgaagctgaagcagatcgagcacaccctgaacgagaagagaatcctgcaggccgtgaacttccccttcctggtgagactggagtacgccttcaaggacaacagcaacctgtacatggtgatggagtacgtgcccggcggcgagatgttcagccacctgagaagaatcggcagattcagcgagccccacgccagattctacgccgcccagatcgtgctgaccttcgagtacctgcacagcctggacctgatctacagagacctgaagcccgagaacctgctgatcgaccaccagggctacatccaggtgaccgacttcggcttcgccaagagagtgaagggcagaacctggaccctgtgcggcacccccgagtacctggcccccgagatcatcctgagcaagggctacaacaaggccgtggactggtgggccctgggcgtgctgatctacgagatggccgccggctacccccccttcttcgccgaccagcccatccagatctacgagaagatcgtgagcggcaagcagaacttctag

SEQ ID NO: 95169 - DNA, 942 bp, synthetic construct
  misc_feature 1..942: note = Description of Artificial Sequence: Synthetic coding sequence
  source 1..942: mol_type = other DNA
atgcccgacctgaagatcctgaagggcaagaccctgggcaccggcagcttcggcagagtgatgctggtgaagcacaaggccaccgagcagtactacgccatgaagatcctggacaagcagaaggtggtgaagctgaagcagatcgagcacaccctgaacgagaagagaatcctgcaggccgtgaacttccccttcctggtgagactggagtacgccttcaaggacaacagcaacctgtacatggtgatggagtacgtgcccggcggcgagatgttcagccacctgagaagaatcggcagattcagcgagccccacgccagattctacgccgcccagatcgtgctgaccttcgagtacctgcacagcctggacctgatctacagagacctgaagcccgagaacctgctgatcgaccaccagggctacatccaggtgaccgacttcggcttcgccaagagagtgaagggcagaacctggaccctgtgcggcacccccgagtacctggcccccgagatcatcctgagcaagggctacaacaaggccgtggactggtgggccctgggcgtgctgatctacgagatggccgccggctacccccccttcttcgccgaccagcccatccagatctacgagaagatcgtgagcggcaaggtgagattccccagccacttcagcagcgacctgaaggacctgctgagaaacctgctgcaggtggacctgaccaagagattcggcaacctgaagaacggcgtgagcgacatcaagacccacaagtggttcgccaccaccgactggatcgccatctaccagagaaaggtggaggcccccttcatccccaagttcagaggcagcggcgacaccagcaacttcgacgactacgaggaggaggacatcagagtgagcatcaccgagaagtgcgccaaggagttcggcgagttctag

SEQ ID NO: 95170 - DNA, 1068 bp, synthetic construct
  misc_feature 1..1068: note = Description of Artificial Sequence: Synthetic coding sequence
  source 1..1068: mol_type = other DNA
atgggcctgagcagaaagagcagcgacgccagcgcctgcagcagcagcgagatcagcgtgaaggagttcctggccaaggccaaggaggacttcctgaagaagtgggagaaccccacccagaacaacgccggcctggaggacttcgagagaaagaagaccctgggcaccggcagcttcggcagagtgatgctggtgaagcacaaggccaccgagcagtactacgccatgaagatcctggacaagcagaaggtggtgaagctgaagcagatcgagcacaccctgaacgagaagagaatcctgcaggccgtgaacttccccttcctggtgagactggagtacgccttcaaggacaacagcaacctgtacatggtgatggagtacgtgcccggcggcgagatgttcagccacctgagaagaatcggcagattcagcgagccccacgccagattctacgccgcccagatcgtgctgaccttcgagtacctgcacagcctggacctgatctacagagacctgaagcccgagaacctgctgatcgaccaccagggctacatccaggtgaccgacttcggcttcgccaagagagtgaagggcagaacctggaccctgtgcggcacccccgagtacctggcccccgagatcatcctgagcaagggctacaacaaggccgtggactggtgggccctgggcgtgctgatctacgagatggccgccggctacccccccttcttcgccgaccagcccatccagatctacgagaagatcgtgagcggcaaggtgagattccccagccacttcagcagcgacctgaaggacctgctgagaaacctgctgcaggtggacctgaccaagagattcggcaacctgaagaacggcgtgagcgacatcaagacccacaagtggttcgccaccaccgactggatcgccatctaccagagaaaggtggaggcccccttcatccccaagttcagaggcagcggcgacaccagcaacttcgacgactacgaggaggaggacatcagagtgagcatcaccgagaagtgcgccaaggagttcggcgagttctag

SEQ ID NO: 95171 - DNA, 738 bp, synthetic construct
  misc_feature 1..738: note = Description of Artificial Sequence: Synthetic coding sequence
  source 1..738: mol_type = other DNA
atgggcctgctgaaggagttcctggccaaggccaaggaggacttcctgaagaagtgggagaaccccacccagaacaacgccggcctggaggacttcgagagaaagaagaccctgggcaccggcagcttcggcagagtgatgctggtgaagcacaaggccaccgagcagtactacgccatgaagatcctggacaagcagaaggtggtgaagctgaagcagatcgagcacaccctgaacgagaagagaatcctgcaggccgtgaacttccccttcctggtgagactggagtacgccttcaaggacaacagcaacctgtacatggtgatggagtacgtgcccggcggcgagatgttcagccacctgagaagaatcggcagattcagcgagccccacgccagattctacgccgcccagatcgtgctgaccttcgagtacctgcacagcctggacctgatctacagagacctgaagcccgagaacctgctgatcgaccaccagggctacatccaggtgaccgacttcggcttcgccaagagagtgaagggcagaacctggaccctgtgcggcacccccgagtacctggcccccgagatcatcctgagcaagggctacaacaaggccgtggactggtgggccctgggcgtgctgatctacgagatggccgccggctacccccccttcttcgccgaccagcccatccagatctacgagaagatcgtgagcggcaagaacttctag

SEQ ID NO: 95172 - DNA, 1197 bp, synthetic construct
  misc_feature 1..1197: note = Description of Artificial Sequence: Synthetic coding sequence
  source 1..1197: mol_type = other DNA
atggccgcctacagagagcccccctgcaaccagtacaccggcaccaccaccgccctgcagaagctggagggcttcgccagcagactgttccacagacacagcaagggcaccgcccacgaccagaagaccgccctggagaacgacagcctgcacttcagcgagcacaccgccctgtgggacagaagcatgaaggagttcctggccaaggccaaggaggacttcctgaagaagtgggagaaccccacccagaacaacgccggcctggaggacttcgagagaaagaagaccctgggcaccggcagcttcggcagagtgatgctggtgaagcacaaggccaccgagcagtactacgccatgaagatcctggacaagcagaaggtggtgaagctgaagcagatcgagcacaccctgaacgagaagagaatcctgcaggccgtgaacttccccttcctggtgagactggagtacgccttcaaggacaacagcaacctgtacatggtgatggagtacgtgcccggcggcgagatgttcagccacctgagaagaatcggcagattcagcgagccccacgccagattctacgccgcccagatcgtgctgaccttcgagtacctgcacagcctggacctgatctacagagacctgaagcccgagaacctgctgatcgaccaccagggctacatccaggtgaccgacttcggcttcgccaagagagtgaagggcagaacctggaccctgtgcggcacccccgagtacctggcccccgagatcatcctgagcaagggctacaacaaggccgtggactggtgggccctgggcgtgctgatctacgagatggccgccggctacccccccttcttcgccgaccagcccatccagatctacgagaagatcgtgagcggcaaggtgagattccccagccacttcagcagcgacctgaaggacctgctgagaaacctgctgcaggtggacctgaccaagagattcggcaacctgaagaacggcgtgagcgacatcaagacccacaagtggttcgccaccaccgactggatcgccatctaccagagaaaggtggaggcccccttcatccccaagttcagaggcagcggcgacaccagcaacttcgacgactacgaggaggaggacatcagagtgagcatcaccgagaagtgcgccaaggagttcggcgagttctag

SEQ ID NO: 95173 - DNA, 774 bp, synthetic construct
  misc_feature 1..774: note = Description of Artificial Sequence: Synthetic coding sequence
  source 1..774: mol_type = other DNA
atgggcaacgccgccaccgccaagaagggcagcgaggtggagagcgtgaaggagttcctggccaaggccaaggaggacttcctgaagaagtgggagaaccccacccagaacaacgccggcctggaggacttcgagagaaagaagaccctgggcaccggcagcttcggcagagtgatgctggtgaagcacaaggccaccgagcagtactacgccatgaagatcctggacaagcagaaggtggtgaagctgaagcagatcgagcacaccctgaacgagaagagaatcctgcaggccgtgaacttccccttcctggtgagactggagtacgccttcaaggacaacagcaacctgtacatggtgatggagtacgtgcccggcggcgagatgttcagccacctgagaagaatcggcagattcagcgagccccacgccagattctacgccgcccagatcgtgctgaccttcgagtacctgcacagcctggacctgatctacagagacctgaagcccgagaacctgctgatcgaccaccagggctacatccaggtgaccgacttcggcttcgccaagagagtgaagggcagaacctggaccctgtgcggcacccccgagtacctggcccccgagatcatcctgagcaagggctacaacaaggccgtggactggtgggccctgggcgtgctgatctacgagatggccgccggctacccccccttcttcgccgaccagcccatccagatctacgagaagatcgtgagcggcaagaacttctag

SEQ ID NO: 95174 - DNA, 1056 bp, synthetic construct
  misc_feature 1..1056: note = Description of Artificial Sequence: Synthetic coding sequence
  source 1..1056: mol_type = other DNA
atgggcaacgccgccaccgccaagaagggcagcgaggtggagagcgtgaaggagttcctggccaaggccaaggaggacttcctgaagaagtgggagaaccccacccagaacaacgccggcctggaggacttcgagagaaagaagaccctgggcaccggcagcttcggcagagtgatgctggtgaagcacaaggccaccgagcagtactacgccatgaagatcctggacaagcagaaggtggtgaagctgaagcagatcgagcacaccctgaacgagaagagaatcctgcaggccgtgaacttccccttcctggtgagactggagtacgccttcaaggacaacagcaacctgtacatggtgatggagtacgtgcccggcggcgagatgttcagccacctgagaagaatcggcagattcagcgagccccacgccagattctacgccgcccagatcgtgctgaccttcgagtacctgcacagcctggacctgatctacagagacctgaagcccgagaacctgctgatcgaccaccagggctacatccaggtgaccgacttcggcttcgccaagagagtgaagggcagaacctggaccctgtgcggcacccccgagtacctggcccccgagatcatcctgagcaagggctacaacaaggccgtggactggtgggccctgggcgtgctgatctacgagatggccgccggctacccccccttcttcgccgaccagcccatccagatctacgagaagatcgtgagcggcaaggtgagattccccagccacttcagcagcgacctgaaggacctgctgagaaacctgctgcaggtggacctgaccaagagattcggcaacctgaagaacggcgtgagcgacatcaagacccacaagtggttcgccaccaccgactggatcgccatctaccagagaaaggtggaggcccccttcatccccaagttcagaggcagcggcgacaccagcaacttcgacgactacgaggaggaggacatcagagtgagcatcaccgagaagtgcgccaaggagttcggcgagttctag

SEQ ID NO: 95175 - DNA, 1077 bp, synthetic construct
  misc_feature 1..1077: note = Description of Artificial Sequence: Synthetic coding sequence
  source 1..1077: mol_type = other DNA
atgggcctgagcagaaagagcagcgacgccagcgcctgcagcagcagcgagatcagcgacagcttcgtgaaggagttcctggccaaggccaaggaggacttcctgaagaagtgggagaaccccacccagaacaacgccggcctggaggacttcgagagaaagaagaccctgggcaccggcagcttcggcagagtgatgctggtgaagcacaaggccaccgagcagtactacgccatgaagatcctggacaagcagaaggtggtgaagctgaagcagatcgagcacaccctgaacgagaagagaatcctgcaggccgtgaacttccccttcctggtgagactggagtacgccttcaaggacaacagcaacctgtacatggtgatggagtacgtgcccggcggcgagatgttcagccacctgagaagaatcggcagattcagcgagccccacgccagattctacgccgcccagatcgtgctgaccttcgagtacctgcacagcctggacctgatctacagagacctgaagcccgagaacctgctgatcgaccaccagggctacatccaggtgaccgacttcggcttcgccaagagagtgaagggcagaacctggaccctgtgcggcacccccgagtacctggcccccgagatcatcctgagcaagggctacaacaaggccgtggactggtgggccctgggcgtgctgatctacgagatggccgccggctacccccccttcttcgccgaccagcccatccagatctacgagaagatcgtgagcggcaaggtgagattccccagccacttcagcagcgacctgaaggacctgctgagaaacctgctgcaggtggacctgaccaagagattcggcaacctgaagaacggcgtgagcgacatcaagacccacaagtggttcgccaccaccgactggatcgccatctaccagagaaaggtggaggcccccttcatccccaagttcagaggcagcggcgacaccagcaacttcgacgactacgaggaggaggacatcagagtgagcatcaccgagaagtgcgccaaggagttcggcgagttctag

SEQ ID NO: 95176 - DNA, 966 bp, synthetic construct
  misc_feature 1..966: note = Description of Artificial Sequence: Synthetic coding sequence
  source 1..966: mol_type = other DNA
atgagcgccagaaagagcagcgacgccagcgcctgcagcagcagcgagatcagcgtgaaggagttcctggccaaggccaaggaggacttcctgaagaagtgggagaaccccacccagaacaacgccggcctggaggacttcgagagaaagaagaccctgggcaccggcagcttcggcagagtgatgctggtgaagcacaaggccaccgagcagtactacgccatgaagatcctggacaagcagaaggacaacagcaacctgtacatggtgatggagtacgtgcccggcggcgagatgttcagccacctgagaagaatcggcagattcagcgagccccacgccagattctacgccgcccagatcgtgctgaccttcgagtacctgcacagcctggacctgatctacagagacctgaagcccgagaacctgctgatcgaccaccagggctacatccaggtgaccgacttcggcttcgccaagagagtgaagggcagaacctggaccctgtgcggcacccccgagtacctggcccccgagatcatcctgagcaagggctacaacaaggccgtggactggtgggccctgggcgtgctgatctacgagatggccgccggctacccccccttcttcgccgaccagcccatccagatctacgagaagatcgtgagcggcaaggtgagattccccagccacttcagcagcgacctgaaggacctgctgagaaacctgctgcaggtggacctgaccaagagattcggcaacctgaagaacggcgtgagcgacatcaagacccacaagtggttcgccaccaccgactggatcgccatctaccagagaaaggtggaggcccccttcatccccaagttcagaggcagcggcgacaccagcaacttcgacgactacgaggaggaggacatcagagtgagcatcaccgagaagtgcgccaaggagttcggcgagttctag

SEQ ID NO: 95177 - DNA, 630 bp, synthetic construct
  misc_feature 1..630: note = Description of Artificial Sequence: Synthetic coding sequence
  source 1..630: mol_type = other DNA
atgagcgcctgcagcagcagcgagatcagcgtgaaggagttcctggccaaggccaaggaggacttcctgaagaagtgggagaaccccacccagaacaacgccggcctggaggacttcgagagaaagaagaccctgggcaccggcagcttcggcagagtgatgctggtgaagcacaaggccaccgagcagtactacgccatgaagatcctggacaagcagaaggtggtgaagctgaagcagatcgagcacaccctgaacgagaagagaatcctgcaggccgtgaacttccccttcctggtgagactggagtacgccttcaaggacaacagcaacctgtacatggtgatggagtacgtgcccggcggcgagatgttcagccacctgagaagaatcggcagattcagcgagccccacgccagattctacgccgcccagatcgtgctgaccttcgagtacctgcacagcctggacctgatctacagagacctgaagcccgagaacctgctgatcgaccaccagggctacatccaggtgaccgacttcggcttcgccaagagagtgaagggcagaacctggaccctgtgcggcacccccgagtacctggcccccgagatcatcctgagcaagtag

SEQ ID NO: 95178 - DNA, 594 bp, synthetic construct
  misc_feature 1..594: note = Description of Artificial Sequence: Synthetic coding sequence
  source 1..594: mol_type = other DNA
atgagcgtgaaggagttcctggccaaggccaaggaggacttcctgaagaagtgggagaaccccacccagaacaacgccggcctggaggacttcgagagaaagaagaccctgggcaccggcagcttcggcagagtgatgctggtgaagcacaaggccaccgagcagtactacgccatgaagatcctggacaagcagaaggtggtgaagctgaagcagatcgagcacaccctgaacgagaagagaatcctgcaggccgtgaacttccccttcctggtgagactggagtacgccttcaaggacaacagcaacctgtacatggtgatggagtacgtgcccggcggcgagatgttcagccacctgagaagaatcggcagattcagcgagccccacgccagattctacgccgcccagatcgtgctgaccttcgagtacctgcacagcctggacctgatctacagagacctgaagcccgagaacctgctgatcgaccaccagggctacatccaggtgaccgacttcggcttcgccaagagagtgaagggcagaacctggaccctgtgcggcacccccgagtacctggcccccgagatctag

SEQ ID NO: 95179 - DNA, 645 bp, synthetic construct
  misc_feature 1..645: note = Description of Artificial Sequence: Synthetic coding sequence
  source 1..645: mol_type = other DNA
atgggcctgagctgcagcagcagcgagatcagcgtgaaggagttcctggccaaggccaaggaggacttcctgaagaagtgggagaaccccacccagaacaacgccggcctggaggacttcgagagaaagaagaccctgggcaccggcagcttcggcagagtgatgctggtgaagcacaaggccaccgagcagtactacgccatgaagatcctggacaagcagaaggtggtgaagctgaagcagatcgagcacaccctgaacgagaagagaatcctgcaggccgtgaacttccccttcctggtgagactggagtacgccttcaaggacaacagcaacctgtacatggtgatggagtacgtgcccggcggcgagatgttcagccacctgagaagaatcggcagattcagcgagccccacgccagattctacgccgcccagatcgtgctgaccttcgagtacctgcacagcctggacctgatctacagagacctgaagcccgagaacctgctgatcgaccaccagggctacatccaggtgaccgacttcggcttcgccaagagagtgaagggcagaacctggaccctgtgcggcacccccgagtacctggcccccgagatcatcctgagcaagggctacaacaagtag

SEQ ID NO: 95180 - DNA, 561 bp, synthetic construct
  misc_feature 1..561: note = Description of Artificial Sequence: Synthetic coding sequence
  source 1..561: mol_type = other DNA
atgggcctgagcagaaagagcagcgacgccagcgcctgcagcagcagcgagatcagcgtgaaggagttcctggccaaggccaaggaggacttcctgaagaagtgggagaaccccacccagaacaacgccggcctggaggacttcgagagaaagaagaccctgggcaccggcagcttcggcagagtgatgctggtgaagcacaaggccaccgagcagtactacgccatgaagatcctggacaagcagaaggtggtgaagctgaagcagatcgagcacaccctgaacgagaagagaatcctgcaggccgtgaacttccccttcctggtgagactggagtacgccttcaaggacaacagcaacctgtacatggtgatggagtacgtgcccggcggcgagatgttcagccacctgagaagaatcggcagattcagcgagccccacgccagattctacgccgcccagatcgtgctgaccttcgagtacctgcacagcctggacctgatctacagagacctgaagcccgagaacctgctgatcgaccaccagggctacatccagtag

SEQ ID NO: 95181 - DNA, 528 bp, synthetic construct
  misc_feature 1..528: note = Description of Artificial Sequence: Synthetic coding sequence
  source 1..528: mol_type = other DNA
atgggcctgagcagaaagagcagcgacgccagcgcctgcagcagcagcgagatcagcgacagcttcgtgaaggagttcctggccaaggccaaggaggacttcctgaagaagtgggagaaccccacccagaacaacgccggcctggaggacttcgagagaaagaagaccctgggcaccggcagcttcggcagagtgatgctggtgaagcacaaggccaccgagcagtactacgccatgaagatcctggacaagcagaaggtggtgaagctgaagcagatcgagcacaccctgaacgagaagagaatcctgcaggccgtgaacttccccttcctggtgagactggagtacgccttcaaggacaacagcaacctgtacatggtgatggagtacgtgcccggcggcgagatgttcagccacctgagaagaatcggcagattcagcgagccccacgccagattctacgccgcccagatcgtgctgaccttcgagtacctgcacagcctggacctgatctacagagacctgtag

SEQ ID NO: 95182 - DNA, 621 bp, synthetic construct
  misc_feature 1..621: note = Description of Artificial Sequence: Synthetic coding sequence
  source 1..621: mol_type = other DNA
atgagcgccagaaagagcagcgacgccagcgcctgcagcagcagcgagatcagcgtgaaggagttcctggccaaggccaaggaggacttcctgaagaagtgggagaaccccacccagaacaacgccggcctggaggacttcgagagaaagaagaccctgggcaccggcagcttcggcagagtgatgctggtgaagcacaaggccaccgagcagtactacgccatgaagatcctggacaagcagaaggtggtgaagctgaagcagatcgagcacaccctgaacgagaagagaatcctgcaggccgtgaacttccccttcctggtgagactggagtacgccttcaaggacaacagcaacctgtacatggtgatggagtacgtgcccggcggcgagatgttcagccacctgagaagaatcggcagattcagcgagccccacgccagattctacgccgcccagatcgtgctgaccttcgagtacctgcacagcctggacctgatctacagagacctgaagcccgagaacctgctgatcgaccaccagggctacatccaggtgaccgacttcggcttcgccaagagagtgaagggcagaacctggaccctgtgcggcaccccctag

SEQ ID NO: 95183 - DNA, 1056 bp, synthetic construct
  misc_feature 1..1056: note = Description of Artificial Sequence: Synthetic coding sequence
  source 1..1056: mol_type = other DNA
atgggcaacgcccccgccaagaaggacaccgagcaggaggagagcgtgaacgagttcctggccaaggccagaggcgacttcctgtacagatggggcaaccccgcccagaacaccgccagcagcgaccagttcgagagactgagaaccctgggcatgggcagcttcggcagagtgatgctggtgagacaccaggagaccggcggccactacgccatgaagatcctgaacaagcagaaggtggtgaagatgaagcaggtggagcacatcctgaacgagaagagaatcctgcaggccatcgacttccccttcctggtgaagctgcagttcagcttcaaggacaacagctacctgtacctggtgatggagtacgtgcccggcggcgagatgttcagcagactgcagagagtgggcagattcagcgagccccacgcctgcttctacgccgcccaggtggtgctggccgtgcagtacctgcacagcctggacctgatccacagagacctgaagcccgagaacctgctgatcgaccagcagggctacctgcaggtgaccgacttcggcttcgccaagagagtgaagggcagaacctggaccctgtgcggcacccccgagtacctggcccccgagatcatcctgagcaagggctacaacaaggccgtggactggtgggccctgggcgtgctgatctacgagatggccgtgggcttcccccccttctacgccgaccagcccatccagatctacgagaagatcgtgagcggcagagtgagattccccagcaagctgagcagcgacctgaagcacctgctgagaagcctgctgcaggtggacctgaccaagagattcggcaacctgagaaacggcgtgggcgacatcaagaaccacaagtggttcgccaccaccagctggatcgccatctacgagaagaaggtggaggcccccttcatccccaagtacaccggccccggcgacgccagcaacttcgacgactacgaggaggaggagctgagaatcagcatcaacgagaagtgcgccaaggagttcagcgagttctag

SEQ ID NO: 95184 - DNA, 1146 bp, synthetic construct; identical to SEQ ID NO: 95134
  misc_feature 1..1146: note = Description of Artificial Sequence: Synthetic coding sequence
  source 1..1146: mol_type = other DNA

SEQ ID NO: 95185 - DNA, 1146 bp, synthetic construct; identical to SEQ ID NO: 95134
  misc_feature 1..1146: note = Description of Artificial Sequence: Synthetic coding sequence
  source 1..1146: mol_type = other DNA

SEQ ID NO: 95186 - DNA, 1146 bp, synthetic construct; identical to SEQ ID NO: 95134
  misc_feature 1..1146: note = Description of Artificial Sequence: Synthetic coding sequence
  source 1..1146: mol_type = other DNA

SEQ ID NO: 95187 - DNA, 1146 bp, synthetic construct; identical to SEQ ID NO: 95134
  misc_feature 1..1146: note = Description of Artificial Sequence: Synthetic coding sequence
  source 1..1146: mol_type = other DNA

SEQ ID NO: 95188 - DNA, 243 bp, synthetic construct
  misc_feature 1..243: note = Description of Artificial Sequence: Synthetic coding sequence
  source 1..243: mol_type = other DNA
atgggcagcaccctgagaaagagaaagatgtacgaggagttcctgagcaaggtgagcatcctggagagcctggagaagtgggagagactgaccgtggccgacgccctggagcccgtgcagttcgaggacggcgagaagatcgtggtgcagggcgagcccggcgacgacttctacatcatcaccgagaagaacctgcccggcgtggtggcccacgcctgcaaccccagctacctgggcggctag

SEQ ID NO: 95189 - DNA, 1146 bp, synthetic construct
  misc_feature 1..1146: note = Description of Artificial Sequence: Synthetic coding sequence
  source 1..1146: mol_type = other DNA
atggccagcccccccgcctgccccagcgaggaggacgagagcctgaagggctgcgagctgtacgtgcagctgcacggcatccagcaggtgctgaaggactgcatcgtgcacctgtgcatcagcaagcccgagagacccatgaagttcctgagagagcacttcgagaagctggagaaggaggagaacagacagatcctggccagacagaagagcaacagccagagcgacagccacgacgaggaggtgagccccaccccccccaaccccgtggtgaaggccagaagaagaagaggcggcgtgagcgccgaggtgtacaccgaggaggacgccgtgagctacgtgagaaaggtgatccccaaggactacaagaccatgaccgccctggccaaggccatcagcaagaacgtgctgttcgcccacctggacgacaacgagagaagcgacatcttcgacgccatgttccccgtgacccacatcgccggcgagaccgtgatccagcagggcaacgagggcgacaacttctacgtggtggaccagggcgaggtggacgtgtacgtgaacggcgagtgggtgaccaacatcagcgagggcggcagcttcggcgagctggccctgatctacggcacccccagagccgccaccgtgaaggccaagaccgacctgaagctgtggggcatcgacagagacagctacagaagaatcctgatgggcagcaccctgagaaagagaaagatgtacgaggagttcctgagcaaggtgagcatcctggagagcctggagaagtgggagagactgaccgtggccgacgccctggagcccgtgcagttcgaggacggcgagaagatcgtggtgcagggcgagcccggcgacgacttctacatcatcaccgagggcaccgccagcgtgctgcagagaagaagccccaacgaggagtacgtggaggtgggcagactgggccccagcgactacttcggcgagatcgccctgctgctgaacagacccagagccgccaccgtggtggccagaggccccctgaagtgcgtgaagctggacagacccagattcgagagagtgctgggcccctgcagcgagatcctgaagagaaacatccagagatacaacagcttcatcagcctgaccgtgtag

SEQ ID NO: 95190 - DNA, 1146 bp, synthetic construct; identical to SEQ ID NO: 95189
  misc_feature 1..1146: note = Description of Artificial Sequence: Synthetic coding sequence
  source 1..1146: mol_type = other DNA

SEQ ID NO: 95191 - DNA, 1146 bp, synthetic construct; identical to SEQ ID NO: 95189
  misc_feature 1..1146: note = Description of Artificial Sequence: Synthetic coding sequence
  source 1..1146: mol_type = other DNA

SEQ ID NO: 95192 - DNA, 498 bp, synthetic construct
  misc_feature 1..498: note = Description of Artificial Sequence: Synthetic coding sequence
  source 1..498: mol_type = other DNA
atggccagcccccccgcctgccccagcgaggaggacgagagcctgaagggctgcgagctgtacgtgcagctgcacggcatccagcaggtgctgaaggactgcatcgtgcacctgtgcatcagcaagcccgagagacccatgaagttcctgagagagcacttcgagaagctggagaaggaggagaacagacagatcctggccagacagaagagcaacagccagagcgacagccacgacgaggaggtgagccccaccccccccaaccccgtggtgaaggccagaagaagaagaggcggcgtgagcgccgaggtgtacaccgaggaggacgccgtgagctacgtgagaaaggtgatccccaaggactacaagaccatgaccgccctggccaaggccatcagcaagaacgtgctgttcgcccacctggacgacaacgagagaagcgacatcttcgacgccatgttccccgtgacccacatcgccggcgagaccgtgatctag

SEQ ID NO: 95193 - DNA, 894 bp, synthetic construct
  misc_feature 1..894: note = Description of Artificial Sequence: Synthetic coding sequence
  source 1..894: mol_type = other DNA
atggccagcccccccgcctgccccagcgaggaggacgagagcctgaagggctgcgagctgtacgtgcagctgcacggcatccagcaggtgctgaaggactgcatcgtgcacctgtgcatcagcaagcccgagagacccatgaagttcctgagagagcacttcgagaagctggagaaggaggagaacagacagatcctggccagacagaagagcaacagccagagcgacagccacgacgaggaggtgagccccaccccccccaaccccgtggtgaaggccagaagaagaagaggcggcgtgagcgccgaggtgtacaccgaggaggacgccgtgagctacgtgagaaaggtgatccccaaggactacaagaccatgaccgccctggccaaggccatcagcaagaacgtgctgttcgcccacctggacgacaacgagagaagcgacatcttcgacgccatgttccccgtgacccacatcgccggcgagaccgtgatccagcagggcaacgagggcgacaacttctacgtggtggaccagggcgaggtggacgtgtacgtgaacggcgagtgggtgaccaacatcagcgagggcggcagcttcggcgagctggccctgatctacggcacccccagagccgccaccgtgaaggccaagaccgacctgaagctgtggggcatcgacagagacagctacagaagaatcctgatgggcagcaccctgagaaagagaaagatgtacgaggagttcctgagcaaggtgagcatcctggagagcctggagaagtgggagagactgaccgtggccgacgccctggagcccgtgcagttcgaggacggcgagaagatcgtggtgcagggcgagcccggcgacgacttctacatcatcaccgagtag

SEQ ID NO: 95194 - DNA, 177 bp, synthetic construct
  misc_feature 1..177: note = Description of Artificial Sequence: Synthetic coding sequence
  source 1..177: mol_type = other DNA
atggccagcccccccgcctgccccagcgaggaggacgagagcctgaagggctgcgagctgtacgtgcagctgcacggcatccagcaggtgctgaaggactgcatcgtgcacctgtgcatcagcaagcccgagagacccatgaagttcctgagagagcacttcgagaagctggagtag

SEQ ID NO: 95195 - DNA, 1146 bp, synthetic construct; identical to SEQ ID NO: 95189
  misc_feature 1..1146: note = Description of Artificial Sequence: Synthetic coding sequence
  source 1..1146: mol_type = other DNA

SEQ ID NO: 95196 - DNA, 1146 bp, synthetic construct; identical to SEQ ID NO: 95189
  misc_feature 1..1146: note = Description of Artificial Sequence: Synthetic coding sequence
  source 1..1146: mol_type = other DNA

SEQ ID NO: 95197 - DNA, 1215 bp, synthetic construct
  misc_feature 1..1215: note = Description of Artificial Sequence: Synthetic coding sequence
  source 1..1215: mol_type = other DNA
atgagccacatccagatcccccccggcctgaccgagctgctgcagggctacaccgtggaggtgctgagacagcagccccccgacctggtggagttcgccgtggagtacttcaccagactgagagaggccagagcccccgccagcgtgctgcccgccgccacccccagacagagcctgggccaccccccccccgagcccggccccgacagagtggccgacgccaagggcgacagcgagagcgaggaggacgaggacctggaggtgcccgtgcccagcagattcaacagaagagtgagcgtgtgcgccgagacctacaaccccgacgaggaggaggaggacaccgaccccagagtgatccaccccaagaccgacgagcagagatgcagactgcaggaggcctgcaaggacatcctgctgttcaagaacctggaccaggagcagctgagccaggtgctggacgccatgttcgagagaatcgtgaaggccgacgagcacgtgatcgaccagggcgacgacggcgacaacttctacgtgatcgagagaggcacctacgacatcctggtgaccaaggacaaccagaccagaagcgtgggccagtacgacaacagaggcagcttcggcgagctggccctgatgtacaacacccccagagccgccaccatcgtggccaccagcgagggcagcctgtggggcctggacagagtgaccttcagaagaatcatcgtgaagaacaacgccaagaagagaaagatgttcgagagcttcatcgagagcgtgcccctgctgaagagcctggaggtgagcgagagaatgaagatcgtggacgtgatcggcgagaagatctacaaggacggcgagagaatcatcacccagggcgagaaggccgacagcttctacatcatcgagagcggcgaggtgagcatcctgatcagaagcagaaccaagagcaacaaggacggcggcaaccaggaggtggagatcgccagatgccacaagggccagtacttcggcgagctggccctggtgaccaacaagcccagagccgccagcgcctacgccgtgggcgacgtgaagtgcctggtgatggacgtgcaggccttcgagagactgctgggcccctgcatggacatcatgaagagaaacatcagccactacgaggagcagctggtgaagatgttcggcagcagcgtggacctgggcaacctgggccagtag

SEQ ID NO: 95198 - DNA, 1149 bp, synthetic construct
  misc_feature 1..1149: note = Description of Artificial Sequence: Synthetic coding sequence
  source 1..1149: mol_type = other DNA
atgagccacatccagatcccccccggcctgaccgagctgctgcagggctacaccgtggaggtgctgagacagcagccccccgacctggtggagttcgccgtggagtacttcaccagactgagagaggccagagcccccgccagcgtgctgcccgccgccacccccagacagagcctgggccaccccccccccgagcccggccccgacagagtggccgacgccaagggcgacagcgagagcgaggaggacgaggacctggaggtgcccgtgcccagcagattcaacagaagagtgagcgtgtgcgccgagacctacaaccccgacgaggaggaggaggacaccgaccccagagtgatccaccccaagaccgacgagcagagatgcagactgcaggaggcctgcaaggacatcctgctgttcaagaacctggaccaggagcagctgagccaggtgctggacgccatgttcgagagaatcgtgaaggccgacgagcacgtgatcgaccagggcgacgacggcgacaacttctacgtgatcgagagaggcacctacgacatcctggtgaccaaggacaaccagaccagaagcgtgggccagtacgacaacagaggcagcttcggcgagctggccctgatgtacaacacccccagagccgccaccatcgtggccaccagcgagggcagcctgtggggcctggacagagtgaccttcagaagaatcatcgtgaagaacaacgccaagaagagaaagatgttcgagagcttcatcgagagcgtgcccctgctgaagagcctggaggtgagcgagagaatgaagatcgtggacgtgatcggcgagaagatctacaaggacggcgagagaatcatcacccagaccaagagcaacaaggacggcggcaaccaggaggtggagatcgccagatgccacaagggccagtacttcggcgagctggccctggtgaccaacaagcccagagccgccagcgcctacgccgtgggcgacgtgaagtgcctggtgatggacgtgcaggccttcgagagactgctgggcccctgcatggacatcatgaagagaaacatcagccactacgaggagcagctggtgaagatgttcggcagcagcgtggacctgggcaacctgggccagtag

SEQ ID NO: 95199 - DNA, 1215 bp, synthetic construct; identical to SEQ ID NO: 95197
  misc_feature 1..1215: note = Description of Artificial Sequence: Synthetic coding sequence
  source 1..1215: mol_type = other DNA

SEQ ID NO: 95200 - DNA, 1257 bp, synthetic construct
  misc_feature 1..1257: note = Description of Artificial Sequence: Synthetic coding sequence
  source 1..1257: mol_type = other DNA
atgagcatcgagatccccgccggcctgaccgagctgctgcagggcttcaccgtggaggtgctgagacaccagcccgccgacctgctggagttcgccctgcagcacttcaccagactgcagcaggagaacgagagaaagggcaccgccagattcggccacgagggcagaacctggggcgacctgggcgccgccgccggcggcggcacccccagcaagggcgtgaacttcgccgaggagcccatgcagagcgacagcgaggacggcgaggaggaggaggccgcccccgccgacgccggcgccttcaacgcccccgtgatcaacagattcaccagaagagccagcgtgtgcgccgaggcctacaaccccgacgaggaggaggacgacgccgagagcagaatcatccaccccaagaccgacgaccagagaaacagactgcaggaggcctgcaaggacatcctgctgttcaagaacctggaccccgagcagatgagccaggtgctggacgccatgttcgagaagctggtgaaggacggcgagcacgtgatcgaccagggcgacgacggcgacaacttctacgtgatcgacagaggcaccttcgacatctacgtgaagtgcgacggcgtgggcagatgcgtgggcaactacgacaacagaggcagcttcggcgagctggccctgatgtacaacacccccagagccgccaccatcaccgccaccagccccggcgccctgtggggcctggacagagtgaccttcagaagaatcatcgtgaagaacaacgccaagaagagaaagatgtacgagagcttcatcgagagcctgcccttcctgaagagcctggagttcagcgagagactgaaggtggtggacgtgatcggcaccaaggtgtacaacgacggcgagcagatcatcgcccagggcgacagcgccgacagcttcttcatcgtggagagcggcgaggtgaagatcaccatgaagagaaagggcaagagcgaggtggaggagaacggcgccgtggagatcgccagatgcagcagaggccagtacttcggcgagctggccctggtgaccaacaagcccagagccgccagcgcccacgccatcggcaccgtgaagtgcctggccatggacgtgcaggccttcgagagactgctgggcccctgcatggagatcatgaagagaaacatcgccacctacgaggagcagctggtggccctgttcggcaccaacatggacatcgtggagcccaccgcctag

SEQ ID NO: 95201 - DNA, 1218 bp, synthetic construct
  misc_feature 1..1218: note = Description of Artificial Sequence: Synthetic coding sequence
  source 1..1218: mol_type = other DNA
atgagcatcgagatccccgccggcctgaccgagctgctgcagggcttcaccgtggaggtgctgagacaccagcccgccgacctgctggagttcgccctgcagcacttcaccagactgcagcaggagaacgagagaaagggcaccgccagattcggccacgagggcagaacctggggcgacctgggcgccgccgccggcggcggcacccccagcaagggcgtgaacttcgccgaggaggccgcccccgccgacgccggcgccttcaacgcccccgtgatcaacagattcaccagaagagccagcgtgtgcgccgaggcctacaaccccgacgaggaggaggacgacgccgagagcagaatcatccaccccaagaccgacgaccagagaaacagactgcaggaggcctgcaaggacatcctgctgttcaagaacctggaccccgagcagatgagccaggtgctggacgccatgttcgagaagctggtgaaggacggcgagcacgtgatcgaccagggcgacgacggcgacaacttctacgtgatcgacagaggcaccttcgacatctacgtgaagtgcgacggcgtgggcagatgcgtgggcaactacgacaacagaggcagcttcggcgagctggccctgatgtacaacacccccagagccgccaccatcaccgccaccagccccggcgccctgtggggcctggacagagtgaccttcagaagaatcatcgtgaagaacaacgccaagaagagaaagatgtacgagagcttcatcgagagcctgcccttcctgaagagcctggagttcagcgagagactgaaggtggtggacgtgatcggcaccaaggtgtacaacgacggcgagcagatcatcgcccagggcgacagcgccgacagcttcttcatcgtggagagcggcgaggtgaagatcaccatgaagagaaagggcaagagcgaggtggaggagaacggcgccgtggagatcgccagatgcagcagaggccagtacttcggcgagctggccctggtgaccaacaagcccagagccgccagcgcccacgccatcggcaccgtgaagtgcctggccatggacgtgcaggccttcgagagactgctgggcccctgcatggagatcatgaagagaaacatcgccacctacgaggagcagctggtggccctgttcggcaccaacatggacatcgtggagcccaccgcctag

SEQ ID NO: 95202 - DNA, 1257 bp, synthetic construct; identical to SEQ ID NO: 95200
  misc_feature 1..1257: note = Description of Artificial Sequence: Synthetic coding sequence
  source 1..1257: mol_type = other DNA

SEQ ID NO: 95203 - DNA, 1170 bp, synthetic construct
  misc_feature 1..1170: note = Description of Artificial Sequence: Synthetic coding sequence
  source 1..1170: mol_type = other DNA
atggagaagcagaacatgttcctgcacggcagctacatcctgagagaggacgtgagaaccgccaacgtgatcgccgccgaggccgtgacctgcctggtgatcgacagagacagcttcaagcacctgatcggcggcctggacgacgtgagcaacaaggcctacgaggacgccgaggccaaggccaagtacgaggccgaggccgccttcttcgccaacctgaagctgagcgacttcaacatcatcgacaccctgggcgtgggcggcttcggcagagtggagctggtgcagctgaagagcgaggagagcaagaccttcgccatgaagatcctgaagaagagacacatcgtggacaccagacagcaggagcacatcagaagcgagaagcagatcatgcagggcgcccacagcgacttcatcgtgagactgtacagaaccttcaaggacagcaagtacctgtacatgctgatggaggcctgcctgggcggcgagctgtggaccatcctgagagacagaggcagcttcgaggacagcaccaccagattctacaccgcctgcgtggtggaggccttcgcctacctgcacagcaagggcatcatctacagagacctgaagcccgagaacctgatcctggaccacagaggctacgccaagctggtggacttcggcttcgccaagaagatcggcttcggcaagaagacctggaccttctgcggcacccccgagtacgtggcccccgagatcatcctgaacaagggccacgacatcagcgccgactactggagcctgggcatcctgatgtacgagctgctgaccggcagcccccccttcagcggccccgaccccatgaagacctacaacatcatcctgagaggcatcgacatgatcgagttccccaagaagatcgccaagaacgccgccaacctgatcaagaagctgtgcagagacaaccccagcgagagactgggcaacctgaagaacggcgtgaaggacatccagaagcacaagtggttcgagggcttcaactgggagggcctgagaaagggcaccctgaccccccccatcatccccagcgtggccagccccaccgacaccagcaacttcgacagcttccccgaggacaacgacgagcccccccccgacgacaacagcggctgggacatcgacttctag

SEQ ID NO: 95204 - DNA, 852 bp, synthetic construct
  misc_feature 1..852: note = Description of Artificial Sequence: Synthetic coding sequence
  source 1..852: mol_type = other DNA
atgaagatcctgaagaagagacacatcgtggacaccagacagcaggagcacatcagaagcgagaagcagatcatgcagggcgcccacagcgacttcatcgtgagactgtacagaaccttcaaggacagcaagtacctgtacatgctgatggaggcctgcctgggcggcgagctgtggaccatcctgagagacagaggcagcttcgaggacagcaccaccagattctacaccgcctgcgtggtggaggccttcgcctacctgcacagcaagggcatcatctacagagacctgaagcccgagaacctgatcctggaccacagaggctacgccaagctggtggacttcggcttcgccaagaagatcggcttcggcaagaagacctggaccttctgcggcacccccgagtacgtggcccccgagatcatcctgaacaagggccacgacatcagcgccgactactggagcctgggcatcctgatgtacgagctgctgaccggcagcccccccttcagcggccccgaccccatgaagacctacaacatcatcctgagaggcatcgacatgatcgagttccccaagaagatcgccaagaacgccgccaacctgatcaagaagctgtgcagagacaaccccagcgagagactgggcaacctgaagaacggcgtgaaggacatccagaagcacaagtggttcgagggcttcaactgggagggcctgagaaagggcaccctgaccccccccatcatccccagcgtggccagccccaccgacaccagcaacttcgacagcttccccgaggacaacgacgagcccccccccgacgacaacagcggctgggacatcgacttctag

SEQ ID NO: 95205 - DNA, 546 bp, synthetic construct
  misc_feature 1..546: note = Description of Artificial Sequence: Synthetic coding sequence
  source 1..546: mol_type = other DNA
agctgcatcatcaaggagggcgacgtgggcagcctggtgtacgtgatggaggacggcaaggtggaggtgaccaaggagggcgtgaagctgtgcaccatgggccccggcaaggtgttcggcgagctggccatcctgtacaactgcaccagaaccgccaccgtgaagaccctggtgaacgtgaagctgtgggccatcgacagacagtgcttccagaccatcatgatgagaaccggcctgatcaagcacaccgagtacatggagttcctgaagagcgtgcccaccttccagagcctgcccgaggagatcctgagcaagctggccgacgtgctggaggagacccactacgagaacggcgagtacatcatcagacagggcgccagaggcgacaccttcttcatcatcagcaagggcaccgtgaacgtgaccagagaggacagccccagcgaggaccccgtgttcctgagaaccctgggcaagggcgactggttcggcgagaaggccctgcagggctggacctggaacctgttcgagtacgtggtggagtag

SEQ ID NO: 95206 - DNA, 2061 bp, synthetic construct
  misc_feature 1..2061: note = Description of Artificial Sequence: Synthetic coding sequence
  source 1..2061: mol_type = other DNA
atgggcaccctgagagacctgcagtacgccctgcaggagaagatcgaggagctgagacagagagacgccctgatcgacgagctggagctggagctggaccagaaggacgagctgatccagaagctgcagaacgagctggacaagtacagaagcgtgatcagacccgccacccagcaggcccagaagcagagcgccagcaccctgcagggcgagcccagaaccaagagacaggccatcagcgccgagcccaccgccttcgacatccaggacctgagccacgtgaccctgcccttctaccccaagagcccccagagcaaggacctgatcaaggaggccatcctggacaacgacttcatgaagaacctggagctgagccagatccaggagatcgtggactgcatgtaccccgtggagtacggcaaggacagctgcatcatcaaggagggcgacgtgggcagcctggtgtacgtgatggaggacggcaaggtggaggtgaccaaggagggcgtgaagctgtgcaccatgggccccggcaaggtgttcggcgagctggccatcctgtacaactgcaccagaaccgccaccgtgaagaccctggtgaacgtgaagctgtgggccatcgacagacagtgcttccagaccatcatgatgagaaccggcctgatcaagcacaccgagtacatggagttcctgaagagcgtgcccaccttccagagcctgcccgaggagatcctgagcaagctggccgacgtgctggaggagacccactacgagaacggcgagtacatcatcagacagggcgccagaggcgacaccttcttcatcatcagcaagggcaccgtgaacgtgaccagagaggacagccccagcgaggaccccgtgttcctgagaaccctgggcaagggcgactggttcggcgagaaggccctgcagggcgaggacgtgagaaccgccaacgtgatcgccgccgaggccgtgacctgcctggtgatcgacagagacagcttcaagcacctgatcggcggcctggacgacgtgagcaacaaggcctacgaggacgccgaggccaaggccaagtacgaggccgaggccgccttcttcgccaacctgaagctgagcgacttcaacatcatcgacaccctgggcgtgggcggcttcggcagagtggagctggtgcagctgaagagcgaggagagcaagaccttcgccatgaagatcctgaagaagagacacatcgtggacaccagacagcaggagcacatcagaagcgagaagcagatcatgcagggcgcccacagcgacttcatcgtgagactgtacagaaccttcaaggacagcaagtacctgtacatgctgatggaggcctgcctgggcggcgagctgtggaccatcctgagagacagaggcagcttcgaggacagcaccaccagattctacaccgcctgcgtggtggaggccttcgcctacctgcacagcaagggcatcatctacagagacctgaagcccgagaacctgatcctggaccacagaggctacgccaagctggtggacttcggcttcgccaagaagatcggcttcggcaagaagacctggaccttctgcggcacccccgagtacgtggcccccgagatcatcctgaacaagggccacgacatcagcgccgactactggagcctgggcatcctgatgtacgagctgctgaccggcagcccccccttcagcggccccgaccccatgaagacctacaacatcatcctgagaggcatcgacatgatcgagttccccaagaagatcgccaagaacgccgccaacctgatcaagaagctgtgcagagacaaccccagcgagagactgggcaacctgaagaacggcgtgaaggacatccagaagcacaagtggttcgagggcttcaactgggagggcctgagaaagggcaccctgaccccccccatcatccccagcgtggccagccccaccgacaccagcaacttcgacagcttccccgaggacaacgacgagcccccccccgacgacaacagcggctgggacatcgacttctag

SEQ ID NO: 95207 - DNA, 1980 bp, synthetic construct
  misc_feature 1..1980: note = Description of Artificial Sequence: Synthetic coding sequence
  source 1..1980: mol_type = other DNA
atgctgaaggaggagagaatcaaggagctggagaagagactgagcgagaaggaggaggagatccaggagctgaagagaaagctgcacaagtgccagagcgtgctgcccgtgcccagcacccacatcggccccagaaccaccagagcccagggcatcagcgccgagccccagacctacagaagcttccacgacctgagacaggccttcagaaagttcaccaagagcgagagaagcaaggacctgatcaaggaggccatcctggacaacgacttcatgaagaacctggagctgagccagatccaggagatcgtggactgcatgtaccccgtggagtacggcaaggacagctgcatcatcaaggagggcgacgtgggcagcctggtgtacgtgatggaggacggcaaggtggaggtgaccaaggagggcgtgaagctgtgcaccatgggccccggcaaggtgttcggcgagctggccatcctgtacaactgcaccagaaccgccaccgtgaagaccctggtgaacgtgaagctgtgggccatcgacagacagtgcttccagaccatcatgatgagaaccggcctgatcaagcacaccgagtacatggagttcctgaagagcgtgcccaccttccagagcctgcccgaggagatcctgagcaagctggccgacgtgctggaggagacccactacgagaacggcgagtacatcatcagacagggcgccagaggcgacaccttcttcatcatcagcaagggcaccgtgaacgtgaccagagaggacagccccagcgaggaccccgtgttcctgagaaccctgggcaagggcgactggttcggcgagaaggccctgcagggcgaggacgtgagaaccgccaacgtgatcgccgccgaggccgtgacctgcctggtgatcgacagagacagcttcaagcacctgatcggcggcctggacgacgtgagcaacaaggcctacgaggacgccgaggccaaggccaagtacgaggccgaggccgccttcttcgccaacctgaagctgagcgacttcaacatcatcgacaccctgggcgtgggcggcttcggcagagtggagctggtgcagctgaagagcgaggagagcaagaccttcgccatgaagatcctgaagaagagacacatcgtggacaccagacagcaggagcacatcagaagcgagaagcagatcatgcagggcgcccacagcgacttcatcgtgagactgtacagaaccttcaaggacagcaagtacctgtacatgctgatggaggcctgcctgggcggcgagctgtggaccatcctgagagacagaggcagcttcgaggacagcaccaccagattctacaccgcctgcgtggtggaggccttcgcctacctgcacagcaagggcatcatctacagagacctgaagcccgagaacctgatcctggaccacagaggctacgccaagctggtggacttcggcttcgccaagaagatcggcttcggcaagaagacctggaccttctgcggcacccccgagtacgtggcccccgagatcatcctgaacaagggccacgacatcagcgccgactactggagcctgggcatcctgatgtacgagctgctgaccggcagcccccccttcagcggccccgaccccatgaagacctacaacatcatcctgagaggcatcgacatgatcgagttccccaagaagatcgccaagaacgccgccaacctgatcaagaagctgtgcagagacaaccccagcgagagactgggcaacctgaagaacggcgtgaaggacatccagaagcacaagtggttcgagggcttcaactgggagggcctgagaaagggcaccctgaccccccccatcatccccagcgtggccagccccaccgacaccagcaacttcgacagcttccccgaggacaacgacgagcccccccccgacgacaacagcggctgggacatcgacttctag

SEQ ID NO: 95208 - DNA, 2016 bp, synthetic construct
  misc_feature 1..2016: note = Description of Artificial Sequence: Synthetic coding sequence
  source 1..2016: mol_type = other DNA
atgagcgagctggaggaggacttcgccaagatcctgatgctgaaggaggagagaatcaaggagctggagaagagactgagcgagaaggaggaggagatccaggagctgaagagaaagctgcacaagtgccagagcgtgctgcccgtgcccagcacccacatcggccccagaaccaccagagcccagggcatcagcgccgagccccagacctacagaagcttccacgacctgagacaggccttcagaaagttcaccaagagcgagagaagcaaggacctgatcaaggaggccatcctggacaacgacttcatgaagaacctggagctgagccagatccaggagatcgtggactgcatgtaccccgtggagtacggcaaggacagctgcatcatcaaggagggcgacgtgggcagcctggtgtacgtgatggaggacggcaaggtggaggtgaccaaggagggcgtgaagctgtgcaccatgggccccggcaaggtgttcggcgagctggccatcctgtacaactgcaccagaaccgccaccgtgaagaccctggtgaacgtgaagctgtgggccatcgacagacagtgcttccagaccatcatgatgagaaccggcctgatcaagcacaccgagtacatggagttcctgaagagcgtgcccaccttccagagcctgcccgaggagatcctgagcaagctggccgacgtgctggaggagacccactacgagaacggcgagtacatcatcagacagggcgccagaggcgacaccttcttcatcatcagcaagggcaccgtgaacgtgaccagagaggacagccccagcgaggaccccgtgttcctgagaaccctgggcaagggcgactggttcggcgagaaggccctgcagggcgaggacgtgagaaccgccaacgtgatcgccgccgaggccgtgacctgcctggtgatcgacagagacagcttcaagcacctgatcggcggcctggacgacgtgagcaacaaggcctacgaggacgccgaggccaaggccaagtacgaggccgaggccgccttcttcgccaacctgaagctgagcgacttcaacatcatcgacaccctgggcgtgggcggcttcggcagagtggagctggtgcagctgaagagcgaggagagcaagaccttcgccatgaagatcctgaagaagagacacatcgtggacaccagacagcaggagcacatcagaagcgagaagcagatcatgcagggcgcccacagcgacttcatcgtgagactgtacagaaccttcaaggacagcaagtacctgtacatgctgatggaggcctgcctgggcggcgagctgtggaccatcctgagagacagaggcagcttcgaggacagcaccaccagattctacaccgcctgcgtggtggaggccttcgcctacctgcacagcaagggcatcatctacagagacctgaagcccgagaacctgatcctggaccacagaggctacgccaagctggtggacttcggcttcgccaagaagatcggcttcggcaagaagacctggaccttctgcggcacccccgagtacgtggcccccgagatcatcctgaacaagggccacgacatcagcgccgactactggagcctgggcatcctgatgtacgagctgctgaccggcagcccccccttcagcggccccgaccccatgaagacctacaacatcatcctgagaggcatcgacatgatcgagttccccaagaagatcgccaagaacgccgccaacctgatcaagaagctgtgcagagacaaccccagcgagagactgggcaacctgaagaacggcgtgaaggacatccagaagcacaagtggttcgagggcttcaactgggagggcctgagaaagggcaccctgaccccccccatcatccccagcgtggccagccccaccgacaccagcaacttcgacagcttccccgaggacaacgacgagcccccccccgacgacaacagcggctgggacatcgacttctag

SEQ ID NO: 95209 - DNA, 2289 bp, synthetic construct
  misc_feature 1..2289: note = Description of Artificial Sequence: Synthetic coding sequence
  source 1..2289: mol_type = other DNA
atgggcaacggcagcgtgaagcccaagcacagcaagcaccccgacggccacagcggcaacctgaccaccgacgccctgagaaacaaggtgaccgagctggagagagagctgagaagaaaggacgccgagatccaggagagagagtaccacctgaaggagctgagagagcagctgagcaagcagaccgtggccatcgccgagctgaccgaggagctgcagaacaagtgcatccagctgaacaagctgcaggacgtggtgcacatgcagggcggcagccccctgcaggccagccccgacaaggtgcccctggaggtgcacagaaagaccagcggcctggtgagcctgcacagcagaagaggcgccaaggccggcgtgagcgccgagcccaccaccagaacctacgacctgaacaagccccccgagttcagcttcgagaaggccagagtgagaaaggacagcagcgagaagaagctgatcaccgacgccctgaacaagaaccagttcctgaagagactggacccccagcagatcaaggacatggtggagtgcatgtacggcagaaactaccagcagggcagctacatcatcaagcagggcgagcccggcaaccacatcttcgtgctggccgagggcagactggaggtgttccagggcgagaagctgctgagcagcatccccatgtggaccaccttcggcgagctggccatcctgtacaactgcaccagaaccgccagcgtgaaggccatcaccaacgtgaagacctgggccctggacagagaggtgttccagaacatcatgagaagaaccgcccaggccagagacgagcagtacagaaacttcctgagaagcgtgagcctgctgaagaacctgcccgaggacaagctgaccaagatcatcgactgcctggaggtggagtactacgacaagggcgactacatcatcagagagggcgaggagggcagcaccttcttcatcctggccaagggcaaggtgaaggtgacccagagcaccgagggccacgaccagccccagctgatcaagaccctgcagaagggcgagtacttcggcgagaaggccctgatcagcgacgacgtgagaagcgccaacatcatcgccgaggagaacgacgtggcctgcctggtgatcgacagagagaccttcaaccagaccgtgggcaccttcgaggagctgcagaagtacctggagggctacgtggccaacctgaacagagacgacgagaagagacacgccaagagaagcatgagcaactggaagctgagcaaggccctgagcctggagatgatccagctgaaggagaaggtggccagattcagcagcagcagccccttccagaacctggagatcatcgccaccctgggcgtgggcggcttcggcagagtggagctggtgaaggtgaagaacgagaacgtggccttcgccatgaagtgcatcagaaagaagcacatcgtggacaccaagcagcaggagcacgtgtacagcgagaagagaatcctggaggagctgtgcagccccttcatcgtgaagctgtacagaaccttcaaggacaacaagtacgtgtacatgctgctggaggcctgcctgggcggcgagctgtggagcatcctgagagacagaggcagcttcgacgagcccaccagcaagttctgcgtggcctgcgtgaccgaggccttcgactacctgcacagactgggcatcatctacagagacctgaagcccgagaacctgatcctggacgccgagggctacctgaagctggtggacttcggcttcgccaagaagatcggcagcggccagaagacctggaccttctgcggcacccccgagtacgtggcccccgaggtgatcctgaacaagggccacgacttcagcgtggacttctggagcctgggcatcctggtgtacgagctgctgaccggcaacccccccttcagcggcgtggaccagatgatgacctacaacctgatcctgaagggcatcgagaagatggacttccccagaaagatcaccagaagacccgaggacctgatcagaagactgtgcagacagaaccccaccgagagactgggcaacctgaagaacggcatcaacgacatcaagaagcacagatggctgaacggcttcaactgggagggcctgaaggccagaagcctgcccagccccctgcagagagagctgaagggccccatcgaccacagctacttcgacaagtacccccccgagaagggcatgccccccgacgagctgagcggctgggacaaggacttctag

SEQ ID NO: 95210 - DNA, 2289 bp, synthetic construct; identical to SEQ ID NO: 95209
  misc_feature 1..2289: note = Description of Artificial Sequence: Synthetic coding sequence
  source 1..2289: mol_type = other DNA

SEQ ID NO: 95211 - DNA, 2202 bp, synthetic construct
  misc_feature 1..2202: note = Description of Artificial Sequence: Synthetic coding sequence
  source 1..2202: mol_type = other DNA
atgggcaacggcagcgtgaagcccaagcacagcaagcaccccgacggccacagcggcaacctgaccaccgacgccctgagaaacaaggtgaccgagctggagagagagctgagaagaaaggacgccgagatccaggagagagagtaccacctgaaggagctgagagagcagctgagcaagcagaccgtggccatcgccgagctgaccgaggagctgcagaacaagtgcatccagctgaacaagctgcaggacgtggtgcacatgcagggcggcagccccctgcaggccagccccgacaaggtgcccctggaggtgcacagaaagaccagcggcctggtgagcctgcacagcagaagaggcgccaaggccggcgtgagcgccgagcccaccaccagaacctacgacctgaacaagccccccgagttcagcttcgagaaggccagagtgagaaaggacagcagcgagaagaagctgatcaccgacgccctgaacaagaaccagttcctgaagagactggacccccagcagatcaaggacatggtggagtgcatgtacggcagaaactaccagcagggcagctacatcatcaagcagggcgagcccggcaaccacatcttcgtgctggccgagggcagactggaggtgttccagggcgagaagctgctgagcagcatccccatgtggaccaccttcggcgagctggccatcctgtacaactgcaccagaaccgccagcgtgaaggccatcaccaacgtgaagacctgggccctggacagagaggtgttccagaacatcatgagaagaaccgcccaggccagagacgagcagtacagaaacttcctgagaagcgtgagcctgctgaagaacctgcccgaggacaagctgaccaagatcatcgactgcctggaggtggagtactacgacaagggcgactacatcatcagagagggcgaggagggcagcaccttcttcatcctggccaagggcaaggtgaaggtgacccagagcaccgagggccacgaccagccccagctgatcaagaccctgcagaagggcgagtacttcggcgagaaggccctgatcagcgacgacgtgagaagcgccaacatcatcgccgaggagaacgacgtggcctgcctggtgatcgacagagagaccttcaaccagaccgtgggcaccttcgaggagctgcagaagtacctggagggctacgtggccaacctgaacagagacgacgagaagagacacgccaagagaagcatgagcaactggaagctgagcaaggccctgagcctggagatgatccagctgaaggagaaggtgaaggtgaagaacgagaacgtggccttcgccatgaagtgcatcagaaagaagcacatcgtggacaccaagcagcaggagcacgtgtacagcgagaagagaatcctggaggagctgtgcagccccttcatcgtgaagctgtacagaaccttcaaggacaacaagtacgtgtacatgctgctggaggcctgcctgggcggcgagctgtggagcatcctgagagacagaggcagcttcgacgagcccaccagcaagttctgcgtggcctgcgtgaccgaggccttcgactacctgcacagactgggcatcatctacagagacctgaagcccgagaacctgatcctggacgccgagggctacctgaagctggtggacttcggcttcgccaagaagatcggcagcggccagaagacctggaccttctgcggcacccccgagtacgtggcccccgaggtgatcctgaacaagggccacgacttcagcgtggacttctggagcctgggcatcctggtgtacgagctgctgaccggcaacccccccttcagcggcgtggaccagatgatgacctacaacctgatcctgaagggcatcgagaagatggacttccccagaaagatcaccagaagacccgaggacctgatcagaagactgtgcagacagaaccccaccgagagactgggcaacctgaagaacggcatcaacgacatcaagaagcacagatggctgaacggcttcaactgggagggcctgaaggccagaagcctgcccagccccctgcagagagagctgaagggccccatcgaccacagctacttcgacaagtacccccccgagaagggcatgccccccgacgagctgagcggctgggacaaggacttctag

SEQ ID NO: 95212 - DNA, 1029 bp, synthetic construct
  misc_feature 1..1029: note = Description of Artificial Sequence: Synthetic coding sequence
  source 1..1029: mol_type = other DNA
atgagcaactggaagctgagcaaggccctgagcctggagatgatccagctgaaggagaaggtggccagattcagcagcagcagccccttccagaacctggagatcatcgccaccctgggcgtgggcggcttcggcagagtggagctggtgaaggtgaagaacgagaacgtggccttcgccatgaagtgcatcagaaagaagcacatcgtggacaccaagcagcaggagcacgtgtacagcgagaagagaatcctggaggagctgtgcagccccttcatcgtgaagctgtacagaaccttcaaggacaacaagtacgtgtacatgctgctggaggcctgcctgggcggcgagctgtggagcatcctgagagacagaggcagcttcgacgagcccaccagcaagttctgcgtggcctgcgtgaccgaggccttcgactacctgcacagactgggcatcatctacagagacctgaagcccgagaacctgatcctggacgccgagggctacctgaagctggtggacttcggcttcgccaagaagatcggcagcggccagaagacctggaccttctgcggcacccccgagtacgtggcccccgaggtgatcctgaacaagggccacgacttcagcgtggacttctggagcctgggcatcctggtgtacgagctgctgaccggcaacccccccttcagcggcgtggaccagatgatgacctacaacctgatcctgaagggcatcgagaagatggacttccccagaaagatcaccagaagacccgaggacctgatcagaagactgtgcagacagaaccccaccgagagactgggcaacctgaagaacggcatcaacgacatcaagaagcacagatggctgaacggcttcaactgggagggcctgaaggccagaagcctgcccagccccctgcagagagagctgaagggccccatcgaccacagctacttcgacaagtacccccccgagaagggcatgccccccgacgagctgagcggctgggacaaggacttctag

SEQ ID NO: 95213 - DNA, 942 bp, synthetic construct
  misc_feature 1..942: note = Description of Artificial Sequence: Synthetic coding sequence
  source 1..942: mol_type = other DNA
atgagccagagcagacacagagccgaggccccccccctggagagagaggacagcggcaccttcagcctgggcaagatgatcaccgccaagcccggcaagacccccatccaggtgctgcacgagtacggcatgaagaccaagaacatccccgtgtacgagtgcgagagaagcgacgtgcagatccacgtgcccaccttcaccttcagagtgaccgtgggcgacatcacctgcaccggcgagggcaccagcaagaagctggccaagcacagagccgccgaggccgccatcaacatcctgaaggccaacgccagcatctgcttcgccgtgcccgaccccctgatgcccgaccccagcaagcagcccaagaaccagctgaaccccatcggcagcctgcaggagctggccatccaccacggctggagactgcccgagtacaccctgagccaggagggcggccccgcccacaagagagagtacaccaccatctgcagactggagagcttcatggagaccggcaagggcgccagcaagaagcaggccaagagaaacgccgccgagaagttcctggccaagttcagcaacatcagccccgagaaccacatcagcctgaccaacgtggtgggccacagcctgggctgcacctggcacagcctgagaaacagccccggcgagaagatcaacctgctgaagagaagcctgctgagcatccccaacaccgactacatccagctgctgagcgagatcgccaaggagcagggcttcaacatcacctacctggacatcgacgagctgagcgccaacggccagtaccagtgcctggccgagctgagcaccagccccatcaccgtgtgccacggcagcggcatcagctgcggcaacgcccagagcgacgccgcccacaacgccctgcagtacctgaagatcatcgccgagagaaagtag

SEQ ID NO: 95214 - DNA, 909 bp, synthetic construct
  misc_feature 1..909: note = Description of Artificial Sequence: Synthetic coding sequence
  source 1..909: mol_type = other DNA
atgcagagcacccccttctgcggcttctgcagcctgggcaagatgatcaccgccaagcccggcaagacccccatccaggtgctgcacgagtacggcatgaagaccaagaacatccccgtgtacgagtgcgagagaagcgacgtgcagatccacgtgcccaccttcaccttcagagtgaccgtgggcgacatcacctgcaccggcgagggcaccagcaagaagctggccaagcacagagccgccgaggccgccatcaacatcctgaaggccaacgccagcatctgcttcgccgtgcccgaccccctgatgcccgaccccagcaagcagcccaagaaccagctgaaccccatcggcagcctgcaggagctggccatccaccacggctggagactgcccgagtacaccctgagccaggagggcggccccgcccacaagagagagtacaccaccatctgcagactggagagcttcatggagaccggcaagggcgccagcaagaagcaggccaagagaaacgccgccgagaagttcctggccaagttcagcaacatcagccccgagaaccacatcagcctgaccaacgtggtgggccacagcctgggctgcacctggcacagcctgagaaacagccccggcgagaagatcaacctgctgaagagaagcctgctgagcatccccaacaccgactacatccagctgctgagcgagatcgccaaggagcagggcttcaacatcacctacctggacatcgacgagctgagcgccaacggccagtaccagtgcctggccgagctgagcaccagccccatcaccgtgtgccacggcagcggcatcagctgcggcaacgcccagagcgacgccgcccacaacgccctgcagtacctgaagatcatcgccgagagaaagtag

SEQ ID NO: 95215 - DNA, 603 bp, synthetic construct
  misc_feature 1..603: note = Description of Artificial Sequence: Synthetic coding sequence
  source 1..603: mol_type = other DNA
atgcccgaccccagcaagcagcccaagaaccagctgaaccccatcggcagcctgcaggagctggccatccaccacggctggagactgcccgagtacaccctgagccaggagggcggccccgcccacaagagagagtacaccaccatctgcagactggagagcttcatggagaccggcaagggcgccagcaagaagcaggccaagagaaacgccgccgagaagttcctggccaagttcagcaacatcagccccgagaaccacatcagcctgaccaacgtggtgggccacagcctgggctgcacctggcacagcctgagaaacagccccggcgagaagatcaacctgctgaagagaagcctgctgagcatccccaacaccgactacatccagctgctgagcgagatcgccaaggagcagggcttcaacatcacctacctggacatcgacgagctgagcgccaacggccagtaccagtgcctggccgagctgagcaccagccccatcaccgtgtgccacggcagcggcatcagctgcggcaacgcccagagcgacgccgcccacaacgccctgcagtacctgaagatcatcgccgagagaaagtag

SEQ ID NO: 95216 - DNA, 867 bp, synthetic construct
  misc_feature 1..867: note = Description of Artificial Sequence: Synthetic coding sequence
  source 1..867: mol_type = other DNA
atgatcaccgccaagcccggcaagacccccatccaggtgctgcacgagtacggcatgaagaccaagaacatccccgtgtacgagtgcgagagaagcgacgtgcagatccacgtgcccaccttcaccttcagagtgaccgtgggcgacatcacctgcaccggcgagggcaccagcaagaagctggccaagcacagagccgccgaggccgccatcaacatcctgaaggccaacgccagcatctgcttcgccgtgcccgaccccctgatgcccgaccccagcaagcagcccaagaaccagctgaaccccatcggcagcctgcaggagctggccatccaccacggctggagactgcccgagtacaccctgagccaggagggcggccccgcccacaagagagagtacaccaccatctgcagactggagagcttcatggagaccggcaagggcgccagcaagaagcaggccaagagaaacgccgccgagaagttcctggccaagttcagcaacatcagccccgagaaccacatcagcctgaccaacgtggtgggccacagcctgggctgcacctggcacagcctgagaaacagccccggcgagaagatcaacctgctgaagagaagcctgctgagcatccccaacaccgactacatccagctgctgagcgagatcgccaaggagcagggcttcaacatcacctacctggacatcgacgagctgagcgccaacggccagtaccagtgcctggccgagctgagcaccagccccatcaccgtgtgccacggcagcggcatcagctgcggcaacgcccagagcgacgccgcccacaacgccctgcagtacctgaagatcatcgccgagagaaagtag

SEQ ID NO: 95217 - DNA, 1077 bp, synthetic construct
  misc_feature 1..1077: note = Description of Artificial Sequence: Synthetic coding sequence
  source 1..1077: mol_type = other DNA
atggaggcccccggcctggcccaggccgccgccgccgagagcgacagcagaaaggtggccgaggagacccccgacggcgcccccgccctgtgccccagccccgaggccctgagccccgagccccccgtgtacagcctgcaggacttcgacaccctggccaccgtgggcaccggcaccttcggcagagtgcacctggtgaaggagaagaccgccaagcacttcttcgccctgaaggtgatgagcatccccgacgtgatcagactgaagcaggagcagcacgtgcacaacgagaagagcgtgctgaaggaggtgagccaccccttcctgatcagactgttctggacctggcacgacgagagattcctgtacatgctgatggagtacgtgcccggcggcgagctgttcagctacctgagaaacagaggcagattcagcagcaccaccggcctgttctacagcgccgagatcatctgcgccatcgagtacctgcacagcaaggagatcgtgtacagagacctgaagcccgagaacatcctgctggacagagacggccacatcaagctgaccgacttcggcttcgccaagaagctggtggacagaacctggaccctgtgcggcacccccgagtacctggcccccgaggtgatccagagcaagggccacggcagagccgtggactggtgggccctgggcatcctgatcttcgagatgctgagcggcttcccccccttcttcgacgacaaccccttcggcatctaccagaagatcctggccggcaagatcgacttccccagacacctggacttccacgtgaaggacctgatcaagaagctgctggtggtggacagaaccagaagactgggcaacatgaagaacggcgccaacgacgtgaagcaccacagatggttcagaagcgtggactgggaggccgtgccccagagaaagctgaagccccccatcgtgcccaagatcgccggcgacggcgacaccagcaacttcgagacctaccccgagaacgactgggacaccgccgcccccgtgccccagaaggacctggagatcttcaagaacttctag

SEQ ID NO: 95218 - DNA, 1983 bp, synthetic construct
  misc_feature 1..1983: note = Description of Artificial Sequence: Synthetic coding sequence
  source 1..1983: mol_type = other DNA
atggacgactggaagcccagccccctgatcaagcccttcggcgccagaaagaagagaagctggtacctgacctggaagtacaagctgaccaaccagagagccctgagaagattctgccagaccggcgccgtgctgttcctgctggtgaccgtgatcgtgaacatcaagctgatcctggacaccagaagagccatcagcgaggccaacgaggaccccgagcccgagcaggactacgacgaggccctgggcagactggagccccccagaagaagaggcagcggccccagaagagtgctggacgtggaggtgtacagcagcagaagcaaggtgtacgtggccgtggacggcaccaccgtgctggaggacgaggccagagagcagggcagaggcatccacgtgatcgtgctgaaccaggccaccggccacgtgatggccaagagagtgttcgacacctacagcccccacgaggacgaggccatggtgctgttcctgaacatggtggcccccggcagagtgctgatctgcaccgtgaaggacgagggcagcttccacctgaaggacaccgccaaggccctgctgagaagcctgggcagccaggccggccccgccctgggctggagagacacctgggccttcgtgggcagaaagggcggccccgtgttcggcgagaagcacagcaagagccccgccctgagcagctggggcgaccccgtgctgctgaagaccgacgtgcccctgagcagcgccgaggaggccgagtgccactgggccgacaccgagctgaacagaagaagaagaagattctgcagcaaggtggagggctacggcagcgtgtgcagctgcaaggaccccacccccatcgagttcagccccgaccccctgcccgacaacaaggtgctgaacgtgcccgtggccgtgatcgccggcaacagacccaactacctgtacagaatgctgagaagcctgctgagcgcccagggcgtgagcccccagatgatcaccgtgttcatcgacggctactacgaggagcccatggacgtggtggccctgttcggcctgagaggcatccagcacacccccatcagcatcaagaacgccagagtgagccagcactacaaggccagcctgaccgccaccttcaacctgttccccgaggccaagttcgccgtggtgctggaggaggacctggacatcgccgtggacttcttcagcttcctgagccagagcatccacctgctggaggaggacgacagcctgtactgcatcagcgcctggaacgaccagggctacgagcacaccgccgaggaccccgccctgctgtacagagtggagaccatgcccggcctgggctgggtgctgagaagaagcctgtacaaggaggagctggagcccaagtggcccacccccgagaagctgtgggactgggacatgtggatgagaatgcccgagcagagaagaggcagagagtgcatcatccccgacgtgagcagaagctaccacttcggcatcgtgggcctgaacatgaacggctacttccacgaggcctacttcaagaagcacaagttcaacaccgtgcccggcgtgcagctgagaaacgtggacagcctgaagaaggaggcctacgaggtggaggtgcacagactgctgagcgaggccgaggtgctggaccacagcaagaacccctgcgaggacagcttcctgcccgacaccgagggccacacctacgtggccttcatcagaatggagaaggacgacgacttcaccacctggacccagctggccaagtgcctgcacatctgggacctggacgtgagaggcaaccacagaggcctgtggagactgttcagaaagaagaaccacttcctgatggtgggcgtgcccgccagcccctacagcgtgaagaagccccccagcgtgacccccatcttcctggagcccccccccaaggaggagggcgcccccggcgcccccgagcagacctag

SEQ ID NO: 95219 - DNA, 2247 bp, synthetic construct
  misc_feature 1..2247: note = Description of Artificial Sequence: Synthetic coding sequence
  source 1..2247: mol_type = other DNA
atggacgactggaagcccagccccctgatcaagcccttcggcgccagaaagaagagaagctggtacctgacctggaagtacaagctgaccaaccagagagccctgagaagattctgccagaccggcgccgtgctgttcctgctggtgaccgtgatcgtgaacatcaagctgatcctggacaccagaagagccatcagcgaggccaacgaggaccccgagcccgagcaggactacgacgaggccctgggcagactggagccccccagaagaagaggcagcggccccagaagagtgctggacgtggaggtgtacagcagcagaagcaaggtgtacgtggccgtggacggcaccaccgtgctggaggacgaggccagagagcagggcagaggcatccacgtgatcgtgctgaaccaggccaccggccacgtgatggccaagagagtgttcgacacctacagcccccacgaggacgaggccatggtgctgttcctgaacatggtggcccccggcagagtgctgatctgcaccgtgaaggacgagggcagcttccacctgaaggacaccgccaaggccctgctgagaagcctgggcagccaggccggccccgccctgggctggagagacacctgggccttcgtgggcagaaagggcggccccgtgttcggcgagaagcacagcaagagccccgccctgagcagctggggcgaccccgtgctgctgaagaccgacgtgcccctgagcagcgccgaggaggccgagtgccactgggccgacaccgagctgaacagaagaagaagaagattctgcagcaaggtggagggctacggcagcgtgtgcagctgcaaggaccccacccccatcgagttcagccccgaccccctgcccgacaacaaggtgctgaacgtgcccgtggccgtgatcgccggcaacagacccaactacctgtacagaatgctgagaagcctgctgagcgcccagggcgtgagcccccagatgatcaccgtgttcatcgacggctactacgaggagcccatggacgtggtggccctgttcggcctgagaggcatccagcacacccccatcagcatcaagaacgccagagtgagccagcactacaaggccagcctgaccgccaccttcaacctgttccccgaggccaagttcgccgtggtgctggaggaggacctggacatcgccgtggacttcttcagcttcctgagccagagcatccacctgctggaggaggacgacagcctgtactgcatcagcgcctggaacgaccagggctacgagcacaccgccgaggaccccgccctgctgtacagagtggagaccatgcccggcctgggctgggtgctgagaagaagcctgtacaaggaggagctggagcccaagtggcccacccccgagaagctgtgggactgggacatgtggatgagaatgcccgagcagagaagaggcagagagtgcatcatccccgacgtgagcagaagctaccacttcggcatcgtgggcctgaacatgaacggctacttccacgaggcctacttcaagaagcacaagttcaacaccgtgcccggcgtgcagctgagaaacgtggacagcctgaagaaggaggcctacgaggtggaggtgcacagactgctgagcgaggccgaggtgctggaccacagcaagaacccctgcgaggacagcttcctgcccgacaccgagggccacacctacgtggccttcatcagaatggagaaggacgacgacttcaccacctggacccagctggccaagtgcctgcacatctgggacctggacgtgagaggcaaccacagaggcctgtggagactgttcagaaagaagaaccacttcctgatgagcgaggaggccaccctgagccaccccaacttccccggcgccacccccaagggcggcggcagccccagaagccccagaaccgacatgagacccccccccggcccctgcggcgccggccccggcagcgagagcaacctgttcatcgactgccccgagggcctggagaacagacccaacctggagggcctggacttcttcctgggctggaacgccgccctgagagtgggcctggccctgacccaggagaccgccgtgcccaacccctggaccggccccgccggcgcccacatgctgacccagacccacagcgagaccctgagacactggaccagaccccccctgagcctgctgttcgtgcagatcagcaaggccggctag

SEQ ID NO: 95220 - DNA, 2247 bp, synthetic construct; identical to SEQ ID NO: 95219
  misc_feature 1..2247: note = Description of Artificial Sequence: Synthetic coding sequence
  source 1..2247: mol_type = other DNA

SEQ ID NO: 95221 - DNA, 603 bp, synthetic construct
  misc_feature 1..603: note = Description of Artificial Sequence: Synthetic coding sequence
  source 1..603: mol_type = other DNA
atggacgactggaagcccagccccctgatcaagcccttcggcgccagaaagaagagaagctggtacctgacctggaagtacaagctgaccaaccagagagccctgagaagattctgccagaccggcgccgtgctgttcctgctggtgaccgtgatcgtgaacatcaagctgatcctggacaccagaagagccatcagcgaggccaacgaggaccccgagcccgagcaggactacgacgaggccctgggcagactggagccccccagaagaagaggcagcggccccagaagagtgctggacgtggaggtgtacagcagcagaagcaaggtgtacgtggccgtggacggcaccaccgtgctggaggacgaggccagagagcagggcagaggcatccacgtgatcgtgctgaaccaggccaccggccacgtgatggccaagagagtgttcgacacctacagcccccacgaggacgaggccatggtgctgttcctgaacatggtggcccccggcagagtgctgatctgcaccgtgaaggtgctgagcagcggcagaaacatcctgaaccacctgcccagcctgcccggcggcacccagagctgctag

SEQ ID NO: 95222 - DNA, 1917 bp, synthetic construct
  misc_feature 1..1917: note = Description of Artificial Sequence: Synthetic coding sequence
  source 1..1917: mol_type = other DNA
atggagggcaccaaggagatcaaggtgagcaacagaagaatccaggagcactggaccggcgccgtgctgttcctgctggtgaccgtgatcgtgaacatcaagctgatcctggacaccagaagagccatcagcgaggccaacgaggaccccgagcccgagcaggactacgacgaggccctgggcagactggagccccccagaagaagaggcagcggccccagaagagtgctggacgtggaggtgtacagcagcagaagcaaggtgtacgtggccgtggacggcaccaccgtgctggaggacgaggccagagagcagggcagaggcatccacgtgatcgtgctgaaccaggccaccggccacgtgatggccaagagagtgttcgacacctacagcccccacgaggacgaggccatggtgctgttcctgaacatggtggcccccggcagagtgctgatctgcaccgtgaaggacgagggcagcttccacctgaaggacaccgccaaggccctgctgagaagcctgggcagccaggccggccccgccctgggctggagagacacctgggccttcgtgggcagaaagggcggccccgtgttcggcgagaagcacagcaagagccccgccctgagcagctggggcgaccccgtgctgctgaagaccgacgtgcccctgagcagcgccgaggaggccgagtgccactgggccgacaccgagctgaacagaagaagaagaagattctgcagcaaggtggagggctacggcagcgtgtgcagctgcaaggaccccacccccatcgagttcagccccgaccccctgcccgacaacaaggtgctgaacgtgcccgtggccgtgatcgccggcaacagacccaactacctgtacagaatgctgagaagcctgctgagcgcccagggcgtgagcccccagatgatcaccgtgttcatcgacggctactacgaggagcccatggacgtggtggccctgttcggcctgagaggcatccagcacacccccatcagcatcaagaacgccagagtgagccagcactacaaggccagcctgaccgccaccttcaacctgttccccgaggccaagttcgccgtggtgctggaggaggacctggacatcgccgtggacttcttcagcttcctgagccagagcatccacctgctggaggaggacgacagcctgtactgcatcagcgcctggaacgaccagggctacgagcacaccgccgaggaccccgccctgctgtacagagtggagaccatgcccggcctgggctgggtgctgagaagaagcctgtacaaggaggagctggagcccaagtggcccacccccgagaagctgtgggactgggacatgtggatgagaatgcccgagcagagaagaggcagagagtgcatcatccccgacgtgagcagaagctaccacttcggcatcgtgggcctgaacatgaacggctacttccacgaggcctacttcaagaagcacaagttcaacaccgtgcccggcgtgcagctgagaaacgtggacagcctgaagaaggaggcctacgaggtggaggtgcacagactgctgagcgaggccgaggtgctggaccacagcaagaacccctgcgaggacagcttcctgcccgacaccgagggccacacctacgtggccttcatcagaatggagaaggacgacgacttcaccacctggacccagctggccaagtgcctgcacatctgggacctggacgtgagaggcaaccacagaggcctgtggagactgttcagaaagaagaaccacttcctgatggtgggcgtgcccgccagcccctacagcgtgaagaagccccccagcgtgacccccatcttcctggagcccccccccaaggaggagggcgcccccggcgcccccgagcagacctag

SEQ ID NO: 95223 - DNA, 861 bp, synthetic construct
  misc_feature 1..861: note = Description of Artificial Sequence: Synthetic coding sequence
  source 1..861: mol_type = other DNA
atgagcgacagcgagaagctgaacctggacagcatcatcggcagactgctggagggcgacatccacggccagtactacgacctgctgagactgttcgagtacggcggcttcccccccgagagcaactacctgttcctgggcgactacgtggacagaggcaagcagagcctggagaccatctgcctgctgctggcctacaagatcaagtaccccgagaacttcttcctgctgagaggcaaccacgagtgcgccagcatcaacagaatctacggcttctacgacgagtgcaagagaagatacaacatcaagctgtggaagaccttcaccgactgcttcaactgcctgcccatcgccgccatcgtggacgagaagatcttctgctgccacggcggcctgagccccgacctgcagagcatggagcagatcagaagaatcatgagacccaccgacgtgcccgaccagggcctgctgtgcgacctgctgtggagcgaccccgacaaggacgtgcagggctggggcgagaacgacagaggcgtgagcttcaccttcggcgccgaggtggtggccaagttcctgcacaagcacgacctggacctgatctgcagagcccaccaggtggtggaggacggctacgagttcttcgccaagagacagctggtgaccctgttcagcgcccccaactactgcggcgagttcgacaacgccggcgccatgatgagcgtggacgagaccctgatgtgcagcttccagatcctgaagcccgccgacaagaacaagggcaagtacggccagttcagcggcctgaaccccggcggcagacccatcaccccccccagaaacagcgccaaggccaagaagtag

SEQ ID NO: 95224 - DNA, 1548 bp, synthetic construct
  misc_feature 1..1548: note = Description of Artificial Sequence: Synthetic coding sequence
  source 1..1548: mol_type = other DNA
atggccgagctggagcacctgggcggcaagagagccgagagcgccagaatgagaagagccgagcagctgagaagatggagaggcagcctgaccgagcaggagcccgccgagagaagaggcgccggcagacagcccctgaccagaagaggcagccccagagtgagattcgaggacggcgccgtgttcctggccgcctgcagcagcggcgacaccgacgaggtgagaaagctgctggccagaggcgccgacatcaacaccgtgaacgtggacggcctgaccgccctgcaccaggcctgcatcgacgagaacctggacatggtgaagttcctggtggagaacagagccaacgtgaaccagcaggacaacgagggctggacccccctgcacgccgccgccagctgcggctacctgaacatcgccgagtacttcatcaaccacggcgccagcgtgggcatcgtgaacagcgagggcgaggtgcccagcgacctggccgaggagcccgccatgaaggacctgctgctggagcaggtgaagaagcagggcgtggacctggagcagagcagaaaggaggaggagcagcagatgctgcaggacgccagacagtggctgaacagcggcaagatcgaggacgtgagacaggccagaagcggcgccaccgccctgcacgtggccgccgccaagggctacagcgaggtgctgagactgctgatccaggccggctacgagctgaacgtgcaggactacgacggctggacccccctgcacgccgccgcccactggggcgtgaaggaggcctgcagcatcctggccgaggccctgtgcgacatggacatcagaaacaagctgggccagacccccttcgacgtggccgacgagggcctggtggagcacctggagctgctgcagaagaagcagaacgtgctgagaagcgagaaggagaccagaaacaagctgatcgagagcgacctgaacagcaagatccagagcggcttcttcaagaacaaggagaagatgctgtacgaggaggagacccccaagagccaggagatggaggaggagaacaaggagagcagcagcagcagcagcgaggaggaggagggcgaggacgaggccagcgagagcgagaccgagaaggaggccgacaagaagcccgaggccttcgtgaaccacagcaacagcgagagcaagagcagcatcaccgagcagatccccgcccccgcccagaacaccttcagcgccagcagcgccagaagattcagcagcggcctgttcaacaagcccgaggagcccaaggacgagagccccagcagctggagactgggcctgagaaagaccggcagccacaacatgctgagcgaggtggccaacagcagagagcccatcagagacagaggcagcagcatctacagaagcagcagcagccccagaatcagcgccctgctggacaacaaggacaaggtgcagttcggcagagtgtggggcaacagcaaggccgtgttcttcttccacgagaacagcatcctgggcaccaacgagaacatcttctag

SEQ ID NO: 95225 - DNA, 4125 bp, synthetic construct
  misc_feature 1..4125: note = Description of Artificial Sequence: Synthetic coding sequence
  source 1..4125: mol_type = other DNA
atgctgaagaccgagagcagcggcgagagaaccaccctgagaagcgccagcccccacagaaacgcctacagaaccgagttccaggccctgaagagcaccttcgacaagcccaagagcgacggcgagcagaagaccaaggagggcgagggcagccagcagagcagaggcagaaagtacggcagcaacgtgaacagaatcaagaacctgttcatgcagatgggcatggagcccaacgagaacgccgccgtgatcgccaagaccagaggcaagggcggccacagcagcccccagagaagaatgaagcccaaggagttcctggagaagaccgacggcagcgtggtgaagctggagagcagcgtgagcgagagaatcagcagattcgacaccatgtacgacggccccagctacagcaagttcaccgagaccagaaagatgttcgagagaagcgtgcacgagagcggccagaacaacagatacagccccaagaaggagaaggccggcggcagcgagccccaggacgagtggggcggcagcaagagcaacagaggcagcaccgacagcctggacagcctgagcagcagaaccgaggccgtgagccccaccgtgagccagctgagcgccgtgttcgagaacaccgacagccccagcgccatcatcagcgagaaggccgagaacaacgagtacagcgtgaccggccactaccccctgaacctgcccagcgtgaccgtgaccaacctggacaccttcggccacctgaaggacagcaacagctggccccccagcaacaagagaggcgtggacaccgaggacgcccacaagagcaacgccacccccgtgcccgaggtggccagcaagagcaccagcctggccagcatccccggcgaggagatccagcagagcaaggagcccgaggacagcaccagcaaccagcagacccccgacagcatcgacaaggacggccccgaggagccctgcgccgagagcaaggccatgcccaagagcgagatccccagcccccagagccagctgctggaggacgccgaggccaacctggtgggcagagaggccgccaagcagcagagaaaggagctggccggcggcgacttcaccagccccgacgccagcgccagcagctgcggcaaggaggtgcccgaggacagcaacaacttcgacggcagccacgtgtacatgcacagcgactacaacgtgtacagagtgagaagcagatacaacagcgactggggcgagaccggcaccgagcaggacgaggaggaggacagcgacgagaacagctactaccagcccgacatggagtacagcgagatcgtgggcctgcccgaggaggaggagatccccgccaacagaaagatcaagttcagcagcgcccccatcaaggtgttcaacacctacagcaacgaggactacgacagaagaaacgacgaggtggaccccgtggccgccagcgccgagtacgagctggagaagagagtggagaagctggagctgttccccgtggagctggagaaggacgaggacggcctgggcatcagcatcatcggcatgggcgtgggcgccgacgccggcctggagaagctgggcatcttcgtgaagaccgtgaccgagggcggcgccgcccagagagacggcagaatccaggtgaacgaccagatcgtggaggtggacggcatcagcctggtgggcgtgacccagaacttcgccgccaccgtgctgagaaacaccaagggcaacgtgagattcgtgatcggcagagagaagcccggccaggtgagcgaggtggcccagctgatcagccagaccctggagcaggagagaagacagagagagctgctggagcagcactacgcccagtacgacgccgacgacgacgagaacaccgtggccgagctgcagggcatgagcggcaactgcaacaacaacaacaactacttcctgaagaccggcgagtacgccaccgacgaggaggaggacgaggtgggccccgtgctgcccggcagcgacatggccatcgaggtgttcgagctgcccgagaacgaggacatgttcagccccagcgagctggacaccagcaagctgagccacaagttcaaggagctgcagatcaagcacgccgtgaccgaggccgagatccagaagctgaagaccaagctgcaggccgccgagaacgagaaggtgagatgggagctggagaagacccagctgcagcagaacatcgaggagaacaaggagagaatgctgaagctggagagctactggatcgaggcccagaccctgtgccacaccgtgaacgagcacctgaaggagacccagagccagtaccaggccctggagaagaagtacaacaaggccaagaagctgatcaaggacttccagcagaaggagctggacttcatcaagagacaggaggccgagagaaagaagatcgaggacctggagaaggcccacctggtggaggtgcagggcctgcaggtgagaatcagagacctggaggccgaggtgttcagactgctgaagcagaacggcacccaggtgaacaacaacaacaacatcttcgagagaagaaccagcctgggcgaggtgagcaagggcgacaccatggagaacctggacggcaagcagaccagctgccaggacggcctgagccaggacctgaacgaggccgtgcccgagaccgagagactggacagcaaggccctgaagaccagagcccagctgagcgtgaagaacagaagacagagacccagcagaaccagactgtacgacagcgtgagcagcaccgacggcgaggacagcctggagagaaagcccagcaacagcttctacaaccacatgcacatcaccaagctgctgccccccaagggcctgagaaccagcagccccgagagcgacagcggcgtgccccccctgacccccgtggacagcaacgtgcccttcagcagcgaccacatcgccgagttccaggaggagcccctggaccccgagatgggccccctgagcagcatgtggggcgacaccagcctgttcagcaccagcaagagcgaccacgacgtggaggagagcccctgccaccaccagaccaccaacaagaagatcctgagagagaaggacgacgccaaggaccccaagagcctgagagccagcagcagcctggccgtgcagggcggcaagatcaagagaaagttcgtggacctgggcgcccccctgagaagaaacagcagcaagggcaagaagtggaaggagaaggagaaggaggccagcagattcagcgccggcagcagaatcttcagaggcagactggagaactggacccccaagccctgcagcaccgcccagaccagcaccagaagcccctgcatgcccttcagctggttcaacgacagcagaaagggcagctacagcttcagaaacctgcccgcccccaccagcagcctgcagcccagccccgagaccctgatcagcgacaagaagggcagcaaggtggagaacacctggatcaccaaggccaacaagagaaaccccaaccccagcagcagcagcatcttcggcagacacagccagctgatgagcgtggtgtggatccaggagaccaacaacttcaccttcaacgacgacttcagccccagcagcaccagcagcgccgacctgagcggcctgggcgccgagcccaagacccccggcctgagccagagcctggccctgagcagcgacgagatcctggacgacggccagagccccaagcacagccagtgccagaacagagccgtgcaggagtggagcgtgcagcaggtgagccactggctgatgagcctgaacctggagcagtacgtgagcgagttcagcgcccagaacatcaccggcgagcagctgctgcagctggacggcaacaagctgaaggccctgggcatgaccgccagccaggacagagccgtggtgaagaagaagctgaaggagatgaagatgagcctggagaaggccagaaaggcccaggagaagatggagaagcagagagagaagctgagaagaaaggagcaggagcagatgcagagaaagagcaagaagaccgagaagatgaccagcaccaccgccgagggcgccggcgagcagtag

SEQ ID NO: 95226 - DNA, 1026 bp, synthetic construct
  misc_feature 1..1026: note = Description of Artificial Sequence: Synthetic coding sequence
  source 1..1026: mol_type = other DNA
atgagcgacagcgagaagctgaacctggacagcatcatcggcagactgctggagggcagcagagtgctgaccccccactgcgcccccgtgcagggcagcagacccggcaagaacgtgcagctgaccgagaacgagatcagaggcctgtgcctgaagagcagagagatcttcctgagccagcccatcctgctggagctggaggcccccctgaagatctgcggcgacatccacggccagtactacgacctgctgagactgttcgagtacggcggcttcccccccgagagcaactacctgttcctgggcgactacgtggacagaggcaagcagagcctggagaccatctgcctgctgctggcctacaagatcaagtaccccgagaacttcttcctgctgagaggcaaccacgagtgcgccagcatcaacagaatctacggcttctacgacgagtgcaagagaagatacaacatcaagctgtggaagaccttcaccgactgcttcaactgcctgcccatcgccgccatcgtggacgagaagatcttctgctgccacggcggcctgagccccgacctgcagagcatggagcagatcagaagaatcatgagacccaccgacgtgcccgaccagggcctgctgtgcgacctgctgtggagcgaccccgacaaggacgtgcagggctggggcgagaacgacagaggcgtgagcttcaccttcggcgccgaggtggtggccaagttcctgcacaagcacgacctggacctgatctgcagagcccaccaggtggtggaggacggctacgagttcttcgccaagagacagctggtgaccctgttcagcgcccccaactactgcggcgagttcgacaacgccggcgccatgatgagcgtggacgagaccctgatgtgcagcttccagatcctgaagcccgccgacaagaacaagggcaagtacggccagttcagcggcctgaaccccggcggcagacccatcaccccccccagaaacagcgccaaggccaagaagtag

SEQ ID NO: 95227 - DNA, 993 bp, synthetic construct
  misc_feature 1..993: note = Description of Artificial Sequence: Synthetic coding sequence
  source 1..993: mol_type = other DNA
atgagcgacagcgagaagctgaacctggacagcatcatcggcagactgctggaggtgcagggcagcagacccggcaagaacgtgcagctgaccgagaacgagatcagaggcctgtgcctgaagagcagagagatcttcctgagccagcccatcctgctggagctggaggcccccctgaagatctgcggcgacatccacggccagtactacgacctgctgagactgttcgagtacggcggcttcccccccgagagcaactacctgttcctgggcgactacgtggacagaggcaagcagagcctggagaccatctgcctgctgctggcctacaagatcaagtaccccgagaacttcttcctgctgagaggcaaccacgagtgcgccagcatcaacagaatctacggcttctacgacgagtgcaagagaagatacaacatcaagctgtggaagaccttcaccgactgcttcaactgcctgcccatcgccgccatcgtggacgagaagatcttctgctgccacggcggcctgagccccgacctgcagagcatggagcagatcagaagaatcatgagacccaccgacgtgcccgaccagggcctgctgtgcgacctgctgtggagcgaccccgacaaggacgtgcagggctggggcgagaacgacagaggcgtgagcttcaccttcggcgccgaggtggtggccaagttcctgcacaagcacgacctggacctgatctgcagagcccaccaggtggtggaggacggctacgagttcttcgccaagagacagctggtgaccctgttcagcgcccccaactactgcggcgagttcgacaacgccggcgccatgatgagcgtggacgagaccctgatgtgcagcttccagatcctgaagcccgccgacaagaacaagggcaagtacggccagttcagcggcctgaaccccggcggcagacccatcaccccccccagaaacagcgccaaggccaagaagtag

SEQ ID NO: 95228 - DNA, 1245 bp, synthetic construct
  misc_feature 1..1245: note = Description of Artificial Sequence: Synthetic coding sequence
  source 1..1245: mol_type = other DNA
atgagacagagagccgacagaagaagcatggtgagcaccagcggcgccgccaccgccagcagcgccgccggccccagcagaggcgccgcccacagccccagcagcgccccccacgccagcagacacagaccccccttcagcagcagagccaccggcctgctgcagcagagacagcactgcgtgcaccactgcacccagctgtgccccagagtgcagaccccctgcctgccccccccccccgcccccgccaccgagctgcacagctacctgcagcagggcggcgagagaggcctgctggacaccacccccggcaccgccggctggggcaccagcgccaccggcgccgtgcagggcagcagacccggcaagaacgtgcagctgaccgagaacgagatcagaggcctgtgcctgaagagcagagagatcttcctgagccagcccatcctgctggagctggaggcccccctgaagatctgcggcgacatccacggccagtactacgacctgctgagactgttcgagtacggcggcttcccccccgagagcaactacctgttcctgggcgactacgtggacagaggcaagcagagcctggagaccatctgcctgctgctggcctacaagatcaagtaccccgagaacttcttcctgctgagaggcaaccacgagtgcgccagcatcaacagaatctacggcttctacgacgagtgcaagagaagatacaacatcaagctgtggaagaccttcaccgactgcttcaactgcctgcccatcgccgccatcgtggacgagaagatcttctgctgccacggcggcctgagccccgacctgcagagcatggagcagatcagaagaatcatgagacccaccgacgtgcccgaccagggcctgctgtgcgacctgctgtggagcgaccccgacaaggacgtgcagggctggggcgagaacgacagaggcgtgagcttcaccttcggcgccgaggtggtggccaagttcctgcacaagcacgacctggacctgatctgcagagcccaccaggtggtggaggacggctacgagttcttcgccaagagacagctggtgaccctgttcagcgcccccaactactgcggcgagttcgacaacgccggcgccatgatgagcgtggacgagaccctgatgtgcagcttccagatcctgaagcccgccgacaagaacaagggcaagtacggccagttcagcggcctgaaccccggcggcagatag

SEQ ID NO: 95229 - DNA, 984 bp, synthetic construct
  misc_feature 1..984: note = Description of Artificial Sequence: Synthetic coding sequence
  source 1..984: mol_type = other DNA
atggccgacggcgagctgaacgtggacagcctgatcaccagactgctggaggtgagaggctgcagacccggcaagatcgtgcagatgaccgaggccgaggtgagaggcctgtgcatcaagagcagagagatcttcctgagccagcccatcctgctggagctggaggcccccctgaagatctgcggcgacatccacggccagtacaccgacctgctgagactgttcgagtacggcggcttcccccccgaggccaactacctgttcctgggcgactacgtggacagaggcaagcagagcctggagaccatctgcctgctgctggcctacaagatcaagtaccccgagaacttcttcctgctgagaggcaaccacgagtgcgccagcatcaacagaatctacggcttctacgacgagtgcaagagaagattcaacatcaagctgtggaagaccttcaccgactgcttcaactgcctgcccatcgccgccatcgtggacgagaagatcttctgctgccacggcggcctgagccccgacctgcagagcatggagcagatcagaagaatcatgagacccaccgacgtgcccgacaccggcctgctgtgcgacctgctgtggagcgaccccgacaaggacgtgcagggctggggcgagaacgacagaggcgtgagcttcaccttcggcgccgacgtggtgagcaagttcctgaacagacacgacctggacctgatctgcagagcccaccaggtggtggaggacggctacgagttcttcgccaagagacagctggtgaccctgttcagcgcccccaactactgcggcgagttcgacaacgccggcggcatgatgagcgtggacgagaccctgatgtgcagcttccagatcctgaagcccagcgagaagaaggccaagtaccagtacggcggcctgaacagcggcagacccgtgaccccccccagaaccgccaacccccccaagaagagatag

SEQ ID NO: 95230 - DNA, 984 bp, synthetic construct; identical to SEQ ID NO: 95229
  misc_feature 1..984: note = Description of Artificial Sequence: Synthetic coding sequence
  source 1..984: mol_type = other DNA

SEQ ID NO: 95231 - DNA, 984 bp, synthetic construct; identical to SEQ ID NO: 95229
  misc_feature 1..984: note = Description of Artificial Sequence: Synthetic coding sequence
  source 1..984: mol_type = other DNA

SEQ ID NO: 95232 - DNA, 378 bp, synthetic construct
  misc_feature 1..378: note = Description of Artificial Sequence: Synthetic coding sequence
  source 1..378: mol_type = other DNA
atggccgacggcgagctgaacgtggacagcctgatcaccagactgctggaggtgagaggctgcagacccggcaagatcgtgcagatgaccgaggccgaggtgagaggcctgtgcatcaagagcagagagatcttcctgagccagcccatcctgctggagctggaggcccccctgaagatctgcggcgacatccacggccagtacaccgacctgctgagactgttcgagtacggcggcttcccccccgaggccaactacctgttcctgggcgactacgtggacagaggcaagcagagcctggagaccatctgcctgctgctggcctacaagatcaagtaccccgagaacttcttcctgctgagaggcaaccacgagtag

SEQ ID NO: 95233 - DNA, 417 bp, synthetic construct
  misc_feature 1..417: note = Description of Artificial Sequence: Synthetic coding sequence
  source 1..417: mol_type = other DNA
atggccgacggcgagctgaacgtggacagcctgatcaccagactgctggaggtgagaggctgcagacccggcaagatcgtgcagatgaccgaggccgaggtgagaggcctgtgcatcaagagcagagagatcttcctgagccagcccatcctgctggagctggaggcccccctgaagatctgcggcgacatccacggccagtacaccgacctgctgagactgttcgagtacggcggcttcccccccgaggccaactacctgttcctgggcgactacgtggacagaggcaagcagagcctggagaccatctgcctgctgctggcctacaagatcaagtaccccgagaacttcttcctgctgagaggcaaccacgagtgcgccagcatcaacagaatctacggcttctacgacgagtag

SEQ ID NO: 95234 - DNA, 510 bp, synthetic construct
  misc_feature 1..510: note = Description of Artificial Sequence: Synthetic coding sequence
  source 1..510: mol_type = other DNA
atgaccgaggccgaggtgagaggcctgtgcatcaagagcagagagatcttcctgagccagcccatcctgctggagctggaggcccccctgaagatctgcggcgacatccacggccagtacaccgacctgctgagactgttcgagtacggcggcttcccccccgaggccaactacctgttcctgggcgactacgtggacagaggcaagcagagcctggagaccatctgcctgctgctggcctacaagatcaagtaccccgagaacttcttcctgctgagaggcaaccacgagtgcgccagcatcaacagaatctacggcttctacgacgagtgcaagagaagattcaacatcaagctgtggaagaccttcaccgactgcttcaactgcctgcccatcgccgccatcgtggacgagaagatcttctgctgccacggcggcctgagccccgacctgcagagcatggagcagatcagaagaatcatgagacccaccgacgtgcccgacacctag

SEQ ID NO: 95235 - DNA, 972 bp, synthetic construct
  misc_feature 1..972: note = Description of Artificial Sequence: Synthetic coding sequence
  source 1..972: mol_type = other DNA
atggccgacctggacaagctgaacatcgacagcatcatccagagactgctggaggtgagaggcagcaagcccggcaagaacgtgcagctgcaggagaacgagatcagaggcctgtgcctgaagagcagagagatcttcctgagccagcccatcctgctggagctggaggcccccctgaagatctgcggcgacatccacggccagtactacgacctgctgagactgttcgagtacggcggcttcccccccgagagcaactacctgttcctgggcgactacgtggacagaggcaagcagagcctggagaccatctgcctgctgctggcctacaagatcaagtaccccgagaacttcttcctgctgagaggcaaccacgagtgcgccagcatcaacagaatctacggcttctacgacgagtgcaagagaagatacaacatcaagctgtggaagaccttcaccgactgcttcaactgcctgcccatcgccgccatcgtggacgagaagatcttctgctgccacggcggcctgagccccgacctgcagagcatggagcagatcagaagaatcatgagacccaccgacgtgcccgaccagggcctgctgtgcgacctgctgtggagcgaccccgacaaggacgtgctgggctggggcgagaacgacagaggcgtgagcttcaccttcggcgccgaggtggtggccaagttcctgcacaagcacgacctggacctgatctgcagagcccaccaggtggtggaggacggctacgagttcttcgccaagagacagctggtgaccctgttcagcgcccccaactactgcggcgagttcgacaacgccggcgccatgatgagcgtggacgagaccctgatgtgcagcttccagatcctgaagcccgccgagaagaagaagcccaacgccaccagacccgtgaccccccccagaggcatgatcaccaagcaggccaagaagtag

SEQ ID NO: 95236 - DNA, 1014 bp, synthetic construct
  misc_feature 1..1014: note = Description of Artificial Sequence: Synthetic coding sequence
  source 1..1014: mol_type = other DNA
atggccgacctggacaagctgaacatcgacagcatcatccagagactgctggaggtgagaggcagcaagcccggcaagaacgtgcagctgcaggagaacgagatcagaggcctgtgcctgaagagcagagagatcttcctgagccagcccatcctgctggagctggaggcccccctgaagatctgcggcgacatccacggccagtactacgacctgctgagactgttcgagtacggcggcttcccccccgagagcaactacctgttcctgggcgactacgtggacagaggcaagcagagcctggagaccatctgcctgctgctggcctacaagatcaagtaccccgagaacttcttcctgctgagaggcaaccacgagtgcgccagcatcaacagaatctacggcttctacgacgagtgcaagagaagatacaacatcaagctgtggaagaccttcaccgactgcttcaactgcctgcccatcgccgccatcgtggacgagaagatcttctgctgccacggcggcctgagccccgacctgcagagcatggagcagatcagaagaatcatgagacccaccgacgtgcccgaccagggcctgctgtgcgacctgctgtggagcgaccccgacaaggacgtgctgggctggggcgagaacgacagaggcgtgagcttcaccttcggcgccgaggtggtggccaagttcctgcacaagcacgacctggacctgatctgcagagcccaccaggtggtggaggacggctacgagttcttcgccaagagacagctggtgaccctgttcagcgcccccaactactgcggcgagttcgacaacgccggcgccatgatgagcgtggacgagaccctgatgtgcagcttccagatcctgaagcccgccgagaagaagaagcccaacgccaccagacccgtgaccccccccagagtggccagcggcctgaaccccagcatccagaaggccagcaactacagaaacaacaccgtgctgtacgagtag

SEQ ID NO: 95237 - DNA, 999 bp, synthetic construct
  misc_feature 1..999: note = Description of Artificial Sequence: Synthetic coding sequence
  source 1..999: mol_type = other DNA
atgttcctgcccctgtacctgaacctggtgctgtacttcgtgttctggctgcactggaccaactgcgacttcagcctggccgtgagaggcagcaagcccggcaagaacgtgcagctgcaggagaacgagatcagaggcctgtgcctgaagagcagagagatcttcctgagccagcccatcctgctggagctggaggcccccctgaagatctgcggcgacatccacggccagtactacgacctgctgagactgttcgagtacggcggcttcccccccgagagcaactacctgttcctgggcgactacgtggacagaggcaagcagagcctggagaccatctgcctgctgctggcctacaagatcaagtaccccgagaacttcttcctgctgagaggcaaccacgagtgcgccagcatcaacagaatctacggcttctacgacgagtgcaagagaagatacaacatcaagctgtggaagaccttcaccgactgcttcaactgcctgcccatcgccgccatcgtggacgagaagatcttctgctgccacggcggcctgagccccgacctgcagagcatggagcagatcagaagaatcatgagacccaccgacgtgcccgaccagggcctgctgtgcgacctgctgtggagcgaccccgacaaggacgtgctgggctggggcgagaacgacagaggcgtgagcttcaccttcggcgccgaggtggtggccaagttcctgcacaagcacgacctggacctgatctgcagagcccaccaggtggtggaggacggctacgagttcttcgccaagagacagctggtgaccctgttcagcgcccccaactactgcggcgagttcgacaacgccggcgccatgatgagcgtggacgagaccctgatgtgcagcttccagatcctgaagcccgccgagaagaagaagcccaacgccaccagacccgtgaccccccccagaggcatgatcaccaagcaggccaagaagtag

SEQ ID NO: 95238 - DNA, 426 bp, synthetic construct
  misc_feature 1..426: note = Description of Artificial Sequence: Synthetic coding sequence
  source 1..426: mol_type = other DNA
atggagcagatcagaagaatcatgagacccaccgacgtgcccgaccagggcctgctgtgcgacctgctgtggagcgaccccgacaaggacgtgctgggctggggcgagaacgacagaggcgtgagcttcaccttcggcgccgaggtggtggccaagttcctgcacaagcacgacctggacctgatctgcagagcccaccaggtggtggaggacggctacgagttcttcgccaagagacagctggtgaccctgttcagcgcccccaactactgcggcgagttcgacaacgccggcgccatgatgagcgtggacgagaccctgatgtgcagcttccagatcctgaagcccgccgagaagaagaagcccaacgccaccagacccgtgaccccccccagaggcatgatcaccaagcaggccaagaagtag

SEQ ID NO: 95239 - DNA, 225 bp, synthetic construct
  misc_feature 1..225: note = Description of Artificial Sequence: Synthetic coding sequence
  source 1..225: mol_type = other DNA
atgggcagaagaagcagcaagtgctgctgcatctacgagaagcccagagccttcggcgagagcagcaccgagagcgacgaggaggaggaggagggctgcggccacacccactgcgtgagaggccacagaaagggcagaagaagagccaccctgggccccacccccaccacccccccccagccccccgaccccagccagcccccccccggccccatgcagcactag

SEQ ID NO: 95240 - DNA, 225 bp, synthetic construct; identical to SEQ ID NO: 95239
  misc_feature 1..225: note = Description of Artificial Sequence: Synthetic coding sequence
  source 1..225: mol_type = other DNA

SEQ ID NO: 95241 - DNA, 225 bp, synthetic construct; identical to SEQ ID NO: 95239
  misc_feature 1..225: note = Description of Artificial Sequence: Synthetic coding sequence
  source 1..225: mol_type = other DNA

SEQ ID NO: 95242 - DNA, 225 bp, synthetic construct; identical to SEQ ID NO: 95239
  misc_feature 1..225: note = Description of Artificial Sequence: Synthetic coding sequence
  source 1..225: mol_type = other DNA

SEQ ID NO: 95243 - DNA, 381 bp, synthetic construct
  misc_feature 1..381: note = Description of Artificial Sequence: Synthetic coding sequence
  source 1..381: mol_type = other DNA
atggccgaggccggcgccggcctgagcgagaccgtgaccgagaccaccgtgaccgtgaccaccgagcccgagaacagaagcctgaccatcaagctgagaaagagaaagcccgagaagaaggtggagtggaccagcgacaccgtggacaacgagcacatgggcagaagaagcagcaagtgctgctgcatctacgagaagcccagagccttcggcgagagcagcaccgagagcgacgaggaggaggaggagggctgcggccacacccactgcgtgagaggccacagaaagggcagaagaagagccaccctgggccccacccccaccacccccccccagccccccgaccccagccagcccccccccggccccatgcagcactag

SEQ ID NO: 95244 - DNA, 225 bp, synthetic construct; identical to SEQ ID NO: 95239
  misc_feature 1..225: note = Description of Artificial Sequence: Synthetic coding sequence
  source 1..225: mol_type = other DNA

SEQ ID NO: 95245 - DNA, 381 bp, synthetic construct; identical to SEQ ID NO: 95243
  misc_feature 1..381: note = Description of Artificial Sequence: Synthetic coding sequence
  source 1..381: mol_type = other DNA

SEQ ID NO: 95246 - DNA, 225 bp, synthetic construct; identical to SEQ ID NO: 95239
  misc_feature 1..225: note = Description of Artificial Sequence: Synthetic coding sequence
  source 1..225: mol_type = other DNA

SEQ ID NO: 95247 - DNA, 225 bp, synthetic construct; identical to SEQ ID NO: 95239
  misc_feature 1..225: note = Description of Artificial Sequence: Synthetic coding sequence
  source 1..225: mol_type = other DNA

SEQ ID NO: 95248 - DNA, 225 bp, synthetic construct; identical to SEQ ID NO: 95239
  misc_feature 1..225: note = Description of Artificial Sequence: Synthetic coding sequence
  source 1..225: mol_type = other DNA

SEQ ID NO: 95249 - DNA, 225 bp, synthetic construct; identical to SEQ ID NO: 95239
  misc_feature 1..225: note = Description of Artificial Sequence: Synthetic coding sequence
  source 1..225: mol_type = other DNA

SEQ ID NO: 95250 - DNA, 225 bp, synthetic construct; identical to SEQ ID NO: 95239
  misc_feature 1..225: note = Description of Artificial Sequence: Synthetic coding sequence
  source 1..225: mol_type = other DNA

SEQ ID NO: 95251 - DNA, 225 bp, synthetic construct; identical to SEQ ID NO: 95239
  misc_feature 1..225: note = Description of Artificial Sequence: Synthetic coding sequence
  source 1..225: mol_type = other DNA

SEQ ID NO: 95252 - DNA, 225 bp, synthetic construct; identical to SEQ ID NO: 95239
  misc_feature 1..225: note = Description of Artificial Sequence: Synthetic coding sequence
  source 1..225: mol_type = other DNA

SEQ ID NO: 95253 - DNA, 225 bp, synthetic construct; identical to SEQ ID NO: 95239
  misc_feature 1..225: note = Description of Artificial Sequence: Synthetic coding sequence
  source 1..225: mol_type = other DNA

SEQ ID NO: 95254 - DNA, 225 bp, synthetic construct; identical to SEQ ID NO: 95239
  misc_feature 1..225: note = Description of Artificial Sequence: Synthetic coding sequence
  source 1..225: mol_type = other DNA

SEQ ID NO: 95255 - DNA, 225 bp, synthetic construct; identical to SEQ ID NO: 95239
  misc_feature 1..225: note = Description of Artificial Sequence: Synthetic coding sequence
  source 1..225: mol_type = other DNA

SEQ ID NO: 95256 - DNA, 225 bp, synthetic construct; identical to SEQ ID NO: 95239
  misc_feature 1..225: note = Description of Artificial Sequence: Synthetic coding sequence
  source 1..225: mol_type = other DNA

SEQ ID NO: 95257 - DNA, 225 bp, synthetic construct; identical to SEQ ID NO: 95239
  misc_feature 1..225: note = Description of Artificial Sequence: Synthetic coding sequence
  source 1..225: mol_type = other DNA

SEQ ID NO: 95258 - DNA, 225 bp, synthetic construct; identical to SEQ ID NO: 95239
  misc_feature 1..225: note = Description of Artificial Sequence: Synthetic coding sequence
  source 1..225: mol_type = other DNA

SEQ ID NO: 95259 - DNA, 225 bp, synthetic construct; identical to SEQ ID NO: 95239
  misc_feature 1..225: note = Description of Artificial Sequence: Synthetic coding sequence
  source 1..225: mol_type = other DNA

SEQ ID NO: 95260 - DNA, 225 bp, synthetic construct; identical to SEQ ID NO: 95239
  misc_feature 1..225: note = Description of Artificial Sequence: Synthetic coding sequence
  source 1..225: mol_type = other DNA

SEQ ID NO: 95261 - DNA, 381 bp, synthetic construct; identical to SEQ ID NO: 95243
  misc_feature 1..381: note = Description of Artificial Sequence: Synthetic coding sequence
  source 1..381: mol_type = other DNA

SEQ ID NO: 95262 - DNA, 381 bp, synthetic construct; identical to SEQ ID NO: 95243
  misc_feature 1..381: note = Description of Artificial Sequence: Synthetic coding sequence
  source 1..381: mol_type = other DNA

SEQ ID NO: 95263 - DNA, 225 bp, synthetic construct; identical to SEQ ID NO: 95239
  misc_feature 1..225: note = Description of Artificial Sequence: Synthetic coding sequence
  source 1..225: mol_type = other DNA

SEQ ID NO: 95264 - DNA, 225 bp, synthetic construct; identical to SEQ ID NO: 95239
  misc_feature 1..225: note = Description of Artificial Sequence: Synthetic coding sequence
  source 1..225: mol_type = other DNA

SEQ ID NO: 95265 - DNA, 225 bp, synthetic construct; identical to SEQ ID NO: 95239
  misc_feature 1..225: note = Description of Artificial Sequence: Synthetic coding sequence
  source 1..225: mol_type = other DNA

SEQ ID NO: 95266 - DNA, 381 bp, synthetic construct; identical to SEQ ID NO: 95243
  misc_feature 1..381: note = Description of Artificial Sequence: Synthetic coding sequence
  source 1..381: mol_type = other DNA

SEQ ID NO: 95267 - DNA, 225 bp, synthetic construct; identical to SEQ ID NO: 95239
  misc_feature 1..225: note = Description of Artificial Sequence: Synthetic coding sequence
  source 1..225: mol_type = other DNA

SEQ ID NO: 95268 - DNA, 225 bp, synthetic construct; identical to SEQ ID NO: 95239
  misc_feature 1..225: note = Description of Artificial Sequence: Synthetic coding sequence
  source 1..225: mol_type = other DNA

SEQ ID NO: 95269 - DNA, 381 bp, synthetic construct; identical to SEQ ID NO: 95243
  misc_feature 1..381: note = Description of Artificial Sequence: Synthetic coding sequence
  source 1..381: mol_type = other DNA

SEQ ID NO: 95270 - DNA, 225 bp, synthetic construct; identical to SEQ ID NO: 95239
  misc_feature 1..225: note = Description of Artificial Sequence: Synthetic coding sequence
  source 1..225: mol_type = other DNA

SEQ ID NO: 95271 - DNA, 225 bp, synthetic construct; identical to SEQ ID NO: 95239
  misc_feature 1..225: note = Description of Artificial Sequence: Synthetic coding sequence
  source 1..225: mol_type = other DNA

SEQ ID NO: 95272 - DNA, 225 bp, synthetic construct; identical to SEQ ID NO: 95239
  misc_feature 1..225: note = Description of Artificial Sequence: Synthetic coding sequence
  source 1..225: mol_type = other DNA

SEQ ID NO: 95273 - DNA, 225 bp, synthetic construct; identical to SEQ ID NO: 95239
  misc_feature 1..225: note = Description of Artificial Sequence: Synthetic coding sequence
  source 1..225: mol_type = other DNA

SEQ ID NO: 95274 - DNA, 225 bp, synthetic construct; identical to SEQ ID NO: 95239
  misc_feature 1..225: note = Description of Artificial Sequence: Synthetic coding sequence
  source 1..225: mol_type = other DNA

SEQ ID NO: 95275 - DNA, 225 bp, synthetic construct; identical to SEQ ID NO: 95239
  misc_feature 1..225: note = Description of Artificial Sequence: Synthetic coding sequence
  source 1..225: mol_type = other DNA

SEQ ID NO: 95276 - DNA, 381 bp, synthetic construct; identical to SEQ ID NO: 95243
  misc_feature 1..381: note = Description of Artificial Sequence: Synthetic coding sequence
  source 1..381: mol_type = other DNA

SEQ ID NO: 95277 - DNA, 225 bp, synthetic construct; identical to SEQ ID NO: 95239
  misc_feature 1..225: note = Description of Artificial Sequence: Synthetic coding sequence
  source 1..225: mol_type = other DNA

SEQ ID NO: 95278 - DNA, 225 bp, synthetic construct; identical to SEQ ID NO: 95239
  misc_feature 1..225: note = Description of Artificial Sequence: Synthetic coding sequence
  source 1..225: mol_type = other DNA

SEQ ID NO: 95279 - DNA, 225 bp, synthetic construct; identical to SEQ ID NO: 95239
  misc_feature 1..225: note = Description of Artificial Sequence: Synthetic coding sequence
  source 1..225: mol_type = other DNA

SEQ ID NO: 95280 - DNA, 225 bp, synthetic construct; identical to SEQ ID NO: 95239
  misc_feature 1..225: note = Description of Artificial Sequence: Synthetic coding sequence
  source 1..225: mol_type = other DNA

SEQ ID NO: 95281 - DNA, 225 bp, synthetic construct; identical to SEQ ID NO: 95239
  misc_feature 1..225: note = Description of Artificial Sequence: Synthetic coding sequence
  source 1..225: mol_type = other DNA

SEQ ID NO: 95282 - DNA, 225 bp, synthetic construct; identical to SEQ ID NO: 95239
  misc_feature 1..225: note = Description of Artificial Sequence: Synthetic coding sequence
  source 1..225: mol_type = other DNA

SEQ ID NO: 95283 - DNA, 381 bp, synthetic construct; identical to SEQ ID NO: 95243
  misc_feature 1..381: note = Description of Artificial Sequence: Synthetic coding sequence
  source 1..381: mol_type = other DNA

SEQ ID NO: 95284 - DNA, 225 bp, synthetic construct; identical to SEQ ID NO: 95239
  misc_feature 1..225: note = Description of Artificial Sequence: Synthetic coding sequence
  source 1..225: mol_type = other DNA

SEQ ID NO: 95285 - DNA, 225 bp, synthetic construct; identical to SEQ ID NO: 95239
  misc_feature 1..225: note = Description of Artificial Sequence: Synthetic coding sequence
  source 1..225: mol_type = other DNA

SEQ ID NO: 95286 - DNA, 225 bp, synthetic construct; identical to SEQ ID NO: 95239
  misc_feature 1..225: note = Description of Artificial Sequence: Synthetic coding sequence
  source 1..225: mol_type = other DNA

SEQ ID NO: 95287 - DNA, 444 bp, synthetic construct
  misc_feature 1..444: note = Description of Artificial Sequence: Synthetic coding sequence
  source 1..444: mol_type = other DNA
atggccgacagcggcaccgccggcggcgccgccctggccgcccccgcccccggccccggcagcggcggccccggccccagagtgtacttccagagcccccccggcgccgccggcgagggccccggcggcgccgacgacgagggccccgtgagaagacagggcaaggtgaccgtgaagtacgacagaaaggagctgagaaagagactgaacctggaggagtggatcctggagcagctgaccagactgtacgactgccaggaggaggagatccccgagctggagatcgacgtggacgagctgctggacatggagagcgacgacgccagagccgccagagtgaaggagctgctggtggactgctacaagcccaccgaggccttcatcagcggcctgctggacaagatcagaggcatgcagaagctgagcaccccccagaagaagtag

SEQ ID NO: 95288 - DNA, 498 bp, synthetic construct
  misc_feature 1..498: note = Description of Artificial Sequence: Synthetic coding sequence
  source 1..498: mol_type = other DNA
atgagcgtggccaccggcagcagcgagaccgccggcggcgccagcggcggcggcgccagagtgttcttccagagccccagaggcggcgccggcggcagccccggcagcagcagcggcagcggcagcagcagagaggacagcgcccccgtggccaccgccgccgccgccggccaggtgcagcagcagcagcagagaagacaccagcagggcaaggtgaccgtgaagtacgacagaaaggagctgagaaagagactggtgctggaggagtggatcgtggagcagctgggccagctgtacggctgcgaggaggaggagatgcccgaggtggagatcgacatcgacgacctgctggacgccgacagcgacgaggagagagccagcaagctgcaggaggccctggtggactgctacaagcccaccgaggagttcatcaaggagctgctgagcagaatcagaggcatgagaaagctgagccccccccagaagaagagcgtgtag

SEQ ID NO: 95289 - DNA, 438 bp, synthetic construct
  misc_feature 1..438: note = Description of Artificial Sequence: Synthetic coding sequence
  source 1..438: mol_type = other DNA
atgctgagcagcagccccgccagctgcaccagccccagccccgacggcgagaacccctgcaagaaggtgcactgggccagcggcagaagaagaaccagcagcaccgacagcgagagcaagagccaccccgacagcagcaagatccccagaagcagaagacccagcagactgaccgtgaagtacgacagaggccagctgcagagatggctggagatggagcagtgggtggacgcccaggtgcaggagctgttccaggaccaggccacccccagcgagcccgagatcgacctggaggccctgatggacctgagcaccgaggagcagaagacccagctggaggccatcctgggcaactgccccagacccaccgaggccttcatcagcgagctgctgagccagctgaagaagctgagaagactgagcagaccccagaagtag

SEQ ID NO: 95290 - DNA, 603 bp, synthetic construct
  misc_feature 1..603: note = Description of Artificial Sequence: Synthetic coding sequence
  source 1..603: mol_type = other DNA
atgctgagcagcagccccgccagctgcaccagccccagccccgacggcgagaacccctgcaagaaggtgcactgggccagcggcagaagaagaaccagcagcaccgacagcgagagcaagagccaccccgacagcagcaagatccccagaagcagaagacccagcagactgaccgtgaagtacgacagaggccagctgcagagatggctggagatggagcagtgggtggacgcccaggtgcaggagctgttccagagcctggccctgagccccagactggagtgcagcggcgtgatccacagcctgcagctgctgccccccggcttcaacagattcagctgcctgagcagctggagcagctgggactacggcatcaagcagcccctgctgagcctgagactgacctggaagctgagctggatctacccccagagaagcagaagactgagctggagacccttcctgggcaccgcccccgccccccagagactgctgagcctgagctgcagcgtgaacagcagaaacagcggcgacagcgccggcctgagaaacaagcccgagagacccagcctggccgccagcgccctgcccggcctgccctag

SEQ ID NO: 95291 - DNA, 516 bp, synthetic construct
  misc_feature 1..516: note = Description of Artificial Sequence: Synthetic coding sequence
  source 1..516: mol_type = other DNA
atggagcaggacaacagccccagaaagatccagttcaccgtgcccctgctggagccccacctggaccccgaggccgccgagcagatcagaagaagaagacccacccccgccaccctggtgctgaccagcgaccagagcagccccgagatcgacgaggacagaatccccaacccccacctgaagagcaccctggccatgagccccagacagagaaagaagatgaccagaatcacccccaccatgaaggagctgcagatgatggtggagcaccacctgggccagcagcagcagggcgaggagcccgagggcgccgccgagagcaccgagacccaggagagcagaccccccggcatccccgacaccgaggtggagagcagactgggcaccagcggcaccgccaagaagaccgccgagtgcatccccaagacccacgagagaggcagcaaggagcccagcaccaaggagcccagcacccacatcccccccctggacagcaagggcgccaacagcgtgtag

SEQ ID NO: 95292 - DNA, 462 bp, synthetic construct
  misc_feature 1..462: note = Description of Artificial Sequence: Synthetic coding sequence
  source 1..462: mol_type = other DNA
atggagcaggacaacagccccagaaagatccagttcaccgtgcccctgctggagccccacctggaccccgaggccgccgagcagatcagaagaagaagacccacccccgccaccctggtgctgaccagcgaccagagcagccccgagatcgacgaggacagaatccccaacccccacctgaagaagctgcagaacgccagcctgaagctgaccagagaggccgtgagaaaccccgcccagaagaacccccagcccatctaccaccactggatccccagagagcccaccagatgccacagaagaggcggcaccggcggccagaagagcgtgggcggcttcccctgcagcacccacaccctggcccccttctacgtgttcaccagaagcatcctgctgctgaagagaggcgagagaatgagccaccccctggagcccagagacgaccccaccaagatgccctag

SEQ ID NO: 95293 - DNA, 330 bp, synthetic construct
  misc_feature 1..330: note = Description of Artificial Sequence: Synthetic coding sequence
  source 1..330: mol_type = other DNA
atggagcccaacagccccaagaagatccagttcgccgtgcccgtgttccagagccagatcgcccccgaggccgccgagcagatcagaaagagaagacccacccccgccagcctggtgatcctgaacgagcacaacccccccgagatcgacgacaagagaggccccaacacccagggcgagctgcagaacgccagccccaagcagagaaagcagagcgtgtacaccccccccaccatcaagggcgtgaagcacctgaagggccagaacgagagcgccttccccgaggaggaggagggcaccaacgagagagaggagcagagagaccactag

SEQ ID NO: 95294 - DNA, 330 bp, synthetic construct; identical to SEQ ID NO: 95293
  misc_feature 1..330: note = Description of Artificial Sequence: Synthetic coding sequence
  source 1..330: mol_type = other DNA

SEQ ID NO: 95295 - DNA, 330 bp, synthetic construct; identical to SEQ ID NO: 95293
  misc_feature 1..330: note = Description of Artificial Sequence: Synthetic coding sequence
  source 1..330: mol_type = other DNA

SEQ ID NO: 95296 - DNA, 618 bp, synthetic construct
  misc_feature 1..618: note = Description of Artificial Sequence: Synthetic coding sequence
  source 1..618: mol_type = other DNA
atggccgccagcaccgccagccacagacccatcaagggcatcctgaagaacaagaccagcaccaccagcagcatggtggccagcgccgagcagcccagaggcaacgtggacgaggagctgagcaagaagagccagaagtgggacgagatgaacatcctggccacctaccaccccgccgacaaggactacggcctgatgaagatcgacgagcccagcaccccctaccacagcatgatgggcgacgacgaggacgcctgcagcgacaccgaggccaccgaggccatggcccccgacatcctggccagaaagctggccgccgccgagggcctggagcccaagtacagaatccaggagcaggagagcagcggcgaggaggacagcgacctgagccccgaggagagagagaagaagagacagttcgagatgaagagaaagctgcactacaacgagggcctgaacatcaagctggccagacagctgatcagcaaggacctgcacgacgacgacgaggacgaggagatgctggagaccgccgacggcgagagcatgaacaccgaggagagcaaccagggcagcacccccagcgaccagcagcagaacaagctgagaagcagctag

SEQ ID NO: 95297 - DNA, 3093 bp, synthetic construct
  misc_feature 1..3093: note = Description of Artificial Sequence: Synthetic coding sequence
  source 1..3093: mol_type = other DNA
atgaagatggccgacgccaagcagaagagaaacgagcagctgaagagatggatcggcagcgagaccgacctggagccccccgtggtgaagagacagaagaccaaggtgaagttcgacgacggcgccgtgttcctggccgcctgcagcagcggcgacaccgacgaggtgctgaagctgctgcacagaggcgccgacatcaactacgccaacgtggacggcctgaccgccctgcaccaggcctgcatcgacgacaacgtggacatggtgaagttcctggtggagaacggcgccaacatcaaccagcccgacaacgagggctggatccccctgcacgccgccgccagctgcggctacctggacatcgccgagttcctgatcggccagggcgcccacgtgggcgccgtgaacagcgagggcgacacccccctggacatcgccgaggaggaggccatggaggagctgctgcagaacgaggtgaacagacagggcgtggacatcgaggccgccagaaaggaggaggagagaatcatgctgagagacgccagacagtggctgaacagcggccacatcaacgacgtgagacacgccaagagcggcggcaccgccctgcacgtggccgccgccaagggctacaccgaggtgctgaagctgctgatccaggccggctacgacgtgaacatcaaggactacgacggctggacccccctgcacgccgccgcccactggggcaaggaggaggcctgcagaatcctggtggacaacctgtgcgacatggagatggtgaacaaggtgggccagaccgccttcgacgtggccgacgaggacatcctgggctacctggaggagctgcagaagaagcagaacctgctgcacagcgagaagagagacaagaagagccccctgatcgagagcaccgccaacatggacaacaaccagagccagaagaccttcaagaacaaggagaccctgatcatcgagcccgagaagaacgccagcagaatcgagagcctggagcaggagaaggtggacgaggaggaggagggcaagaaggacgagagcagctgcagcagcgaggaggacgaggaggacgacagcgagagcgaggccgagaccgacaagaccaagcccctggccagcgtgaccaacgccaacaccagcagcacccaggccgcccccgtggccgtgaccacccccaccgtgagcagcggccaggccacccccaccagccccatcaagaagttccccaccaccgccaccaagatcagccccaaggaggaggagagaaaggacgagagccccgccacctggagactgggcctgagaaagaccggcagctacggcgccctggccgagatcaccgccagcaaggagggccagaaggagaaggacaccgccggcgtgaccagaagcgccagcagccccagactgagcagcagcctggacaacaaggagaaggagaaggacagcaagggcaccagactggcctacgtggcccccaccatccccagaagactggccagcaccagcgacatcgaggagaaggagaacagagacagcagcagcctgagaaccagcagcagctacaccagaagaaagtgggaggacgacctgaagaagaacagcagcgtgaacgagggcagcacctaccacaagagctgcagcttcggcagaagacaggacgacctgatcagcagcagcgtgcccagcaccaccagcacccccaccgtgaccagcgccgccggcctgcagaagagcctgctgagcagcaccagcaccaccaccaagatcaccaccggcagcagcagcgccggcacccagagcagcaccagcaacagactgtgggccgaggacagcaccgagaaggagaaggacagcgtgcccaccgccgtgaccatccccgtggcccccaccgtggtgaacgccgccgccagcaccaccaccctgaccaccaccaccgccggcaccgtgagcagcaccaccgaggtgagagagagaagaagaagctacctgacccccgtgagagacgaggagagcgagagccagagaaaggccagaagcagacaggccagacagagcagaagaagcacccagggcgtgaccctgaccgacctgcaggaggccgagaagaccatcggcagaagcagaagcaccagaaccagagagcaggagaacgaggagaaggagaaggaggagaaggagaagcaggacaaggagaagcaggaggagaagaaggagagcgagaccagcagagaggacgagtacaagcagaagtacagcagaacctacgacgagacctaccagagatacagacccgtgagcaccagcagcagcaccacccccagcagcagcctgagcaccatgagcagcagcctgtacgccagcagccagctgaacagacccaacagcctggtgggcatcaccagcgcctacagcagaggcatcaccaaggagaacgagagagagggcgagaagagagaggaggagaaggagggcgaggacaagagccagcccaagagcatcagagagagaagaagacccagagagaagagaagaagcaccggcgtgagcttctggacccaggacagcgacgagaacgagcaggagcagcagagcgacaccgaggagggcagcaacaagaaggagacccagaccgacagcatcagcagatacgagaccagcagcaccagcgccggcgacagatacgacagcctgctgggcagaagcggcagctacagctacctggaggagagaaagccctacagcagcagactggagaaggacgacagcaccgacttcaagaagctgtacgagcagatcctggccgagaacgagaagctgaaggcccagctgcacgacaccaacatggagctgaccgacctgaagctgcagctggagaaggccacccagagacaggagagattcgccgacagaagcctgctggagatggagaagagagagagaagagccctggagagaagaatcagcgagatggaggaggagctgaagatgctgcccgacctgaaggccgacaaccagagactgaaggacgagaacggcgccctgatcagagtgatcagcaagctgagcaagtag

SEQ ID NO: 95298 - DNA, 2916 bp, synthetic construct
  misc_feature 1..2916: note = Description of Artificial Sequence: Synthetic coding sequence
  source 1..2916: mol_type = other DNA
atgaagatggccgacgccaagcagaagagaaacgagcagctgaagagatggatcggcagcgagaccgacctggagccccccgtggtgaagagacagaagaccaaggtgaagttcgacgacggcgccgtgttcctggccgcctgcagcagcggcgacaccgacgaggtgctgaagctgctgcacagaggcgccgacatcaactacgccaacgtggacggcctgaccgccctgcaccaggcctgcatcgacgacaacgtggacatggtgaagttcctggtggagaacggcgccaacatcaaccagcccgacaacgagggctggatccccctgcacgccgccgccagctgcggctacctggacatcgccgagttcctgatcggccagggcgcccacgtgggcgccgtgaacagcgagggcgacacccccctggacatcgccgaggaggaggccatggaggagctgctgcagaacgaggtgaacagacagggcgtggacatcgaggccgccagaaaggaggaggagagaatcatgctgagagacgccagacagtggctgaacagcggccacatcaacgacgtgagacacgccaagagcggcggcaccgccctgcacgtggccgccgccaagggctacaccgaggtgctgaagctgctgatccaggccggctacgacgtgaacatcaaggactacgacggctggacccccctgcacgccgccgcccactggggcaaggaggaggcctgcagaatcctggtggacaacctgtgcgacatggagatggtgaacaaggtgggccagaccgccttcgacgtggccgacgaggacatcctgggctacctggaggagctgcagaagaagcagaacctgctgcacagcgagaagagagacaagaagagccccctgatcgagagcaccgccaacatggacaacaaccagagccagaagaccttcaagaacaaggagaccctgatcatcgagcccgagaagaacgccagcagaatcgagagcctggagcaggagaaggtggacgaggaggaggagggcaagaaggacgagagcagctgcagcagcgaggaggacgaggaggacgacagcgagagcgaggccgagaccgacaagaccaagcccctggccagcgtgaccaacgccaacaccagcagcacccaggccgcccccgtggccgtgaccacccccaccgtgagcagcggccaggccacccccaccagccccatcaagaagttccccaccaccgccaccaagatcagccccaaggaggaggagagaaaggacgagagccccgccacctggagactgggcctgagaaagaccggcagctacggcgccctggccgagatcaccgccagcaaggagggccagaaggagaaggacaccgccggcgtgaccagaagcgccagcagccccagactgagcagcagcctggacaacaaggagaaggagaaggacagcaagggcaccagactggcctacgtggcccccaccatccccagaagactggccagcaccagcgacatcgaggagaaggagaacagagacagcagcagcctgagaaccagcagcagctacaccagaagaaagtgggaggacgacctgaagaagaacagcagcgtgaacgagggcagcacctaccacaagagctgcagcttcggcagaagacaggacgacctgatcagcagcagcgtgcccagcaccaccagcacccccaccgtgaccagcgccgccggcctgcagaagagcctgctgagcagcaccagcaccaccaccaagatcaccaccggcagcagcagcgccggcacccagagcagaagctacctgacccccgtgagagacgaggagagcgagagccagagaaaggccagaagcagacaggccagacagagcagaagaagcacccagggcgtgaccctgaccgacctgcaggaggccgagaagaccatcggcagaagcagaagcaccagaaccagagagcaggagaacgaggagaaggagaaggaggagaaggagaagcaggacaaggagaagcaggaggagaagaaggagagcgagaccagcagagaggacgagtacaagcagaagtacagcagaacctacgacgagacctaccagagatacagacccgtgagcaccagcagcagcaccacccccagcagcagcctgagcaccatgagcagcagcctgtacgccagcagccagctgaacagacccaacagcctggtgggcatcaccagcgcctacagcagaggcatcaccaaggagaacgagagagagggcgagaagagagaggaggagaaggagggcgaggacaagagccagcccaagagcatcagagagagaagaagacccagagagaagagaagaagcaccggcgtgagcttctggacccaggacagcgacgagaacgagcaggagcagcagagcgacaccgaggagggcagcaacaagaaggagacccaggtgaacaccatcaccctgtacgagaccagcagcaccagcgccggcgacagatacgacagcctgctgggcagaagcggcagctacagctacctggaggagagaaagccctacagcagcagactggagaaggacgacagcaccgacttcaagaagctgtacgagcagatcctggccgagaacgagaagctgaaggcccagctgcacgacaccaacatggagctgaccgacctgaagctgcagctggagaaggccacccagagacaggagagattcgccgacagaagcctgctggagatggagaagagagagagaagagccctggagagaagaatcagcgagatggaggaggagctgaagatgctgcccgacctgaaggccgacaaccagagactgaaggacgagaacggcgccctgatcagagtgatcagcaagctgagcaagtag

SEQ ID NO: 95299 - DNA, 2925 bp, synthetic construct
  misc_feature 1..2925: note = Description of Artificial Sequence: Synthetic coding sequence
  source 1..2925: mol_type = other DNA
atgaagatggccgacgccaagcagaagagaaacgagcagctgaagagatggatcggcagcgagaccgacctggagccccccgtggtgaagagacagaagaccaaggtgaagttcgacgacggcgccgtgttcctggccgcctgcagcagcggcgacaccgacgaggtgctgaagctgctgcacagaggcgccgacatcaactacgccaacgtggacggcctgaccgccctgcaccaggcctgcatcgacgacaacgtggacatggtgaagttcctggtggagaacggcgccaacatcaaccagcccgacaacgagggctggatccccctgcacgccgccgccagctgcggctacctggacatcgccgagttcctgatcggccagggcgcccacgtgggcgccgtgaacagcgagggcgacacccccctggacatcgccgaggaggaggccatggaggagctgctgcagaacgaggtgaacagacagggcgtggacatcgaggccgccagaaaggaggaggagagaatcatgctgagagacgccagacagtggctgaacagcggccacatcaacgacgtgagacacgccaagagcggcggcaccgccctgcacgtggccgccgccaagggctacaccgaggtgctgaagctgctgatccaggccggctacgacgtgaacatcaaggactacgacggctggacccccctgcacgccgccgcccactggggcaaggaggaggcctgcagaatcctggtggacaacctgtgcgacatggagatggtgaacaaggtgggccagaccgccttcgacgtggccgacgaggacatcctgggctacctggaggagctgcagaagaagcagaacctgctgcacagcgagaagagagacaagaagagccccctgatcgagagcaccgccaacatggacaacaaccagagccagaagaccttcaagaacaaggagaccctgatcatcgagcccgagaagaacgccagcagaatcgagagcctggagcaggagaaggtggacgaggaggaggagggcaagaaggacgagagcagctgcagcagcgaggaggacgaggaggacgacagcgagagcgaggccgagaccgacaagaccaagcccctggccagcgtgaccaacgccaacaccagcagcacccaggccgcccccgtggccgtgaccacccccaccgtgagcagcggccaggccacccccaccagccccatcaagaagttccccaccaccgccaccaagatcagccccaaggaggaggagagaaaggacgagagccccgccacctggagactgggcctgagaaagaccggcagctacggcgccctggccgagatcaccgccagcaaggagggccagaaggagaaggacaccgccggcgtgaccagaagcgccagcagccccagactgagcagcagcctggacaacaaggagaaggagaaggacagcaagggcaccagactggcctacgtggcccccaccatccccagaagactggccagcaccagcgacatcgaggagaaggagaacagagacagcagcagcctgagaaccagcagcagctacaccagaagaaagtgggaggacgacctgaagaagaacagcagcgtgaacgagggcagcacctaccacaagagcaccagcaacagactgtgggccgaggacagcaccgagaaggagaaggacagcgtgcccaccgccgtgaccatccccgtggcccccaccgtggtgaacgccgccgccagcaccaccaccctgaccaccaccaccgccggcaccgtgagcagcaccaccgaggtgagagagagaagaagaagctacctgacccccgtgagagacgaggagagcgagagccagagaaaggccagaagcagacaggccagacagagcagaagaagcacccagggcgtgaccctgaccgacctgcaggaggccgagaagaccatcggcagaagcagaagcaccagaaccagagagcaggagaacgaggagaaggagaaggaggagaaggagaagcaggacaaggagaagcaggaggagaagaaggagagcgagaccagcagagaggacgagtacaagcagaagtacagcagaacctacgacgagacctaccagagatacagacccgtgagcaccagcagcagcaccacccccagcagcagcctgagcaccatgagcagcagcctgtacgccagcagccagctgaacagacccaacagcctggtgggcatcaccagcgcctacagcagaggcatcaccaaggagaacgagagagagggcgagaagagagaggaggagaaggagggcgaggacaagagccagcccaagagcatcagagagagaagaagacccagagagaagagaagaagcaccggcgtgagcttctggacccaggacagcgacgagaacgagcaggagcagcagagcgacaccgaggagggcagcaacaagaaggagacccaggtgaacaccatcaccctgtacgagaccagcagcaccagcgccggcgacagatacgacagcctgctgggcagaagcggcagctacagctacctggaggagagaaagccctacagcagcagactggagaaggacgacagcaccgacttcaagaagctgtacgagcagatcctggccgagaacgagaagctgaaggcccagctgcacgacaccaacatggagctgaccgacctgaagctgcagctggagaaggccacccagagacaggagagattcgccgacagaagcctgctggagatggagaagagagagagaagagccctggagagaagaatcagcgagatggaggaggagctgaagatgctgcccgacctgaaggccgacaaccagagactgaaggacgagaacggcgccctgatcagagtgatcagcaagctgagcaagtag

SEQ ID NO: 95300 - DNA, 2988 bp, synthetic construct
  misc_feature 1..2988: note = Description of Artificial Sequence: Synthetic coding sequence
  source 1..2988: mol_type = other DNA
atgaagatggccgacgccaagcagaagagaaacgagcagctgaagagatggatcggcagcgagaccgacctggagccccccgtggtgaagagacagaagaccaaggtgaagttcgacgacggcgccgtgttcctggccgcctgcagcagcggcgacaccgacgaggtgctgaagctgctgcacagaggcgccgacatcaactacgccaacgtggacggcctgaccgccctgcaccaggcctgcatcgacgacaacgtggacatggtgaagttcctggtggagaacggcgccaacatcaaccagcccgacaacgagggctggatccccctgcacgccgccgccagctgcggctacctggacatcgccgagttcctgatcggccagggcgcccacgtgggcgccgtgaacagcgagggcgacacccccctggacatcgccgaggaggaggccatggaggagctgctgcagaacgaggtgaacagacagggcgtggacatcgaggccgccagaaaggaggaggagagaatcatgctgagagacgccagacagtggctgaacagcggccacatcaacgacgtgagacacgccaagagcggcggcaccgccctgcacgtggccgccgccaagggctacaccgaggtgctgaagctgctgatccaggccggctacgacgtgaacatcaaggactacgacggctggacccccctgcacgccgccgcccactggggcaaggaggaggcctgcagaatcctggtggacaacctgtgcgacatggagatggtgaacaaggtgggccagaccgccttcgacgtggccgacgaggacatcctgggctacctggaggagctgcagaagaagcagaacctgctgcacagcgagaagagagacaagaagagccccctgatcgagagcaccgccaacatggacaacaaccagagccagaagaccttcaagaacaaggagaccctgatcatcgagcccgagaagaacgccagcagaatcgagagcctggagcaggagaaggtggacgaggaggaggagggcaagaaggacgagagcagctgcagcagcgaggaggacgaggaggacgacagcgagagcgaggccgagaccgacaagaccaagcccctggccagcgtgaccaacgccaacaccagcagcacccaggccgcccccgtggccgtgaccacccccaccgtgagcagcggccaggccacccccaccagccccatcaagaagttccccaccaccgccaccaagatcagccccaaggaggaggagagaaaggacgagagccccgccacctggagactgggcctgagaaagaccggcagctacggcgccctggccgagatcaccgccagcaaggagggccagaaggagaaggacaccgccggcgtgaccagaagcgccagcagccccagactgagcagcagcctggacaacaaggagaaggagaaggacagcaagggcaccagactggcctacgtggcccccaccatccccagaagactggccagcaccagcgacatcgaggagaaggagaacagagacagcagcagcctgagaaccagcagcagctacaccagaagaaagtgggaggacgacctgaagaagaacagcagcgtgaacgagggcagcacctaccacaagagctgcagcttcggcagaagacaggacgacctgatcagcagcagcgtgcccagcaccaccagcacccccaccgtgaccagcgccgccggcctgcagaagagcctgctgagcagcaccagcaccaccaccaagatcaccaccggcagcagcagcgccggcacccagagcagcaccagcaacagactgtgggccgaggacagcaccgagaaggagaaggacagcgtgcccaccgccgtgaccatccccgtggcccccaccgtggtgaacgccgccgccagcaccaccaccctgaccaccaccaccgccggcaccgtgagcagcaccaccgaggtgagagagagaagaagaagctacctgacccccgtgagagacgaggagagcgagagccagagaaaggccagaagcagacaggccagacagagcagaagaagcacccagggcgtgaccctgaccgacctgcaggaggccgagaagaccatcggcagaagcagaagcaccagaaccagagagcaggagaacgaggagaaggagaaggaggagaaggagaagcaggacaaggagaagcaggaggagaagaaggagagcgagaccagcagagaggacgagtacaagcagaagtacagcagaacctacgacgagacctaccagagatacagacccgtgagcaccagcagcagcaccacccccagcagcagcctgagcaccatgagcagcagcctgtacgccagcagccagctgaacagacccaacagcctggtgggcatcaccagcgcctacagcagaggcatcaccaaggagaacgagagagagggcgagaagagagaggaggagaaggagggcgaggacaagagccagcccaagagcatcagagagagaagaagacccagagagaagagaagaagcaccggcgtgagcttctggacccaggacagcgacgagaacgagcaggagcagcagagcgacaccgaggagggcagcaacaagaaggagacccaggtgaacaccatcaccctgtacgagaccagcagcaccagcgccggcgacagatacgacagcctgctgggcagaagcggcagctacagctacctggaggagagaaagccctacagcagcagactggagaaggacgacagcaccgacttcaagaagagacaggagagattcgccgacagaagcctgctggagatggagaagagagagagaagagccctggagagaagaatcagcgagatggaggaggagctgaagatgctgcccgacctgaaggccgacaaccagagactgaaggacgagaacggcgccctgatcagagtgatcagcaagctgagcaagtag

SEQ ID NO: 95301 - DNA, 2988 bp, synthetic construct
  misc_feature 1..2988: note = Description of Artificial Sequence: Synthetic coding sequence
  source 1..2988: mol_type = other DNA
atgaagatggccgacgccaagcagaagagaaacgagcagctgaagagatggatcggcagcgagaccgacctggagccccccgtggtgaagagacagaagaccaaggtgaagttcgacgacggcgccgtgttcctggccgcctgcagcagcggcgacaccgacgaggtgctgaagctgctgcacagaggcgccgacatcaactacgccaacgtggacggcctgaccgccctgcaccaggcctgcatcgacgacaacgtggacatggtgaagttcctggtggagaacggcgccaacatcaaccagcccgacaacgagggctggatccccctgcacgccgccgccagctgcggctacctggacatcgccgagttcctgatcggccagggcgcccacgtgggcgccgtgaacagcgagggcgacacccccctggacatcgccgaggaggaggccatggaggagctgctgcagaacgaggtgaacagacagggcgtggacatcgaggccgccagaaaggaggaggagagaatcatgctgagagacgccagacagtggctgaacagcggccacatcaacgacgtgagacacgccaagagcggcggcaccgccctgcacgtggccgccgccaagggctacaccgaggtgctgaagctgctgatccaggccggctacgacgtgaacatcaaggactacgacggctggacccccctgcacgccgccgcccactggggcaaggaggaggcctgcagaatcctggtggacaacctgtgcgacatggagatggtgaacaaggtgggccagaccgccttcgacgtggccgacgaggacatcctgggctacctggaggagctgcagaagaagcagaacctgctgcacagcgagaagagagacaagaagagccccctgatcgagagcaccgccaacatggacaacaaccagagccagaagaccttcaagaacaaggagaccctgatcatcgagcccgagaagaacgccagcagaatcgagagcctggagcaggagaaggtggacgaggaggaggagggcaagaaggacgagagcagctgcagcagcgaggaggacgaggaggacgacagcgagagcgaggccgagaccgacaagaccaagcccctggccagcgtgaccaacgccaacaccagcagcacccaggccgcccccgtggccgtgaccacccccaccgtgagcagcggccaggccacccccaccagccccatcaagaagttccccaccaccgccaccaagatcagccccaaggaggaggagagaaaggacgagagccccgccacctggagactgggcctgagaaagaccggcagctacggcgccctggccgagatcaccgccagcaaggagggccagaaggagaaggacaccgccggcgtgaccagaagcgccagcagccccagactgagcagcagcctggacaacaaggagaaggagaaggacagcaagggcaccagactggcctacgtggcccccaccatccccagaagactggccagcaccagcgacatcgaggagaaggagaacagagacagcagcagcctgagaaccagcagcagctacaccagaagaaagtgggaggacgacctgaagaagaacagcagcgtgaacgagggcagcacctaccacaagagctgcagcttcggcagaagacaggacgacctgatcagcagcagcgtgcccagcaccaccagcacccccaccgtgaccagcgccgccggcctgcagaagagcctgctgagcagcaccagcaccaccaccaagatcaccaccggcagcagcagcgccggcacccagagcagcaccagcaacagactgtgggccgaggacagcaccgagaaggagaaggacagcgtgcccaccgccgtgaccatccccgtggcccccaccgtggtgaacgccgccgccagcaccaccaccctgaccaccaccaccgccggcaccgtgagcagcaccaccgaggtgagagagagaagaagaagctacctgacccccgtgagagacgaggagagcgagagccagagaaaggccagaagcagacaggccagacagagcagaagaagcacccagggcgtgaccctgaccgacctgcaggaggccgagaagaccatcggcagaagcagaagcaccagaaccagagagcaggagaacgaggagaaggagaaggaggagaaggagaagcaggacaaggagaagcaggaggagaagaaggagagcgagaccagcagagaggacgagtacaagcagaagtacagcagaacctacgacgagacctaccagagatacagacccgtgagcaccagcagcagcaccacccccagcagcagcctgagcaccatgagcagcagcctgtacgccagcagccagctgaacagacccaacagcctggtgggcatcaccagcgcctacagcagaggcatcaccaaggagaacgagagagagggcgagaagagagaggaggagaaggagggcgaggacaagagccagcccaagagcatcagagagagaagaagacccagagagaagagaagaagcaccggcgtgagcttctggacccaggacagcgacgagaacgagcaggagcagcagagcgacaccgaggagggcagcaacaagaaggagacccagaccgacagcatcagcagatacgagaccagcagcaccagcgccggcgacagatacgacagcctgctgggcagaagcggcagctacagctacctggaggagagaaagccctacagcagcagactggagaaggacgacagcaccgacttcaagaagagacaggagagattcgccgacagaagcctgctggagatggagaagagagagagaagagccctggagagaagaatcagcgagatggaggaggagctgaagatgctgcccgacctgaaggccgacaaccagagactgaaggacgagaacggcgccctgatcagagtgatcagcaagctgagcaagtag

SEQ ID NO: 95302 - DNA, 3093 bp, synthetic construct; identical to SEQ ID NO: 95297
  misc_feature 1..3093: note = Description of Artificial Sequence: Synthetic coding sequence
  source 1..3093: mol_type = other DNA

SEQ ID NO: 95303 - DNA, 3093 bp, synthetic construct
  misc_feature 1..3093: note = Description of Artificial Sequence: Synthetic coding sequence
  source 1..3093: mol_type = other DNA
atgaagatggccgacgccaagcagaagagaaacgagcagctgaagagatggatcggcagcgagaccgacctggagccccccgtggtgaagagacagaagaccaaggtgaagttcgacgacggcgccgtgttcctggccgcctgcagcagcggcgacaccgacgaggtgctgaagctgctgcacagaggcgccgacatcaactacgccaacgtggacggcctgaccgccctgcaccaggcctgcatcgacgacaacgtggacatggtgaagttcctggtggagaacggcgccaacatcaaccagcccgacaacgagggctggatccccctgcacgccgccgccagctgcggctacctggacatcgccgagttcctgatcggccagggcgcccacgtgggcgccgtgaacagcgagggcgacacccccctggacatcgccgaggaggaggccatggaggagctgctgcagaacgaggtgaacagacagggcgtggacatcgaggccgccagaaaggaggaggagagaatcatgctgagagacgccagacagtggctgaacagcggccacatcaacgacgtgagacacgccaagagcggcggcaccgccctgcacgtggccgccgccaagggctacaccgaggtgctgaagctgctgatccaggccggctacgacgtgaacatcaaggactacgacggctggacccccctgcacgccgccgcccactggggcaaggaggaggcctgcagaatcctggtggacaacctgtgcgacatggagatggtgaacaaggtgggccagaccgccttcgacgtggccgacgaggacatcctgggctacctggaggagctgcagaagaagcagaacctgctgcacagcgagaagagagacaagaagagccccctgatcgagagcaccgccaacatggacaacaaccagagccagaagaccttcaagaacaaggagaccctgatcatcgagcccgagaagaacgccagcagaatcgagagcctggagcaggagaaggtggacgaggaggaggagggcaagaaggacgagagcagctgcagcagcgaggaggacgaggaggacgacagcgagagcgaggccgagaccgacaagaccaagcccctggccagcgtgaccaacgccaacaccagcagcacccaggccgcccccgtggccgtgaccacccccaccgtgagcagcggccaggccacccccaccagccccatcaagaagttccccaccaccgccaccaagatcagccccaaggaggaggagagaaaggacgagagccccgccacctggagactgggcctgagaaagaccggcagctacggcgccctggccgagatcaccgccagcaaggagggccagaaggagaaggacaccgccggcgtgaccagaagcgccagcagccccagactgagcagcagcctggacaacaaggagaaggagaaggacagcaagggcaccagactggcctacgtggcccccaccatccccagaagactggccagcaccagcgacatcgaggagaaggagaacagagacagcagcagcctgagaaccagcagcagctacaccagaagaaagtgggaggacgacctgaagaagaacagcagcgtgaacgagggcagcacctaccacaagagctgcagcttcggcagaagacaggacgacctgatcagcagcagcgtgcccagcaccaccagcacccccaccgtgaccagcgccgccggcctgcagaagagcctgctgagcagcaccagcaccaccaccaagatcaccaccggcagcagcagcgccggcacccagagcagcaccagcaacagactgtgggccgaggacagcaccgagaaggagaaggacagcgtgcccaccgccgtgaccatccccgtggcccccaccgtggtgaacgccgccgccagcaccaccaccctgaccaccaccaccgccggcaccgtgagcagcaccaccgaggtgagagagagaagaagaagctacctgacccccgtgagagacgaggagagcgagagccagagaaaggccagaagcagacaggccagacagagcagaagaagcacccagggcgtgaccctgaccgacctgcaggaggccgagaagaccatcggcagaagcagaagcaccagaaccagagagcaggagaacgaggagaaggagaaggaggagaaggagaagcaggacaaggagaagcaggaggagaagaaggagagcgagaccagcagagaggacgagtacaagcagaagtacagcagaacctacgacgagacctaccagagatacagacccgtgagcaccagcagcagcaccacccccagcagcagcctgagcaccatgagcagcagcctgtacgccagcagccagctgaacagacccaacagcctggtgggcatcaccagcgcctacagcagaggcatcaccaaggagaacgagagagagggcgagaagagagaggaggagaaggagggcgaggacaagagccagcccaagagcatcagagagagaagaagacccagagagaagagaagaagcaccggcgtgagcttctggacccaggacagcgacgagaacgagcaggagcagcagagcgacaccgaggagggcagcaacaagaaggagacccaggtgaacaccatcaccctgtacgagaccagcagcaccagcgccggcgacagatacgacagcctgctgggcagaagcggcagctacagctacctggaggagagaaagccctacagcagcagactggagaaggacgacagcaccgacttcaagaagctgtacgagcagatcctggccgagaacgagaagctgaaggcccagctgcacgacaccaacatggagctgaccgacctgaagctgcagctggagaaggccacccagagacaggagagattcgccgacagaagcctgctggagatggagaagagagagagaagagccctggagagaagaatcagcgagatggaggaggagctgaagatgctgcccgacctgaaggccgacaaccagagactgaaggacgagaacggcgccctgatcagagtgatcagcaagctgagcaagtag

SEQ ID NO: 95304 - DNA, 2832 bp, synthetic construct
  misc_feature 1..2832: note = Description of Artificial Sequence: Synthetic coding sequence
  source 1..2832: mol_type = other DNA
atggtgaagttcctggtggagaacggcgccaacatcaaccagcccgacaacgagggctggatccccctgcacgccgccgccagctgcggctacctggacatcgccgagttcctgatcggccagggcgcccacgtgggcgccgtgaacagcgagggcgacacccccctggacatcgccgaggaggaggccatggaggagctgctgcagaacgaggtgaacagacagggcgtggacatcgaggccgccagaaaggaggaggagagaatcatgctgagagacgccagacagtggctgaacagcggccacatcaacgacgtgagacacgccaagagcggcggcaccgccctgcacgtggccgccgccaagggctacaccgaggtgctgaagctgctgatccaggccggctacgacgtgaacatcaaggactacgacggctggacccccctgcacgccgccgcccactggggcaaggaggaggcctgcagaatcctggtggacaacctgtgcgacatggagatggtgaacaaggtgggccagaccgccttcgacgtggccgacgaggacatcctgggctacctggaggagctgcagaagaagcagaacctgctgcacagcgagaagagagacaagaagagccccctgatcgagagcaccgccaacatggacaacaaccagagccagaagaccttcaagaacaaggagaccctgatcatcgagcccgagaagaacgccagcagaatcgagagcctggagcaggagaaggtggacgaggaggaggagggcaagaaggacgagagcagctgcagcagcgaggaggacgaggaggacgacagcgagagcgaggccgagaccgacaagaccaagcccctggccagcgtgaccaacgccaacaccagcagcacccaggccgcccccgtggccgtgaccacccccaccgtgagcagcggccaggccacccccaccagccccatcaagaagttccccaccaccgccaccaagatcagccccaaggaggaggagagaaaggacgagagccccgccacctggagactgggcctgagaaagaccggcagctacggcgccctggccgagatcaccgccagcaaggagggccagaaggagaaggacaccgccggcgtgaccagaagcgccagcagccccagactgagcagcagcctggacaacaaggagaaggagaaggacagcaagggcaccagactggcctacgtggcccccaccatccccagaagactggccagcaccagcgacatcgaggagaaggagaacagagacagcagcagcctgagaaccagcagcagctacaccagaagaaagtgggaggacgacctgaagaagaacagcagcgtgaacgagggcagcacctaccacaagagctgcagcttcggcagaagacaggacgacctgatcagcagcagcgtgcccagcaccaccagcacccccaccgtgaccagcgccgccggcctgcagaagagcctgctgagcagcaccagcaccaccaccaagatcaccaccggcagcagcagcgccggcacccagagcagcaccagcaacagactgtgggccgaggacagcaccgagaaggagaaggacagcgtgcccaccgccgtgaccatccccgtggcccccaccgtggtgaacgccgccgccagcaccaccaccctgaccaccaccaccgccggcaccgtgagcagcaccaccgaggtgagagagagaagaagaagctacctgacccccgtgagagacgaggagagcgagagccagagaaaggccagaagcagacaggccagacagagcagaagaagcacccagggcgtgaccctgaccgacctgcaggaggccgagaagaccatcggcagaagcagaagcaccagaaccagagagcaggagaacgaggagaaggagaaggaggagaaggagaagcaggacaaggagaagcaggaggagaagaaggagagcgagaccagcagagaggacgagtacaagcagaagtacagcagaacctacgacgagacctaccagagatacagacccgtgagcaccagcagcagcaccacccccagcagcagcctgagcaccatgagcagcagcctgtacgccagcagccagctgaacagacccaacagcctggtgggcatcaccagcgcctacagcagaggcatcaccaaggagaacgagagagagggcgagaagagagaggaggagaaggagggcgaggacaagagccagcccaagagcatcagagagagaagaagacccagagagaagagaagaagcaccggcgtgagcttctggacccaggacagcgacgagaacgagcaggagcagcagagcgacaccgaggagggcagcaacaagaaggagacccagaccgacagcatcagcagatacgagaccagcagcaccagcgccggcgacagatacgacagcctgctgggcagaagcggcagctacagctacctggaggagagaaagccctacagcagcagactggagaaggacgacagcaccgacttcaagaagctgtacgagcagatcctggccgagaacgagaagctgaaggcccagctgcacgacaccaacatggagctgaccgacctgaagctgcagctggagaaggccacccagagacaggagagattcgccgacagaagcctgctggagatggagaagagagagagaagagccctggagagaagaatcagcgagatggaggaggagctgaagatgctgcccgacctgaaggccgacaaccagagactgaaggacgagaacggcgccctgatcagagtgatcagcaagctgagcaagtag

SEQ ID NO: 95305 - DNA, 2925 bp, synthetic construct
  misc_feature 1..2925: note = Description of Artificial Sequence: Synthetic coding sequence
  source 1..2925: mol_type = other DNA
atgaagatggccgacgccaagcagaagagaaacgagcagctgaagagatggatcggcagcgagaccgacctggagccccccgtggtgaagagacagaagaccaaggtgaagttcgacgacggcgccgtgttcctggccgcctgcagcagcggcgacaccgacgaggtgctgaagctgctgcacagaggcgccgacatcaactacgccaacgtggacggcctgaccgccctgcaccaggcctgcatcgacgacaacgtggacatggtgaagttcctggtggagaacggcgccaacatcaaccagcccgacaacgagggctggatccccctgcacgccgccgccagctgcggctacctggacatcgccgagttcctgatcggccagggcgcccacgtgggcgccgtgaacagcgagggcgacacccccctggacatcgccgaggaggaggccatggaggagctgctgcagaacgaggtgaacagacagggcgtggacatcgaggccgccagaaaggaggaggagagaatcatgctgagagacgccagacagtggctgaacagcggccacatcaacgacgtgagacacgccaagagcggcggcaccgccctgcacgtggccgccgccaagggctacaccgaggtgctgaagctgctgatccaggccggctacgacgtgaacatcaaggactacgacggctggacccccctgcacgccgccgcccactggggcaaggaggaggcctgcagaatcctggtggacaacctgtgcgacatggagatggtgaacaaggtgggccagaccgccttcgacgtggccgacgaggacatcctgggctacctggaggagctgcagaagaagcagaacctgctgcacagcgagaagagagacaagaagagccccctgatcgagagcaccgccaacatggacaacaaccagagccagaagaccttcaagaacaaggagaccctgatcatcgagcccgagaagaacgccagcagaatcgagagcctggagcaggagaaggtggacgaggaggaggagggcaagaaggacgagagcagctgcagcagcgaggaggacgaggaggacgacagcgagagcgaggccgagaccgacaagaccaagcccctggccagcgtgaccaacgccaacaccagcagcacccaggccgcccccgtggccgtgaccacccccaccgtgagcagcggccaggccacccccaccagccccatcaagaagttccccaccaccgccaccaagatcagccccaaggaggaggagagaaaggacgagagccccgccacctggagactgggcctgagaaagaccggcagctacggcgccctggccgagatcaccgccagcaaggagggccagaaggagaaggacaccgccggcgtgaccagaagcgccagcagccccagactgagcagcagcctggacaacaaggagaaggagaaggacagcaagggcaccagactggcctacgtggcccccaccatccccagaagactggccagcaccagcgacatcgaggagaaggagaacagagacagcagcagcctgagaaccagcagcagctacaccagaagaaagtgggaggacgacctgaagaagaacagcagcgtgaacgagggcagcacctaccacaagagcaccagcaacagactgtgggccgaggacagcaccgagaaggagaaggacagcgtgcccaccgccgtgaccatccccgtggcccccaccgtggtgaacgccgccgccagcaccaccaccctgaccaccaccaccgccggcaccgtgagcagcaccaccgaggtgagagagagaagaagaagctacctgacccccgtgagagacgaggagagcgagagccagagaaaggccagaagcagacaggccagacagagcagaagaagcacccagggcgtgaccctgaccgacctgcaggaggccgagaagaccatcggcagaagcagaagcaccagaaccagagagcaggagaacgaggagaaggagaaggaggagaaggagaagcaggacaaggagaagcaggaggagaagaaggagagcgagaccagcagagaggacgagtacaagcagaagtacagcagaacctacgacgagacctaccagagatacagacccgtgagcaccagcagcagcaccacccccagcagcagcctgagcaccatgagcagcagcctgtacgccagcagccagctgaacagacccaacagcctggtgggcatcaccagcgcctacagcagaggcatcaccaaggagaacgagagagagggcgagaagagagaggaggagaaggagggcgaggacaagagccagcccaagagcatcagagagagaagaagacccagagagaagagaagaagcaccggcgtgagcttctggacccaggacagcgacgagaacgagcaggagcagcagagcgacaccgaggagggcagcaacaagaaggagacccagaccgacagcatcagcagatacgagaccagcagcaccagcgccggcgacagatacgacagcctgctgggcagaagcggcagctacagctacctggaggagagaaagccctacagcagcagactggagaaggacgacagcaccgacttcaagaagctgtacgagcagatcctggccgagaacgagaagctgaaggcccagctgcacgacaccaacatggagctgaccgacctgaagctgcagctggagaaggccacccagagacaggagagattcgccgacagaagcctgctggagatggagaagagagagagaagagccctggagagaagaatcagcgagatggaggaggagctgaagatgctgcccgacctgaaggccgacaaccagagactgaaggacgagaacggcgccctgatcagagtgatcagcaagctgagcaagtag

SEQ ID NO: 95306 - DNA, 2949 bp, synthetic construct
  misc_feature 1..2949: note = Description of Artificial Sequence: Synthetic coding sequence
  source 1..2949: mol_type = other DNA
atggccgagctggagcacctgggcggcaagagagccgagagcgccagaatgagaagagccgagcagctgagaagatggagaggcagcctgaccgagcaggagcccgccgagagaagaggcgccggcagacagcccctgaccagaagaggcagccccagagtgagattcgaggacggcgccgtgttcctggccgcctgcagcagcggcgacaccgacgaggtgagaaagctgctggccagaggcgccgacatcaacaccgtgaacgtggacggcctgaccgccctgcaccaggcctgcatcgacgagaacctggacatggtgaagttcctggtggagaacagagccaacgtgaaccagcaggacaacgagggctggacccccctgcacgccgccgccagctgcggctacctgaacatcgccgagtacttcatcaaccacggcgccagcgtgggcatcgtgaacagcgagggcgaggtgcccagcgacctggccgaggagcccgccatgaaggacctgctgctggagcaggtgaagaagcagggcgtggacctggagcagagcagaaaggaggaggagcagcagatgctgcaggacgccagacagtggctgaacagcggcaagatcgaggacgtgagacaggccagaagcggcgccaccgccctgcacgtggccgccgccaagggctacagcgaggtgctgagactgctgatccaggccggctacgagctgaacgtgcaggactacgacggctggacccccctgcacgccgccgcccactggggcgtgaaggaggcctgcagcatcctggccgaggccctgtgcgacatggacatcagaaacaagctgggccagacccccttcgacgtggccgacgagggcctggtggagcacctggagctgctgcagaagaagcagaacgtgctgagaagcgagaaggagaccagaaacaagctgatcgagagcgacctgaacagcaagatccagagcggcttcttcaagaacaaggagaagatgctgtacgaggaggagacccccaagagccaggagatggaggaggagaacaaggagagcagcagcagcagcagcgaggaggaggagggcgaggacgaggccagcgagagcgagaccgagaaggaggccgacaagaagcccgaggccttcgtgaaccacagcaacagcgagagcaagagcagcatcaccgagcagatccccgcccccgcccagaacaccttcagcgccagcagcgccagaagattcagcagcggcctgttcaacaagcccgaggagcccaaggacgagagccccagcagctggagactgggcctgagaaagaccggcagccacaacatgctgagcgaggtggccaacagcagagagcccatcagagacagaggcagcagcatctacagaagcagcagcagccccagaatcagcgccctgctggacaacaaggacaaggagagagagaacaagagctacatcagcagcctggcccccagaaagctgaacagcaccagcgacatcgaggagaaggagaacagagagagcgccgtgaacctggtgagaagcggcagctacaccagacagctgtggagagacgaggccaagggcaacgagatcccccagaccatcgcccccagcacctacgtgagcacctacctgaagagaaccccccacaagagccaggccgacaccaccgccgagaagaccgccgacaacgtgagcagcagcacccccctgtgcgtgatcaccaacagacccctgcccagcaccgccaacggcgtgaccgccacccccgtgctgagcatcaccggcaccgacagcagcgtggaggccagagagaagagaagaagctacctgacccccgtgagagacgaggaggccgagagcctgagaaaggccagaagcagacaggccagacagaccagaagaagcacccagggcgtgaccctgaccgacctgcaggaggccgagagaaccttcagcagaagcagagccgagagacaggcccaggagcagcccagagagaagcccaccgacaccgagggcctggagggcagccccgagaagcacgagcccagcgccgtgcccgccaccgaggccggcgagggccagcagccctggggcagaagcctggacgaggagcccatctgccacagactgagatgccccgcccagcccgacaagcccaccacccccgccagccccagcaccagcagacccagcctgtacaccagcagccacctgctgtggaccaacagattcagcgtgcccgacagcgagagcagcgagaccaccaccaacaccaccaccgccaaggagatggacaagaacgagaacgaggaggccgacctggacgagcagagcagcaagagactgagcatcagagagagaagaagacccaaggagagaagaagaggcaccggcatcaacttctggaccaaggacgaggacgagaccgacggcagcgaggaggtgaaggagacctgggccgagagactgaagagactggagagcggcggcagcaaccccaccaccagcgacagctacggcgacagagccagcgccagagccagaagagaggccagagaggccagactggccaccctgaccagcagagtggaggaggacagcaacagagactacaagaagctgtacgagagcgccctgaccgagaaccagaagctgaagaccaagctgcaggaggcccagctggagctggccgacatcaagagcaagctggagaaggtggcccagcagaagcaggagaagaccagcgacagaagcagcgtgctggagatggagaagagagagagaagagccctggagagaaagatgagcgagatggaggaggagatgaaggtgctgaccgagctgaagagcgacaaccagagactgaaggacgagaacggcgccctgatcagagtgatcagcaagctgagcaagtag

SEQ ID NO: 95307 - DNA, 1161 bp, synthetic construct
  misc_feature 1..1161: note = Description of Artificial Sequence: Synthetic coding sequence
  source 1..1161: mol_type = other DNA
atggccgagctggagcacctgggcggcaagagagccgagagcgccagaatgagaagagccgagcagctgagaagatggagaggcagcctgaccgagcaggagcccgccgagagaagaggcgccggcagacagcccctgaccagaagaggcagccccagagtgagattcgaggacggcgccgtgttcctggccgcctgcagcagcggcgacaccgacgaggtgagaaagctgctggccagaggcgccgacatcaacaccgtgaacgtggacggcctgaccgccctgcaccaggcctgcatcgacgagaacctggacatggtgaagttcctggtggagaacagagccaacgtgaaccagcaggacaacgagggctggacccccctgcacgccgccgccagctgcggctacctgaacatcgccgagtacttcatcaaccacggcgccagcgtgggcatcgtgaacagcgagggcgaggtgcccagcgacctggccgaggagcccgccatgaaggacctgctgctggagcaggtgaagaagcagggcgtggacctggagcagagcagaaaggaggaggagcagcagatgctgcaggacgccagacagtggctgaacagcggcaagatcgaggacgtgagacaggccagaagcggcgccaccgccctgcacgtggccgccgccaagggctacagcgaggtgctgagactgctgatccaggccggctacgagctgaacgtgcaggactacgacggctggacccccctgcacgccgccgcccactggggcgtgaaggaggcctgcagcatcctggccgaggccctgtgcgacatggacatcagaaacaagctgggccagacccccttcgacgtggccgacgagggcctggtggagcacctggagctgctgcagaagaagcagaacgtgctgagaagcgagaaggagaccagaaacaagctgatcgagagcgacctgaacagcaagatccagagcggcttcttcaagaacaaggagaagatgctgtacgaggaggagacccccaagagccaggagatggaggaggagaacaaggagagcagcagcagcagcagcgaggaggaggagggcgaggacgaggccagcgagagcgagaccgagaaggaggccgtgctgttctggcccttctag

SEQ ID NO: 95308 - DNA, 675 bp, synthetic construct
  misc_feature 1..675: note = Description of Artificial Sequence: Synthetic coding sequence
  source 1..675: mol_type = other DNA
atggacaagaacgagaacgaggaggccgacctggacgagcagagcagcaagagactgagcatcagagagagaagaagacccaaggagagaagaagaggcaccggcatcaacttctggaccaaggacgaggacgagaccgacggcagcgaggaggtgaaggagacctggcacgagagactgagcagactggagagcggcggcagcaaccccaccaccagcgacagctacggcgacagagccagcgccagagccagaagagaggccagagaggccagactggccaccctgaccagcagagtggaggaggacagcaacagagactacaagaagctgtacgagagcgccctgaccgagaaccagaagctgaagaccaagctgcaggaggcccagctggagctggccgacatcaagagcaagctggagaaggtggcccagcagaagcaggagaagaccagcgacagaagcagcgtgctggagatggagaagagagagagaagagccctggagagaaagatgagcgagatggaggaggagatgaagaacctgcaccagctgaagcagatccagaccctgaagcagatgaacgagcagctgcaggccgagaacagagccctgaccagagtggtggccagactgagcgagagcatcgagagcagcgacacccaggagctgtag

SEQ ID NO: 95309 - DNA, 627 bp, synthetic construct
  misc_feature 1..627: note = Description of Artificial Sequence: Synthetic coding sequence
  source 1..627: mol_type = other DNA
atggacaagaacgagaacgaggaggccgacctggacgagcagagcagcaagagactgagcatcagagagagaagaagacccaaggagagaagaagaggcaccggcatcaacttctggaccaaggacgaggacgagaccgacggcagcgaggaggtgaaggagacctggcacgagagactgagcagactggagagcggcggcagcaaccccaccaccagcgacagctacggcgacagagccagcgccagagccagaagagaggccagagaggccagactggccaccctgaccagcagagtggaggaggacagcaacagagactacaagaagctgtacgagagcgccctgaccgagaaccagaagctgaagaccaagctgcaggaggcccagctggagctggccgacatcaagagcaagctggagaaggtggcccagcagaagcaggagaagaccagcgacagaagcagcgtgctggagatggagaagagagagagaagagccctggagagaaagatgagcgagatggaggaggagatgaaggtgctgaccgagctgaagagcgacaaccagagactgaaggacgagaacggcgccctgatcagagtgatcagcaagctgagcaagtag

SEQ ID NO: 95310 - DNA, 2949 bp, synthetic construct
  misc_feature 1..2949: note = Description of Artificial Sequence: Synthetic coding sequence
  source 1..2949: mol_type = other DNA
atggccgagctggagcacctgggcggcaagagagccgagagcgccagaatgagaagagccgagcagctgagaagatggagaggcagcctgaccgagcaggagcccgccgagagaagaggcgccggcagacagcccctgaccagaagaggcagccccagagtgagattcgaggacggcgccgtgttcctggccgcctgcagcagcggcgacaccgacgaggtgagaaagctgctggccagaggcgccgacatcaacaccgtgaacgtggacggcctgaccgccctgcaccaggcctgcatcgacgagaacctggacatggtgaagttcctggtggagaacagagccaacgtgaaccagcaggacaacgagggctggacccccctgcacgccgccgccagctgcggctacctgaacatcgccgagtacttcatcaaccacggcgccagcgtgggcatcgtgaacagcgagggcgaggtgcccagcgacctggccgaggagcccgccatgaaggacctgctgctggagcaggtgaagaagcagggcgtggacctggagcagagcagaaaggaggaggagcagcagatgctgcaggacgccagacagtggctgaacagcggcaagatcgaggacgtgagacaggccagaagcggcgccaccgccctgcacgtggccgccgccaagggctacagcgaggtgctgagactgctgatccaggccggctacgagctgaacgtgcaggactacgacggctggacccccctgcacgccgccgcccactggggcgtgaaggaggcctgcagcatcctggccgaggccctgtgcgacatggacatcagaaacaagctgggccagacccccttcgacgtggccgacgagggcctggtggagcacctggagctgctgcagaagaagcagaacgtgctgagaagcgagaaggagaccagaaacaagctgatcgagagcgacctgaacagcaagatccagagcggcttcttcaagaacaaggagaagatgctgtacgaggaggagacccccaagagccaggagatggaggaggagaacaaggagagcagcagcagcagcagcgaggaggaggagggcgaggacgaggccagcgagagcgagaccgagaaggaggccgacaagaagcccgaggccttcgtgaaccacagcaacagcgagagcaagagcagcatcaccgagcagatccccgcccccgcccagaacaccttcagcgccagcagcgccagaagattcagcagcggcctgttcaacaagcccgaggagcccaaggacgagagccccagcagctggagactgggcctgagaaagaccggcagccacaacatgctgagcgaggtggccaacagcagagagcccatcagagacagaggcagcagcatctacagaagcagcagcagccccagaatcagcgccctgctggacaacaaggacaaggagagagagaacaagagctacatcagcagcctggcccccagaaagctgaacagcaccagcgacatcgaggagaaggagaacagagagagcgccgtgaacctggtgagaagcggcagctacaccagacagctgtggagagacgaggccaagggcaacgagatcccccagaccatcgcccccagcacctacgtgagcacctacctgaagagaaccccccacaagagccaggccgacaccaccgccgagaagaccgccgacaacgtgagcagcagcacccccctgtgcgtgatcaccaacagacccctgcccagcaccgccaacggcgtgaccgccacccccgtgctgagcatcaccggcaccgacagcagcgtggaggccagagagaagagaagaagctacctgacccccgtgagagacgaggaggccgagagcctgagaaaggccagaagcagacaggccagacagaccagaagaagcacccagggcgtgaccctgaccgacctgcaggaggccgagagaaccttcagcagaagcagagccgagagacaggcccaggagcagcccagagagaagcccaccgacaccgagggcctggagggcagccccgagaagcacgagcccagcgccgtgcccgccaccgaggccggcgagggccagcagccctggggcagaagcctggacgaggagcccatctgccacagactgagatgccccgcccagcccgacaagcccaccacccccgccagccccagcaccagcagacccagcctgtacaccagcagccacctgctgtggaccaacagattcagcgtgcccgacagcgagagcagcgagaccaccaccaacaccaccaccgccaaggagatggacaagaacgagaacgaggaggccgacctggacgagcagagcagcaagagactgagcatcagagagagaagaagacccaaggagagaagaagaggcaccggcatcaacttctggaccaaggacgaggacgagaccgacggcagcgaggaggtgaaggagacctggcacgagagactgagcagactggagagcggcggcagcaaccccaccaccagcgacagctacggcgacagagccagcgccagagccagaagagaggccagagaggccagactggccaccctgaccagcagagtggaggaggacagcaacagagactacaagaagctgtacgagagcgccctgaccgagaaccagaagctgaagaccaagctgcaggaggcccagctggagctggccgacatcaagagcaagctggagaaggtggcccagcagaagcaggagaagaccagcgacagaagcagcgtgctggagatggagaagagagagagaagagccctggagagaaagatgagcgagatggaggaggagatgaaggtgctgaccgagctgaagagcgacaaccagagactgaaggacgagaacggcgccctgatcagagtgatcagcaagctgagcaagtag

SEQ ID NO: 95311 - DNA, 2349 bp, synthetic construct
  misc_feature 1..2349: note = Description of Artificial Sequence: Synthetic coding sequence
  source 1..2349: mol_type = other DNA
atgagcggcgaggacggccccgccgccggccccggcgccgccgccgccgccgccagagagagaagaagagagcagctgagacagtggggcgccagagccggcgccgagcccggccccggcgagagaagagccagaaccgtgagattcgagagagccgccgagttcctggccgcctgcgccggcggcgacctggacgaggccagactgatgctgagagccgccgaccccggccccggcgccgagctggaccccgccgcccccccccccgccagagccgtgctggacagcaccaacgccgacggcatcagcgccctgcaccaggcctgcatcgacgagaacctggaggtggtgagattcctggtggagcagggcgccaccgtgaaccaggccgacaacgagggctggacccccctgcacgtggccgccagctgcggctacctggacatcgccagatacctgctgagccacggcgccaacatcgccgccgtgaacagcgacggcgacctgcccctggacctggccgagagcgacgccatggagggcctgctgaaggccgagatcgccagaagaggcgtggacgtggaggccgccaagagagccgaggaggagctgctgctgcacgacaccagatgctggctgaacggcggcgccatgcccgaggccagacaccccagaaccggcgccagcgccctgcacgtggccgccgccaagggctacatcgaggtgatgagactgctgctgcaggccggctacgaccccgagctgagagacggcgacggctggacccccctgcacgccgccgcccactggggcgtggaggacgcctgcagactgctggccgagcacggcggcggcatggacagcctgacccacgccggccagagaccctgcgacctggccgacgaggaggtgctgagcctgctggaggagctggccagaaagcaggaggacctgagaaaccagaaggaggccagccagagcagaggccaggagccccaggcccccagcagcagcaagcacagaagaagcagcgtgtgcagactgagcagcagagagaagatcagcctgcaggacctgagcaaggagagaagacccggcggcgccggcggcccccccatccaggacgaggacgagggcgaggagggccccaccgagcccccccccgccgagcccagaaccctgaacggcgtgagcagccccccccaccccagccccaagagccccgtgcagctggaggaggcccccttcagcagaagattcggcctgctgaagaccggcagcagcggcgccctgggcccccccgagagaagaaccgccgagggcgcccccggcgccggcctgcagagaagcgccagcagcagctggctggagggcaccagcacccaggccaaggagctgagactggccagaatcacccccacccccagccccaagctgcccgagcccagcgtgctgagcgaggtgaccaagccccccccctgcctggagaacagcagcccccccagcagaatccccgagcccgagagccccgccaagcccaacgtgcccaccgccagcaccgccccccccgccgacagcagagacagaagaagaagctaccagatgcccgtgagagacgaggagagcgagagccagagaaaggccagaagcagactgatgagacagagcagaagaagcacccagggcgtgaccctgaccgacctgaaggaggccgagaaggccgccggcaaggcccccgagagcgagaagcccgcccagagcctggaccccagcagaagacccagagtgcccggcgtggagaacagcgacagccccgcccagagagccgaggcccccgacggccagggccccggcccccaggccgccagagagcacagaaaggtgggcaaggagtggagaggccccgccgagggcgaggaggccgagcccgccgacagaagccaggagagcagcaccctggagggcggccccagcgccagaagacagagatggcagagagacctgaaccccgagcccgagcccgagagcgaggagcccgacggcggcttcagaaccctgtacgccgagctgagaagagagaacgagagactgagagaggccctgaccgagaccaccctgagactggcccagctgaaggtggagctggagagagccacccagagacaggagagattcgccgagagacccgccctgctggagctggagagattcgagagaagagccctggagagaaaggccgccgagctggaggaggagctgaaggccctgagcgacctgagagccgacaaccagagactgaaggacgagaacgccgccctgatcagagtgatcagcaagctgagcaagtag

SEQ ID NO: 95312 - DNA, 2160 bp, synthetic construct
  misc_feature 1..2160: note = Description of Artificial Sequence: Synthetic coding sequence
  source 1..2160: mol_type = other DNA
atgagcggcgaggacggccccgccgccggccccggcgccgccgccgccgccgccagagagagaagaagagagcagctgagacagtggggcgccagagccggcgccgagcccggccccggcgagagaagagccagaaccgtgagattcgagagagccgccgagttcctggccgcctgcgccggcggcgacctggacgaggccagactgatgctgagagccgccgaccccggccccggcgccgagctggaccccgccgcccccccccccgccagagccgtgctggacagcaccaacgccgacggcatcagcgccctgcaccaggcctgcatcgacgagaacctggaggtggtgagattcctggtggagcagggcgccaccgtgaaccaggccgacaacgagggctggacccccctgcacgtggccgccagctgcggctacctggacatcgccagatacctgctgagccacggcgccaacatcgccgccgtgaacagcgacggcgacctgcccctggacctggccgagagcgacgccatggagggcctgctgaaggccgagatcgccagaagaggcgtggacgtggaggccgccaagagagccgaggaggagctgctgctgcacgacaccagatgctggctgaacggcggcgccatgcccgaggccagacaccccagaaccggcgccagcgccctgcacgtggccgccgccaagggctacatcgaggtgatgagactgctgctgcaggccggctacgaccccgagctgagagacggcgacggctggacccccctgcacgccgccgcccactggggcgtggaggacgcctgcagactgctggccgagcacggcggcggcatggacagcctgacccacgccggccagagaccctgcgacctggccgacgaggaggtgctgagcctgctggaggagctggccagaaagcaggaggacctgagaaaccagaaggaggccagccagagcagaggccaggagccccaggcccccagcagcagcaagcacagaagaagcagcgtgtgcagactgagcagcagagagaagatcagcctgcaggacctgagcaaggagagaagacccggcggcgccggcggcccccccatccaggacgaggacgagggcgaggagggccccaccgagcccccccccgccgagcccagaaccctgaacggcgtgagcagccccccccaccccagccccaagagccccgtgcagctggaggaggcccccttcagcagaagattcggcctgctgaagaccggcagcagcggcgccctgggcccccccgagagaagaaccgccgagggcgcccccggcgccggcctgcagagaagcgccagcagcagctggctggagggcaccagcacccaggccaaggagctgagactggccagaatcacccccacccccagccccaagctgcccgagcccagcgtgctgagcgaggtgaccaagccccccccctgcctggagaacagcagcccccccagcagaatccccgagcccgagagccccgccaagcccaacgtgcccaccgccagcaccgccccccccgccgacagcagagacagaagaagaagctaccagatgcccgtgagagacgaggagagcgagagccagagaaaggccagaagcagactgatgagacagagcagaagaagcacccagggcgtgaccctgaccgacctgaaggaggccgagaaggccggcgaggaggccgagcccgccgacagaagccaggagagcagcaccctggagggcggccccagcgccagaagacagagatggcagagagacctgaaccccgagcccgagcccgagagcgaggagcccgacggcggcttcagaaccctgtacgccgagctgagaagagagaacgagagactgagagaggccctgaccgagaccaccctgagactggcccagctgaaggtggagctggagagagccacccagagacaggagagattcgccgagagacccgccctgctggagctggagagattcgagagaagagccctggagagaaaggccgccgagctggaggaggagctgaaggccctgagcgacctgagagccgacaaccagagactgaaggacgagaacgccgccctgatcagagtgatcagcaagctgagcaagtag

SEQ ID NO: 95313 - DNA, 2124 bp, synthetic construct
  misc_feature 1..2124: note = Description of Artificial Sequence: Synthetic coding sequence
  source 1..2124: mol_type = other DNA
atgagaaacggcggcccctgccagcccctggccgccggccccagagccgagggcgccagcgtgaactggagcgtgaccgcctggggccccggcacccaggcctgcatcgacgagaacctggaggtggtgagattcctggtggagcagggcgccaccgtgaaccaggccgacaacgagggctggacccccctgcacgtggccgccagctgcggctacctggacatcgccagatacctgctgagccacggcgccaacatcgccgccgtgaacagcgacggcgacctgcccctggacctggccgagagcgacgccatggagggcctgctgaaggccgagatcgccagaagaggcgtggacgtggaggccgccaagagagccgaggaggagctgctgctgcacgacaccagatgctggctgaacggcggcgccatgcccgaggccagacaccccagaaccggcgccagcgccctgcacgtggccgccgccaagggctacatcgaggtgatgagactgctgctgcaggccggctacgaccccgagctgagagacggcgacggctggacccccctgcacgccgccgcccactggggcgtggaggacgcctgcagactgctggccgagcacggcggcggcatggacagcctgacccacgccggccagagaccctgcgacctggccgacgaggaggtgctgagcctgctggaggagctggccagaaagcaggaggacctgagaaaccagaaggaggccagccagagcagaggccaggagccccaggcccccagcagcagcaagcacagaagaagcagcgtgtgcagactgagcagcagagagaagatcagcctgcaggacctgagcaaggagagaagacccggcggcgccggcggcccccccatccaggacgaggacgagggcgaggagggccccaccgagcccccccccgccgagcccagaaccctgaacggcgtgagcagccccccccaccccagccccaagagccccgtgcagctggaggaggcccccttcagcagaagattcggcctgctgaagaccggcagcagcggcgccctgggcccccccgagagaagaaccgccgagggcgcccccggcgccggcctgcagagaagcgccagcagcagctggctggagggcaccagcacccaggccaaggagctgagactggccagaatcacccccacccccagccccaagctgcccgagcccagcgtgctgagcgaggtgaccaagccccccccctgcctggagaacagcagcccccccagcagaatccccgagcccgagagccccgccaagcccaacgtgcccaccgccagcaccgccccccccgccgacagcagagacagaagaagaagctaccagatgcccgtgagagacgaggagagcgagagccagagaaaggccagaagcagactgatgagacagagcagaagaagcacccagggcgtgaccctgaccgacctgaaggaggccgagaaggccgccggcaaggcccccgagagcgagaagcccgcccagagcctggaccccagcagaagacccagagtgcccggcgtggagaacagcgacagccccgcccagagagaggcccccgacggccagggccccggcccccaggccgccagagagcacagaaaggtgggcaaggagtggagaggccccgccgagggcgaggaggccgagcccgccgacagaagccaggagagcagcaccctggagggcggccccagcgccagaagacagagatggcagagagacctgaaccccgagcccgagcccgagagcgaggagcccgacggcggcttcagaaccctgtacgccgagctgagaagagagaacgagagactgagagaggccctgaccgagaccaccctgagactggcccagctgaaggtggagctggagagagccacccagagacaggagagattcgccgagagacccgccctgctggagctggagagattcgagagaagagccctggagagaaaggccgccgagctggaggaggagctgaaggccctgagcgacctgagagccgacaaccagagactgaaggacgagaacgccgccctgatcagagtgatcagcaagctgagcaagtag

SEQ ID NO: 95314 - DNA, 2142 bp, synthetic construct
  misc_feature 1..2142: note = Description of Artificial Sequence: Synthetic coding sequence
  source 1..2142: mol_type = other DNA
atggagcccggcaccggcggcagcagaaagagactgggccccagagccggcttcagattctggccccccttcttccccagaagaagccaggccggcagcagcaagttccccacccccctgggccccgagaacagcggcaaccccaccctgctgagcagcgcccagcccgagaccagagtgagctactggaccaagctgctgagccagctgctggcccccctgcccggcctgctgcagaaggtgctgatctggagccagctgttcggcggcatgttccccaccagatggctggacttcgccggcgtgtacagcgccctgagagccctgaagggcagagagaagcccgccgcccccaccgcccagaagagcctgagcagcctgcagctggacagcagcgaccccagcgtgaccagccccctggactggctggaggagggcatccactggcagtacagcccccccgacctgaagctggagctgaaggccaagggcagcgccctggaccccgccgcccaggccttcctgctggagcagcagctgtggggcgtggagctgctgcccagcagcctgcagagcagactgtacagcaacagagagctgggcagcagccccagcggccccctgaacatccagagaatcgacaacttcagcgtggtgagctacctgctgaaccccagctacctggactgcttccccagactggaggtgagctaccagaacagcgacggcaacagcgaggtggtgggcttccagaccctgacccccgagagcagctgcctgagagaggaccactgccacccccagcccctgagcgccgagctgatccccgccagctggcagggctgcccccccctgagcaccgagggcctgcccgagatccaccacctgagaatgaagagactggagttcctgcagcaggccaacaagggccaggacctgcccacccccgaccaggacaacggctaccacagcctggaggaggagcacagcctgctgagaatggaccccaagcactgcagagacaaccccacccagttcgtgcccgccgccggcgacatccccggcaacacccaggagagcaccgaggagaagatcgagctgctgaccaccgaggtgcccctggccctggaggaggagagccccagcgagggctgccccagcagcgagatccccatggagaaggagcccggcgagggcagaatcagcgtggtggactacagctacctggagggcgacctgcccatcagcgccagacccgcctgcagcaacaagctgatcgactacatcctgggcggcgccagcagcgacctggagaccagcagcgaccccgagggcgaggactgggacgaggaggccgaggacgacggcttcgacagcgacagcagcctgagcgacagcgacctggagcaggaccccgagggcctgcacctgtggaacagcttctgcagcgtggacccctacaacccccagaacttcaccgccaccatccagaccgccgccagaatcgtgcccgaggagcccagcgacagcgagaaggacctgagcggcaagagcgacctggagaacagcagccagagcggcagcctgcccgagacccccgagcacagcagcggcgaggaggacgactgggagagcagcgccgacgaggccgagagcctgaagctgtggaacagcttctgcaacagcgacgacccctacaaccccctgaacttcaaggcccccttccagaccagcggcgagaacgagaagggctgcagagacagcaagacccccagcgagagcatcgtggccatcagcgagtgccacaccctgctgagctgcaaggtgcagctgctgggcagccaggagagcgagtgccccgacagcgtgcagagagacgtgctgagcggcggcagacacacccacgtgaagagaaagaaggtgaccttcctggaggaggtgaccgagtactacatcagcggcgacgaggacagaaagggcccctgggaggagttcgccagagacggctgcagattccagaagagaatccaggagaccgaggacgccatcggctactgcctgaccttcgagcacagagagagaatgttcaacagactgcagggcacctgcttcaagggcctgaacgtgctgaagcagtgctag

SEQ ID NO: 95315 - DNA, 1872 bp, synthetic construct
  misc_feature 1..1872: note = Description of Artificial Sequence: Synthetic coding sequence
  source 1..1872: mol_type = other DNA
atgttccccaccagatggctggacttcgccggcgtgtacagcgccctgagagccctgaagggcagagagaagcccgccgcccccaccgcccagaagagcctgagcagcctgcagctggacagcagcgaccccagcgtgaccagccccctggactggctggaggagggcatccactggcagtacagcccccccgacctgaagctggagctgaaggccaagggcagcgccctggaccccgccgcccaggccttcctgctggagcagcagctgtggggcgtggagctgctgcccagcagcctgcagagcagactgtacagcaacagagagctgggcagcagccccagcggccccctgaacatccagagaatcgacaacttcagcgtggtgagctacctgctgaaccccagctacctggactgcttccccagactggaggtgagctaccagaacagcgacggcaacagcgaggtggtgggcttccagaccctgacccccgagagcagctgcctgagagaggaccactgccacccccagcccctgagcgccgagctgatccccgccagctggcagggctgcccccccctgagcaccgagggcctgcccgagatccaccacctgagaatgaagagactggagttcctgcagcaggccaacaagggccaggacctgcccacccccgaccaggacaacggctaccacagcctggaggaggagcacagcctgctgagaatggaccccaagcactgcagagacaaccccacccagttcgtgcccgccgccggcgacatccccggcaacacccaggagagcaccgaggagaagatcgagctgctgaccaccgaggtgcccctggccctggaggaggagagccccagcgagggctgccccagcagcgagatccccatggagaaggagcccggcgagggcagaatcagcgtggtggactacagctacctggagggcgacctgcccatcagcgccagacccgcctgcagcaacaagctgatcgactacatcctgggcggcgccagcagcgacctggagaccagcagcgaccccgagggcgaggactgggacgaggaggccgaggacgacggcttcgacagcgacagcagcctgagcgacagcgacctggagcaggaccccgagggcctgcacctgtggaacagcttctgcagcgtggacccctacaacccccagaacttcaccgccaccatccagaccgccgccagaatcgtgcccgaggagcccagcgacagcgagaaggacctgagcggcaagagcgacctggagaacagcagccagagcggcagcctgcccgagacccccgagcacagcagcggcgaggaggacgactgggagagcagcgccgacgaggccgagagcctgaagctgtggaacagcttctgcaacagcgacgacccctacaaccccctgaacttcaaggcccccttccagaccagcggcgagaacgagaagggctgcagagacagcaagacccccagcgagagcatcgtggccatcagcgagtgccacaccctgctgagctgcaaggtgcagctgctgggcagccaggagagcgagtgccccgacagcgtgcagagagacgtgctgagcggcggcagacacacccacgtgaagagaaagaaggtgaccttcctggaggaggtgaccgagtactacatcagcggcgacgaggacagaaagggcccctgggaggagttcgccagagacggctgcagattccagaagagaatccaggagaccgaggacgccatcggctactgcctgaccttcgagcacagagagagaatgttcaacagactgcagggcacctgcttcaagggcctgaacgtgctgaagcagtgctag

SEQ ID NO: 95316 - DNA, 1704 bp, synthetic construct
  misc_feature 1..1704: note = Description of Artificial Sequence: Synthetic coding sequence
  source 1..1704: mol_type = other DNA
atggccagccacgtggacctgctgaccgagctgcagctgctggagaaggtgcccaccctggagagactgagagccgcccagaagagaagagcccagcagctgaagaagtgggcccagtacgagcaggacctgcagcacagaaagagaaagcacgagagaaagagaagcaccggcggcagaagaaagaaggtgagcttcgaggccagcgtggccctgctggaggccagcctgagaaacgacgccgaggaggtgagatacttcctgaagaacaaggtgagccccgacctgtgcaacgaggacggcctgaccgccctgcaccagtgctgcatcgacaacttcgaggagatcgtgaagctgctgctgagccacggcgccaacgtgaacgccaaggacaacgagctgtggacccccctgcacgccgccgccacctgcggccacatcaacctggtgaagatcctggtgcagtacggcgccgacctgctggccgtgaacagcgacggcaacatgccctacgacctgtgcgaggacgagcccaccctggacgtgatcgagacctgcatggcctaccagggcatcacccaggagaagatcaacgagatgagagtggcccccgagcagcagatgatcgccgacatccactgcatgatcgccgccggccaggacctggactggatcgacgcccagggcgccaccctgctgcacatcgccggcgccaacggctacctgagagccgccgagctgctgctggaccacggcgtgagagtggacgtgaaggactgggacggctgggagcccctgcacgccgccgccttctggggccagatgcagatggccgagctgctggtgagccacggcgccagcctgagcgccagaaccagcatggacgagatgcccatcgacctgtgcgaggaggaggagttcaaggtgctgctgctggagctgaagcacaagcacgacgtgatcatgaagagccagctgagacacaagagcagcctgagcagaagaaccagcagcgccggcagcagaggcaaggtggtgagaagagccagcctgagcgacagaaccaacctgtacagaaaggagtacgagggcgaggccatcctgtggcagagaagcgccgccgaggaccagagaaccagcacctacaacggcgacatcagagagaccagaaccgaccaggagaacaaggaccccaaccccagactggagaagcccgtgctgctgagcgagttccccaccaagatccccagaggcgagctggacatgcccgtggagaacggcctgagagcccccgtgagcgcctaccagtacgccctggccaacggcgacgtgtggaaggtgcacgaggtgcccgactacagcatggcctacggcaaccccggcgtggccgacgccacccccccctggagcagctacaaggagcagagcccccagaccctgctggagctgaagagacagagagccgccgccaagctgctgagccaccccttcctgagcacccacctgggcagcagcatggccagaaccggcgagagcagcagcgagggcaaggcccccctgatcggcggcagaaccagcccctacagcagcaacggcaccagcgtgtactacaccgtgaccagcggcgacccccccctgctgaagttcaaggcccccatcgaggagatggaggagaaggtgcacggctgctgcagaatcagctag

SEQ ID NO: 95317 - DNA, 1578 bp, synthetic construct
  misc_feature 1..1578: note = Description of Artificial Sequence: Synthetic coding sequence
  source 1..1578: mol_type = other DNA
atggccagccacgtggacctgctgaccgagctgcagctgctggagaaggtgcccaccctggagagactgagagccgcccagaagagaagagcccagcagctgaagaagtgggcccagtacgagcaggacctgcagcacagaaagagaaagcacgagagaaagagaagcaccggcggcagaagaaagaaggtgagcttcgaggccagcgtggccctgctggaggccagcctgagaaacgacgccgaggaggtgagatacttcctgaagaacaaggtgagccccgacctgtgcaacgaggacggcctgaccgccctgcaccagtgctgcatcgacaacttcgaggagatcgtgaagctgctgctgagccacggcgccaacgtgaacgccaaggacaacgagctgtggacccccctgcacgccgccgccacctgcggccacatcaacctggtgaagatcctggtgcagtacggcgccgacctgctggccgtgaacagcgacggcaacatgccctacgacctgtgcgaggacgagcccaccctggacgtgatcgagacctgcatggcctaccagggcatcacccaggagaagatcaacgagatgagagtggcccccgagcagcagatgatcgccgacatccactgcatgatcgccgccggccaggacctggactggatcgacgcccagggcgccaccctgatgcagatggccgagctgctggtgagccacggcgccagcctgagcgccagaaccagcatggacgagatgcccatcgacctgtgcgaggaggaggagttcaaggtgctgctgctggagctgaagcacaagcacgacgtgatcatgaagagccagctgagacacaagagcagcctgagcagaagaaccagcagcgccggcagcagaggcaaggtggtgagaagagccagcctgagcgacagaaccaacctgtacagaaaggagtacgagggcgaggccatcctgtggcagagaagcgccgccgaggaccagagaaccagcacctacaacggcgacatcagagagaccagaaccgaccaggagaacaaggaccccaaccccagactggagaagcccgtgctgctgagcgagttccccaccaagatccccagaggcgagctggacatgcccgtggagaacggcctgagagcccccgtgagcgcctaccagtacgccctggccaacggcgacgtgtggaaggtgcacgaggtgcccgactacagcatggcctacggcaaccccggcgtggccgacgccacccccccctggagcagctacaaggagcagagcccccagaccctgctggagctgaagagacagagagccgccgccaagctgctgagccaccccttcctgagcacccacctgggcagcagcatggccagaaccggcgagagcagcagcgagggcaaggcccccctgatcggcggcagaaccagcccctacagcagcaacggcaccagcgtgtactacaccgtgaccagcggcgacccccccctgctgaagttcaaggcccccatcgaggagatggaggagaaggtgcacggctgctgcagaatcagctag

SEQ ID NO: 95318 - DNA, 3369 bp, synthetic construct
  misc_feature 1..3369: note = Description of Artificial Sequence: Synthetic coding sequence
  source 1..3369: mol_type = other DNA
atggagcccagcgaggtgcccagccagatcagcaaggacaacttcctggaggtgcccaacctgagcgacagcctgtgcgaggacgaggaggtgaccttccagcccggcttcagcccccagcccagcagaagaggcagcgacagcagcgaggacatctacctggacacccccagcagcggcaccagaagagtgagcttcgccgacagcttcggcttcaacctggtgagcgtgaaggagttcgactgctgggagctgcccagcgccagcaccaccttcgacctgggcaccgacatcttccacaccgaggagtacgtgctggcccccctgttcgacctgcccagcagcaaggaggacctgatgcagcagctgcagatccagaaggccatcctggagagcaccgagagcctgctgggcagcaccagcatcaagggcatcatcagagtgctgaacgtgagcttcgagaagctggtgtacgtgagaatgagcctggacgactggcagacccactacgacatcctggccgagtacgtgcccaacagctgcgacggcgagaccgaccagttcagcttcaagatcgtgctggtgcccccctaccagaaggacggcagcaaggtggagttctgcatcagatacgagaccagcgtgggcaccttctggagcaacaacaacggcaccaactacaccttcatctgccagaagaaggagcaggagcccgagcccgtgaagccctggaaggaggtgcccaacagacagatcaagggctgcctgaaggtgaagagcagcaaggaggagagcagcgtgaccagcgaggagaacaacttcgagaaccccaagaacaccgacacctacatccccaccatcatctgcagccacgaggacaaggaggacctggaggccagcaacagaaacgtgaaggacgtgaacagagagcacgacgagcacaacgagaaggagctggagctgatgatcaaccagcacctgatcagaaccagaagcaccgccagcagagacgagagaaacaccttcagcaccgaccccgtgaacttccccaacaaggccgagggcctggagaagaagcagatccacggcgagatctgcaccgacctgttccagagaagcctgagccccagcagcagcgccgagagcagcgtgaagggcgacttctactgcaacgagaagtacagcagcggcgacgactgcacccaccagcccagcgaggagaccaccagcaacatgggcgagatcaagcccagcctgggcgacaccagcagcgacgagctggtgcagctgcacaccggcagcaaggaggtgctggacgacaacgccaaccccgcccacggcaacggcaccgtgcagatcccctgccccagcagcgaccagctgatggccggcaacctgaacaagaagcacgagggcggcgccaagaacatcgaggtgaaggacctgggctgcctgagaagagacttccacagcgacaccagcgcctgcctgaaggagagcaccgaggagggcagcagcaaggaggactactacggcaacggcaaggacgacgaggagcagagaatctacctgggcgtgaacgagaagcagagaaagaacttccagaccatcctgcacgaccaggagagaaagatgggcaaccccaagatcagcgtggccggcatcggcgccagcaacagagacctggccaccctgctgagcgagcacaccgccatccccaccagagccatcaccgccgacgtgagccacagccccagaaccaacctgagctgggaggaggccgtgctgacccccgagcaccaccacctgaccagcgagggcagcgccctgggcggcatcaccggccaggtgtgcagcagcagaaccggcaacgtgctgagaaacgactacctgttccaggtggaggagaagagcggcggcatcaacagcgaggaccaggacaacagcccccagcacaagcagagctggaacgtgctggagagccagggcaagagcagagagaacaagaccaacatcaccgagcacatcaagggccagaccgactgcgaggacgtgtggggcaagagagacaacaccagaagcctgaaggccaccaccgaggagctgttcacctgccaggagaccgtgtgctgcgagctgagcagcctggccgaccacggcatcaccgagaaggccgaggccggcaccgcctacatcatcaagaccaccagcgagagcacccccgagagcatgagcgccagagagaaggccatcatcgccaagctgccccaggagaccgccagaagcgacagacccatcgaggtgaaggagaccgccttcgacccccacgagggcagaaacgacgacagccactacaccctgtgccagagagacaccgtgggcgtgatctacgacaacgacttcgagaaggagagcagactgggcatctgcaacgtgagagtggacgagatggagaaggaggagaccatgagcatgtacaaccccagaaagacccacgacagagagaagtgcggcaccggcaacatcaccagcgtggaggagagcagctgggtgatcaccgagtaccagaaggccaccagcaagctggacctgcagctgggcatgctgcccaccgacaagaccgtgttcagcgagaacagagacctgagacaggtgcaggagctgagcaagaagaccgacagcgacgccatcgtgcacagcgccttcaacagcgacaccaacagagccccccagaacagcagccccttcagcaagcaccacaccgagatcagcgtgagcaccaacgagcaggccatcgccgtggagaacgccgtgaccaccatggccagccagcccatcagcaccaagagcgagaacatctgcaacagcaccagagagatccagggcatcgagaagcacccctaccccgagagcaagcccgaggaggtgagcagaagcagcggcatcgtgaccagcggcagcagaaaggagagatgcatcggccagatcttccagaccgaggagtacagcgtggagaagagcctgggccccatgatcctgatcaacaagcccctggagaacatggaggaggccagacacgagaacgagggcctggtgagcagcggccagagcctgtacaccagcggcgagaaggagagcgacagcagcgccagcaccagcctgcccgtggaggagagccaggcccagggcaacgagagcctgttcagcaagtacaccaacagcaagatcccctacttcctgctgttcctgatcttcctgatcaccgtgtaccactacgacctgatgatcggcctgaccttctacgtgctgagcctgagctggctgagctgggaggagggcagacagaaggagagcgtgaagaagaagtag

SEQ ID NO: 95319 - DNA, 954 bp, synthetic construct
  misc_feature 1..954: note = Description of Artificial Sequence: Synthetic coding sequence
  source 1..954: mol_type = other DNA
atgagctgcaccagaatgatccaggtgctggaccccagacccctgaccagcagcgtgatgcccgtggacgtggccatgagactgtgcctggcccacagcccccccgtgaagagcttcctgggcccctacgacgagttccagagaagacacttcgtgaacaagctgaagcccctgaagagctgcctgaacatcaagcacaaggccaagagccagaacgactggaagtgcagccacaaccaggccaagaagagagtggtgttcgccgacagcaagggcctgagcctgaccgccatccacgtgttcagcgacctgcccgaggagcccgcctgggacctgcagttcgacctgctggacctgaacgacatcagcagcgccctgaagcaccacgaggagaagaacctgatcctggacttcccccagcccagcaccgactacctgagcttcagaagccacttccagaagaacttcgtgtgcctggagaactgcagcctgcaggagagaaccgtgaccggcaccgtgaaggtgaagaacgtgagcttcgagaagaaggtgcagatcagaatcaccttcgacagctggaagaactacaccgacgtggactgcgtgtacatgaagaacgtgtacggcggcaccgacagcgacaccttcagcttcgccatcgacctgccccccgtgatccccaccgagcagaagatcgagttctgcatcagctaccacgccaacggccaggtgttctgggacaacaacgacggccagaactacagaatcgtgcacgtgcagtggaagcccgacggcgtgcagacccagatggccccccaggactgcgccttccaccagaccagccccaagaccgagctggagagcaccatcttcggcagccccagactggccagcggcctgttccccgagtggcagagctggggcagaatggagaacctggccagctacagatag

SEQ ID NO: 95320 - DNA, 894 bp, synthetic construct
  misc_feature 1..894: note = Description of Artificial Sequence: Synthetic coding sequence
  source 1..894: mol_type = other DNA
atgagctgcaccagaatgatccaggtgctggaccccagacccctgaccagcagcgtgatgcccgtggacgtggccatgagactgtgcctggcccacagcccccccgtgaagagcttcctgggcccctacgacgagttccagagaagacacttcgtgaacaagctgaagcccctgaagagctgcctgaacatcaagcacaaggccaagagccagaacgactggaagtgcagccacaaccaggccaagaagagagtggtgttcgccgacagcaagggcctgagcctgaccgccatccacgtgttcagcgacctgcccgaggagcccgcctgggacctgcagttcgacctgctggacctgaacgacatcagcagcgccctgagcttcagaagccacttccagaagaacttcgtgtgcctggagaactgcagcctgcaggagagaaccgtgaccggcaccgtgaaggtgaagaacgtgagcttcgagaagaaggtgcagatcagaatcaccttcgacagctggaagaactacaccgacgtggactgcgtgtacatgaagaacgtgtacggcggcaccgacagcgacaccttcagcttcgccatcgacctgccccccgtgatccccaccgagcagaagatcgagttctgcatcagctaccacgccaacggccaggtgttctgggacaacaacgacggccagaactacagaatcgtgcacgtgcagtggaagcccgacggcgtgcagacccagatggccccccaggactgcgccttccaccagaccagccccaagaccgagctggagagcaccatcttcggcagccccagactggccagcggcctgttccccgagtggcagagctggggcagaatggagaacctggccagctacagatag

SEQ ID NO: 95321 - DNA, 600 bp, synthetic construct
  misc_feature 1..600: note = Description of Artificial Sequence: Synthetic coding sequence
  source 1..600: mol_type = other DNA
atgagcagccccaccagccccctgaagcaccacgaggagaagaacctgatcctggacttcccccagcccagcaccgactacctgagcttcagaagccacttccagaagaacttcgtgtgcctggagaactgcagcctgcaggagagaaccgtgaccggcaccgtgaaggtgaagaacgtgagcttcgagaagaaggtgcagatcagaatcaccttcgacagctggaagaactacaccgacgtggactgcgtgtacatgaagaacgtgtacggcggcaccgacagcgacaccttcagcttcgccatcgacctgccccccgtgatccccaccgagcagaagatcgagttctgcatcagctaccacgccaacggccaggtgttctgggacaacaacgacggccagaactacagaatcgtgcacgtgcagtggaagcccgacggcgtgcagacccagatggccccccaggactgcgccttccaccagaccagccccaagaccgagctggagagcaccatcttcggcagccccagactggccagcggcctgttccccgagtggcagagctggggcagaatggagaacctggccagctacagatag

SEQ ID NO: 95322 - DNA, 900 bp, synthetic construct
  misc_feature 1..900: note = Description of Artificial Sequence: Synthetic coding sequence
  source 1..900: mol_type = other DNA
atgagcagaggccccagcagcgccgtgctgcccagcgccctgggcagcagaaagctgggccccagaagcctgagctgcctgagcgacctggacggcggcgtggccctggagcccagagcctgcagaccccccggcagccccggcagagcccccccccccacccccgcccccagcggctgcgaccccagactgagacccatcatcctgagaagagccagaagcctgcccagcagccccgagagaagacagaaggccgccggcgcccccggcgccgcctgcagacccggctgcagccagaagctgagagtgagattcgccgacgccctgggcctggagctggcccaggtgaaggtgttcaacgccggcgacgaccccagcgtgcccctgcacgtgctgagcagactggccatcaacagcgacctgtgctgcagcagccaggacctggagttcaccctgcactgcctggtgcccgacttccccccccccgtggaggccgccgacttcggcgagagactgcagagacagctggtgtgcctggagagagtgacctgcagcgacctgggcatcagcggcaccgtgagagtgtgcaacgtggccttcgagaagcaggtggccgtgagatacaccttcagcggctggagaagcacccacgaggccgtggccagatggagaggccccgccggccccgagggcaccgaggacgtgttcaccttcggcttccccgtgccccccttcctgctggagctgggcagcagagtgcacttcgccgtgagataccaggtggccggcgccgagtactgggacaacaacgaccacagagactacagcctgacctgcagaaaccacgccctgcacatgcccagaggcgagtgcgaggagagctggatccacttcatctag

SEQ ID NO: 95323 - DNA, 756 bp, synthetic construct
  misc_feature 1..756: note = Description of Artificial Sequence: Synthetic coding sequence
  source 1..756: mol_type = other DNA
atgaccagactgaccgtgctggccctgctggccggcctgctggccagcagcagagccggcagcagccccctgctggacatcgtgggcggcagaaaggccagacccagacagttccccttcctggccagcatccagaaccagggcagacacttctgcggcggcgccctgatccacgccagattcgtgatgaccgccgccagctgcttccagagccagaaccccggcgtgagcaccgtggtgctgggcgcctacgacctgagaagaagagagagacagagcagacagaccttcagcatcagcagcatgagcgagaacggctacgacccccagcagaacctgaacgacctgatgctgctgcagctggacagagaggccaacctgaccagcagcgtgaccatcctgcccctgcccctgcagaacgccaccgtggaggccggcaccagatgccaggtggccggctggggcagccagagaagcggcggcagactgagcagattccccagattcgtgaacgtgaccgtgacccccgaggaccagtgcagacccaacaacgtgtgcaccggcgtgctgaccagaagaggcggcatctgcaacggcgacggcggcacccccctggtgtgcgagggcctggcccacggcgtggccagcttcagcctgggcccctgcggcagaggccccgacttcttcaccagagtggccctgttcagagactggatcgacggcgtgctgaacaaccccggccccggccccgcctag

SEQ ID NO: 95324 - DNA, 954 bp, synthetic construct
  misc_feature 1..954: note = Description of Artificial Sequence: Synthetic coding sequence
  source 1..954: mol_type = other DNA
atggccgccgagagaggcgccggccagcagcagagccaggagatgatggaggaggagcacgagctgcccgtggacatggagaccatcaacctggacagagacgccgaggacgtggacctgaaccactacagaatcggcaagatcgagggcttcgaggtgctgaagaaggtgaagaccctgtgcctgagacagaacctgatcaagtgcatcgagaacctggaggagctgcagagcctgagagagctggacctgtacgacaaccagatcaagaagatcgagaacctggaggccctgaccgagctggagatcctggacatcagcttcaacctgctgagaaacatcgagggcgtggacaagctgaccagactgaagaagctgttcctggtgaacaacaagatcagcaagatcgagaacctgagcaacctgcaccagctgcagatgctggagctgggcagcaacagaatcagagccatcgagaacatcgacaccctgaccaacctggagagcctgttcctgggcaagaacaagatcaccaagctgcagaacctggacgccctgaccaacctgaccgtgctgagcatgcagagcaacagactgaccaagatcgagggcctgcagaacctggtgaacctgagagagctgtacctgagccacaacggcatcgaggtgatcgagggcctggagaacaacaacaagctgaccatgctggacatcgccagcaacagaatcaagaagatcgagaacatcagccacctgaccgagctgcaggagttctggatgaacgacaacctgctggagagctggagcgacctggacgagctgaagggcgccagaagcctggagaccgtgtacctggagagaaaccccctgcagaaggacccccagtacagaagaaaggtgatgctggccctgcccagcgtgagacagatcgacgccaccttcgtgagattctag

SEQ ID NO: 95325 - DNA, 714 bp, synthetic construct
  misc_feature 1..714: note = Description of Artificial Sequence: Synthetic coding sequence
  source 1..714: mol_type = other DNA
atggccgccgagagaggcgccggccagcagcagagccaggagatgatggaggaggagcacgagctgcccgtggacatggagaccatcaacctggacagagacgccgaggacgtggacctgaaccactacagaatcggcaagatcgagggcttcgaggtgctgaagaaggtgaagaccctgtgcctgagacagaacctgatcaagtgcatcgagaacctggaggagctgcagagcctgagagagctggacctgtacgacaaccagatcaagaagatcgagaacctggaggccctgaccgagctggagatcctggacatcagcttcaacctgctgagaaacatcgagggcgtggacaagctgaccagactgaagaagctgttcctggtgaacaacaagatcagcaagatcgagaacctgagcaacctgcaccagctgcagatgctggagctgggcagcaacagaatcagagccatcgagaacatcgacaccctgaccaacctggagagcctgttcctgggcaagaacaagatcaccaagctgcagaacctggacgccctgaccaacctgaccgtgctgagcatgcagagcaacagactgaccaagatcgagggcctgcagaacctggtgaacctgagagagctgtacctgagccacaacggcatcgaggtgatcgagggcctggagaacaacgtgcaggacagcctgacctactag

SEQ ID NO: 95326 - DNA, 843 bp, synthetic construct
  misc_feature 1..843: note = Description of Artificial Sequence: Synthetic coding sequence
  source 1..843: mol_type = other DNA
atggccgccgagagaggcgccggccagcagcagagccaggagatgatggaggtggacagaagagtggagagcgaggagagcggcgacgaggagggcaagaagcacagcagcggcatcgtggccgacctgagcgagcagagcctgaaggacggcgaggagagaggcgaggaggaccccgaggaggagcacgagctgcccgtggacatggagaccatcaacctggacagagacgccgaggacgtggacctgaaccactacagaatcggcaagatcgagggcttcgaggtgctgaagaaggtgaagaccctgtgcctgagacagaacctgatcaagtgcatcgagaacctggaggagctgcagagcctgagagagctggacctgtacgacaaccagatcaagaagatcgagaacctggaggccctgaccgagctggagatcctggacatcagcttcaacctgctgagaaacatcgagggcgtggacaagctgaccagactgaagaagctgttcctggtgaacaacaagatcagcaagatcgagaacctgagcaacctgcaccagctgcagatgctggagctgggcagcaacagaatcagagccatcgagaacatcgacaccctgaccaacctggagagcctgttcctgggcaagaacaagatcaccaagctgcagaacctggacgccctgaccaacctgaccgtgctgagcatgcagagcaacagactgaccaagatcgagggcctgcagaacctggtgaacctgagagagctgtacctgagccacaacggcatcgaggtgatcgagggcctggagaacaacgtgcaggacagcctgacctactag

SEQ ID NO: 95327 - DNA, 1083 bp, synthetic construct; identical to SEQ ID NO: 92533
  misc_feature 1..1083: note = Description of Artificial Sequence: Synthetic coding sequence
  source 1..1083: mol_type = other DNA

SEQ ID NO: 95328 - DNA, 384 bp, synthetic construct
  misc_feature 1..384: note = Description of Artificial Sequence: Synthetic coding sequence
  source 1..384: mol_type = other DNA
atggtgcagaccgccgtggtgcccgtgaagaagaagagagtggagggccccggcagcctgggcctggaggagagcggcagcagaagaatgcagaacttcgccttcagcggcggcctgtacggcggcctgccccccacccacagcgaggccggcagccagccccacggcatccacggcaccgccctgatcggcggcctgcccatgccctaccccaacctggcccccgacgtggacctgacccccgtggtgcccagcgccgtgaacatgaaccccgcccccaaccccgccgtgtacaaccccgaggccgtgaacgagcccaagaagaagaagtacgccaaggaggcctggcccggcaagaagcccacccccagcctgctgatctag

SEQ ID NO: 95329 - DNA, 1056 bp, synthetic construct
  misc_feature 1..1056: note = Description of Artificial Sequence: Synthetic coding sequence
  source 1..1056: mol_type = other DNA
atggccgccgccgccaacagcggcagcagcctgcccctgttcgactgccccacctgggccggcaagcccccccccggcctgcacctggacgtggtgaagggcgacaagctgatcgagaagctgatcatcgacgagaagaagtactacctgttcggcagaaaccccgacctgtgcgacttcaccatcgaccaccagagctgcagcagagtgcacgccgccctggtgtaccacaagcacctgaagagagtgttcctgatcgacctgaacagcacccacggcaccttcctgggccacatcagactggagccccacaagccccagcagatccccatcgacagcaccgtgagcttcggcgccagcaccagagcctacaccctgagagagaagccccagaccctgcccagcgccgtgaagggcgacgagaagatgggcggcgaggacgacgagctgaagggcctgctgggcctgcccgaggaggagaccgagctggacaacctgaccgagttcaacaccgcccacaacaagagaatcagcaccctgaccatcgaggagggcaacctggacatccagagacccaagagaaagagaaagaacagcagagtgaccttcagcgaggacgacgagatcatcaaccccgaggacgtggaccccagcgtgggcagattcagaaacatggtgcagaccgccgtggtgcccgtgaagaagaagagagtggagggccccggcagcctgggcctggaggagagcggcagcagaagaatgcagaacttcgccttcagcggcggcctgtacggcggcctgccccccacccacagcgaggccggcagccagccccacggcatccacggcaccgccctgatcggcggcctgcccatgccctaccccaacctggcccccgacgtggacctgacccccgtggtgcccagcgccgtgaacatgaaccccgcccccaaccccgccgtgtacaaccccgaggccgtgaacgagcccaagaagaagaagtacgccaaggaggcctggcccggcaagaagcccacccccagcctgctgatctag

SEQ ID NO: 95330 - DNA, 630 bp, synthetic construct
  misc_feature 1..630: note = Description of Artificial Sequence: Synthetic coding sequence
  source 1..630: mol_type = other DNA
atgggcggcgaggacgacgagctgaagggcctgctgggcctgcccgaggaggagaccgagctggacaacctgaccgagttcaacaccgcccacaacaagagaatcagcaccctgaccatcgaggagggcaacctggacatccagagacccaagagaaagagaaagaacagcagagtgaccttcagcgaggacgacgagatcatcaaccccgaggacgtggaccccagcgtgggcagattcagaaacatggtgcagaccgccgtggtgcccgtgaagaagaagagagtggagggccccggcagcctgggcctggaggagagcggcagcagaagaatgcagaacttcgccttcagcggcggcctgtacggcggcctgccccccacccacagcgaggccggcagccagccccacggcatccacggcaccgccctgatcggcggcctgcccatgccctaccccaacctggcccccgacgtggacctgacccccgtggtgcccagcgccgtgaacatgaaccccgcccccaaccccgccgtgtacaaccccgaggccgtgaacgagcccaagaagaagaagtacgccaaggaggcctggcccggcaagaagcccacccccagcctgctgatctag

SEQ ID NO: 95331 - DNA, 711 bp, synthetic construct
  misc_feature 1..711: note = Description of Artificial Sequence: Synthetic coding sequence
  source 1..711: mol_type = other DNA
atgggcggcgaggacgacgagctgaagggcctgctgggcctgcccgaggaggagaccgagctggacaacctgaccgagttcaacaccgcccacaacaagagaatcagcaccctgaccatcgaggagggcaacctggacatccagagacccaagagaaagagaaagaacagcagagtgaccttcagcgaggacgacgagatcatcaaccccgaggacgtggaccccagcgtgggcagattcagaaacatggtgcagaccgccgtggtgcccgtgaagaagaagagagtggagggccccggcagcctgggcctggaggagagcggcagcagaagaatgcagaacttcgccttcagcggcggcctgtacggcggcctgccccccacccacagcgaggccggcagccagccccacggcatccacggcaccgccctgatcggcggcctgcccatgccctaccccaacctggcccccgacgtggacctgacccccgtggtgcccagcgccgtgaacatgaaccccgcccccaaccccgccgtgtacaaccccgaggccgtgaacgagcccaagaagaagaagtacgccaaggaggcctggcccggctgcgagttcgtgagccagagcctgatcgccaccgccatctggaagtgcctgctgaaggcccagagcctgggcctgggcggcaacgcccccagccccctgtactacaagtag

SEQ ID NO: 95332 - DNA, 618 bp, synthetic construct
  misc_feature 1..618: note = Description of Artificial Sequence: Synthetic coding sequence
  source 1..618: mol_type = other DNA
atgggcggcgaggacgacgagctgaagggcctgctgggcctgcccgaggaggagaccgagctggacaacctgaccgagttcaacaccgcccacaacaagagaatcagcaccctgaccatcgaggagggcaacctggacatccagagacccaagagaaagagaaagaacagcagagtgaccttcagcgaggacgacgagatcatcaaccccgaggacgtggaccccagcgtgggcagattcagaaacatggtgcagaccgccgtggtgcccgtgaagaagaagagagtggagggccccggcagcctgggcctggaggagagcggcagcagaagaatgcagaacttcgccttcagcggcggcctgtacggcggcctgccccccacccacagcgaggccggcagccagccccacggcatccacggcaccgccctgatcggcggcctgcccatgccctaccccaacctggcccccgacgtggacctgacccccgtggtgcccagcgccgtgaacatgaaccccgcccccaaccccgccgtgtacaaccccgaggccgtgaacgagcccaagaagaagaagtacgccaaggaggcctggcccggcaagaagcccaccccctag

SEQ ID NO: 95333 - DNA, 600 bp, synthetic construct
  misc_feature 1..600: note = Description of Artificial Sequence: Synthetic coding sequence
  source 1..600: mol_type = other DNA
atggccgccgccgccaacagcggcagcagcctgcccctgttcgactgccccacctgggccggcaagcccccccccggcctgcacctggacgtggtgaagggcgacaagctgatcgagaagctgatcatcgacgagaagaagtactacctgttcggcagaaaccccgacctgtgcgacttcaccatcgaccaccagagctgcagcagagtgcacgccgccctggtgtaccacaagcacctgaagagagtgttcctgatcgacctgaacagcacccacggcaccttcctgggccacatcagactggagccccacaagccccagcagatccccatcgacagcaccgtgagcttcggcgccagcaccagagcctacaccctgagagagaagccccagaccctgcccagcgccgtgaagggcgacgagaagatgggcggcgaggacgacgagctgaagggcctgctgggcctgcccgaggaggagaccgagctggacaacctgaccgagttcaacaccgcccacaaccacatggccagcatgggccagcacagcagcgtggcctgcccctgccacacccagaccctgcccctgatgtggacctag

SEQ ID NO: 95334 - DNA, 3891 bp, synthetic construct
  misc_feature 1..3891: note = Description of Artificial Sequence: Synthetic coding sequence
  source 1..3891: mol_type = other DNA
atgctgaagaccgagagcagcggcgagagaaccaccctgagaagcgccagcccccacagaaacgcctacagaaccgagttccaggccctgaagagcaccttcgacaagcccaagagcgacggcgagcagaagaccaaggagggcgagggcagccagcagagcagaggcagaaagtacggcagcaacgtgaacagaatcaagaacctgttcatgcagatgggcatggagcccaacgagaacgccgccgtgatcgccaagaccagaggcaagggcggccacagcagcccccagagaagaatgaagcccaaggagttcctggagaagaccgacggcagcgtggtgaagctggagagcagcgtgagcgagagaatcagcagattcgacaccatgtacgacggccccagctacagcaagttcaccgagaccagaaagatgttcgagagaagcgtgcacgagagcggccagaacaacagatacagccccaagaaggagaaggccggcggcagcgagccccaggacgagtggggcggcagcaagagcaacagaggcagcaccgacagcctggacagcctgagcagcagaaccgaggccgtgagccccaccgtgagccagctgagcgccgtgttcgagaacaccgacagccccagcgccatcatcagcgagaaggccgagaacaacgagtacagcgtgaccggccactaccccctgaacctgcccagcgtgaccgtgaccaacctggacaccttcggccacctgaaggacagcaacagctggccccccagcaacaagagaggcgtggacaccgaggacgcccacaagagcaacgccacccccgtgcccgaggtggccagcaagagcaccagcctggccagcatccccggcgaggagatccagcagagcaaggagcccgaggacagcaccagcaaccagcagacccccgacagcatcgacaaggacggccccgaggagccctgcgccgagagcaaggccatgcccaagagcgagatccccagcccccagagccagctgctggaggacgccgaggccaacctggtgggcagagaggccgccaagcagcagagaaaggagctggccggcggcgacttcaccagccccgacgccagcgccagcagctgcggcaaggaggtgcccgaggacagcaacaacttcgacggcagccacgtgtacatgcacagcgactacaacgtgtacagagtgagaagcagatacaacagcgactggggcgagaccggcaccgagcaggacgaggaggaggacagcgacgagaacagctactaccagcccgacatggagtacagcgagatcgtgggcctgcccgaggaggaggagatccccgccaacagaaagatcaagttcagcagcgcccccatcaaggtgttcaacacctacagcaacgaggactacgacagaagaaacgacgaggtggaccccgtggccgccagcgccgagtacgagctggagaagagagtggagaagctggagctgttccccgtggagctggagaaggacgaggacggcctgggcatcagcatcatcggcatgggcgtgggcgccgacgccggcctggagaagctgggcatcttcgtgaagaccgtgaccgagggcggcgccgcccagagagacggcagaatccaggtgaacgaccagatcgtggaggtggacggcatcagcctggtgggcgtgacccagaacttcgccgccaccgtgctgagaaacaccaagggcaacgtgagattcgtgatcggcagagagaagcccggccaggtgagcgaggtggcccagctgatcagccagaccctggagcaggagagaagacagagagagctgctggagcagcactacgcccagtacgacgccgacgacgacgagaccggcgagtacgccaccgacgaggaggaggacgaggtgggccccgtgctgcccggcagcgacatggccatcgaggtgttcgagctgcccgagaacgaggacatgttcagccccagcgagctggacaccagcaagctgagccacaagttcaaggagctgcagatcaagcacgccgtgaccgaggccgagatccagaagctgaagaccaagctgcaggccgccgagaacgagaaggtgagatgggagctggagaagacccagctgcagcagaacatcgaggagaacaaggagagaatgctgaagctggagagctactggatcgaggcccagaccctgtgccacaccgtgaacgagcacctgaaggagacccagagccagtaccaggccctggagaagaagtacaacaaggccaagaagctgatcaaggacttccagcagaaggagctggacttcatcaagagacaggaggccgagagaaagaagatcgaggacctggagaaggcccacctggtggaggtgcagggcctgcaggtgagaatcagagacctggaggccgaggtgttcagactgctgaagcagaacggcacccaggtgaacaacaacaacaacatcttcgagagaagaaccagcctgggcgaggtgagcaagggcgacaccatggagaacctggacggcaagcagaccagctgccaggacggcctgagccaggacctgaacgaggccgtgcccgagaccgagagactggacagcaaggccctgaagaccagagcccagctgagcgtgaagaacagaagacagagacccagcagaaccagactgtacgacagcgtgagcagcaccgacggcgaggacagcctggagagaaagggcctgagaaccagcagccccgagagcgacagcggcgtgccccccctgacccccgtggacagcaacgtgcccttcagcagcgaccacatcgccgagttccaggaggagcccctggaccccgagatgggccccctgagcagcatgtggggcgacaccagcctgttcagcaccagcaagagcgaccacgacgtggaggagagcccctgccaccaccagaccaccaacaagaagatcctgagagagaaggacgacgccaaggaccccaagagcctgagagccagcagcagcctggccgtgcagggcggcaagatcaagagaaagttcgtggacctgggcgcccccctgagaagaaacagcagcaagggcaagaagtggaaggagaaggagaaggaggccagcagattcagcgccggcagcagaatcttcagaggcagactggagaactggacccccaagccctgcagcaccgcccagaccagcaccagaagcccctgcatgcccttcagctggttcaacgacagcagaaagggcagctacagcttcagaaacctgcccgcccccaccagcagcctgcagcccagccccgagaccctgatcagcgacaagaagggcagcaagaacttcaccttcaacgacgacttcagccccagcagcaccagcagcgccgacctgagcggcctgggcgccgagcccaagacccccggcctgagccagagcctggccctgagcagcgacgagatcctggacgacggccagagccccaagcacagccagtgccagaacagagccgtgcaggagtggagcgtgcagcaggtgagccactggctgatgagcctgaacctggagcagtacgtgagcgagttcagcgcccagaacatcaccggcgagcagctgctgcagctggacggcaacaagctgaaggccctgggcatgaccgccagccaggacagagccgtggtgaagaagaagctgaaggagatgaagatgagcctggagaaggccagaaaggcccaggagaagatggagaagcagagagagaagctgagaagaaaggagcaggagcagatgcagagaaagagcaagaagaccgagaagatgaccagcaccaccgccgagggcgccggcgagcagtag

SEQ ID NO: 95335 - DNA, 3297 bp, synthetic construct
  misc_feature 1..3297: note = Description of Artificial Sequence: Synthetic coding sequence
  source 1..3297: mol_type = other DNA
atgctgaagaccgagagcagcggcgagagaaccaccctgagaagcgccagcccccacagaaacgcctacagaaccgagttccaggccctgaagagcaccttcgacaagcccaagagcgacggcgagcagaagaccaaggagggcgagggcagccagcagagcagaggcagaaagtacggcagcaacgtgaacagaatcaagaacctgttcatgcagatgggcatggagcccaacgagaacgccgccgtgatcgccaagaccagaggcaagggcggccacagcagcccccagagaagaatgaagcccaaggagttcctggagaagaccgacggcagcgtggtgaagctggagagcagcgtgagcgagagaatcagcagattcgacaccatgtacgacggccccagctacagcaagttcaccgagaccagaaagatgttcgagagaagcgtgcacgagagcggccagaacaacagatacagccccaagaaggagaaggccggcggcagcgagccccaggacgagtggggcggcagcaagagcaacagaggcagcaccgacagcctggacagcctgagcagcagaaccgaggccgtgagccccaccgtgagccagctgagcgccgtgttcgagaacaccgacagccccagcgccatcatcagcgagaaggccgagaacaacgagtacagcgtgaccggccactaccccctgaacctgcccagcgtgaccgtgaccaacctggacaccttcggccacctgaaggacagcaacagctggccccccagcaacaagagaggcgtggacaccgaggacgcccacaagagcaacgccacccccgtgcccgaggtggccagcaagagcaccagcctggccagcatccccggcgaggagatccagcagagcaaggagcccgaggacagcaccagcaaccagcagacccccgacagcatcgacaaggacggccccgaggagccctgcgccgagagcaaggccatgcccaagagcgagatccccagcccccagagccagctgctggaggacgccgaggccaacctggtgggcagagaggccgccaagcagcagagaaaggagctggccggcggcgacttcaccagccccgacgccagcgccagcagctgcggcaaggaggtgcccgaggacagcaacaacttcgacggcagccacgtgtacatgcacagcgactacaacgtgtacagagtgagaagcagatacaacagcgactggggcgagaccggcaccgagcaggacgaggaggaggacagcgacgagaacagctactaccagcccgacatggagtacagcgagatcgtgggcctgcccgaggaggaggagatccccgccaacagaaagatcaagttcagcagcgcccccatcaaggtgttcaacacctacagcaacgaggactacgacagaagaaacgacgaggtggaccccgtggccgccagcgccgagtacgagctggagaagagagtggagaagctggagctgttccccgtggagctggagaaggacgaggacggcctgggcatcagcatcatcggcatgggcgtgggcgccgacgccggcctggagaagctgggcatcttcgtgaagaccgtgaccgagggcggcgccgcccagagagacggcagaatccaggtgaacgaccagatcgtggaggtggacggcatcagcctggtgggcgtgacccagaacttcgccgccaccgtgctgagaaacaccaagggcaacgtgagattcgtgatcggcagagagaagcccggccaggtgagcgaggtggcccagctgatcagccagaccctggagcaggagagaagacagagagagctgctggagcagcactacgcccagtacgacgccgacgacgacgagaccggcgagtacgccaccgacgaggaggaggacgaggtgggccccgtgctgcccggcagcgacatggccatcgaggtgttcgagctgcccgagaacgaggacatgttcagccccagcgagctggacaccagcaagctgagccacaagttcaaggagctgcagatcaagcacgccgtgaccgaggccgagatccagaagctgaagaccaagctgcaggccgccgagaacgagaaggtgagatgggagctggagaagacccagctgcagcagaacatcgaggagaacaaggagagaatgctgaagctggagagctactggatcgaggcccagaccctgtgccacaccgtgaacgagcacctgaaggagacccagagccagtaccaggccctggagaagaagtacaacaaggccaagaagctgatcaaggacttccagcagaaggagctggacttcatcaagagacaggaggccgagagaaagaagatcgaggacctggagaaggcccacctggtggaggtgcagggcctgcaggtgagaatcagagacctggaggccgaggtgttcagactgctgaagcagaacggcacccaggtgaacaacaacaacaacatcttcgagagaagaaccagcctgggcgaggtgagcaagggcgacaccatggagaacctggacggcaagcagaccagctgccaggacggcctgagccaggacctgaacgaggccgtgcccgagaccgagagactggacagcaaggccctgaagaccagagcccagctgagcgtgaagaacagaagacagagacccagcagaaccagactgtacgacagcgtgagcagcaccgacggcgaggacagcctggagagaaagaacttcaccttcaacgacgacttcagccccagcagcaccagcagcgccgacctgagcggcctgggcgccgagcccaagacccccggcctgagccagagcctggccctgagcagcgacgagagcctggacatgatcgacgacgagatcctggacgacggccagagccccaagcacagccagtgccagaacagagccgtgcaggagtggagcgtgcagcaggtgagccactggctgatgagcctgaacctggagcagtacgtgagcgagttcagcgcccagaacatcaccggcgagcagctgctgcagctggacggcaacaagctgaaggccctgggcatgaccgccagccaggacagagccgtggtgaagaagaagctgaaggagatgaagatgagcctggagaaggccagaaaggcccaggagaagatggagaagcagagagagaagctgagaagaaaggagcaggagcagatgcagagaaagagcaagaagaccgagaagatgaccagcaccaccgccgagggcgccggcgagcagtag

SEQ ID NO: 95336 - DNA, 222 bp, synthetic construct
  misc_feature 1..222: note = Description of Artificial Sequence: Synthetic coding sequence
  source 1..222: mol_type = other DNA
atgctgaagaccgagagcagcggcgagagaaccaccctgagaagcgccagcccccacagaaacgcctacagaaccgagttccaggccctgaagagcaccttcgacaagcccaagagcgacggcgagcagaagaccaaggagggcgagggcagccagcagagcagaggcagaaagtacggcagcaacgtgaacagaatcaagaacctgttcatgcagatgtag

SEQ ID NO: 95337 - DNA, 126 bp, synthetic construct
  misc_feature 1..126: note = Description of Artificial Sequence: Synthetic coding sequence
  source 1..126: mol_type = other DNA
atgctgaagaccgagagcagcggcgagagaaccaccctgagaagcgccagcccccacagaaacgcctacagaaccgagttccaggccctgaagagcaccttcgacaagcccaagagcgacggctag

SEQ ID NO: 95338 - DNA, 3297 bp, synthetic construct; identical to SEQ ID NO: 95335
  misc_feature 1..3297: note = Description of Artificial Sequence: Synthetic coding sequence
  source 1..3297: mol_type = other DNA

SEQ ID NO: 95339 - DNA, 3762 bp, synthetic construct
  misc_feature 1..3762: note = Description of Artificial Sequence: Synthetic coding sequence
  source 1..3762: mol_type = other DNA
atgctgaagaccgagagcagcggcgagagaaccaccctgagaagcgccagcccccacagaaacgcctacagaaccgagttccaggccctgaagagcaccttcgacaagcccaagagcgacggcgagcagaagaccaaggagggcgagggcagccagcagagcagaggcagaaagtacggcagcaacgtgaacagaatcaagaacctgttcatgcagatgggcatggagcccaacgagaacgccgccgtgatcgccaagaccagaggcaagggcggccacagcagcccccagagaagaatgaagcccaaggagttcctggagaagaccgacggcagcgtggtgaagctggagagcagcgtgagcgagagaatcagcagattcgacaccatgtacgacggccccagctacagcaagttcaccgagaccagaaagatgttcgagagaagcgtgcacgagagcggccagaacaacagatacagccccaagaaggagaaggccggcggcagcgagccccaggacgagtggggcggcagcaagagcaacagaggcagcaccgacagcctggacagcctgagcagcagaaccgaggccgtgagccccaccgtgagccagctgagcgccgtgttcgagaacaccgacagccccagcgccatcatcagcgagaaggccgagaacaacgagtacagcgtgaccggccactaccccctgaacctgcccagcgtgaccgtgaccaacctggacaccttcggccacctgaaggacagcaacagctggccccccagcaacaagagaggcgtggacaccgaggacgcccacaagagcaacgccacccccgtgcccgaggtggccagcaagagcaccagcctggccagcatccccggcgaggagatccagcagagcaaggagcccgaggacagcaccagcaaccagcagacccccgacagcatcgacaaggacggccccgaggagccctgcgccgagagcaaggccatgcccaagagcgagatccccagcccccagagccagctgctggaggacgccgaggccaacctggtgggcagagaggccgccaagcagcagagaaaggagctggccggcggcgacttcaccagccccgacgccagcgccagcagctgcggcaaggaggtgcccgaggacagcaacaacttcgacggcagccacgtgtacatgcacagcgactacaacgtgtacagagtgagaagcagatacaacagcgactggggcgagaccggcaccgagcaggacgaggaggaggacagcgacgagaacagctactaccagcccgacatggagtacagcgagatcgtgggcctgcccgaggaggaggagatccccgccaacagaaagatcaagttcagcagcgcccccatcaaggtgttcaacacctacagcaacgaggactacgacagaagaaacgacgaggtggaccccgtggccgccagcgccgagtacgagctggagaagagagtggagaagctggagctgttccccgtggagctggagaaggacgaggacggcctgggcatcagcatcatcggcatgggcgtgggcgccgacgccggcctggagaagctgggcatcttcgtgaagaccgtgaccgagggcggcgccgcccagagagacggcagaatccaggtgaacgaccagatcgtggaggtggacggcatcagcctggtgggcgtgacccagaacttcgccgccaccgtgctgagaaacaccaagggcaacgtgagattcgtgatcggcagagagaagcccggccaggtgagcgaggtggcccagctgatcagccagaccctggagcaggagagaagacagagagagctgctggagcagcactacgcccagtacgacgccgacgacgacgagaccggcgagtacgccaccgacgaggaggaggacgaggtgggccccgtgctgcccggcagcgacatggccatcgaggtgttcgagctgcccgagaacgaggacatgttcagccccagcgagctggacaccagcaagctgagccacaagttcaaggagctgcagatcaagcacgccgtgaccgaggccgagatccagaagctgaagaccaagctgcaggccgccgagaacgagaaggtgagatgggagctggagaagacccagctgcagcagaacatcgaggagaacaaggagagaatgctgaagctggagagctactggatcgaggcccagaccctgtgccacaccgtgaacgagcacctgaaggagacccagagccagtaccaggccctggagaagaagtacaacaaggccaagaagctgatcaaggacttccagcagaaggagctggacttcatcaagagacaggaggccgagagaaagaagatcgaggacctggagaaggcccacctggtggaggtgcagggcctgcaggtgagaatcagagacctggaggccgaggtgttcagactgctgaagcagaacggcacccaggtgaacaacaacaacaacatcttcgagagaagaaccagcctgggcgaggtgagcaagggcgacaccatggagaacctggacggcaagcagaccagctgccaggacggcctgagccaggacctgaacgaggccgtgcccgagaccgagagactggacagcaaggccctgaagaccagagcccagctgagcgtgaagaacagaagacagagacccagcagaaccagactgtacgacagcgtgagcagcaccgacggcgaggacagcctggagagaaagcccagcaacagcttctacaaccacatgcacatcaccaagctgctgccccccaagggcctgagaaccagcagccccgagagcgacagcggcgtgccccccctgacccccgtggacagcaacgtgcccttcagcagcgaccacatcgccgagttccaggaggagcccctggaccccgagatgggccccctgagcagcatgtggggcgacaccagcctgttcagcaccagcaagagcgaccacgacgtggaggagagcccctgccaccaccagaccaccaacaagaagatcctgagagagaaggacgacgccaaggaccccaagagcctgagagccagcagcagcctggccgtgcagggcggcaagatcaagagaaagttcgtggacctgggcgcccccctgagaagaaacagcagcaagggcaagaagtggaaggagaaggagaaggaggccagcagattcagcgccggcagcagaatcttcagaggcagactggagaactggacccccaagccctgcagcaccgcccagaccagcaccagaagcccctgcatgcccttcagctggttcaacgacagcagaaagggcagctacagcttcagaaacctgcccgcccccaccagcagcctgcagcccagccccgagaccctgatcagcgacaagaagggcagcaagaacttcaccttcaacgacgacttcagccccagcagcaccagcagcgccgacctgagcggcctgggcgccgagcccaagacccccggcctgagccagagcctggccctgagcagcgacgaggccctgggcatgaccgccagccaggacagagccgtggtgaagaagaagctgaaggagatgaagatgagcctggagaaggccagaaaggcccaggagaagatggagaagcagagagagaagctgagaagaaaggagcaggagcagatgcagagaaagagcaagaagaccgagaagatgaccagcaccaccgccgagggcgccggcgagcagtag

SEQ ID NO: 95340 - DNA, 930 bp, synthetic construct
  misc_feature 1..930: note = Description of Artificial Sequence: Synthetic coding sequence
  source 1..930: mol_type = other DNA
atggacgagaaggtgttcaccaaggagctggaccagtggatcgagcagctgaacgagtgcaagcagctgagcgagagccaggtgaagagcctgtgcgagaaggccaaggagatcctgaccaaggagagcaacgtgcaggaggtgagatgccccgtgaccgtgtgcggcgacgtgcacggccagttccacgacctgatggagctgttcagaatcggcggcaagagccccgacaccaactacctgttcatgggcgactacgtggacagaggctactacagcgtggagaccgtgaccctgctggtggccctgaaggtgagatacagagagagaatcaccatcctgagaggcaaccacgagagcagacagatcacccaggtgtacggcttctacgacgagtgcctgagaaagtacggcaacgccaacgtgtggaagtacttcaccgacctgttcgactacctgcccctgaccgccctggtggacggccagatcttctgcctgcacggcggcctgagccccagcatcgacaccctggaccacatcagagccctggacagactgcaggaggtgccccacgagggccccatgtgcgacctgctgtggagcgaccccgacgacagaggcggctggggcatcagccccagaggcgccggctacaccttcggccaggacatcagcgagaccttcaaccacgccaacggcctgaccctggtgagcagagcccaccagctggtgatggagggctacaactggtgccacgacagaaacgtggtgaccatcttcagcgcccccaactactgctacagatgcggcaaccaggccgccatcatggagctggacgacaccctgaagtacagcttcctgcagttcgaccccgcccccagaagaggcgagccccacgtgaccagaagaacccccgactacttcctgtag

SEQ ID NO: 95341 - DNA, 1407 bp, synthetic construct
  misc_feature 1..1407: note = Description of Artificial Sequence: Synthetic coding sequence
  source 1..1407: mol_type = other DNA
atggcccccccccccgccagagtgcacctgggcgccttcctggccgtgacccccaaccccggcagcgccgccagcggcaccgaggccgccgccgccacccccagcaaggtgtggggcagcagcgccggcagaatcgagcccagaggcggcggcagaggcgccctgcccaccagcatgggccagcacggccccagcgccagagccagagccggcagagcccccggccccagacccgccagagaggccagccccagactgagagtgcacaagaccttcaagttcgtggtggtgggcgtgctgctgcaggtggtgcccagcagcgccgccaccatcaagctgcacgaccagagcatcggcacccagcagtgggagcacagccccctgggcgagctgtgcccccccggcagccacagaagcgagcaccccggcgcctgcaacagatgcaccgagggcgtgggctacaccaacgccagcaacaacctgttcgcctgcctgccctgcaccgcctgcaagagcgacgaggaggagagaagcccctgcaccaccaccagaaacaccgcctgccagtgcaagcccggcaccttcagaaacgacaacagcgccgagatgtgcagaaagtgcagcagaggctgccccagaggcatggtgaaggtgaaggactgcaccccctggagcgacatcgagtgcgtgcacaaggagagcggcaacggccacaacatctgggtgatcctggtggtgaccctggtggtgcccctgctgctggtggccgtgctgatcgtgtgctgctgcatcggcagcggctgcggcggcgaccccaagtgcatggacagagtgtgcttctggagactgggcctgctgagaggccccggcgccgaggacaacgcccacaacgagatcctgagcaacgccgacagcctgagcaccttcgtgagcgagcagcagatggagagccaggagcccgccgacctgaccggcgtgaccgtgcagagccccggcgaggcccagtgcctgctgggccccgccgaggccgagggcagccagagaagaagactgctggtgcccgccaacggcgccgaccccaccgagaccctgatgctgttcttcgacaagttcgccaacatcgtgcccttcgacagctgggaccagctgatgagacagctggacctgaccaagaacgagatcgacgtggtgagagccggcaccgccggccccggcgacgccctgtacgccatgctgatgaagtgggtgaacaagaccggcagaaacgccagcatccacaccctgctggacgccctggagagaatggaggagagacacgccagagagaagatccaggacctgctggtggacagcggcaagttcatctacctggaggacggcaccggcagcgccgtgagcctggagtag

SEQ ID NO: 95342 - DNA, 930 bp, synthetic construct; identical to SEQ ID NO: 90830
  misc_feature 1..930: note = Description of Artificial Sequence: Synthetic coding sequence
  source 1..930: mol_type = other DNA

SEQ ID NO: 95343 - DNA, 1461 bp, synthetic construct
  misc_feature 1..1461: note = Description of Artificial Sequence: Synthetic coding sequence
  source 1..1461: mol_type = other DNA
atgagcagcagcagcccccccgccggcgccgccagcgccgccatcagcgccagcgagaaggtggacggcttcaccagaaagagcgtgagaaaggcccagagacagaagagaagccagggcagcagccagttcagaagccagggcagccaggccgagctgcaccccctgccccagctgaaggacgccaccagcaacgagcagcaggagctgttctgccagaagctgcagcagtgctgcatcctgttcgacttcatggacagcgtgagcgacctgaagagcaaggagatcaagagagccaccctgaacgagctggtggagtacgtgagcaccaacagaggcgtgatcgtggagagcgcctacagcgacatcgtgaagatgatcagcgccaacatcttcagaaccctgccccccagcgacaaccccgacttcgaccccgaggaggacgagcccaccctggaggccagctggccccacatccagctggtgtacgagttcttcctgagattcctggagagccccgacttccagcccagcatcgccaagagatacatcgaccagaagttcgtgcagcagctgctggagctgttcgacagcgaggaccccagagagagagacttcctgaagaccgtgctgcacagaatctacggcaagttcctgggcctgagagccttcatcagaaagcagatcaacaacatcttcctgagattcatctacgagaccgagcacttcaacggcgtggccgagctgctggagatcctgggcagcatcatcaacggcttcgccctgcccctgaaggccgagcacaagcagttcctgatgaaggtgctgatccccatgcacaccgccaagggcctggccctgttccacgcccagctggcctactgcgtggtgcagttcctggagaaggacaccaccctgaccgagcccgtgatcagaggcctgctgaagttctggcccaagacctgcagccagaaggaggtgatgttcctgggcgagatcgaggagatcctggacgtgatcgagcccacccagttcaagaagatcgaggagcccctgttcaagcagatcagcaagtgcgtgagcagcagccacttccaggtggccgagagagccctgtacttctggaacaacgagtacatcctgagcctgatcgaggagaacatcgacaagatcctgcccatcatgttcgccagcctgtacaagatcagcaaggagcactggaaccccaccatcgtggccctggtgtacaacgtgctgaagaccctgatggagatgaacggcaagctgttcgacgacctgaccagcagctacaaggccgagagacagagagagaagaagaaggagctggagagagaggagctgtggaagaagctggaggagctgaagctgaagaaggccctggagaagcagaacagcgcctacaacatgcacagcatcctgagcaacaccagcgccgagtag

SEQ ID NO: 95344 - DNA, 1290 bp, synthetic construct
  misc_feature 1..1290: note = Description of Artificial Sequence: Synthetic coding sequence
  source 1..1290: mol_type = other DNA
atgatcatgaacgccaccagcaacgagcagcaggagctgttctgccagaagctgcagcagtgctgcatcctgttcgacttcatggacagcgtgagcgacctgaagagcaaggagatcaagagagccaccctgaacgagctggtggagtacgtgagcaccaacagaggcgtgatcgtggagagcgcctacagcgacatcgtgaagatgatcagcgccaacatcttcagaaccctgccccccagcgacaaccccgacttcgaccccgaggaggacgagcccaccctggaggccagctggccccacatccagctggtgtacgagttcttcctgagattcctggagagccccgacttccagcccagcatcgccaagagatacatcgaccagaagttcgtgcagcagctgctggagctgttcgacagcgaggaccccagagagagagacttcctgaagaccgtgctgcacagaatctacggcaagttcctgggcctgagagccttcatcagaaagcagatcaacaacatcttcctgagattcatctacgagaccgagcacttcaacggcgtggccgagctgctggagatcctgggcagcatcatcaacggcttcgccctgcccctgaaggccgagcacaagcagttcctgatgaaggtgctgatccccatgcacaccgccaagggcctggccctgttccacgcccagctggcctactgcgtggtgcagttcctggagaaggacaccaccctgaccgagcccgtgatcagaggcctgctgaagttctggcccaagacctgcagccagaaggaggtgatgttcctgggcgagatcgaggagatcctggacgtgatcgagcccacccagttcaagaagatcgaggagcccctgttcaagcagatcagcaagtgcgtgagcagcagccacttccaggtggccgagagagccctgtacttctggaacaacgagtacatcctgagcctgatcgaggagaacatcgacaagatcctgcccatcatgttcgccagcctgtacaagatcagcaaggagcactggaaccccaccatcgtggccctggtgtacaacgtgctgaagaccctgatggagatgaacggcaagctgttcgacgacctgaccagcagctacaaggccgagagacagagagagaagaagaaggagctggagagagaggagctgtggaagaagctggaggagctgaagctgaagaaggccctggagaagcagaacagcgcctacaacatgcacagcatcctgagcaacaccagcgccgagtag

SEQ ID NO: 95345 - DNA, 1461 bp, synthetic construct; identical to SEQ ID NO: 95343
  misc_feature 1..1461: note = Description of Artificial Sequence: Synthetic coding sequence
  source 1..1461: mol_type = other DNA

SEQ ID NO: 95346 - DNA, 1341 bp, synthetic construct
  misc_feature 1..1341: note = Description of Artificial Sequence: Synthetic coding sequence
  source 1..1341: mol_type = other DNA
atgaagtgcttcagcagatacctgccctacatcttcagaccccccaacaccatcctgagcagcagctgccacaccgaggccgacatcatcagcaccgtggagttcaaccacaccggcgagctgctggccaccggcgacaagggcggcagagtggtgatcttccagagagagcaggagagcaagaaccaggtgcacagaagaggcgagtacaacgtgtacagcaccttccagagccacgagcccgagttcgactacctgaagagcctggagatcgaggagaagatcaacaagatcagatggctgccccagcagaacgccgcctacttcctgctgagcaccaacgacaagaccgtgaagctgtggaaggtgagcgagagagacaagagacccgagggctacaacctgaaggacgaggagggcagactgagagaccccgccaccatcaccaccctgagagtgcccgtgctgagacccatggacctgatggtggaggccacccccagaagagtgttcgccaacgcccacacctaccacatcaacagcatcagcgtgaacagcgactacgagacctacatgagcgccgacgacctgagaatcaacctgtggaacttcgagatcaccaaccagagcttcaacatcgtggacatcaagcccgccaacatggaggagctgaccgaggtgatcaccgccgccgagttccacccccaccactgcaacaccttcgtgtacagcagcagcaagggcaccatcagactgtgcgacatgagagccagcgccctgtgcgacagacacaccaagttcttcgaggagcccgaggaccccagcaacagaagcttcttcagcgagatcatcagcagcatcagcgacgtgaagttcagccacagcggcagatacatcatgaccagagactacctgaccgtgaaggtgtgggacctgaacatggagaacagacccatcgagacctaccaggtgcacgactacctgagaagcaagctgtgcagcctgtacgagaacgactgcatcttcgacaagttcgagtgcgtgtggaacggcagcgacagcgtgatcatgaccggcagctacaacaacttcttcagaatgttcgacagaaacaccaagagagacgtgaccctggaggccagcagagagaacagcaagcccagagccatcctgaagcccagaaaggtgtgcgtgggcggcaagagaagaaaggacgagatcagcgtggacagcctggacttcagcaagaagatcctgcacaccgcctggcaccccagcgagaacatcatcgccgtggccgccaccaacaacctgtacatcttccaggacaaggtgaactag

SEQ ID NO: 95347 - DNA, 1332 bp, synthetic construct
  misc_feature 1..1332: note = Description of Artificial Sequence: Synthetic coding sequence
  source 1..1332: mol_type = other DNA
atggaggaggacatcgacaccagaaagatcaacaacagcttcctgagagaccacagctacgccaccgaggccgacatcatcagcaccgtggagttcaaccacaccggcgagctgctggccaccggcgacaagggcggcagagtggtgatcttccagagagagcaggagagcaagaaccaggtgcacagaagaggcgagtacaacgtgtacagcaccttccagagccacgagcccgagttcgactacctgaagagcctggagatcgaggagaagatcaacaagatcagatggctgccccagcagaacgccgcctacttcctgctgagcaccaacgacaagaccgtgaagctgtggaaggtgagcgagagagacaagagacccgagggctacaacctgaaggacgaggagggcagactgagagaccccgccaccatcaccaccctgagagtgcccgtgctgagacccatggacctgatggtggaggccacccccagaagagtgttcgccaacgcccacacctaccacatcaacagcatcagcgtgaacagcgactacgagacctacatgagcgccgacgacctgagaatcaacctgtggaacttcgagatcaccaaccagagcttcaacatcgtggacatcaagcccgccaacatggaggagctgaccgaggtgatcaccgccgccgagttccacccccaccactgcaacaccttcgtgtacagcagcagcaagggcaccatcagactgtgcgacatgagagccagcgccctgtgcgacagacacaccaagttcttcgaggagcccgaggaccccagcaacagaagcttcttcagcgagatcatcagcagcatcagcgacgtgaagttcagccacagcggcagatacatcatgaccagagactacctgaccgtgaaggtgtgggacctgaacatggagaacagacccatcgagacctaccaggtgcacgactacctgagaagcaagctgtgcagcctgtacgagaacgactgcatcttcgacaagttcgagtgcgtgtggaacggcagcgacagcgtgatcatgaccggcagctacaacaacttcttcagaatgttcgacagaaacaccaagagagacgtgaccctggaggccagcagagagaacagcaagcccagagccatcctgaagcccagaaaggtgtgcgtgggcggcaagagaagaaaggacgagatcagcgtggacagcctggacttcagcaagaagatcctgcacaccgcctggcaccccagcgagaacatcatcgccgtggccgccaccaacaacctgtacatcttccaggacaaggtgaactag

SEQ ID NO: 95348 - DNA, 1506 bp, synthetic construct
  misc_feature 1..1506: note = Description of Artificial Sequence: Synthetic coding sequence
  source 1..1506: mol_type = other DNA
atggtgctgcagcccagcgagagacactacagagactggaaccacagaagactgggcccctggtgcagccccaccggcagccccgcccccctgagctgcgagaccggctgcggcgagggcagctggatcctggtgtgcagactgctggtgcccacccaggtgagcctgctgagcatggaggaggacatcgacaccagaaagatcaacaacagcttcctgagagaccacagctacgccaccgaggccgacatcatcagcaccgtggagttcaaccacaccggcgagctgctggccaccggcgacaagggcggcagagtggtgatcttccagagagagcaggagagcaagaaccaggtgcacagaagaggcgagtacaacgtgtacagcaccttccagagccacgagcccgagttcgactacctgaagagcctggagatcgaggagaagatcaacaagatcagatggctgccccagcagaacgccgcctacttcctgctgagcaccaacgacaagaccgtgaagctgtggaaggtgagcgagagagacaagagacccgagggctacaacctgaaggacgaggagggcagactgagagaccccgccaccatcaccaccctgagagtgcccgtgctgagacccatggacctgatggtggaggccacccccagaagagtgttcgccaacgcccacacctaccacatcaacagcatcagcgtgaacagcgactacgagacctacatgagcgccgacgacctgagaatcaacctgtggaacttcgagatcaccaaccagagcttcaacatcgtggacatcaagcccgccaacatggaggagctgaccgaggtgatcaccgccgccgagttccacccccaccactgcaacaccttcgtgtacagcagcagcaagggcaccatcagactgtgcgacatgagagccagcgccctgtgcgacagacacaccaagttcttcgaggagcccgaggaccccagcaacagaagcttcttcagcgagatcatcagcagcatcagcgacgtgaagttcagccacagcggcagatacatcatgaccagagactacctgaccgtgaaggtgtgggacctgaacatggagaacagacccatcgagacctaccaggtgcacgactacctgagaagcaagctgtgcagcctgtacgagaacgactgcatcttcgacaagttcgagtgcgtgtggaacggcagcgacagcgtgatcatgaccggcagctacaacaacttcttcagaatgttcgacagaaacaccaagagagacgtgaccctggaggccagcagagagaacagcaagcccagagccatcctgaagcccagaaaggtgtgcgtgggcggcaagagaagaaaggacgagatcagcgtggacagcctggacttcagcaagaagatcctgcacaccgcctggcaccccagcgagaacatcatcgccgtggccgccaccaacaacctgtacatcttccaggacaaggtgaactag

SEQ ID NO: 95349 - DNA, 1299 bp, synthetic construct
  misc_feature 1..1299: note = Description of Artificial Sequence: Synthetic coding sequence
  source 1..1299: mol_type = other DNA
atgaactaccccgacgagaacacctacggcaacaaggccgacatcatcagcaccgtggagttcaaccacaccggcgagctgctggccaccggcgacaagggcggcagagtggtgatcttccagagagagcaggagagcaagaaccaggtgcacagaagaggcgagtacaacgtgtacagcaccttccagagccacgagcccgagttcgactacctgaagagcctggagatcgaggagaagatcaacaagatcagatggctgccccagcagaacgccgcctacttcctgctgagcaccaacgacaagaccgtgaagctgtggaaggtgagcgagagagacaagagacccgagggctacaacctgaaggacgaggagggcagactgagagaccccgccaccatcaccaccctgagagtgcccgtgctgagacccatggacctgatggtggaggccacccccagaagagtgttcgccaacgcccacacctaccacatcaacagcatcagcgtgaacagcgactacgagacctacatgagcgccgacgacctgagaatcaacctgtggaacttcgagatcaccaaccagagcttcaacatcgtggacatcaagcccgccaacatggaggagctgaccgaggtgatcaccgccgccgagttccacccccaccactgcaacaccttcgtgtacagcagcagcaagggcaccatcagactgtgcgacatgagagccagcgccctgtgcgacagacacaccaagttcttcgaggagcccgaggaccccagcaacagaagcttcttcagcgagatcatcagcagcatcagcgacgtgaagttcagccacagcggcagatacatcatgaccagagactacctgaccgtgaaggtgtgggacctgaacatggagaacagacccatcgagacctaccaggtgcacgactacctgagaagcaagctgtgcagcctgtacgagaacgactgcatcttcgacaagttcgagtgcgtgtggaacggcagcgacagcgtgatcatgaccggcagctacaacaacttcttcagaatgttcgacagaaacaccaagagagacgtgaccctggaggccagcagagagaacagcaagcccagagccatcctgaagcccagaaaggtgtgcgtgggcggcaagagaagaaaggacgagatcagcgtggacagcctggacttcagcaagaagatcctgcacaccgcctggcaccccagcgagaacatcatcgccgtggccgccaccaacaacctgtacatcttccaggacaaggtgaactag

SEQ ID NO: 95350 - DNA, 1332 bp, synthetic construct; identical to SEQ ID NO: 95347
  misc_feature 1..1332: note = Description of Artificial Sequence: Synthetic coding sequence
  source 1..1332: mol_type = other DNA

SEQ ID NO: 95351 - DNA, 1332 bp, synthetic construct; identical to SEQ ID NO: 95347
  misc_feature 1..1332: note = Description of Artificial Sequence: Synthetic coding sequence
  source 1..1332: mol_type = other DNA

SEQ ID NO: 95352 - DNA, 1530 bp, synthetic construct
  misc_feature 1..1530: note = Description of Artificial Sequence: Synthetic coding sequence
  source 1..1530: mol_type = other DNA
atgctgctgagcctgcccgccctgcacctgcagaccagcgagcaccaccccttcttccagctgccccacagaagactgggcccctggtgcagccccaccggcagccccgcccccctgagctgcgagaccggctgcggcgagggcagctggatcctggtgtgcagactgctggtgcccacccaggtgagcctgctgagcatggaggaggacatcgacaccagaaagatcaacaacagcttcctgagagaccacagctacgccaccgaggccgacatcatcagcaccgtggagttcaaccacaccggcgagctgctggccaccggcgacaagggcggcagagtggtgatcttccagagagagcaggagagcaagaaccaggtgcacagaagaggcgagtacaacgtgtacagcaccttccagagccacgagcccgagttcgactacctgaagagcctggagatcgaggagaagatcaacaagatcagatggctgccccagcagaacgccgcctacttcctgctgagcaccaacgacaagaccgtgaagctgtggaaggtgagcgagagagacaagagacccgagggctacaacctgaaggacgaggagggcagactgagagaccccgccaccatcaccaccctgagagtgcccgtgctgagacccatggacctgatggtggaggccacccccagaagagtgttcgccaacgcccacacctaccacatcaacagcatcagcgtgaacagcgactacgagacctacatgagcgccgacgacctgagaatcaacctgtggaacttcgagatcaccaaccagagcttcaacatcgtggacatcaagcccgccaacatggaggagctgaccgaggtgatcaccgccgccgagttccacccccaccactgcaacaccttcgtgtacagcagcagcaagggcaccatcagactgtgcgacatgagagccagcgccctgtgcgacagacacaccaagttcttcgaggagcccgaggaccccagcaacagaagcttcttcagcgagatcatcagcagcatcagcgacgtgaagttcagccacagcggcagatacatcatgaccagagactacctgaccgtgaaggtgtgggacctgaacatggagaacagacccatcgagacctaccaggtgcacgactacctgagaagcaagctgtgcagcctgtacgagaacgactgcatcttcgacaagttcgagtgcgtgtggaacggcagcgacagcgtgatcatgaccggcagctacaacaacttcttcagaatgttcgacagaaacaccaagagagacgtgaccctggaggccagcagagagaacagcaagcccagagccatcctgaagcccagaaaggtgtgcgtgggcggcaagagaagaaaggacgagatcagcgtggacagcctggacttcagcaagaagatcctgcacaccgcctggcaccccagcgagaacatcatcgccgtggccgccaccaacaacctgtacatcttccaggacaaggtgaactag

SEQ ID NO: 95353 - DNA, 1332 bp, synthetic construct; identical to SEQ ID NO: 95347
  misc_feature 1..1332: note = Description of Artificial Sequence: Synthetic coding sequence
  source 1..1332: mol_type = other DNA

SEQ ID NO: 95354 - DNA, 1350 bp, synthetic construct
  misc_feature 1..1350: note = Description of Artificial Sequence: Synthetic coding sequence
  source 1..1350: mol_type = other DNA
atgatccccggcatcggcaccctgacccaggacaccctgtggtgcttcagccaggtgaagggcaccatcgagatcggcaccaccgaggccgacatcatcagcaccgtggagttcaaccacaccggcgagctgctggccaccggcgacaagggcggcagagtggtgatcttccagagagagcaggagagcaagaaccaggtgcacagaagaggcgagtacaacgtgtacagcaccttccagagccacgagcccgagttcgactacctgaagagcctggagatcgaggagaagatcaacaagatcagatggctgccccagcagaacgccgcctacttcctgctgagcaccaacgacaagaccgtgaagctgtggaaggtgagcgagagagacaagagacccgagggctacaacctgaaggacgaggagggcagactgagagaccccgccaccatcaccaccctgagagtgcccgtgctgagacccatggacctgatggtggaggccacccccagaagagtgttcgccaacgcccacacctaccacatcaacagcatcagcgtgaacagcgactacgagacctacatgagcgccgacgacctgagaatcaacctgtggaacttcgagatcaccaaccagagcttcaacatcgtggacatcaagcccgccaacatggaggagctgaccgaggtgatcaccgccgccgagttccacccccaccactgcaacaccttcgtgtacagcagcagcaagggcaccatcagactgtgcgacatgagagccagcgccctgtgcgacagacacaccaagttcttcgaggagcccgaggaccccagcaacagaagcttcttcagcgagatcatcagcagcatcagcgacgtgaagttcagccacagcggcagatacatcatgaccagagactacctgaccgtgaaggtgtgggacctgaacatggagaacagacccatcgagacctaccaggtgcacgactacctgagaagcaagctgtgcagcctgtacgagaacgactgcatcttcgacaagttcgagtgcgtgtggaacggcagcgacagcgtgatcatgaccggcagctacaacaacttcttcagaatgttcgacagaaacaccaagagagacgtgaccctggaggccagcagagagaacagcaagcccagagccatcctgaagcccagaaaggtgtgcgtgggcggcaagagaagaaaggacgagatcagcgtggacagcctggacttcagcaagaagatcctgcacaccgcctggcaccccagcgagaacatcatcgccgtggccgccaccaacaacctgtacatcttccaggacaaggtgaactag

SEQ ID NO: 95355 - DNA, 1299 bp, synthetic construct; identical to SEQ ID NO: 95349
  misc_feature 1..1299: note = Description of Artificial Sequence: Synthetic coding sequence
  source 1..1299: mol_type = other DNA

SEQ ID NO: 95356 - DNA, 1494 bp, synthetic construct
  misc_feature 1..1494: note = Description of Artificial Sequence: Synthetic coding sequence
  source 1..1494: mol_type = other DNA
atggagaccaagctgccccccgccagcacccccaccagccccagcagccccggcctgagccccgtgcccccccccgacaaggtggacggcttcagcagaagaagcctgagaagagccagacccagaagaagccacagcagcagccagttcagataccagagcaaccagcaggagctgacccccctgcccctgctgaaggacgtgcccgccagcgagctgcacgagctgctgagcagaaagctggcccagtgcggcgtgatgttcgacttcctggactgcgtggccgacctgaagggcaaggaggtgaagagagccgccctgaacgagctggtggagtgcgtgggcagcaccagaggcgtgctgatcgagcccgtgtaccccgacatcatcagaatgatcagcgtgaacatcttcagaaccctgccccccagcgagaaccccgagttcgaccccgaggaggacgagcccaacctggagcccagctggccccacctgcagctggtgtacgagttcttcctgagattcctggagagccccgacttccagcccagcgtggccaagagatacgtggaccagaagttcgtgctgatgctgctggagctgttcgacagcgaggaccccagagagagagagtacctgaagaccatcctgcacagagtgtacggcaagttcctgggcctgagagcctacatcagaaagcagtgcaaccacatcttcctgagattcatctacgagttcgagcacttcaacggcgtggccgagctgctggagatcctgggcagcatcatcaacggcttcgccctgcccctgaagaccgagcacaagcagttcctggtgagagtgctgatccccctgcacagcgtgaagagcctgagcgtgttccacgcccagctggcctactgcgtggtgcagttcctggagaaggacgccaccctgaccgagcacgtgatcagaggcctgctgaagtactggcccaagacctgcacccagaaggaggtgatgttcctgggcgagatggaggagatcctggacgtgatcgagcccagccagttcgtgaagatccaggagcccctgttcaagcaggtggccagatgcgtgagcagcccccacttccaggtggccgagagagccctgtacttctggaacaacgagtacatcctgagcctgatcgaggacaactgccacaccgtgctgcccgccgtgttcggcaccctgtaccaggtgagcaaggagcactggaaccagaccatcgtgagcctgatctacaacgtgctgaagaccttcatggagatgaacggcaagctgttcgacgagctgaccgccagctacaagctggagaagcagcaggagcagcagaaggcccaggagagacaggagctgtggcagggcctggaggagctgagactgagaagactgcagggcacccagggcgccaaggaggcccccctgcagagactgaccccccaggtggccgccagcggcggccagagctag

SEQ ID NO: 95357 - DNA, 1107 bp, synthetic construct
  misc_feature 1..1107: note = Description of Artificial Sequence: Synthetic coding sequence
  source 1..1107: mol_type = other DNA
agcgtgcagagccaccccgccccccccagacccagagagaaccccagaggcagcgagagcctgccctgcagactgaccgccatggagaccaagctgccccccgccagcacccccaccagccccagcagccccggcctgagccccgtgcccccccccgacaaggtggacggcttcagcagaagaagcctgagaagagccagacccagaagaagccacagcagcagccagttcagataccagagcaaccagcaggagctgacccccctgcccctgctgaaggacgtgcccgccagcgagctgcacgagctgctgagcagaaagctggcccagtgcggcgtgatgttcgacttcctggactgcgtggccgacctgaagggcaaggaggtgaagagagccgccctgaacgagctggtggagtgcgtgggcagcaccagaggcgtgctgatcgagcccgtgtaccccgacatcatcagaatgatcagcgtgaacatcttcagaaccctgccccccagcgagaaccccgagttcgaccccgaggaggacgagcccaacctggagcccagctggccccacctgcagctggtgtacgagttcttcctgagattcctggagagccccgacttccagcccagcgtggccaagagatacgtggaccagaagttcgtgctgatgctgctggagctgttcgacagcgaggaccccagagagagagagtacctgaagaccatcctgcacagagtgtacggcaagttcctgggcctgagagcctacatcagaaagcagtgcaaccacatcttcctgagattcatctacgagttcgagcacttcaacggcgtggccgagctgctggagatcctgggcagcatcatcaacggcttcgccctgcccctgaagaccgagcacaagcccggcagcagacccgacccccccgccctgtgccaggtggccgtgtgcctgccctgccccgccggcatcctgtgcggcgccgtgcccggcgagggctgccacagcgacagagccagagaccccggcgccgcccagatcctggccaagaacctgcaccccgagggcggcgacgtgagcggcggcgacggcagagacagctag

SEQ ID NO: 95358 - DNA, 582 bp, synthetic construct
  misc_feature 1..582: note = Description of Artificial Sequence: Synthetic coding sequence
  source 1..582: mol_type = other DNA
atggagaccaagctgccccccgccagcacccccaccagccccagcagccccggcctgagccccgtgcccccccccgacaaggtggacggcttcagcagaagaagcctgagaagagccagacccagaagaagccacagcagcagccagttcagataccagagcaaccagcaggagctgacccccctgcccctgctgaaggacgtgcccgccagcgagctgcacgagctgctgagcagaaagctggcccagtgcggcgtgatgttcgacttcctggactgcgtggccgacctgaagggcaaggaggtgaagagagccgccctgaacgagctggtggagtgcgtgggcagcaccagaggcgtgctgatcgagcccgtgtaccccgacatcatcagaatgatcagcgtgaacatcttcagaaccctgccccccagcgagaaccccgagttcgaccccgaggaggacgagcccaacctggagcccagctggccccacctgcagctggtgtacgagttcttcctgagattcctggagagccccgacttccagcccagcgtggccaagagatacgtggaccagaagtag

SEQ ID NO: 95359 - DNA, 1494 bp, synthetic construct; identical to SEQ ID NO: 95356
  misc_feature 1..1494: note = Description of Artificial Sequence: Synthetic coding sequence
  source 1..1494: mol_type = other DNA

SEQ ID NO: 95360 - DNA, 408 bp, synthetic construct
  misc_feature 1..408: note = Description of Artificial Sequence: Synthetic coding sequence
  source 1..408: mol_type = other DNA
atggaggagctgaccgaggtgatcaccgccgccgagttccacccccaccagtgcaacgtgttcgtgtacagcagcagcaagggcaccatcagactgtgcgacatgagaagcagcgccctgtgcgacagacacagcaagttcttcgaggagcccgaggaccccagcagcagaagcttcttcagcgagatcatcagcagcatcagcgacgtgaagttcagccacagcggcagatacatgatgaccagagaccccgtgggcgagggcgtgggcccccagcacagagccggcagatggagacccaccagaagcaccagcacctgcgccgccagcagcgccctgagcatgagaaccaccgccagcctgaccagcctgagcgtggccggcaccgtgagaatcgcccccagctag

SEQ ID NO: 95361 - DNA, 1269 bp, synthetic construct
  misc_feature 1..1269: note = Description of Artificial Sequence: Synthetic coding sequence
  source 1..1269: mol_type = other DNA
ctgaccgccgacatcatcagcaccgtggagttcaactacagcggcgacctgctggccaccggcgacaagggcggcagagtggtgatcttccagagagagcaggagaacaagagcagaccccacagcagaggcgagtacaacgtgtacagcaccttccagagccacgagcccgagttcgactacctgaagagcctggagatcgaggagaagatcaacaagatcagatggctgccccagcagaacgccgcccacttcctgctgagcaccaacgacaagaccatcaagctgtggaagatcagcgagagagacaagagagccgagggctacaacctgaaggacgaggacggcagactgagagaccccttcagaatcaccgccctgagagtgcccatcctgaagcccatggacctgatggtggaggccagccccagaagaatcttcgccaacgcccacacctaccacatcaacagcatcagcgtgaacagcgaccacgagacctacctgagcgccgacgacctgagaatcaacctgtggcacctggagatcaccgacagaagcttcaacatcgtggacatcaagcccgccaacatggaggagctgaccgaggtgatcaccgccgccgagttccacccccaccagtgcaacgtgttcgtgtacagcagcagcaagggcaccatcagactgtgcgacatgagaagcagcgccctgtgcgacagacacagcaagttcttcgaggagcccgaggaccccagcagcagaagcttcttcagcgagatcatcagcagcatcagcgacgtgaagttcagccacagcggcagatacatgatgaccagagactacctgagcgtgaaggtgtgggacctgaacatggagagcagacccgtggagacccaccaggtgcacgagtacctgagaagcaagctgtgcagcctgtacgagaacgactgcatcttcgacaagttcgagtgctgctggaacggcagcgacagcgccatcatgaccggcagctacaacaacttcttcagaatgttcgacagagacaccagaagagacgtgaccctggaggccagcagagagagcagcaagcccagagccagcctgaagcccagaaaggtgtgcaccggcggcaagagaagaaaggacgagatcagcgtggacagcctggacttcaacaagaagatcctgcacaccgcctggcaccccgtggacaacgtgatcgccgtggccgccaccaacaacctgtacatcttccaggacaagatcaactag

SEQ ID NO: 95362 - DNA, 1713 bp, synthetic construct
  misc_feature 1..1713: note = Description of Artificial Sequence: Synthetic coding sequence
  source 1..1713: mol_type = other DNA
atgccctacaagctgaagaaggagaaggagccccccaaggtggccaagtgcaccgccaagcccagcagcagcggcaaggacggcggcggcgagaacaccgaggaggcccagccccagccccagccccagccccagccccaggcccagagccagccccccagcagcaacaagagacccagcaacagcacccccccccccacccagctgagcaagatcaagtacagcggcggcccccagatcgtgaagaaggagctgttcatccagaagctgagacagtgctgcgtgctgttcgacttcgtgagcgaccccctgagcgacctgaagttcaaggaggtgaagagagccggcctgaacgagatggtggagtacatcacccacagcagagacgtggtgaccgaggccatctaccccgaggccgtgaccatgttcagcgtgaacctgttcagaaccctgccccccagcagcaaccccaccggcgccgagttcgaccccgaggaggacgagcccaccctggaggccgcctggccccacctgcagctggtgtacgagttcttcctgagattcctggagagccccgacttccagcccaacatcgccaagaagtacatcgaccagaagttcgtgctggccctgctggacctgttcgacagcgaggaccccagagagagagacttcctgaagaccatcctgcacagaatctacggcaagttcctgggcctgagagcctacatcagaagacagatcaaccacatcttctacagattcatctacgagaccgagcaccacaacggcatcgccgagctgctggagatcctgggcagcatcatcaacggcttcgccctgcccctgaaggaggagcacaagatgttcctgatcagagtgctgctgcccctgcacaaggtgaagagcctgagcgtgtaccacccccagctggcctactgcgtggtgcagttcctggagaaggagagcagcctgaccgagcccgtgatcgtgggcctgctgaagttctggcccaagacccacagccccaaggaggtgatgttcctgaacgagctggaggagatcctggacgtgatcgagcccagcgagttcagcaaggtgatggagcccctgttcagacagctggccaagtgcgtgagcagcccccacttccaggtggccgagagagccctgtactactggaacaacgagtacatcatgagcctgatcagcgacaacgccgccagagtgctgcccatcatgttccccgccctgtacagaaacagcaagagccactggaacaagaccatccacggcctgatctacaacgccctgaagctgttcatggagatgaaccagaagctgttcgacgactgcacccagcagtacaaggccgagaagcagaagggcagattcagaatgaaggagagagaggagatgtggcagaagatcgaggagctggccagactgaacccccagtaccccatgttcagagcccccccccccctgccccccgtgtacagcatggagaccgagacccccaccgccgaggacatccagctgctgaagagaaccgtggagaccgaggccgtgcagatgctgaaggacatcaagaaggagaaggtgctgctgagaagaaagagcgagctgccccaggacgtgtacaccatcaaggccctggaggcccacaagagagccgaggagttcctgaccgccagccaggaggccctgtag

SEQ ID NO: 95363 - DNA, 1491 bp, synthetic construct
  misc_feature 1..1491: note = Description of Artificial Sequence: Synthetic coding sequence
  source 1..1491: mol_type = other DNA
atgccctacaagctgaagaaggagaaggagctgttcatccagaagctgagacagtgctgcgtgctgttcgacttcgtgagcgaccccctgagcgacctgaagttcaaggaggtgaagagagccggcctgaacgagatggtggagtacatcacccacagcagagacgtggtgaccgaggccatctaccccgaggccgtgaccatgttcagcgtgaacctgttcagaaccctgccccccagcagcaaccccaccggcgccgagttcgaccccgaggaggacgagcccaccctggaggccgcctggccccacctgcagctggtgtacgagttcttcctgagattcctggagagccccgacttccagcccaacatcgccaagaagtacatcgaccagaagttcgtgctggccctgctggacctgttcgacagcgaggaccccagagagagagacttcctgaagaccatcctgcacagaatctacggcaagttcctgggcctgagagcctacatcagaagacagatcaaccacatcttctacagattcatctacgagaccgagcaccacaacggcatcgccgagctgctggagatcctgggcagcatcatcaacggcttcgccctgcccctgaaggaggagcacaagatgttcctgatcagagtgctgctgcccctgcacaaggtgaagagcctgagcgtgtaccacccccagctggcctactgcgtggtgcagttcctggagaaggagagcagcctgaccgagcccgtgatcgtgggcctgctgaagttctggcccaagacccacagccccaaggaggtgatgttcctgaacgagctggaggagatcctggacgtgatcgagcccagcgagttcagcaaggtgatggagcccctgttcagacagctggccaagtgcgtgagcagcccccacttccaggtggccgagagagccctgtactactggaacaacgagtacatcatgagcctgatcagcgacaacgccgccagagtgctgcccatcatgttccccgccctgtacagaaacagcaagagccactggaacaagaccatccacggcctgatctacaacgccctgaagctgttcatggagatgaaccagaagctgttcgacgactgcacccagcagtacaaggccgagaagcagaagggcagattcagaatgaaggagagagaggagatgtggcagaagatcgaggagctggccagactgaacccccagtaccccatgttcagagcccccccccccctgccccccgtgtacagcatggagaccgagacccccaccgccgaggacatccagctgctgaagagaaccgtggagaccgaggccgtgcagatgctgaaggacatcaagaaggagaaggtgctgctgagaagaaagagcgagctgccccaggacgtgtacaccatcaaggccctggaggcccacaagagagccgaggagttcctgaccgccagccaggaggccctgtag

SEQ ID NO: 95364 - DNA, 1515 bp, synthetic construct
  misc_feature 1..1515: note = Description of Artificial Sequence: Synthetic coding sequence
  source 1..1515: mol_type = other DNA
tgaaagaaggagagaagacagagcagcagcagattcaacctgagcaagaacagagagctgcagaagctgcccgccctgaaggacagccccacccaggagagagaggagctgttcatccagaagctgagacagtgctgcgtgctgttcgacttcgtgagcgaccccctgagcgacctgaagttcaaggaggtgaagagagccggcctgaacgagatggtggagtacatcacccacagcagagacgtggtgaccgaggccatctaccccgaggccgtgaccatgttcagcgtgaacctgttcagaaccctgccccccagcagcaaccccaccggcgccgagttcgaccccgaggaggacgagcccaccctggaggccgcctggccccacctgcagctggtgtacgagttcttcctgagattcctggagagccccgacttccagcccaacatcgccaagaagtacatcgaccagaagttcgtgctggccctgctggacctgttcgacagcgaggaccccagagagagagacttcctgaagaccatcctgcacagaatctacggcaagttcctgggcctgagagcctacatcagaagacagatcaaccacatcttctacagattcatctacgagaccgagcaccacaacggcatcgccgagctgctggagatcctgggcagcatcatcaacggcttcgccctgcccctgaaggaggagcacaagatgttcctgatcagagtgctgctgcccctgcacaaggtgaagagcctgagcgtgtaccacccccaggtgatcgtgggcctgctgaagttctggcccaagacccacagccccaaggaggtgatgttcctgaacgagctggaggagatcctggacgtgatcgagcccagcgagttcagcaaggtgatggagcccctgttcagacagctggccaagtgcgtgagcagcccccacttccaggtggccgagagagccctgtactactggaacaacgagtacatcatgagcctgatcagcgacaacgccgccagagtgctgcccatcatgttccccgccctgtacagaaacagcaagagccactggaacaagaccatccacggcctgatctacaacgccctgaagctgttcatggagatgaaccagaagctgttcgacgactgcacccagcagtacaaggccgagaagcagaagggcagattcagaatgaaggagagagaggagatgtggcagaagatcgaggagctggccagactgaacccccagtaccccatgttcagagcccccccccccctgccccccgtgtacagcatggagaccgagacccccaccgccgaggacatccagctgctgaagagaaccgtggagaccgaggccgtgcagatgctgaaggacatcaagaaggagaaggtgctgctgagaagaaagagcgagctgccccaggacgtgtacaccatcaaggccctggaggcccacaagagagccgaggagttcctgaccgccagccaggaggccctgtag

SEQ ID NO: 95365 - DNA, 1809 bp, synthetic construct
  misc_feature 1..1809: note = Description of Artificial Sequence: Synthetic coding sequence
  source 1..1809: mol_type = other DNA
atgccctacaagctgaagaaggagaaggagccccccaaggtggccaagtgcaccgccaagcccagcagcagcggcaaggacggcggcggcgagaacaccgaggaggcccagccccagccccagccccagccccagccccaggcccagagccagccccccagcagcaacaagagacccagcaacagcacccccccccccacccagctgagcaagatcaagtacagcggcggcccccagatcgtgaagaaggagagaagacagagcagcagcagattcaacctgagcaagaacagagagctgcagaagctgcccgccctgaaggacagccccacccaggagagagaggagctgttcatccagaagctgagacagtgctgcgtgctgttcgacttcgtgagcgaccccctgagcgacctgaagttcaaggaggtgaagagagccggcctgaacgagatggtggagtacatcacccacagcagagacgtggtgaccgaggccatctaccccgaggccgtgaccatgttcagcgtgaacctgttcagaaccctgccccccagcagcaaccccaccggcgccgagttcgaccccgaggaggacgagcccaccctggaggccgcctggccccacctgcagctggtgtacgagttcttcctgagattcctggagagccccgacttccagcccaacatcgccaagaagtacatcgaccagaagttcgtgctggccctgctggacctgttcgacagcgaggaccccagagagagagacttcctgaagaccatcctgcacagaatctacggcaagttcctgggcctgagagcctacatcagaagacagatcaaccacatcttctacagattcatctacgagaccgagcaccacaacggcatcgccgagctgctggagatcctgggcagcatcatcaacggcttcgccctgcccctgaaggaggagcacaagatgttcctgatcagagtgctgctgcccctgcacaaggtgaagagcctgagcgtgtaccacccccagctggcctactgcgtggtgcagttcctggagaaggagagcagcctgaccgagcccgtgatcgtgggcctgctgaagttctggcccaagacccacagccccaaggaggtgatgttcctgaacgagctggaggagatcctggacgtgatcgagcccagcgagttcagcaaggtgatggagcccctgttcagacagctggccaagtgcgtgagcagcccccacttccaggtggccgagagagccctgtactactggaacaacgagtacatcatgagcctgatcagcgacaacgccgccagagtgctgcccatcatgttccccgccctgtacagaaacagcaagagccactggaacaagaccatccacggcctgatctacaacgccctgaagctgttcatggagatgaaccagaagctgttcgacgactgcacccagcagtacaaggccgagaagcagaagggcagattcagaatgaaggagagagaggagatgtggcagaagatcgaggagctggccagactgaacccccagtaccccatgttcagagcccccccccccctgccccccgtgtacagcatggagaccgagacccccaccgccgaggacatccagctgctgaagagaaccgtggagaccgaggccgtgcagatgctgaaggacatcaagaaggagaaggtgctgctgagaagaaagagcgagctgccccaggacgtgtacaccatcaaggccctggaggcccacaagagagccgaggagttcctgaccgccagccaggaggccctgtag

SEQ ID NO: 95366 - DNA, 1755 bp, synthetic construct
  misc_feature 1..1755: note = Description of Artificial Sequence: Synthetic coding sequence
  source 1..1755: mol_type = other DNA
atgccctacaagctgaagaaggagaaggagccccccaaggtggccaagtgcaccgccaagcccagcagcagcggcaaggacggcggcggcgagaacaccgaggaggcccagccccagccccagccccagccccagccccaggcccagagccagccccccagcagcaacaagagacccagcaacagcacccccccccccacccagctgagcaagatcaagtacagcggcggcccccagatcgtgaagaaggagagaagacagagcagcagcagattcaacctgagcaagaacagagagctgcagaagctgcccgccctgaaggacagccccacccaggagagagaggagctgttcatccagaagctgagacagtgctgcgtgctgttcgacttcgtgagcgaccccctgagcgacctgaagttcaaggaggtgaagagagccggcctgaacgagatggtggagtacatcacccacagcagagacgtggtgaccgaggccatctaccccgaggccgtgaccatgttcagcgtgaacctgttcagaaccctgccccccagcagcaaccccaccggcgccgagttcgaccccgaggaggacgagcccaccctggaggccgcctggccccacctgcagctggtgtacgagttcttcctgagattcctggagagccccgacttccagcccaacatcgccaagaagtacatcgaccagaagttcgtgctggccctgctggacctgttcgacagcgaggaccccagagagagagacttcctgaagaccatcctgcacagaatctacggcaagttcctgggcctgagagcctacatcagaagacagatcaaccacatcttctacagattcatctacgagaccgagcaccacaacggcatcgccgagctgctggagatcctgggcagcatcatcaacggcttcgccctgcccctgaaggaggagcacaagatgttcctgatcagagtgctgctgcccctgcacaaggtgaagagcctgagcgtgtaccacccccaggtgatcgtgggcctgctgaagttctggcccaagacccacagccccaaggaggtgatgttcctgaacgagctggaggagatcctggacgtgatcgagcccagcgagttcagcaaggtgatggagcccctgttcagacagctggccaagtgcgtgagcagcccccacttccaggtggccgagagagccctgtactactggaacaacgagtacatcatgagcctgatcagcgacaacgccgccagagtgctgcccatcatgttccccgccctgtacagaaacagcaagagccactggaacaagaccatccacggcctgatctacaacgccctgaagctgttcatggagatgaaccagaagctgttcgacgactgcacccagcagtacaaggccgagaagcagaagggcagattcagaatgaaggagagagaggagatgtggcagaagatcgaggagctggccagactgaacccccagtaccccatgttcagagcccccccccccctgccccccgtgtacagcatggagaccgagacccccaccgccgaggacatccagctgctgaagagaaccgtggagaccgaggccgtgcagatgctgaaggacatcaagaaggagaaggtgctgctgagaagaaagagcgagctgccccaggacgtgtacaccatcaaggccctggaggcccacaagagagccgaggagttcctgaccgccagccaggaggccctgtag

SEQ ID NO: 95367 - DNA, 1404 bp, synthetic construct
  misc_feature 1..1404: note = Description of Artificial Sequence: Synthetic coding sequence
  source 1..1404: mol_type = other DNA
atgagcagcgcccccaccaccccccccagcgtggacaaggtggacggcttcagcagaaagagcgtgagaaaggccagacagaagagaagccagagcagcagccagttcagaagccagggcaagcccatcgagctgacccccctgcccctgctgaaggacgtgcccagcagcgagcagcccgagctgttcctgaagaagctgcagcagtgctgcgtgatcttcgacttcatggacaccctgagcgacctgaagatgaaggagtacaagagaagcaccctgaacgagctggtggactacatcaccatcagcagaggctgcctgaccgagcagacctaccccgaggtggtgagaatggtgagctgcaacatcttcagaaccctgccccccagcgacagcaacgagttcgaccccgaggaggacgagcccaccctggaggccagctggccccacctgcagctggtgtacgagttcttcatcagattcctggagagccaggagttccagcccagcatcgccaagaagtacatcgaccagaagttcgtgctgcagctgctggagctgttcgacagcgaggaccccagagagagagactacctgaagaccgtgctgcacagaatctacggcaagttcctgggcctgagagccttcatcagaaagcagatcaacaacatcttcctgagattcgtgtacgagaccgagcacttcaacggcgtggccgagctgctggagatcctgggcagcatcatcaacggcttcgccctgcccctgaaggccgagcacaagcagttcctggtgaaggtgctgatccccctgcacaccgtgagaagcctgagcctgttccacgcccagctggcctactgcatcgtgcagttcctggagaaggaccccagcctgaccgagcccgtgatcagaggcctgatgaagttctggcccaagacctgcagccagaaggaggtgatgttcctgggcgagctggaggagatcctggacgtgatcgagcccagccagttcgtgaagatccaggagcccctgttcaagcagatcgccaagtgcgtgagcagcccccacttccaggtggccgagagagccctgtactactggaacaacgagtacatcatgagcctgatcgaggagaacagcaacgtgatcctgcccatcatgttcagcagcctgtacagaatcagcaaggagcactggaaccccgccatcgtggccctggtgtacaacgtgctgaaggccttcatggagatgaacagcaccatgttcgacgagctgaccgccacctacaagagcgacagacagagagagaagaagaaggagaaggagagagaggagctgtggaagaagctggaggacctggagctgaagagaggcctgagaagagacggcatcatccccacctag

SEQ ID NO: 95368 - DNA, 1176 bp, synthetic construct
  misc_feature 1..1176: note = Description of Artificial Sequence: Synthetic coding sequence
  source 1..1176: mol_type = other DNA
atggacaccctgagcgacctgaagatgaaggagtacaagagaagcaccctgaacgagctggtggactacatcaccatcagcagaggctgcctgaccgagcagacctaccccgaggtggtgagaatggtgagctgcaacatcttcagaaccctgccccccagcgacagcaacgagttcgaccccgaggaggacgagcccaccctggaggccagctggccccacctgcagctggtgtacgagttcttcatcagattcctggagagccaggagttccagcccagcatcgccaagaagtacatcgaccagaagttcgtgctgcagctgctggagctgttcgacagcgaggaccccagagagagagactacctgaagaccgtgctgcacagaatctacggcaagttcctgggcctgagagccttcatcagaaagcagatcaacaacatcttcctgagattcgtgtacgagaccgagcacttcaacggcgtggccgagctgctggagatcctgggcagcatcatcaacggcttcgccctgcccctgaaggccgagcacaagcagttcctggtgaaggtgctgatccccctgcacaccgtgagaagcctgagcctgttccacgcccagctggcctactgcatcgtgcagttcctggagaaggaccccagcctgaccgagcccgtgatcagaggcctgatgaagttctggcccaagacctgcagccagaaggaggtgatgttcctgggcgagctggaggagatcctggacgtgatcgagcccagccagttcgtgaagatccaggagcccctgttcaagcagatcgccaagtgcgtgagcagcccccacttccaggtggccgagagagccctgtactactggaacaacgagtacatcatgagcctgatcgaggagaacagcaacgtgatcctgcccatcatgttcagcagcctgtacagaatcagcaaggagcactggaaccccgccatcgtggccctggtgtacaacgtgctgaaggccttcatggagatgaacagcaccatgttcgacgagctgaccgccacctacaagagcgacagacagagagagaagaagaaggagaaggagagagaggagctgtggaagaagctggaggacctggagctgaagagaggcctgagaagagacggcatcatccccacctag

SEQ ID NO: 95369 - DNA, 1389 bp, synthetic construct
  misc_feature 1..1389: note = Description of Artificial Sequence: Synthetic coding sequence
  source 1..1389: mol_type = other DNA
atgagcagcgcccccaccaccccccccagcgtggacaaggtggacggcttcagcagaaagagcgtgagaaaggccagacagaagagaagccagagcagcagccagttcagaagccagggcaagcccatcgagctgacccccctgcccctgctgaaggacgtgcccagcagcgagcagcccgagctgttcctgaagaagctgcagcagtgctgcgtgatcttcgacttcatggacaccctgagcgacctgaagatgaaggagtacaagagaagcaccctgaacgagctggtggactacatcaccatcagcagaggctgcctgaccgagcagacctaccccgaggtggtgagaatggtgagctgcaacatcttcagaaccctgccccccagcgacagcaacgagttcgaccccgaggaggacgagcccaccctggaggccagctggccccacctgcagctggtgtacgagttcttcatcagattcctggagagccaggagttccagcccagcatcgccaagaagtacatcgaccagaagttcgtgctgcagctgctggagctgttcgacagcgaggaccccagagagagagactacctgaagaccgtgctgcacagaatctacggcaagttcctgggcctgagagccttcatcagaaagcagatcaacaacatcttcctgagattcgtgtacgagaccgagcacttcaacggcgtggccgagctgctggagatcctgggcagcatcatcaacggcttcgccctgcccctgaaggccgagcacaagcagttcctggtgaaggtgctgatccccctgcacaccgtgagaagcctgagcctgttccacgcccagctggcctactgcatcgtgcagttcctggagaaggaccccagcctgaccgagcccgtgatcagaggcctgatgaagttctggcccaagacctgcagccagaaggaggtgatgttcctgggcgagctggaggagatcctggacgtgatcgagcccagccagttcgtgaagatccaggagcccctgttcaagcagatcgccaagtgcgtgagcagcccccacttccaggtggccgagagagccctgtactactggaacaacgagtacatcatgagcctgatcgaggagaacagcaacgtgatcctgcccatcatgttcagcagcctgtacagaatcagcaaggagcactggaaccccgccatcgtggccctggtgtacaacgtgctgaaggccttcatggagatgaacagcaccatgttcgacgagctgaccgccacctacaacgagaagaagaaggagaaggagagagaggagctgtggaagaagctggaggacctggagctgaagagaggcctgagaagagacggcatcatccccacctag

SEQ ID NO: 95370 - DNA, 1344 bp, synthetic construct
  misc_feature 1..1344: note = Description of Artificial Sequence: Synthetic coding sequence
  source 1..1344: mol_type = other DNA
atgggcctgagcttcttcagcaagcacctgcccatccaggagggccagccctgggccctgaagacccccgccgacatcatcagcaccgtggagttcaaccacaccggcgagctgctggccaccggcgacaagggcggcagagtggtgatcttccagagagagcccgagagcaagaacgccccccacagccagggcgagtacgacgtgtacagcaccttccagagccacgagcccgagttcgactacctgaagagcctggagatcgaggagaagatcaacaagatcaagtggctgccccagcagaacgccgcccacagcctgctgagcaccaacgacaagaccatcaagctgtggaagatcaccgagagagacaagagacccgagggctacaacctgaaggacgaggagggcaagctgaaggacctgagcaccgtgaccagcctgcaggtgcccgtgctgaagcccatggacctgatggtggaggtgagccccagaagaatcttcgccaacggccacacctaccacatcaacagcatcagcgtgaacagcgactgcgagacctacatgagcgccgacgacctgagaatcaacctgtggcacctggccatcaccgacagaagcttcaacatcgtggacatcaagcccgccaacatggaggacctgaccgaggtgatcaccgccagcgagttccacccccaccactgcaacctgttcgtgtacagcagcagcaagggcagcctgagactgtgcgacatgagagccgccgccctgtgcgacaagcacagcaagctgttcgaggagcccgaggaccccagcaacagaagcttcttcagcgagatcatcagcagcgtgagcgacgtgaagttcagccacagcggcagatacatgctgaccagagactacctgaccgtgaaggtgtgggacctgaacatggaggccagacccatcgagacctaccaggtgcacgactacctgagaagcaagctgtgcagcctgtacgagaacgactgcatcttcgacaagttcgagtgcgcctggaacggcagcgacagcgtgatcatgaccggcgcctacaacaacttcttcagaatgttcgacagaaacaccaagagagacgtgaccctggaggccagcagagagagcagcaagcccagagccgtgctgaagcccagaagagtgtgcgtgggcggcaagagaagaagagacgacatcagcgtggacagcctggacttcaccaagaagatcctgcacaccgcctggcaccccgccgagaacatcatcgccatcgccgccaccaacaacctgtacatcttccaggacaaggtgaacagcgacatgcactag

SEQ ID NO: 95371 - DNA, 1344 bp, synthetic construct
  misc_feature 1..1344: note = Description of Artificial Sequence: Synthetic coding sequence
  source 1..1344: mol_type = other DNA
atgggcgaggacaccgacaccagaaagatcaaccacagcttcctgagagaccacagctacgtgaccgaggccgacatcatcagcaccgtggagttcaaccacaccggcgagctgctggccaccggcgacaagggcggcagagtggtgatcttccagagagagcccgagagcaagaacgccccccacagccagggcgagtacgacgtgtacagcaccttccagagccacgagcccgagttcgactacctgaagagcctggagatcgaggagaagatcaacaagatcaagtggctgccccagcagaacgccgcccacagcctgctgagcaccaacgacaagaccatcaagctgtggaagatcaccgagagagacaagagacccgagggctacaacctgaaggacgaggagggcaagctgaaggacctgagcaccgtgaccagcctgcaggtgcccgtgctgaagcccatggacctgatggtggaggtgagccccagaagaatcttcgccaacggccacacctaccacatcaacagcatcagcgtgaacagcgactgcgagacctacatgagcgccgacgacctgagaatcaacctgtggcacctggccatcaccgacagaagcttcaacatcgtggacatcaagcccgccaacatggaggacctgaccgaggtgatcaccgccagcgagttccacccccaccactgcaacctgttcgtgtacagcagcagcaagggcagcctgagactgtgcgacatgagagccgccgccctgtgcgacaagcacagcaagctgttcgaggagcccgaggaccccagcaacagaagcttcttcagcgagatcatcagcagcgtgagcgacgtgaagttcagccacagcggcagatacatgctgaccagagactacctgaccgtgaaggtgtgggacctgaacatggaggccagacccatcgagacctaccaggtgcacgactacctgagaagcaagctgtgcagcctgtacgagaacgactgcatcttcgacaagttcgagtgcgcctggaacggcagcgacagcgtgatcatgaccggcgcctacaacaacttcttcagaatgttcgacagaaacaccaagagagacgtgaccctggaggccagcagagagagcagcaagcccagagccgtgctgaagcccagaagagtgtgcgtgggcggcaagagaagaagagacgacatcagcgtggacagcctggacttcaccaagaagatcctgcacaccgcctggcaccccgccgagaacatcatcgccatcgccgccaccaacaacctgtacatcttccaggacaaggtgaacagcgacatgcactag

SEQ ID NO: 95372 - DNA, 1323 bp, synthetic construct
  misc_feature 1..1323: note = Description of Artificial Sequence: Synthetic coding sequence
  source 1..1323: mol_type = other DNA
atgagagaggccgacaccctgagacccccccagctgatggaggtgagcgccgacatcatcagcaccgtggagttcaaccacaccggcgagctgctggccaccggcgacaagggcggcagagtggtgatcttccagagagagcccgagagcaagaacgccccccacagccagggcgagtacgacgtgtacagcaccttccagagccacgagcccgagttcgactacctgaagagcctggagatcgaggagaagatcaacaagatcaagtggctgccccagcagaacgccgcccacagcctgctgagcaccaacgacaagaccatcaagctgtggaagatcaccgagagagacaagagacccgagggctacaacctgaaggacgaggagggcaagctgaaggacctgagcaccgtgaccagcctgcaggtgcccgtgctgaagcccatggacctgatggtggaggtgagccccagaagaatcttcgccaacggccacacctaccacatcaacagcatcagcgtgaacagcgactgcgagacctacatgagcgccgacgacctgagaatcaacctgtggcacctggccatcaccgacagaagcttcaacatcgtggacatcaagcccgccaacatggaggacctgaccgaggtgatcaccgccagcgagttccacccccaccactgcaacctgttcgtgtacagcagcagcaagggcagcctgagactgtgcgacatgagagccgccgccctgtgcgacaagcacagcaagctgttcgaggagcccgaggaccccagcaacagaagcttcttcagcgagatcatcagcagcgtgagcgacgtgaagttcagccacagcggcagatacatgctgaccagagactacctgaccgtgaaggtgtgggacctgaacatggaggccagacccatcgagacctaccaggtgcacgactacctgagaagcaagctgtgcagcctgtacgagaacgactgcatcttcgacaagttcgagtgcgcctggaacggcagcgacagcgtgatcatgaccggcgcctacaacaacttcttcagaatgttcgacagaaacaccaagagagacgtgaccctggaggccagcagagagagcagcaagcccagagccgtgctgaagcccagaagagtgtgcgtgggcggcaagagaagaagagacgacatcagcgtggacagcctggacttcaccaagaagatcctgcacaccgcctggcaccccgccgagaacatcatcgccatcgccgccaccaacaacctgtacatcttccaggacaaggtgaacagcgacatgcactag

SEQ ID NO: 95373 - DNA, 1323 bp, synthetic construct; identical to SEQ ID NO: 95372
  misc_feature 1..1323: note = Description of Artificial Sequence: Synthetic coding sequence
  source 1..1323: mol_type = other DNA

SEQ ID NO: 95374 - DNA, 1293 bp, synthetic construct
  misc_feature 1..1293: note = Description of Artificial Sequence: Synthetic coding sequence
  source 1..1293: mol_type = other DNA
atgggcaagagagacaccgccgacatcatcagcaccgtggagttcaaccacaccggcgagctgctggccaccggcgacaagggcggcagagtggtgatcttccagagagagcccgagagcaagaacgccccccacagccagggcgagtacgacgtgtacagcaccttccagagccacgagcccgagttcgactacctgaagagcctggagatcgaggagaagatcaacaagatcaagtggctgccccagcagaacgccgcccacagcctgctgagcaccaacgacaagaccatcaagctgtggaagatcaccgagagagacaagagacccgagggctacaacctgaaggacgaggagggcaagctgaaggacctgagcaccgtgaccagcctgcaggtgcccgtgctgaagcccatggacctgatggtggaggtgagccccagaagaatcttcgccaacggccacacctaccacatcaacagcatcagcgtgaacagcgactgcgagacctacatgagcgccgacgacctgagaatcaacctgtggcacctggccatcaccgacagaagcttcaacatcgtggacatcaagcccgccaacatggaggacctgaccgaggtgatcaccgccagcgagttccacccccaccactgcaacctgttcgtgtacagcagcagcaagggcagcctgagactgtgcgacatgagagccgccgccctgtgcgacaagcacagcaagctgttcgaggagcccgaggaccccagcaacagaagcttcttcagcgagatcatcagcagcgtgagcgacgtgaagttcagccacagcggcagatacatgctgaccagagactacctgaccgtgaaggtgtgggacctgaacatggaggccagacccatcgagacctaccaggtgcacgactacctgagaagcaagctgtgcagcctgtacgagaacgactgcatcttcgacaagttcgagtgcgcctggaacggcagcgacagcgtgatcatgaccggcgcctacaacaacttcttcagaatgttcgacagaaacaccaagagagacgtgaccctggaggccagcagagagagcagcaagcccagagccgtgctgaagcccagaagagtgtgcgtgggcggcaagagaagaagagacgacatcagcgtggacagcctggacttcaccaagaagatcctgcacaccgcctggcaccccgccgagaacatcatcgccatcgccgccaccaacaacctgtacatcttccaggacaaggtgaacagcgacatgcactag

SEQ ID NO: 95375 - DNA, 1623 bp, synthetic construct
  misc_feature 1..1623: note = Description of Artificial Sequence: Synthetic coding sequence
  source 1..1623: mol_type = other DNA
atgcccaacaagaacaagaaggagaaggagagccccaaggccggcaagagcggcaagagcagcaaggagggccaggacaccgtggagagcgagcagatcagcgtgagaaagaacagcctggtggccgtgcccagcaccgtgagcgccaagatcaaggtgcccgtgagccagcccatcgtgaagaaggacaagagacagaacagcagcagattcagcgccagcaacaacagagagctgcagaagctgcccagcctgaaggacgtgccccccgccgaccaggagaagctgttcatccagaagctgagacagtgctgcgtgctgttcgacttcgtgagcgaccccctgagcgacctgaagtggaaggaggtgaagagagccgccctgagcgagatggtggagtacatcacccacaacagaaacgtgatcaccgagcccatctaccccgaggtggtgcacatgttcgccgtgaacatgttcagaaccctgccccccagcagcaaccccaccggcgccgagttcgaccccgaggaggacgagcccaccctggaggccgcctggccccacctgcagctggtgtacgagttcttcctgagattcctggagagccccgacttccagcccaacatcgccaagaagtacatcgaccagaagttcgtgctgcagctgctggagctgttcgacagcgaggaccccagagagagagacttcctgaagaccaccctgcacagaatctacggcaagttcctgggcctgagagcctacatcagaaagcagatcaacaacatcttctacagattcatctacgagaccgagcaccacaacggcatcgccgagctgctggagatcctgggcagcatcatcaacggcttcgccctgcccctgaaggaggagcacaagatcttcctgctgaaggtgctgctgcccctgcacaaggtgaagagcctgagcgtgtaccacccccagctggcctactgcgtggtgcagttcctggagaaggacagcaccctgaccgagcccgtggtgatggccctgctgaagtactggcccaagacccacagccccaaggaggtgatgttcctgaacgagctggaggagatcctggacgtgatcgagcccagcgagttcgtgaagatcatggagcccctgttcagacagctggccaagtgcgtgagcagcccccacttccaggtggccgagagagccctgtactactggaacaacgagtacatcatgagcctgatcagcgacaacgccgccaagatcctgcccatcatgttccccagcctgtacagaaacagcaagacccactggaacaagaccatccacggcctgatctacaacgccctgaagctgttcatggagatgaaccagaagctgttcgacgactgcacccagcagttcaaggccgagaagctgaaggagaagctgaagatgaaggagagagaggaggcctgggtgaagatcgagaacctggccaaggccaacccccaggcccagaaggaccccaagaaggacagacccctggccagaagaaagagcgagctgccccaggacccccacaccaagaaggccctggaggcccactgcagagccgacgagctggccagccaggacggcagatag

SEQ ID NO: 95376 - DNA, 1575 bp, synthetic construct
  misc_feature 1..1575: note = Description of Artificial Sequence: Synthetic coding sequence
  source 1..1575: mol_type = other DNA
atgctgacctgcaacaaggccggcagcagaatggtggtggacgccgccaacagcaacggccccttccagcccgtggtgctgctgcacatcagagacgtgccccccgccgaccaggagaagctgttcatccagaagctgagacagtgctgcgtgctgttcgacttcgtgagcgaccccctgagcgacctgaagtggaaggaggtgaagagagccgccctgagcgagatggtggagtacatcacccacaacagaaacgtgatcaccgagcccatctaccccgaggtggtgcacatgttcgccgtgaacatgttcagaaccctgccccccagcagcaaccccaccggcgccgagttcgaccccgaggaggacgagcccaccctggaggccgcctggccccacctgcagctggtgtacgagttcttcctgagattcctggagagccccgacttccagcccaacatcgccaagaagtacatcgaccagaagttcgtgctgcagctgctggagctgttcgacagcgaggaccccagagagagagacttcctgaagaccaccctgcacagaatctacggcaagttcctgggcctgagagcctacatcagaaagcagatcaacaacatcttctacagattcatctacgagaccgagcaccacaacggcatcgccgagctgctggagatcctgggcagcatcatcaacggcttcgccctgcccctgaaggaggagcacaagatcttcctgctgaaggtgctgctgcccctgcacaaggtgaagagcctgagcgtgtaccacccccagctggcctactgcgtggtgcagttcctggagaaggacagcaccctgaccgagcccgtggtgatggccctgctgaagtactggcccaagacccacagccccaaggaggtgatgttcctgaacgagctggaggagatcctggacgtgatcgagcccagcgagttcgtgaagatcatggagcccctgttcagacagctggccaagtgcgtgagcagcccccacttccaggtggccgagagagccctgtactactggaacaacgagtacatcatgagcctgatcagcgacaacgccgccaagatcctgcccatcatgttccccagcctgtacagaaacagcaagacccactggaacaagaccatccacggcctgatctacaacgccctgaagctgttcatggagatgaaccagaagctgttcgacgactgcacccagcagttcaaggccgagaagctgaaggagaagctgaagatgaaggagagagaggaggcctgggtgaagatcgagaacctggccaaggccaacccccagtacaccgtgtacagccaggccagcaccatgagcatccccgtggccatggagaccgacggccccctgttcgaggacgtgcagatgctgagaaagaccgtgaaggacgaggcccaccaggcccagaaggaccccaagaaggacagacccctggccagaagaaagagcgagctgccccaggacccccacaccaagaaggccctggaggcccactgcagagccgacgagctggccagccaggacggcagatag

SEQ ID NO: 95377 - DNA, 783 bp, synthetic construct
  misc_feature 1..783: note = Description of Artificial Sequence: Synthetic coding sequence
  source 1..783: mol_type = other DNA
atgttcagaaccctgccccccagcagcaaccccaccggcgccgagttcgaccccgaggaggacgagcccaccctggaggccgcctggccccacctgcagctggtgtacgagttcttcctgagattcctggagagccccgacttccagcccaacatcgccaagaagtacatcgaccagaagttcgtgctgcagctgctggagctgttcgacagcgaggaccccagagagagagacttcctgaagaccaccctgcacagaatctacggcaagttcctgggcctgagagcctacatcagaaagcagatcaacaacatcttctacagattcatctacgagaccgagcaccacaacggcatcgccgagctgctggagatcctgggcagcatcatcaacggcttcgccctgcccctgaaggaggagcacaagatcttcctgctgaaggtgctgctgcccctgcacaaggtgaagagcctgagcgtgtaccacccccagctggcctactgcgtggtgcagttcctggagaaggacagcaccctgaccgagcccgtggtgatggccctgctgaagtactggcccaagacccacagccccaaggaggtgatgttcctgaacgagctggaggagatcctggacgtgatcgagcccagcgagttcgtgaagatcatggagcccctgttcagacagctggccaagtgcgtgagcagcccccacttccaggacaacacctggctggacatccagagacccgaggccctgcacggcgacgagcccaaggccatctag

SEQ ID NO: 95378 - DNA, 1458 bp, synthetic construct
  misc_feature 1..1458: note = Description of Artificial Sequence: Synthetic coding sequence
  source 1..1458: mol_type = other DNA
atgctgacctgcaacaaggccggcagcagaatggtggtggacgccgccaacagcaacggccccttccagcccgtggtgctgctgcacatcagagacgtgccccccgccgaccaggagaagctgttcatccagaagctgagacagtgctgcgtgctgttcgacttcgtgagcgaccccctgagcgacctgaagtggaaggaggtgaagagagccgccctgagcgagatggtggagtacatcacccacaacagaaacgtgatcaccgagcccatctaccccgaggtggtgcacatgttcgccgtgaacatgttcagaaccctgccccccagcagcaaccccaccggcgccgagttcgaccccgaggaggacgagcccaccctggaggccgcctggccccacctgcagctggtgtacgagttcttcctgagattcctggagagccccgacttccagcccaacatcgccaagaagtacatcgaccagaagttcgtgctgcagctgctggagctgttcgacagcgaggaccccagagagagagacttcctgaagaccaccctgcacagaatctacggcaagttcctgggcctgagagcctacatcagaaagcagatcaacaacatcttctacagattcatctacgagaccgagcaccacaacggcatcgccgagctgctggagatcctgggcagcatcatcaacggcttcgccctgcccctgaaggaggagcacaagatcttcctgctgaaggtgctgctgcccctgcacaaggtgaagagcctgagcgtgtaccacccccagctggcctactgcgtggtgcagttcctggagaaggacagcaccctgaccgagcccgtggtgatggccctgctgaagtactggcccaagacccacagccccaaggaggtgatgttcctgaacgagctggaggagatcctggacgtgatcgagcccagcgagttcgtgaagatcatggagcccctgttcagacagctggccaagtgcgtgagcagcccccacttccaggtggccgagagagccctgtactactggaacaacgagtacatcatgagcctgatcagcgacaacgccgccaagatcctgcccatcatgttccccagcctgtacagaaacagcaagacccactggaacaagaccatccacggcctgatctacaacgccctgaagctgttcatggagatgaaccagaagctgttcgacgactgcacccagcagttcaaggccgagaagctgaaggagaagctgaagatgaaggagagagaggaggcctgggtgaagatcgagaacctggccaaggccaacccccaggcccagaaggaccccaagaaggacagacccctggccagaagaaagagcgagctgccccaggacccccacaccaagaaggccctggaggcccactgcagagccgacgagctggccagccaggacggcagatag

SEQ ID NO: 95379 - DNA, 1668 bp, synthetic construct
  misc_feature 1..1668: note = Description of Artificial Sequence: Synthetic coding sequence
  source 1..1668: mol_type = other DNA
atgcccaacaagaacaagaaggagaaggagagccccaaggccggcaagagcggcaagagcagcaaggagggccaggacaccgtggagagcgagggcaccagccccgaggagcccagcagccccaaggtgcccccccccctgctgcccgagctgctggtgctgatcttcggcggcctgcagggcagagacgtgccccccgccgaccaggagaagctgttcatccagaagctgagacagtgctgcgtgctgttcgacttcgtgagcgaccccctgagcgacctgaagtggaaggaggtgaagagagccgccctgagcgagatggtggagtacatcacccacaacagaaacgtgatcaccgagcccatctaccccgaggtggtgcacatgttcgccgtgaacatgttcagaaccctgccccccagcagcaaccccaccggcgccgagttcgaccccgaggaggacgagcccaccctggaggccgcctggccccacctgcagctggtgtacgagttcttcctgagattcctggagagccccgacttccagcccaacatcgccaagaagtacatcgaccagaagttcgtgctgcagctgctggagctgttcgacagcgaggaccccagagagagagacttcctgaagaccaccctgcacagaatctacggcaagttcctgggcctgagagcctacatcagaaagcagatcaacaacatcttctacagattcatctacgagaccgagcaccacaacggcatcgccgagctgctggagatcctgggcagcatcatcaacggcttcgccctgcccctgaaggaggagcacaagatcttcctgctgaaggtgctgctgcccctgcacaaggtgaagagcctgagcgtgtaccacccccagctggcctactgcgtggtgcagttcctggagaaggacagcaccctgaccgagcccgtggtgatggccctgctgaagtactggcccaagacccacagccccaaggaggtgatgttcctgaacgagctggaggagatcctggacgtgatcgagcccagcgagttcgtgaagatcatggagcccctgttcagacagctggccaagtgcgtgagcagcccccacttccaggtggccgagagagccctgtactactggaacaacgagtacatcatgagcctgatcagcgacaacgccgccaagatcctgcccatcatgttccccagcctgtacagaaacagcaagacccactggaacaagaccatccacggcctgatctacaacgccctgaagctgttcatggagatgaaccagaagctgttcgacgactgcacccagcagttcaaggccgagaagctgaaggagaagctgaagatgaaggagagagaggaggcctgggtgaagatcgagaacctggccaaggccaacccccagtacaccgtgtacagccaggccagcaccatgagcatccccgtggccatggagaccgacggccccctgttcgaggacgtgcagatgctgagaaagaccgtgaaggacgaggcccaccaggcccagaaggaccccaagaaggacagacccctggccagaagaaagagcgagctgccccaggacccccacaccaagaaggccctggaggcccactgcagagccgacgagctggccagccaggacggcagatag

SEQ ID NO: 95380 - DNA, 1350 bp, synthetic construct
  misc_feature 1..1350: note = Description of Artificial Sequence: Synthetic coding sequence
  source 1..1350: mol_type = other DNA
atgctgacctgcaacaaggccggcagcagaatggtggtggacgccgccaacagcaacggccccttccagcccgtggtgctgctgcacatcagagacgtgccccccgccgaccaggagaagctgttcatccagaagctgagacagtgctgcgtgctgttcgacttcgtgagcgaccccctgagcgacctgaagtggaaggaggtgaagagagccgccctgagcgagatggtggagtacatcacccacaacagaaacgtgatcaccgagcccatctaccccgaggtggtgcacatgttcgccgtgaacatgttcagaaccctgccccccagcagcaaccccaccggcgccgagttcgaccccgaggaggacgagcccaccctggaggccgcctggccccacctgcagctggtgtacgagttcttcctgagattcctggagagccccgacttccagcccaacatcgccaagaagtacatcgaccagaagttcgtgctgcagctgctggagctgttcgacagcgaggaccccagagagagagacttcctgaagaccaccctgcacagaatctacggcaagttcctgggcctgagagcctacatcagaaagcagatcaacaacatcttctacagattcatctacgagaccgagcaccacaacggcatcgccgagctgctggagatcctgggcagcatcatcaacggcttcgccctgcccctgaaggaggagcacaagatcttcctgctgaaggtgctgctgcccctgcacaaggtgaagagcctgagcgtgtaccacccccagctggcctactgcgtggtgcagttcctggagaaggacagcaccctgaccgagcccgtggtgatggccctgctgaagtactggcccaagacccacagccccaaggaggtgatgttcctgaacgagctggaggagatcctggacgtgatcgagcccagcgagttcgtgaagatcatggagcccctgttcagacagctggccaagtgcgtgagcagcccccacttccaggtggccgagagagccctgtactactggaacaacgagtacatcatgagcctgatcagcgacaacgccgccaagatcctgcccatcatgttccccagcctgtacagaaacagcaagacccactggaacaagaccatccacggcctgatctacaacgccctgaagctgttcatggagatgaaccagaagctgttcgacgactgcacccagcagttcaaggccgagaagctgaaggagaagctgaagatgaaggagagagaggaggcctgggtgaagatcgagaacctggccaaggccaacccccaggtgctgaagaagagaatcacctag

SEQ ID NO: 95381 - DNA, 1155 bp, synthetic construct
  misc_feature 1..1155: note = Description of Artificial Sequence: Synthetic coding sequence
  source 1..1155: mol_type = other DNA
atgctgacctgcaacaaggccggcagcagaatggtggtggacgccgccaacagcaacggccccttccagcccgtggtgctgctgcacatcagagacgtgccccccgccgaccaggagaagctgttcatccagaagctgagacagtgctgcgtgctgttcgacttcgtgagcgaccccctgagcgacctgaagtggaaggaggtgaagagagccgccctgagcgagatggtggagtacatcacccacaacagaaacgtgatcaccgagcccatctaccccgaggtggtgcacatgttcgccgtgaacatgttcagaaccctgccccccagcagcaaccccaccggcgccgagttcgaccccgaggaggacgagcccaccctggaggccgcctggccccacctgcagctggtgtacgagttcttcctgagattcctggagagccccgacttccagcccaacatcgccaagaagtacatcgaccagaagttcgtgctgcagctgctggagctgttcgacagcgaggaccccagagagagagacttcctgaagaccaccctgcacagaatctacggcaagttcctgggcctgagagcctacatcagaaagcagatcaacaacatcttctacagattcatctacgagaccgagcaccacaacggcatcgccgagctgctggagatcctgggcagcatcatcaacggcttcgccctgcccctgaaggaggagcacaagatcttcctgctgaaggtgctgctgcccctgcacaaggtgaagagcctgagcgtgtaccacccccagctggcctactgcgtggtgcagttcctggagaaggacagcaccctgaccgagcccgtggtgatggccctgctgaagtactggcccaagacccacagccccaaggaggtgatgttcctgaacgagctggaggagatcctggacgtgatcgagcccagcgagttcgtgaagatcatggagcccctgttcagacagctggccaagtgcgtgagcagcccccacttccaggtggccgagagagccctgtactactggaacaacgagtacatcatgagcctgatcagcgacaacgccgccaagatcctgcccatcatgttccccagcctgtacagaaacagcaagacccactggaacaagtag

SEQ ID NO: 95382 - DNA, 1662 bp, synthetic construct
  misc_feature 1..1662: note = Description of Artificial Sequence: Synthetic coding sequence
  source 1..1662: mol_type = other DNA
aacaagaacaagaaggagaaggagagccccaaggccggcaagagcggcaagagcagcaaggagggccaggacaccgtggagagcgagggcaccagccccgaggagcccagcagccccaaggtgcccccccccctgctgcccgagctgctggtgctgatcttcggcggcctgcagggcagagacgtgccccccgccgaccaggagaagctgttcatccagaagctgagacagtgctgcgtgctgttcgacttcgtgagcgaccccctgagcgacctgaagtggaaggaggtgaagagagccgccctgagcgagatggtggagtacatcacccacaacagaaacgtgatcaccgagcccatctaccccgaggtggtgcacatgttcgccgtgaacatgttcagaaccctgccccccagcagcaaccccaccggcgccgagttcgaccccgaggaggacgagcccaccctggaggccgcctggccccacctgcagctggtgtacgagttcttcctgagattcctggagagccccgacttccagcccaacatcgccaagaagtacatcgaccagaagttcgtgctgcagctgctggagctgttcgacagcgaggaccccagagagagagacttcctgaagaccaccctgcacagaatctacggcaagttcctgggcctgagagcctacatcagaaagcagatcaacaacatcttctacagattcatctacgagaccgagcaccacaacggcatcgccgagctgctggagatcctgggcagcatcatcaacggcttcgccctgcccctgaaggaggagcacaagatcttcctgctgaaggtgctgctgcccctgcacaaggtgaagagcctgagcgtgtaccacccccagctggcctactgcgtggtgcagttcctggagaaggacagcaccctgaccgagcccgtggtgatggccctgctgaagtactggcccaagacccacagccccaaggaggtgatgttcctgaacgagctggaggagatcctggacgtgatcgagcccagcgagttcgtgaagatcatggagcccctgttcagacagctggccaagtgcgtgagcagcccccacttccaggtggccgagagagccctgtactactggaacaacgagtacatcatgagcctgatcagcgacaacgccgccaagatcctgcccatcatgttccccagcctgtacagaaacagcaagacccactggaacaagaccatccacggcctgatctacaacgccctgaagctgttcatggagatgaaccagaagctgttcgacgactgcacccagcagttcaaggccgagaagctgaaggagaagctgaagatgaaggagagagaggaggcctgggtgaagatcgagaacctggccaaggccaacccccagtacaccgtgtacagccaggccagcaccatgagcatccccgtggccatggagaccgacggccccctgttcgaggacgtgcagatgctgagaaagaccgtgaaggacgaggcccaccaggcccagaaggaccccaagaaggacagacccctggccagaagaaagagcgagctgccccaggacccccacaccaagaaggccctggaggcccactgcagagccgacgagctggccagccaggacggcagatag

SEQ ID NO: 95383 - DNA, 1077 bp, synthetic construct
  misc_feature 1..1077: note = Description of Artificial Sequence: Synthetic coding sequence
  source 1..1077: mol_type = other DNA
atggccgagggcgagagacagcccccccccgacagcagcgaggaggccccccccgccacccagaacttcatcatccccaagaaggagatccacaccgtgcccgacatgggcaagtggaagagaagccaggcctacgccgactacatcggcttcatcctgaccctgaacgagggcgtgaagggcaagaagctgaccttcgagtacagagtgagcgagatgtggaacgaggtgcacgaggagaaggagcaggccgccaagcagagcgtgagctgcgacgagtgcatccccctgcccagagccggccactgcgcccccagcgaggccatcgagaagctggtggccctgctgaacaccctggacagatggatcgacgagaccccccccgtggaccagcccagcagattcggcaacaaggcctacagaacctggtacgccaagctggacgaggaggccgagaacctggtggccaccgtggtgcccacccacctggccgccgccgtgcccgaggtggccgtgtacctgaaggagagcgtgggcaacagcaccagaatcgactacggcaccggccacgaggccgccttcgccgccttcctgtgctgcctgtgcaagatcggcgtgctgagagtggacgaccagatcgccatcgtgttcaaggtgttcaacagatacctggaggtgatgagaaagctgcagaagacctacagaatggagcccgccggcagccagggcgtgtggggcctggacgacttccagttcctgcccttcatctggggcagcagccagctgatcgaccacccctacctggagcccagacacttcgtggacgagaaggccgtgaacgagaaccacaaggactacatgttcctggagtgcatcctgttcatcaccgagatgaagaccggccccttcgccgagcacagcaaccagctgtggaacatcagcgccgtgcccagctggagcaaggtgaaccagggcctgatcagaatgtacaaggccgagtgcctggagaagttccccgtgatccagcacttcaagttcggcagcctgctgcccatccaccccgtgaccagcggctag

SEQ ID NO: 95384 - DNA, 990 bp, synthetic construct
  misc_feature 1..990: note = Description of Artificial Sequence: Synthetic coding sequence
  source 1..990: mol_type = other DNA
atggccgagggcgagagacagcccccccccgacagcagcgaggaggccccccccgccacccagaacttcatcatccccaagaaggagatccacaccgtgcccgacatgggcaagtggaagagaagccaggtgcccttcggcaccgtggcctacgccgactacatcggcttcatcctgaccctgaacgagggcgtgaagggcaagaagctgaccttcgagtacagagtgagcgaggccatcgagaagctggtggccctgctgaacaccctggacagatggatcgacgagaccccccccgtggaccagcccagcagattcggcaacaaggcctacagaacctggtacgccaagctggacgaggaggccgagaacctggtggccaccgtggtgcccacccacctggccgccgccgtgcccgaggtggccgtgtacctgaaggagagcgtgggcaacagcaccagaatcgactacggcaccggccacgaggccgccttcgccgccttcctgtgctgcctgtgcaagatcggcgtgctgagagtggacgaccagatcgccatcgtgttcaaggtgttcaacagatacctggaggtgatgagaaagctgcagaagacctacagaatggagcccgccggcagccagggcgtgtggggcctggacgacttccagttcctgcccttcatctggggcagcagccagctgatcgaccacccctacctggagcccagacacttcgtggacgagaaggccgtgaacgagaaccacaaggactacatgttcctggagtgcatcctgttcatcaccgagatgaagaccggccccttcgccgagcacagcaaccagctgtggaacatcagcgccgtgcccagctggagcaaggtgaaccagggcctgatcagaatgtacaaggccgagtgcctggagaagttccccgtgatccagcacttcaagttcggcagcctgctgcccatccaccccgtgaccagcggctag

SEQ ID NO: 95385 - DNA, 846 bp, synthetic construct
  misc_feature 1..846: note = Description of Artificial Sequence: Synthetic coding sequence
  source 1..846: mol_type = other DNA
atggccgagggcgagagacagcccccccccgacagcagcgaggaggccccccccgccacccagaacttcatcatccccaagaaggagatccacaccgtgcccgacatgggcaagtggaagagaagccaggcctacgccgactacatcggcttcatcctgaccctgaacgagggcgtgaagggcaagaagctgaccttcgagtacagagtgagcgaggaggccgagaacctggtggccaccgtggtgcccacccacctggccgccgccgtgcccgaggtggccgtgtacctgaaggagagcgtgggcaacagcaccagaatcgactacggcaccggccacgaggccgccttcgccgccttcctgtgctgcctgtgcaagatcggcgtgctgagagtggacgaccagatcgccatcgtgttcaaggtgttcaacagatacctggaggtgatgagaaagctgcagaagacctacagaatggagcccgccggcagccagggcgtgtggggcctggacgacttccagttcctgcccttcatctggggcagcagccagctgatcgaccacccctacctggagcccagacacttcgtggacgagaaggccgtgaacgagaaccacaaggactacatgttcctggagtgcatcctgttcatcaccgagatgaagaccggccccttcgccgagcacagcaaccagctgtggaacatcagcgccgtgcccagctggagcaaggtgaaccagggcctgatcagaatgtacaaggccgagtgcctggagaagttccccgtgatccagcacttcaagttcggcagcctgctgcccatccaccccgtgaccagcggctag

SEQ ID NO: 95386 - DNA, 885 bp, synthetic construct
  misc_feature 1..885: note = Description of Artificial Sequence: Synthetic coding sequence
  source 1..885: mol_type = other DNA
atggccgagggcgagagacagcccccccccgacagcagcgaggaggccccccccgccacccagaacttcatcatccccaagaaggagatccacaccgtgcccgacatgggcaagtggaagagaagccaggccatcgagaagctggtggccctgctgaacaccctggacagatggatcgacgagaccccccccgtggaccagcccagcagattcggcaacaaggcctacagaacctggtacgccaagctggacgaggaggccgagaacctggtggccaccgtggtgcccacccacctggccgccgccgtgcccgaggtggccgtgtacctgaaggagagcgtgggcaacagcaccagaatcgactacggcaccggccacgaggccgccttcgccgccttcctgtgctgcctgtgcaagatcggcgtgctgagagtggacgaccagatcgccatcgtgttcaaggtgttcaacagatacctggaggtgatgagaaagctgcagaagacctacagaatggagcccgccggcagccagggcgtgtggggcctggacgacttccagttcctgcccttcatctggggcagcagccagctgatcgaccacccctacctggagcccagacacttcgtggacgagaaggccgtgaacgagaaccacaaggactacatgttcctggagtgcatcctgttcatcaccgagatgaagaccggccccttcgccgagcacagcaaccagctgtggaacatcagcgccgtgcccagctggagcaaggtgaaccagggcctgatcagaatgtacaaggccgagtgcctggagaagttccccgtgatccagcacttcaagttcggcagcctgctgcccatccaccccgtgaccagcggctag

SEQ ID NO: 95387 - DNA, 972 bp, synthetic construct
  misc_feature 1..972: note = Description of Artificial Sequence: Synthetic coding sequence
  source 1..972: mol_type = other DNA
atggccgagggcgagagacagcccccccccgacagcagcgaggaggccccccccgccacccagaacttcatcatccccaagaaggagatccacaccgtgcccgacatgggcaagtggaagagaagccaggcctacgccgactacatcggcttcatcctgaccctgaacgagggcgtgaagggcaagaagctgaccttcgagtacagagtgagcgaggccatcgagaagctggtggccctgctgaacaccctggacagatggatcgacgagaccccccccgtggaccagcccagcagattcggcaacaaggcctacagaacctggtacgccaagctggacgaggaggccgagaacctggtggccaccgtggtgcccacccacctggccgccgccgtgcccgaggtggccgtgtacctgaaggagagcgtgggcaacagcaccagaatcgactacggcaccggccacgaggccgccttcgccgccttcctgtgctgcctgtgcaagatcggcgtgctgagagtggacgaccagatcgccatcgtgttcaaggtgttcaacagatacctggaggtgatgagaaagctgcagaagacctacagaatggagcccgccggcagccagggcgtgtggggcctggacgacttccagttcctgcccttcatctggggcagcagccagctgatcgaccacccctacctggagcccagacacttcgtggacgagaaggccgtgaacgagaaccacaaggactacatgttcctggagtgcatcctgttcatcaccgagatgaagaccggccccttcgccgagcacagcaaccagctgtggaacatcagcgccgtgcccagctggagcaaggtgaaccagggcctgatcagaatgtacaaggccgagtgcctggagaagttccccgtgatccagcacttcaagttcggcagcctgctgcccatccaccccgtgaccagcggctag

SEQ ID NO: 95388 - DNA, 972 bp, synthetic construct; identical to SEQ ID NO: 95387
  misc_feature 1..972: note = Description of Artificial Sequence: Synthetic coding sequence
  source 1..972: mol_type = other DNA

SEQ ID NO: 95389 - DNA, 792 bp, synthetic construct
  misc_feature 1..792: note = Description of Artificial Sequence: Synthetic coding sequence
  source 1..792: mol_type = other DNA
atgggcaagtggaagagaagccaggcctacgccgactacatcggcttcatcctgaccctgaacgagggcgtgaagggcaagaagctgaccttcgagtacagagtgagcgaggccatcgagaagctggtggccctgctgaacaccctggacagatggatcgacgagaccccccccgtggaccagcccagcagattcggcaacaaggcctacagaacctggtacgccaagctggacgaggaggccgagaacctggtggccaccgtggtgcccacccacctggccgccgccgtgcccgaggtggccgtgtacctgaaggagagcgtgggcaacagcaccagaatcgactacggcaccggccacgaggccgccttcgccgccttcctgtgctgcctgtgcaagatcggcgtgctgagagtggacgaccagatcgccatcgtgttcaaggtgttcaacagatacctggaggtgatgagaaagctgcagaagacctacagaatggagcccgccggcagccagggcgtgtggggcctggacgacttccagttcctgcccttcatctggggcagcagccagctgatcgaccacccctacctggagcccagacacttcgtggacgagaaggccgtgaacgagaaccacaaggactacatgttcctggagtgcatcctgttcatcaccgagatgaagaccggccccttcgccgagcacagcaaccagctgtggaacatcagcgccgtgcccagctggagcaaggtgaaccagggcctgatcagaatgtacaaggccgagtag

SEQ ID NO: 95390 - DNA, 1125 bp, synthetic construct
  misc_feature 1..1125: note = Description of Artificial Sequence: Synthetic coding sequence
  source 1..1125: mol_type = other DNA
atggccgagggcgagagacagcccccccccgacagcagcgaggaggccccccccgccacccagaacttcatcatccccaagaaggagatccacaccgtgcccgacatgggcaagtggaagagaagccaggcctacgccgactacatcggcttcatcctgaccctgaacgagggcgtgaagggcaagaagctgaccttcgagtacagagtgagcgagatgtggaacgaggtgcacgaggagaaggagcaggccgccaagcagagcgtgagctgcgacgagtgcatccccctgcccagagccggccactgcgcccccagcgaggccatcgagaagctggtggccctgctgaacaccctggacagatggatcgacgagaccccccccgtggaccagcccagcagattcggcaacaaggcctacagaacctggtacgccaagctggacgaggaggccgagaacctggtggccaccgtggtgcccacccacctggccgccgccgtgcccgaggtggccgtgtacctgaaggagagcgtgggcaacagcaccagaatcgactacggcaccggccacgaggccgccttcgccgccttcctgtgctgcctgtgcaagatcggcgtgctgagagtggacgaccagatcgccatcgtgttcaaggtgttcaacagatacctggaggtgatgagaaagctgcagaagacctacagaatggagcccgccggcagccagggcgtgtggggcctggacgacttccagttcctgcccttcatctggggcagcagccagctgatcgaccacccctacctggagcccagacacttcgtggacgagaaggccgtgaacgagaaccacaaggactacatgttcctggagtgcatcctgttcatcaccgagatgaagaccggccccttcgccgagcacagcaaccagctgtggaacatcagcgccgtgcccagctggagcaaggtgaaccagggcctgatcagaatgtacaaggccgaggccagccccagcgacacctggggcctgggcatcagccacctgggccacggccagagcgagaagcaccagcccccccagcccagaaaggccgccgtgcagctgtgccccgacgagctgggcggctag

SEQ ID NO: 95391 - DNA, 456 bp, synthetic construct
  misc_feature 1..456: note = Description of Artificial Sequence: Synthetic coding sequence
  source 1..456: mol_type = other DNA
atgaagaccggccccttcgccgagcacagcaaccagctgtggaacatcagcgccgtgcccagctggagcaaggtgaaccagggcctgatcagaatgtacaaggccgaggtgagcggcggctggcccgtgtgccccagcctgctgccccacctggtgctgggctggggccagagcaagagatgcggcacctggggcagctgcttcctgctgccccactgcttcgccctgaacctgagacccgcccccctgaccctgggcgccagcgagagccccatctggggcatgggcagccagagaagcaccagccaccccagccccgagaagctgcagagcagcagcgtgctgatgagcctggaggccgaggccagaacctgctgcatgggcagcggcggcgacggcggcctgcccagccccctgagcagcggccagagactgctgaaggccagagccgtgtag

SEQ ID NO: 95392 - DNA, 2802 bp, synthetic construct
  misc_feature 1..2802: note = Description of Artificial Sequence: Synthetic coding sequence
  source 1..2802: mol_type = other DNA
atggccgacctgagcctgctgcaggaggacctgcaggaggacgccgacggcagcctggacttcgtgagccaggacgagatgctgacccccctgggcagactggacaagtacgccgccagcgagaacatcttcaacagacagatggtggccagaagcctgctggacaccctgagagaggtgtgcgacgacgagagagactgcatcgccgtgctggagagaatcagcagactggccgacgacagcgagcccaccgtgagagccgagctgatggagcaggtgccccacatcgccctgttctgccaggagaacagacccagcatcccctacgccttcagcaagttcctgctgcccatcgtggtgagatacctggccgaccagaacaaccaggtgagaaagaccagccaggccgccctgctggccctgctggagcaggagctgatcgagagattcgacgtggagaccaaggtgtgccccgtgctgatcgagctgaccgcccccgacagcaacgacgacgtgaagaccgaggccgtggccatcatgtgcaagatggcccccatggtgggcaaggacatcaccgagagactgatcctgcccagattctgcgagatgtgctgcgactgcagaatgttccacgtgagaaaggtgtgcgccgccaacttcggcgacatctgcagcgtggtgggccagcaggccaccgaggagatgctgctgcccagattcttccagctgtgcagcgacaacgtgtggggcgtgagaaaggcctgcgccgagtgcttcatggccgtgagctgcgccacctgccaggagatcagaagaaccaagctgagcgccctgttcatcaacctgatcagcgaccccagcagatgggtgagacaggccgccttccagagcctgggccccttcatcagcaccttcgccaaccccagcagcagcggccagtacttcaaggaggagagcaagagcagcgaggagatgagcgtggagaacaagaacagaaccagagaccaggaggcccccgaggacgtgcaggtgagacccgaggacacccccagcgacctgagcgtgagcaacagcagcgtgatcctggagaacaccatggaggaccacgccgccgaggccagcggcaagcccctgggcgagatcagcgtgcccctggacagcagcctgctgtgcaccctgagcagcgagagccaccaggaggccgccagcaacgagaacgacaagaagcccggcaactacaagagcatgctgagacccgaggtgggcaccaccagccaggacagcgccctgctggaccaggagctgtacaacagcttccacttctggagaacccccctgcccgagatcgacctggacatcgagctggagcagaacagcggcggcaagcccagccccgagggccccgaggaggagagcgagggccccgtgcccagcagccccaacatcaccatggccaccagaaaggagctggaggagatgatcgagaacctggagccccacatcgacgaccccgacgtgaaggcccaggtggaggtgctgagcgccgccctgagagccagcagcctggacgcccacgaggagaccatcagcatcgagaagagaagcgacctgcaggacgagctggacatcaacgagctgcccaactgcaagatcaaccaggaggacagcgtgcccctgatcagcgacgccgtggagaacatggacagcaccctgcactacatccacagcgacagcgacctgagcaacaacagcagcttcagccccgacgaggagagaagaaccaaggtgcaggacgtggtgccccaggccctgctggaccagtacctgagcatgaccgaccccagcagagcccagaccgtggacaccgagatcgccaagcactgcgcctacagcctgcccggcgtggccctgaccctgggcagacagaactggcactgcctgagagagacctacgagaccctggccagcgacatgcagtggaaggtgagaagaaccctggccttcagcatccacgagctggccgtgatcctgggcgaccagctgaccgccgccgacctggtgcccatcttcaacggcttcctgaaggacctggacgaggtgagaatcggcgtgctgaagcacctgcacgacttcctgaagctgctgcacatcgacaagagaagagagtacctgtaccagctgcaggagttcctggtgaccgacaacagcagaaactggagattcagagccgagctggccgagcagctgatcctgctgctggagctgtacagccccagagacgtgtacgactacctgagacccatcgccctgaacctgtgcgccgacaaggtgagcagcgtgagatggatcagctacaagctggtgagcgagatggtgaagaagctgcacgccgccaccccccccaccttcggcgtggacctgatcaacgagctggtggagaacttcggcagatgccccaagtggagcggcagacaggccttcgtgttcgtgtgccagaccgtgatcgaggacgactgcctgcccatggaccagttcgccgtgcacctgatgccccacctgctgaccctggccaacgacagagtgcccaacgtgagagtgctgctggccaagaccctgagacagaccctgctggagaaggactacttcctggccagcgccagctgccaccaggaggccgtggagcagaccatcatggccctgcagatggacagagacagcgacgtgaagtacttcgccagcatccaccccgccagcaccaagatcagcgaggacgccatgagcaccgccagcagcacctactag

SEQ ID NO: 95393 - DNA, 924 bp, synthetic construct
  misc_feature 1..924: note = Description of Artificial Sequence: Synthetic coding sequence
  source 1..924: mol_type = other DNA
atggccgagatcagcgacctggacagacagatcgagcagctgagaagatgcgagctgatcaaggagagcgaggtgaaggccctgtgcgccaaggccagagagatcctggtggaggagagcaacgtgcagagagtggacagccccgtgaccgtgtgcggcgacatccacggccagttctacgacctgaaggagctgttcagagtgggcggcgacgtgcccgagaccaactacctgttcatgggcgacttcgtggacagaggcttctacagcgtggagaccttcctgctgctgctggccctgaaggtgagataccccgacagaatcaccctgatcagaggcaaccacgagagcagacagatcacccaggtgtacggcttctacgacgagtgcctgagaaagtacggcagcgtgaccgtgtggagatactgcaccgagatcttcgactacctgagcctgagcgccatcatcgacggcaagatcttctgcgtgcacggcggcctgagccccagcatccagaccctggaccagatcagaaccatcgacagaaagcaggaggtgccccacgacggccccatgtgcgacctgctgtggagcgaccccgaggacaccaccggctggggcgtgagccccagaggcgccggctacctgttcggcagcgacgtggtggcccagttcaacgccgccaacgacatcgacatgatctgcagagcccaccagctggtgatggagggctacaagtggcacttcaacgagaccgtgctgaccgtgtggagcgcccccaactactgctacagatgcggcaacgtggccgccatcctggagctggacgagcacctgcagaaggacttcatcatcttcgaggccgccccccaggagaccagaggcatccccagcaagaagcccgtggccgactacttcctgtag

SEQ ID NO: 95394 - DNA, 1413 bp, synthetic construct
  misc_feature 1..1413: note = Description of Artificial Sequence: Synthetic coding sequence
  source 1..1413: mol_type = other DNA
atgctgcaggtgagaacctacctgaccgagcccaccgtgagagccgagctgatggagcaggtgccccacatcgccctgttctgccaggagaacagacccagcatcccctacgccttcagcaagttcctgctgcccatcgtggtgagatacctggccgaccagaacaaccaggtgagaaagaccagccaggccgccctgctggccctgctggagcaggagctgatcgagagattcgacgtggagaccaaggtgtgccccgtgctgatcgagctgaccgcccccgacagcaacgacgacgtgaagaccgaggccgtggccatcatgtgcaagatggcccccatggtgggcaaggacatcaccgagagactgatcctgcccagattctgcgagatgtgctgcgactgcagaatgttccacgtgagaaaggtgtgcgccgccaacttcggcgacatctgcagcgtggtgggccagcaggccaccgaggagatgctgctgcccagattcttccagctgtgcagcgacaacgtgtggggcgtgagaaaggcctgcgccgagtgcttcatggccgtgagctgcgccacctgccaggagatcagaagaaccaagctgagcgccctgttcatcaacctgatcagcgaccccagcagatgggtgagacaggccgccttccagagcctgggccccttcatcagcaccttcgccaaccccagcagcagcggccagtacttcaaggaggagagcaagagcagcgaggagatgagcgtggagaacaagaacagaaccagagaccaggaggcccccgaggacgtgcaggtgagacccgaggacacccccagcgacctgagcgtgagcaacagcagcgtgatcctggagaacaccatggaggaccacgccgccgaggccagcggcaagcccctgggcgagatcagcgtgcccctggacagcagcctgctgtgcaccctgagcagcgagagccaccaggaggccgccagcaacgagaacgacaagaagcccggcaactacaagagcatgctgagacccgaggtgggcaccaccagccaggacagcgccctgctggaccaggagctgtacaacagcttccacttctggagaacccccctgcccgagatcgacctggacatcgagctggagcagaacagcggcggcaagcccagccccgagggccccgaggaggagagcgagggccccgtgcccagcagccccaacatcaccatggccaccagaaaggagctggaggagatgatcgagaacctggagccccacatcgacgaccccgacgtgaaggcccaggtggaggtgctgagcgccgccctgagagccagcagcctggacgcccacgaggagaccatcagcatcaagagagaggtgatctgcaagatgaactggatctag

SEQ ID NO: 95395 - DNA, 2853 bp, synthetic construct
  misc_feature 1..2853: note = Description of Artificial Sequence: Synthetic coding sequence
  source 1..2853: mol_type = other DNA
atggccgacctgagcctgctgcaggaggacctgcaggaggacgccgacggcttcggcgtggacgactacagcagcgagagcgacgtgatcatcatccccagcgccctggacttcgtgagccaggacgagatgctgacccccctgggcagactggacaagtacgccgccagcgagaacatcttcaacagacagatggtggccagaagcctgctggacaccctgagagaggtgtgcgacgacgagagagactgcatcgccgtgctggagagaatcagcagactggccgacgacagcgagcccaccgtgagagccgagctgatggagcaggtgccccacatcgccctgttctgccaggagaacagacccagcatcccctacgccttcagcaagttcctgctgcccatcgtggtgagatacctggccgaccagaacaaccaggtgagaaagaccagccaggccgccctgctggccctgctggagcaggagctgatcgagagattcgacgtggagaccaaggtgtgccccgtgctgatcgagctgaccgcccccgacagcaacgacgacgtgaagaccgaggccgtggccatcatgtgcaagatggcccccatggtgggcaaggacatcaccgagagactgatcctgcccagattctgcgagatgtgctgcgactgcagaatgttccacgtgagaaaggtgtgcgccgccaacttcggcgacatctgcagcgtggtgggccagcaggccaccgaggagatgctgctgcccagattcttccagctgtgcagcgacaacgtgtggggcgtgagaaaggcctgcgccgagtgcttcatggccgtgagctgcgccacctgccaggagatcagaagaaccaagctgagcgccctgttcatcaacctgatcagcgaccccagcagatgggtgagacaggccgccttccagagcctgggccccttcatcagcaccttcgccaaccccagcagcagcggccagtacttcaaggaggagagcaagagcagcgaggagatgagcgtggagaacaagaacagaaccagagaccaggaggcccccgaggacgtgcaggtgagacccgaggacacccccagcgacctgagcgtgagcaacagcagcgtgatcctggagaacaccatggaggaccacgccgccgaggccagcggcaagcccctgggcgagatcagcgtgcccctggacagcagcctgctgtgcaccctgagcagcgagagccaccaggaggccgccagcaacgagaacgacaagaagcccggcaactacaagagcatgctgagacccgaggtgggcaccaccagccaggacagcgccctgctggaccaggagctgtacaacagcttccacttctggagaacccccctgcccgagatcgacctggacatcgagctggagcagaacagcggcggcaagcccagccccgagggccccgaggaggagagcgagggccccgtgcccagcagccccaacatcaccatggccaccagaaaggagctggaggagatgatcgagaacctggagccccacatcgacgaccccgacgtgaaggcccaggtggaggtgctgagcgccgccctgagagccagcagcctggacgcccacgaggagaccatcagcatcgagaagagaagcgacctgcaggacgagctggacatcaacgagctgcccaactgcaagatcaaccaggaggacagcgtgcccctgatcagcgacgccgtggagaacatggacagcaccctgcactacatccacagcgacagcgacctgagcaacaacagcagcttcagccccgacgaggagagaagaaccaaggtgcaggacgtggtgccccaggccctgctggaccagtacctgagcatgaccgaccccagcagagcccagaccgtggacaccgagatcgccaagcactgcgcctacagcctgcccggcgtggccctgaccctgggcagacagaactggcactgcctgagagagacctacgagaccctggccagcgacatgcagtggaaggtgagaagaaccctggccttcagcatccacgagctggccgtgatcctgggcgaccagctgaccgccgccgacctggtgcccatcttcaacggcttcctgaaggacctggacgaggtgagaatcggcgtgctgaagcacctgcacgacttcctgaagctgctgcacatcgacaagagaagagagtacctgtaccagctgcaggagttcctggtgaccgacaacagcagaaactggagattcagagccgagctggccgagcagctgatcctgctgctggagctgtacagccccagagacgtgtacgactacctgagacccatcgccctgaacctgtgcgccgacaaggtgagcagcgtgagatggatcagctacaagctggtgagcgagatggtgaagaagctgcacgccgccaccccccccaccttcggcgtggacctgatcaacgagctggtggagaacttcggcagatgccccaagtggagcggcagacaggccttcgtgttcgtgtgccagaccgtgatcgaggacgactgcctgcccatggaccagttcgccgtgcacctgatgccccacctgctgaccctggccaacgacagagtgcccaacgtgagagtgctgctggccaagaccctgagacagaccctgctggagaaggactacttcctggccagcgccagctgccaccaggaggccgtggagcagaccatcatggccctgcagatggacagagacagcgacgtgaagtacttcgccagcatccaccccgccagcaccaagatcagcgaggacgccatgagcaccgccagcagcacctactag

SEQ ID NO: 95396 - DNA, 1086 bp, synthetic construct
  misc_feature 1..1086: note = Description of Artificial Sequence: Synthetic coding sequence
  source 1..1086: mol_type = other DNA
atggacgacttcagaaccagcgcccccgagcccagaggcccccccaaccccaacgtggagtacatccccttcgacgagatgaaggagagaatcctgaagatcgtgaccggcttcaacggcatccccttcaccatccagagactgtgcgagctgctgaccgaccccagaagaaactacaccggcaccgacaagttcctgagaggcgtggagaagaacgtgatggtggtgagctgcgtgtaccccagcagcgagaagaacaacagcaacagcctgaacagaatgaacggcgtgatgttccccggcaacagccccagctacaccgagagaagcaacatcaacggccccggcacccccagacccctgaacagacccaaggtgagcctgagcgcccccatgaccaccaacggcctgcccgagagcaccgacagcaaggaggccaacctgcagcagaacgaggagaagaaccacagcgacagcagcaccagcgagagcgaggtgagcagcgtgagccccctgaagaacaagcaccccgacgaggacgccgtggaggccgagggccacgaggtgaagagactgagattcgacaaggagggcgaggtgagagagaccgccagccagaccaccagcagcgagatcagcagcgtgatggtgggcgagaccgaggccagcagcagcagccaggacaaggacaaggacagcagatgcaccagacagcactgcaccgaggaggacgaggaggaggacgaggaggaggaggaggagagcttcatgaccagcagagagatgatccccgagagaaagaaccaggagaaggagagcgacgacgccctgaccgtgaacgaggagaccagcgaggagaacaaccagatggaggagagcgacgtgagccaggccgagaaggacctgctgcacagcgagggcagcgagaacgagggccccgtgagcagcagcagcagcgactgcagagagaccgaggagctggtgggcagcaacagcagcaagaccggcgagatcctgagcgagagcagcatggagaacgacgacgaggccaccgaggtgaccgacgagcccatggagcaggactag

SEQ ID NO: 95397 - DNA, 1254 bp, synthetic construct
  misc_feature 1..1254: note = Description of Artificial Sequence: Synthetic coding sequence
  source 1..1254: mol_type = other DNA
atggacgtggagagactgcaggaggccctgaaggacttcgagaagagaggcaagaaggaggtgtgccccgtgctggaccagttcctgtgccacgtggccaagaccggcgagaccatgatccagtggagccagttcaagggctacttcatcttcaagctggagaaggtgatggacgacttcagaaccagcgcccccgagcccagaggcccccccaaccccaacgtggagtacatccccttcgacgagatgaaggagagaatcctgaagatcgtgaccggcttcaacggcatccccttcaccatccagagactgtgcgagctgctgaccgaccccagaagaaactacaccggcaccgacaagttcctgagaggcgtggagaagaacgtgatggtggtgagctgcgtgtaccccagcagcgagaagaacaacagcaacagcctgaacagaatgaacggcgtgatgttccccggcaacagccccagctacaccgagagaagcaacatcaacggccccggcacccccagacccctgaacagacccaaggtgagcctgagcgcccccatgaccaccaacggcctgcccgagagcaccgacagcaaggaggccaacctgcagcagaacgaggagaagaaccacagcgacagcagcaccagcgagagcgaggtgagcagcgtgagccccctgaagaacaagcaccccgacgaggacgccgtggaggccgagggccacgaggtgaagagactgagattcgacaaggagggcgaggtgagagagaccgccagccagaccaccagcagcgagatcagcagcgtgatggtgggcgagaccgaggccagcagcagcagccaggacaaggacaaggacagcagatgcaccagacagcactgcaccgaggaggacgaggaggaggacgaggaggaggaggaggagagcttcatgaccagcagagagatgatccccgagagaaagaaccaggagaaggagagcgacgacgccctgaccgtgaacgaggagaccagcgaggagaacaaccagatggaggagagcgacgtgagccaggccgagaaggacctgctgcacagcgagggcagcgagaacgagggccccgtgagcagcagcagcagcgactgcagagagaccgaggagctggtgggcagcaacagcagcaagaccggcgagatcctgagcgagagcagcatggagaacgacgacgaggccaccgaggtgaccgacgagcccatggagcaggactag

SEQ ID NO: 95398 - DNA, 1083 bp, synthetic construct
  misc_feature 1..1083: note = Description of Artificial Sequence: Synthetic coding sequence
  source 1..1083: mol_type = other DNA
atggacgtggagagactgcaggaggccctgaaggacttcgagaagagaggcaagaaggaggtgtgccccgtgctggaccagttcctgtgccacgtggccaagaccggcgagaccatcatccccttcaccatccagagactgtgcgagctgctgaccgaccccagaagaaactacaccggcaccgacaagttcctgagaggcgtggagaagaacgtgatggtggtgagctgcgtgtaccccagcagcgagaagaacaacagcaacagcctgaacagaatgaacggcgtgatgttccccggcaacagccccagctacaccgagagaagcaacatcaacggccccggcacccccagacccctgaacagacccaaggtgagcctgagcgcccccatgaccaccaacggcctgcccgagagcaccgacagcaaggaggccaacctgcagcagaacgaggagaagaaccacagcgacagcagcaccagcgagagcgaggtgagcagcgtgagccccctgaagaacaagcaccccgacgaggacgccgtggaggccgagggccacgaggtgaagagactgagattcgacaaggagggcgaggtgagagagaccgccagccagaccaccagcagcgagatcagcagcgtgatggtgggcgagaccgaggccagcagcagcagccaggacaaggacaaggacagcagatgcaccagacagcactgcaccgaggaggacgaggaggaggacgaggaggaggaggaggagagcttcatgaccagcagagagatgatccccgagagaaagaaccaggagaaggagagcgacgacgccctgaccgtgaacgaggagaccagcgaggagaacaaccagatggaggagagcgacgtgagccaggccgagaaggacctgctgcacagcgagggcagcgagaacgagggccccgtgagcagcagcagcagcgactgcagagagaccgaggagctggtgggcagcaacagcagcaagaccggcgagatcctgagcgagagcagcatggagaacgacgacgaggccaccgaggtgaccgacgagcccatggagcaggactag

SEQ ID NO: 95399 - DNA, 1116 bp, synthetic construct
  misc_feature 1..1116: note = Description of Artificial Sequence: Synthetic coding sequence
  source 1..1116: mol_type = other DNA
atggccctgggcaagttcagagccgccctgagagactacgagaccgtggtgaaggtgaagccccacgacaaggacgccaagatgaagtaccaggagtgcaacaagatcgtgaagcagaaggccttcgagagagccatcgccggcgacgagcacaagagaagcgtggtggacagcctggacatcgagagcatgaccatcgaggacgagtacagcggccccaagctggaggacggcaaggtgaccatcagcttcatgaaggagctgatgcagtggtacaaggaccagaagaagctgcacagaaagtgcgcctaccagaccgagaagatcaccgtgtgcggcgacacccacggccagttctacgacctgctgaacatcttcgagctgaacggcctgcccagcgagaccaacccctacatcttcaacggcgacttcgtggacagaggcagcttcagcgtggaggtgatcctgaccctgttcggcttcaagctgctgtaccccgaccacttccacctgctgagaggcaaccacgagaccgacaacatgaaccagatctacggcttcgagggcgaggtgaaggccaagtacaccgcccagatgtacgagctgttcagcgaggtgttcgagtggctgcccctggcccagtgcatcaacggcaaggtgctgatcatgcacggcggcctgttcagcgaggacggcgtgaccctggacgacatcagaaagatcgagagaaacagacagccccccgacagcggccccatgtgcgacctgctgtggagcgacccccagccccagaacggcagaagcatcagcaagagaggcgtgagctgccagttcggccccgacgtgaccaaggccttcctggaggagaacaacctggactacatcatcagaagccacgaggtgaaggccgagggctacgaggtggcccacggcggcagatgcgtgaccgtgttcagcgcccccaactactgcgaccagatgggcaacaaggccagctacatccacctgcagggcagcgacctgagaccccagttccaccagttcaccgccgtgccccaccccaacgtgaagcccatggcctacgccaacaccctgctgcagctgggcatgatgtag

SEQ ID NO: 95400 - DNA, 1500 bp, synthetic construct
  misc_feature 1..1500: note = Description of Artificial Sequence: Synthetic coding sequence
  source 1..1500: mol_type = other DNA
atggccatggccgagggcgagagaaccgagtgcgccgagccccccagagacgagccccccgccgacggcgccctgaagagagccgaggagctgaagacccaggccaacgactacttcaaggccaaggactacgagaacgccatcaagttctacagccaggccatcgagctgaaccccagcaacgccatctactacggcaacagaagcctggcctacctgagaaccgagtgctacggctacgccctgggcgacgccaccagagccatcgagctggacaagaagtacatcaagggctactacagaagagccgccagcaacatggccctgggcaagttcagagccgccctgagagactacgagaccgtggtgaaggtgaagccccacgacaaggacgccaagatgaagtaccaggagtgcaacaagatcgtgaagcagaaggccttcgagagagccatcgccggcgacgagcacaagagaagcgtggtggacagcctggacatcgagagcatgaccatcgaggacgagtacagcggccccaagctggaggacggcaaggtgaccatcagcttcatgaaggagctgatgcagtggtacaaggaccagaagaagctgcacagaaagtgcgcctaccagatcctggtgcaggtgaaggaggtgctgagcaagctgagcaccctggtggagaccaccctgaaggagaccgagaagatcaccgtgtgcggcgacacccacggccagttctacgacctgctgaacatcttcgagctgaacggcctgcccagcgagaccaacccctacatcttcaacggcgacttcgtggacagaggcagcttcagcgtggaggtgatcctgaccctgttcggcttcaagctgctgtaccccgaccacttccacctgctgagaggcaaccacgagaccgacaacatgaaccagatctacggcttcgagggcgaggtgaaggccaagtacaccgcccagatgtacgagctgttcagcgaggtgttcgagtggctgcccctggcccagtgcatcaacggcaaggtgctgatcatgcacggcggcctgttcagcgaggacggcgtgaccctggacgacatcagaaagatcgagagaaacagacagccccccgacagcggccccatgtgcgacctgctgtggagcgacccccagccccagaacggcagaagcatcagcaagagaggcgtgagctgccagttcggccccgacgtgaccaaggccttcctggaggagaacaacctggactacatcatcagaagccacgaggtgaaggccgagggctacgaggtggcccacggcggcagatgcgtgaccgtgttcagcgcccccaactactgcgaccagatgggcaacaaggccagctacatccacctgcagggcagcgacctgagaccccagttccaccagttcaccgccgtgccccaccccaacgtgaagcccatggcctacgccaacaccctgctgcagctgggcatgatgtag

SEQ ID NO: 95401 - DNA, 1461 bp, synthetic construct
  misc_feature 1..1461: note = Description of Artificial Sequence: Synthetic coding sequence
  source 1..1461: mol_type = other DNA
atggccatggccgagggcgagagaaccgagtgcgccgagccccccagagacgagccccccgccgacggcgccctgaagagagccgaggagctgaagacccaggccaacgactacttcaaggccaaggactacgagaacgccatcaagttctacagccaggccatcgagctgaaccccagcaacgccatctactacggctacgccctgggcgacgccaccagagccatcgagctggacaagaagtacatcaagggctactacagaagagccgccagcaacatggccctgggcaagttcagagccgccctgagagactacgagaccgtggtgaaggtgaagccccacgacaaggacgccaagatgaagtaccaggagtgcaacaagatcgtgaagcagaaggccttcgagagagccatcgccggcgacgagcacaagagaagcgtggtggacagcctggacatcgagagcatgaccatcgaggacgagtacagcggccccaagctggaggacggcaaggtgaccatcagcttcatgaaggagctgatgcagtggtacaaggaccagaagaagctgcacagaaagtgcgcctaccagatcctggtgcaggtgaaggaggtgctgagcaagctgagcaccctggtggagaccaccctgaaggagaccgagaagatcaccgtgtgcggcgacacccacggccagttctacgacctgctgaacatcttcgagctgaacggcctgcccagcgagaccaacccctacatcttcaacggcgacttcgtggacagaggcagcttcagcgtggaggtgatcctgaccctgttcggcttcaagctgctgtaccccgaccacttccacctgctgagaggcaaccacgagaccgacaacatgaaccagatctacggcttcgagggcgaggtgaaggccaagtacaccgcccagatgtacgagctgttcagcgaggtgttcgagtggctgcccctggcccagtgcatcaacggcaaggtgctgatcatgcacggcggcctgttcagcgaggacggcgtgaccctggacgacatcagaaagatcgagagaaacagacagccccccgacagcggccccatgtgcgacctgctgtggagcgacccccagccccagaacggcagaagcatcagcaagagaggcgtgagctgccagttcggccccgacgtgaccaaggccttcctggaggagaacaacctggactacatcatcagaagccacgaggtgaaggccgagggctacgaggtggcccacggcggcagatgcgtgaccgtgttcagcgcccccaactactgcgaccagatgggcaacaaggccagctacatccacctgcagggcagcgacctgagaccccagttccaccagttcaccgccgtgccccaccccaacgtgaagcccatggcctacgccaacaccctgctgcagctgggcatgatgtag

SEQ ID NO: 95402 - DNA, 1458 bp, synthetic construct
  misc_feature 1..1458: note = Description of Artificial Sequence: Synthetic coding sequence
  source 1..1458: mol_type = other DNA
tgaatggccgagggcgagagaaccgagtgcgccgagccccccagagacgagccccccgccgacggcgccctgaagagagccgaggagctgaagacccaggccaacgactacttcaaggccaaggactacgagaacgccatcaagttctacagccaggccatcgagctgaaccccagcaacgccatctactacggcaacagaagcctggcctacctgagaaccgagtgctacggctacgccctgggcgacgccaccagagccatcgagctggacaagaagtacatcaagggctactacagaagagccgccagcaacatggccctgggcaagttcagagccgccctgagagactacgagaccgtggtgaaggtgaagccccacgacaaggacgccaagatgaagtaccaggagtgcaacaagatcgtgaagcagaaggccttcgagagagccatcgccggcgacgagcacaagagaagcgtggtggacagcctggacatcgagagcatgaccatcgaggacgagtacagcggccccaagctggaggacggcaaggtgaccatcagcttcatgaaggagctgatgcagtggtacaaggaccagaagaagctgcacagaaagtgcgcctaccagatcctggtgcaggtgaaggaggtgctgagcaagctgagcaccctggtggagaccaccctgaaggagaccgagaagatcaccgtgtgcggcgacacccacggccagttctacgacctgctgaacatcttcgagctgaacggcctgcccagcgagaccaacccctacatcttcaacggcgacttcgtggacagaggcagcttcagcgtggaggtgatcctgaccctgttcggcttcaagctgctgtaccccgaccacttccacctgctgagaggcaaccacgagaccgacaacatgaaccagatctacggcttcgagggcgaggtgaaggccaagtacaccgcccagatgtacgagctgttcagcgaggtgttcgagtggctgcccctggcccagtgcatcaacggcaaggtgctgatcatgcacggcggcctgttcagcgaggacggcgtgaccctggacgacatcagaaagatcgagagaaacagacagccccccgacagcggccccatgtgcgacctgctgtggagcgacccccagccccagaacggcagaagcatcagcaagagaggcgtgagctgccagttcggccccgacgtgaccaaggccttcctggaggagaacaacctggactacatcatcagaagccacgaggtgaaggccgagggctacgaggtggcccacggcggcagatgcgtgaccgtgttcagcgcccccaactactgcgaccagatgggcaacaaggccagctacatccacctgcagggcagcgacctgagaccccagttccaccagttcaccgccgtgggcagacccagcagcggcagctag

SEQ ID NO: 95403 - DNA, 477 bp, synthetic construct
  misc_feature 1..477: note = Description of Artificial Sequence: Synthetic coding sequence
  source 1..477: mol_type = other DNA
atgctgaccgtggccgccctgatcgacgagcagatcctgtgcgtgcacggcggcctgagccccgacatcaagaccctggaccagatcagaaccatcgagagaaaccaggagatcccccacaagggcgccttctgcgacctggtgtggagcgaccccgaggacgtggacacctgggccatcagccccagaggcgccggctggctgttcggcgccaaggtgaccaacgagttcgtgcacatcaacaacctgaagctgatctgcagagcccaccagctggtgcacgagggctacaagttcatgttcgacgagaagctggtgaccgtgtggagcgcccccaactactgctacagatgcggcaacatcgccagcatcatggtgttcaaggacgtgaacaccagagagcccaagctgttcagagccgtgcccgacagcgagagagtgatcccccccagaaccaccaccccctacttcctgtag

SEQ ID NO: 95404 - DNA, 918 bp, synthetic construct
  misc_feature 1..918: note = Description of Artificial Sequence: Synthetic coding sequence
  source 1..918: mol_type = other DNA
atggcccccctggacctggacaagtacgtggagatcgccagactgtgcaagtacctgcccgagaacgacctgaagagactgtgcgactacgtgtgcgacctgctgctggaggagagcaacgtgcagcccgtgagcacccccgtgaccgtgtgcggcgacatccacggccagttctacgacctgtgcgagctgttcagaaccggcggccaggtgcccgacaccaactacatcttcatgggcgacttcgtggacagaggctactacagcctggagaccttcacctacctgctggccctgaaggccaagtggcccgacagaatcaccctgctgagaggcaaccacgagagcagacagatcacccaggtgtacggcttctacgacgagtgccagaccaagtacggcaacgccaacgcctggagatactgcaccaaggtgttcgacatgctgaccgtggccgccctgatcgacgagcagatcctgtgcgtgcacggcggcctgagccccgacatcaagaccctggaccagatcagaaccatcgagagaaaccaggagatcccccacaagggcgccttctgcgacctggtgtggagcgaccccgaggacgtggacacctgggccatcagccccagaggcgccggctggctgttcggcgccaaggtgaccaacgagttcgtgcacatcaacaacctgaagctgatctgcagagcccaccagctggtgcacgagggctacaagttcatgttcgacgagaagctggtgaccgtgtggagcgcccccaactactgctacagatgcggcaacatcgccagcatcatggtgttcaaggacgtgaacaccagagagcccaagctgttcagagccgtgcccgacagcgagagagtgatcccccccagaaccaccaccccctacttcctgtag

SEQ ID NO: 95405 - DNA, 852 bp, synthetic construct
  misc_feature 1..852: note = Description of Artificial Sequence: Synthetic coding sequence
  source 1..852: mol_type = other DNA
atggcccccctggacctggacaagtacgtggagatcgccagactgtgcaagtacctgcccgagaacgacctgaagagactgtgcgactacgtgtgcgacctgctgctggaggagagcaacgtgcagcccgtgagcacccccgtgaccgtgtgcggcgacatccacggccagggcgacttcgtggacagaggctactacagcctggagaccttcacctacctgctggccctgaaggccaagtggcccgacagaatcaccctgctgagaggcaaccacgagagcagacagatcacccaggtgtacggcttctacgacgagtgccagaccaagtacggcaacgccaacgcctggagatactgcaccaaggtgttcgacatgctgaccgtggccgccctgatcgacgagcagatcctgtgcgtgcacggcggcctgagccccgacatcaagaccctggaccagatcagaaccatcgagagaaaccaggagatcccccacaagggcgccttctgcgacctggtgtggagcgaccccgaggacgtggacacctgggccatcagccccagaggcgccggctggctgttcggcgccaaggtgaccaacgagttcgtgcacatcaacaacctgaagctgatctgcagagcccaccagctggtgcacgagggctacaagttcatgttcgacgagaagctggtgaccgtgtggagcgcccccaactactgctacagatgcggcaacatcgccagcatcatggtgttcaaggacgtgaacaccagagagcccaagctgttcagagccgtgcccgacagcgagagagtgatcccccccagaaccaccaccccctacttcctgtag

SEQ ID NO: 95406 - DNA, 1029 bp, synthetic construct
  misc_feature 1..1029: note = Description of Artificial Sequence: Synthetic coding sequence
  source 1..1029: mol_type = other DNA
atggcccccctggacctggacaagtacgtggagatcgccagactgtgcaagtacctgcccgagaacgacctgaaggtgagccccatctgcggcctggcccccagcggctgcggcgcccccgccggcagacccttcctgagccccggccccccccccgtgttccacttcctgagattcctgaaggagagactgtgcgactacgtgtgcgacctgctgctggaggagagcaacgtgcagcccgtgagcacccccgtgaccgtgtgcggcgacatccacggccagttctacgacctgtgcgagctgttcagaaccggcggccaggtgcccgacaccaactacatcttcatgggcgacttcgtggacagaggctactacagcctggagaccttcacctacctgctggccctgaaggccaagtggcccgacagaatcaccctgctgagaggcaaccacgagagcagacagatcacccaggtgtacggcttctacgacgagtgccagaccaagtacggcaacgccaacgcctggagatactgcaccaaggtgttcgacatgctgaccgtggccgccctgatcgacgagcagatcctgtgcgtgcacggcggcctgagccccgacatcaagaccctggaccagatcagaaccatcgagagaaaccaggagatcccccacaagggcgccttctgcgacctggtgtggagcgaccccgaggacgtggacacctgggccatcagccccagaggcgccggctggctgttcggcgccaaggtgaccaacgagttcgtgcacatcaacaacctgaagctgatctgcagagcccaccagctggtgcacgagggctacaagttcatgttcgacgagaagctggtgaccgtgtggagcgcccccaactactgctacagatgcggcaacatcgccagcatcatggtgttcaaggacgtgaacaccagagagcccaagctgttcagagccgtgcccgacagcgagagagtgatcccccccagaaccaccaccccctacttcctgtag

SEQ ID NO: 95407 - DNA, 378 bp, synthetic construct
  misc_feature 1..378: note = Description of Artificial Sequence: Synthetic coding sequence
  source 1..378: mol_type = other DNA
atgttcctgctgcccagactgcagctgctgggccagatgagactgtgcgactacgtgtgcgacctgctgctggaggagagcaacgtgcagcccgtgagcacccccgtgaccgtgtgcggcgacatccacggccagttctacgacctgtgcgagctgttcagaaccggcggccaggtgcccgacaccaactacatcttcatgggcgacttcgtggacagaggctactacagcctggagaccttcacctacctgctggccctgaaggccaagtggcccgacagaatcaccctgctgagaggcaaccacgagagcagacagatcacccaggtgtacggcttctacgacgagtgccagaccaagtacggcaacgccaactag

SEQ ID NO: 95408 - DNA, 1161 bp, synthetic construct
  misc_feature 1..1161: note = Description of Artificial Sequence: Synthetic coding sequence
  source 1..1161: mol_type = other DNA
atgagcgccctggagaagagcatgcacctgggcagactgcccagcagaccccccctgcccggcagcggcggcagccagagcggcgccaagatgagaatgggccccggcagaaagagagacttcagccccgtgccctggagccagtacttcgagagcatggaggacgtggaggtggagaacgagaccggcaaggacaccttcagagtgtacaagagcggcagcgagggccccgtgctgctgctgctgcacggcggcggccacagcgccctgagctgggccgtgttcaccgccgccatcatcagcagagtgcagtgcagaatcgtggccctggacctgagaagccacggcgagaccaaggtgaagaaccccgaggacctgagcgccgagaccatggccaaggacgtgggcaacgtggtggaggccatgtacggcgacctgcccccccccatcatgctgatcggccacagcatgggcggcgccatcgccgtgcacaccgccagcagcaacctggtgcccagcctgctgggcctgtgcatgatcgacgtggtggagggcaccgccatggacgccctgaacagcatgcagaacttcctgagaggcagacccaagaccttcaagagcctggagaacgccatcgagtggagcgtgaagagcggccagatcagaaacctggagagcgccagagtgagcatggtgggccaggtgaagcagtgcgagggcatcaccagccccgagggcagcaagagcatcgtggagggcatcatcgaggaggaggaggaggacgaggagggcagcgagagcatcagcaagagaaagaaggaggacgacatggagaccaagaaggaccacccctacacctggagaatcgagctggccaagaccgagaagtactgggacggctggttcagaggcctgagcaacctgttcctgagctgccccatccccaagctgctgctgctggccggcgtggacagactggacaaggacctgaccatcggccagatgcagggcaagttccagatgcaggtgctgccccagtgcggccacgccgtgcacgaggacgcccccgacaaggtggccgaggccgtggccaccttcctgatcagacacagattcgccgagcccatcggcggcttccagtgcgtgttccccggctgctag

SEQ ID NO: 95409 - DNA, 600 bp, synthetic construct
  misc_feature 1..600: note = Description of Artificial Sequence: Synthetic coding sequence
  source 1..600: mol_type = other DNA
atggacgccctgaacagcatgcagaacttcctgagaggcagacccaagaccttcaagagcctggagaacgccatcgagtggagcgtgaagagcggccagatcagaaacctggagagcgccagagtgagcatggtgggccaggtgaagcagtgcgagggcatcaccagccccgagggcagcaagagcatcgtggagggcatcatcgaggaggaggaggaggacgaggagggcagcgagagcatcagcaagagaaagaaggaggacgacatggagaccaagaaggaccacccctacacctggagaatcgagctggccaagaccgagaagtactgggacggctggttcagaggcctgagcaacctgttcctgagctgccccatccccaagctgctgctgctggccggcgtggacagactggacaaggacctgaccatcggccagatgcagggcaagttccagatgcaggtgctgccccagtgcggccacgccgtgcacgaggacgcccccgacaaggtggccgaggccgtggccaccttcctgatcagacacagattcgccgagcccatcggcggcttccagtgcgtgttccccggctgctag

SEQ ID NO: 95410 - DNA, 1203 bp, synthetic construct
  misc_feature 1..1203: note = Description of Artificial Sequence: Synthetic coding sequence
  source 1..1203: mol_type = other DNA
atgagcgccctggagaagagcatgcacctgggcagactgcccagcagaccccccctgcccggcagcggcggcagccagagcggcgccaagatgagaatgggccccggcagaaagagagacttcagccccgtgccctggagccagtacttcgagagcatggaggacgtggaggtggagaacgagaccggcaaggacaccttcagagtgtacaagagcggcagcgagggccccgtgctgctgctgctgcacggcggcggccacagcgccctgagctgggccgtgttcaccgccgccatcatcagcagagtgcagtgcagaatcgtggccctggacctgagaagccacggcgagaccaaggtgaagaaccccgaggacctgagcgccgagaccatggccaaggacgtgggcaacgtggtggaggccatgtacggcgacctgcccccccccatcatgctgatcggccacagcatgggcggcgccatcgccgtgcacaccgccagcagcaacctggtgcccagcctgctgggcctgtgcatgatcgacgtggtggagggcaccgccatggacgccctgaacagcatgcagaacttcctgagaggcagacccaagaccttcaagagcctggagaacgccatcgagtggagcgtgaagagcggccagatcagaaacctggagagcgccagagtgagcatggtgggccaggtgaagcagtgcgagggcatcaccagccccgagggcagcaagagcatcgtggagggcatcatcgaggaggaggaggaggacgaggagggcagcgagagcatcagcaagagaaagaaggaggacgacatggagggcctgcccagcgagacccagaacctgctgctgttcctgcagaccaagaaggaccacccctacacctggagaatcgagctggccaagaccgagaagtactgggacggctggttcagaggcctgagcaacctgttcctgagctgccccatccccaagctgctgctgctggccggcgtggacagactggacaaggacctgaccatcggccagatgcagggcaagttccagatgcaggtgctgccccagtgcggccacgccgtgcacgaggacgcccccgacaaggtggccgaggccgtggccaccttcctgatcagacacagattcgccgagcccatcggcggcttccagtgcgtgttccccggctgctag

SEQ ID NO: 95411 - DNA, 1776 bp, synthetic construct
  misc_feature 1..1776: note = Description of Artificial Sequence: Synthetic coding sequence
  source 1..1776: mol_type = other DNA
atgggctgcagcagcagcagcaccaagaccagaagaagcgacaccagcctgagagccgccctgatcatccagaactggtacagaggctacaaggccagactgaaggccagacagcactacgccctgaccatcttccagagcatcgagtacgccgacgagcagggccagatgcagctgagcaccttcttcagcttcatgctggagaactacacccacatccacaaggaggagctggagctgagaaaccagagcctggagagcgagcaggacatgagagacagatgggactacgtggacagcatcgacgtgcccgacagctacaacggccccagactgcagttccccctgacctgcaccgacatcgacctgctgctggaggccttcaaggagcagcagatcctgcacgcccactacgtgctggaggtgctgttcgagaccaagaaggtgctgaagcagatgcccaacttcacccacatccagaccagccccagcaaggaggtgaccatctgcggcgacctgcacggcaagctggacgacctgttcctgatcttctacaagaacggcctgcccagcgagagaaacccctacgtgttcaacggcgacttcgtggacagaggcaagaacagcatcgagatcctgatgatcctgtgcgtgagcttcctggtgtaccccaacgacctgcacctgaacagaggcaaccacgaggacttcatgatgaacctgagatacggcttcaccaaggagatcctgcacaagtacaagctgcacggcaagagaatcctgcagatcctggaggagttctacgcctggctgcccatcggcaccatcgtggacaacgagatcctggtgatccacggcggcatcagcgagaccaccgacctgaacctgctgcacagagtggagagaaacaagatgaagagcgtgctgatcccccccaccgagaccaacagagaccacgacaccgacagcaagcacaacaaggtgggcgtgaccttcaacgcccacggcagaatcaagaccaacggcagccccaccgagcacctgaccgagcacgagtgggagcaggtggtgaccatcttcagcgccagcaactactacgaggagggcagcaacagaggcgcctacatcaagctgtgcagcggcaccacccccagattcttccagtaccaggtgaccaaggccacctgcttccagcccctgagacagagagtggacaccatggagaacagcgccatcaagatcctgagagagagagtgatcagcagaaagagcgacctgaccagagccttccagctgcaggaccacagaaagagcggcaagctgagcgtgagccagtgggccttctgcatggagaacatcctgggcctgaacctgccctggagaagcctgagcagcaacctggtgaacatcgaccagaacggcaacgtggagtacatgagcagcttccagaacatcagaatcgagaagcccgtgcaggaggcccacagcaccctggtggagaccctgtacagatacagaagcgacctggagatcatcttcaacgccatcgacaccgaccacagcggcctgatcagcgtggaggagttcagagccatgtggaagctgttcagcagccactacaacgtgcacatcgacgacagccaggtgaacaagctggccaacatcatggacctgaacaaggacggcagcatcgacttcaacgagttcctgaaggccttctacgtggtgcacagatacgaggacctgatgaagcccgacgtgaccaacctgggctag

SEQ ID NO: 95412 - DNA, 1803 bp, synthetic construct
  misc_feature 1..1803: note = Description of Artificial Sequence: Synthetic coding sequence
  source 1..1803: mol_type = other DNA
atgggctgcagcagcagcagcaccaagaccagaagaagcgacaccagcctgagagccgccctgatcatccagaactggtacagaggctacaaggccagactgaaggccagacagcactacgccctgaccatcttccagagcatcgagtacgccgacgagcagggccagatgcagctgagcaccttcttcagcttcatgctggagaactacacccacatccacaaggaggagctggagatcctgcacgcccactacgtgctggaggtgctgttcgagaccaagaaggtgctgaagcagatgcccaacttcacccacatccagaccagccccagcaaggaggtgaccatctgcggcgacctgcacggcaagctggacgacctgttcctgatcttctacaagaacggcctgcccagcgagagaaacccctacgtgttcaacggcgacttcgtggacagaggcaagaacagcatcgagatcctgatgatcctgtgcgtgagcttcctggtgtaccccaacgacctgcacctgaacagaggcaaccacgaggacttcatgatgaacctgagatacggcttcaccaaggagatcctgcacaagtacaagctgcacggcaagagaatcctgcagatcctggaggagttctacgcctggctgcccatcggcaccatcgtggacaacgagatcctggtgatccacggcggcatcagcgagaccaccgacctgaacctgctgcacagagtggagagaaacaagatgaagagcgtgctgatcccccccaccgagaccaacagagaccacgacaccgacagcaagcacaacaaggtgggcgtgaccttcaacgcccacggcagaatcaagaccaacggcagccccaccgagcacctgaccgagcacgagtgggagcagatcatcgacatcctgtggagcgaccccagaggcaagaacggctgcttccccaacacctgcagaggcggcggctgctacttcggccccgacgtgaccagcaagatcctgaacaagtaccagctgaagatgctgatcagaagccacgagtgcaagcccgagggctacgagatctgccacgacggcaaggtggtgaccatcttcagcgccagcaactactacgaggagggcagcaacagaggcgcctacatcaagctgtgcagcggcaccacccccagattcttccagtaccaggtgaccaaggccacctgcttccagcccctgagacagagagtggacaccatggagaacagcgccatcaagatcctgagagagagagtgatcagcagaaagagcgacctgaccagagccttccagctgcaggaccacagaaagagcggcaagctgagcgtgagccagtgggccttctgcatggagaacatcctgggcctgaacctgccctggagaagcctgagcagcaacctggtgaacatcgaccagaacggcaacgtggagtacatgagcagcttccagaacatcagaatcgagaagcccgtgcaggaggcccacagcaccctggtggagaccctgtacagatacagaagcgacctggagatcatcttcaacgccatcgacaccgaccacagcggcctgatcagcgtggaggagttcagagccatgtggaagctgttcagcagccactacaacgtgcacatcgacgacagccaggtgaacaagctggccaacatcatggacctgaacaaggacggcagcatcgacttcaacgagttcctgaaggccttctacgtggtgcacagatacgaggacctgatgaagcccgacgtgaccaacctgggctag

SEQ ID NO: 95413 - DNA, 1962 bp, synthetic construct
  misc_feature 1..1962: note = Description of Artificial Sequence: Synthetic coding sequence
  source 1..1962: mol_type = other DNA
atgggctgcagcagcagcagcaccaagaccagaagaagcgacaccagcctgagagccgccctgatcatccagaactggtacagaggctacaaggccagactgaaggccagacagcactacgccctgaccatcttccagagcatcgagtacgccgacgagcagggccagatgcagctgagcaccttcttcagcttcatgctggagaactacacccacatccacaaggaggagctggagctgagaaaccagagcctggagagcgagcaggacatgagagacagatgggactacgtggacagcatcgacgtgcccgacagctacaacggccccagactgcagttccccctgacctgcaccgacatcgacctgctgctggaggccttcaaggagcagcagatcctgcacgcccactacgtgctggaggtgctgttcgagaccaagaaggtgctgaagcagatgcccaacttcacccacatccagaccagccccagcaaggaggtgaccatctgcggcgacctgcacggcaagctggacgacctgttcctgatcttctacaagaacggcctgcccagcgagagaaacccctacgtgttcaacggcgacttcgtggacagaggcaagaacagcatcgagatcctgatgatcctgtgcgtgagcttcctggtgtaccccaacgacctgcacctgaacagaggcaaccacgaggacttcatgatgaacctgagatacggcttcaccaaggagatcctgcacaagtacaagctgcacggcaagagaatcctgcagatcctggaggagttctacgcctggctgcccatcggcaccatcgtggacaacgagatcctggtgatccacggcggcatcagcgagaccaccgacctgaacctgctgcacagagtggagagaaacaagatgaagagcgtgctgatcccccccaccgagaccaacagagaccacgacaccgacagcaagcacaacaaggtgggcgtgaccttcaacgcccacggcagaatcaagaccaacggcagccccaccgagcacctgaccgagcacgagtgggagcagatcatcgacatcctgtggagcgaccccagaggcaagaacggctgcttccccaacacctgcagaggcggcggctgctacttcggccccgacgtgaccagcaagatcctgaacaagtaccagctgaagatgctgatcagaagccacgagtgcaagcccgagggctacgagatctgccacgacggcaaggtggtgaccatcttcagcgccagcaactactacgaggagggcagcaacagaggcgcctacatcaagctgtgcagcggcaccacccccagattcttccagtaccaggtgaccaaggccacctgcttccagcccctgagacagagagtggacaccatggagaacagcgccatcaagatcctgagagagagagtgatcagcagaaagagcgacctgaccagagccttccagctgcaggaccacagaaagagcggcaagctgagcgtgagccagtgggccttctgcatggagaacatcctgggcctgaacctgccctggagaagcctgagcagcaacctggtgaacatcgaccagaacggcaacgtggagtacatgagcagcttccagaacatcagaatcgagaagcccgtgcaggaggcccacagcaccctggtggagaccctgtacagatacagaagcgacctggagatcatcttcaacgccatcgacaccgaccacagcggcctgatcagcgtggaggagttcagagccatgtggaagctgttcagcagccactacaacgtgcacatcgacgacagccaggtgaacaagctggccaacatcatggacctgaacaaggacggcagcatcgacttcaacgagttcctgaaggccttctacgtggtgcacagatacgaggacctgatgaagcccgacgtgaccaacctgggctag

SEQ ID NO: 95414 - DNA, 1131 bp, synthetic construct
  misc_feature 1..1131: note = Description of Artificial Sequence: Synthetic coding sequence
  source 1..1131: mol_type = other DNA
atgggctgcagcagcagcagcaccaagaccagaagaagcgacaccagcctgagagccgccctgatcatccagaactggtacagaggctacaaggccagactgaaggccagacagcactacgccctgaccatcttccagagcatcgagtacgccgacgagcagggccagatgcagctgagcaccttcttcagcttcatgctggagaactacacccacatccacaaggaggagctggagctgagaaaccagagcctggagagcgagcaggacatgagagacagatgggactacgtggacagcatcgacgtgcccgacagctacaacggccccagactgcagttccccctgacctgcaccgacatcgacctgctgctggaggccttcaaggagcagcagatcctgcacgcccactacgtgctggaggtgctgttcgagaccaagaaggtgctgaagcagatgcccaacttcacccacatccagaccagccccagcaaggaggtgaccatctgcggcgacctgcacggcaagctggacgacctgttcctgatcttctacaagaacggcctgcccagcgagagaaacccctacgtgttcaacggcgacttcgtggacagaggcaagaacagcatcgagatcctgatgatcctgtgcgtgagcttcctggtgtaccccaacgacctgcacctgaacagaggcaaccacgaggacttcatgatgaacctgagatacggcttcaccaaggagatcctgcacaagtacaagctgcacggcaagagaatcctgcagatcctggaggagttctacgcctggctgcccatcggcaccatcgtggacaacgagatcctggtgatccacggcggcatcagcgagaccaccgacctgaacctgctgcacagagtggagagaaacaagatgaagagcgtgctgatcccccccaccgagaccaacagagaccacgacaccgacagcaagcacaacaaggtgggcgtgaccttcaacgcccacggcagaatcaagaccaacggcagccccaccgagcacctgaccgagcacgagtgggagcagagcggctactacggcaagcagagacaccaggacatcaagagagagagcgacttcaccaagaagtag

SEQ ID NO: 95415 - DNA, 1767 bp, synthetic construct
  misc_feature 1..1767: note = Description of Artificial Sequence: Synthetic coding sequence
  source 1..1767: mol_type = other DNA
atgctggagaactacacccacatccacaaggaggagctggagctgagaaaccagagcctggagagcgagcaggacatgagagacagatgggactacgtggacagcatcgacgtgcccgacagctacaacggccccagactgcagttccccctgacctgcaccgacatcgacctgctgctggaggccttcaaggagcagcagatcctgcacgcccactacgtgctggaggtgctgttcgagaccaagaaggtgctgaagcagatgcccaacttcacccacatccagaccagccccagcaaggaggtgaccatctgcggcgacctgcacggcaagctggacgacctgttcctgatcttctacaagaacggcctgcccagcgagagaaacccctacgtgttcaacggcgacttcgtggacagaggcaagaacagcatcgagatcctgatgatcctgtgcgtgagcttcctggtgtaccccaacgacctgcacctgaacagaggcaaccacgaggacttcatgatgaacctgagatacggcttcaccaaggagatcctgcacaagtacaagctgcacggcaagagaatcctgcagatcctggaggagttctacgcctggctgcccatcggcaccatcgtggacaacgagatcctggtgatccacggcggcatcagcgagaccaccgacctgaacctgctgcacagagtggagagaaacaagatgaagagcgtgctgatcccccccaccgagaccaacagagaccacgacaccgacagcaagcacaacaaggtgggcgtgaccttcaacgcccacggcagaatcaagaccaacggcagccccaccgagcacctgaccgagcacgagtgggagcagatcatcgacatcctgtggagcgaccccagaggcaagaacggctgcttccccaacacctgcagaggcggcggctgctacttcggccccgacgtgaccagcaagatcctgaacaagtaccagctgaagatgctgatcagaagccacgagtgcaagcccgagggctacgagatctgccacgacggcaaggtggtgaccatcttcagcgccagcaactactacgaggagggcagcaacagaggcgcctacatcaagctgtgcagcggcaccacccccagattcttccagtaccaggtgaccaaggccacctgcttccagcccctgagacagagagtggacaccatggagaacagcgccatcaagatcctgagagagagagtgatcagcagaaagagcgacctgaccagagccttccagctgcaggaccacagaaagagcggcaagctgagcgtgagccagtgggccttctgcatggagaacatcctgggcctgaacctgccctggagaagcctgagcagcaacctggtgaacatcgaccagaacggcaacgtggagtacatgagcagcttccagaacatcagaatcgagaagcccgtgcaggaggcccacagcaccctggtggagaccctgtacagatacagaagcgacctggagatcatcttcaacgccatcgacaccgaccacagcggcctgatcagcgtggaggagttcagagccatgtggaagctgttcagcagccactacaacgtgcacatcgacgacagccaggtgaacaagctggccaacatcatggacctgaacaaggacggcagcatcgacttcaacgagttcctgaaggccttctacgtggtgcacagatacgaggacctgatgaagcccgacgtgaccaacctgggctag

SEQ ID NO: 95416 - DNA, 2262 bp, synthetic construct
  misc_feature 1..2262: note = Description of Artificial Sequence: Synthetic coding sequence
  source 1..2262: mol_type = other DNA
atgggcagcggcaccagcacccagcaccacttcgccttccagaacgccgagagagccttcaaggccgccgccctgatccagagatggtacagaagatacgtggccagactggagatgagaagaagatgcacctggagcatcttccagagcatcgagtacgccggccagcaggaccaggtgaagctgcacgacttcttcagctacctgatggaccacttcatccccagcagccacaacgacagagacttcctgaccagaatcttcaccgaggacagattcgcccaggacagcgagatgaagaagtgcagcgactacgagagcatcgaggtgcccgacagctacaccggccccagactgagcttccccctgctgcccgaccacgccaccgccctggtggaggccttcagactgaagcagcagctgcacgccagatacgtgctgaacctgctgtacgagaccaagaagcacctggtgcagctgcccaacatcaacagagtgagcacctgctacagcgaggagatcaccgtgtgcggcgacctgcacggccagctggacgacctgatcttcatcttctacaagaacggcctgcccagccccgagagaagctacgtgttcaacggcgacttcgtggacagaggcaaggacagcgtggagatcctgatgatcctgttcgccttcatgctggtgtaccccaaggagttccacctgaacagaggcaaccacgaggaccacatggtgaacctgagatacggcttcaccaaggaggtgatgaacaagtacaaggtgcacggcaaggagatcctgagaaccctgcaggacgtgttctgctggctgcccctggccaccctgatcgacgagaaggtgctgatcctgcacggcggcgtgagcgacatcaccgacctggagctgctggacaagatcgagagaagcaagatcgtgagcaccatgagatgcaagaccagacagaagagcgagaagcagatggaggagaagagaagagccaaccagaagagcagcgcccagggccccatcccctggttcctgcccgagagcagaagcctgcccagcagccccctgagactgggcagctacaaggcccagaagaccagcagaagcagcagcatcccctgcagcggcagcctggacggcagagagctgagcagacaggtgagaagcagcgtggagctggagctggagagatgcagacagcaggccggcctgctggtgaccggcgagaaggaggagcccagcagaagcgccagcgaggccgacagcgaggccggcgagctgagaaagcccacccaggaggagtggagacaggtggtggacatcctgtggagcgaccccatggcccaggagggctgcaaggccaacaccatcagaggcggcggctgctacttcggccccgacgtgacccagcagctgctgcagaagtacaacatgcagttcctgatcagaagccacgagtgcaagcccgagggctacgagttctgccacaacagaaaggtgctgaccatcttcagcgccagcaactactacgaggtgggcagcaacagaggcgcctacgtgaagctgggccccgccctgaccccccacatcgtgcagtaccaggccaacaaggtgacccacaccctgaccatgagacagagaatcagcagagtggaggagagcgccctgagagccctgagagagaagctgttcgcccacagcagcgacctgctgagcgagttcaagaagcacgacgccgacaaggtgggcctgatcaccctgagcgactgggccgccgccgtggagagcgtgctgcacctgggcctgccctggagaatgctgagaccccagctggtgaacagcagcgccgacaacatgctggagtacaagagctggctgaagaacctggccaaggagcagctgagcagagagaacatccagagcagcctgctggagaccctgtacagaaacagaagcaacctggagaccatcttcagaatcatcgacagcgaccacagcggcttcatcagcctggacgagttcagacagacctggaagctgttcagcagccacatgaacatcgacatcaccgacgactgcatctgcgacctggccagaagcatcgacttcaacaaggacggccacatcgacatcaacgagttcctggaggccttcagactggtggagaagagctgccccgagggcgacgccagcgagtgcccccaggccaccaacgccaaggacagcggctgcagcagccccggcgcccactag

SEQ ID NO: 95417 - DNA, 1797 bp, synthetic construct
  misc_feature 1..1797: note = Description of Artificial Sequence: Synthetic coding sequence
  source 1..1797: mol_type = other DNA
atgggcagcggcaccagcacccagcaccacttcgccttccagaacgccgagagagccttcaaggccgccgccctgatccagagatggtacagaagatacgtggccagactggagatgagaagaagatgcacctggagcatcttccagagcatcgagtacgccggccagcaggaccaggtgaagctgcacgacttcttcagctacctgatggaccacttcatccccagcagccacaacgacagagacttcctgaccagaatcttcaccgaggacagattcgcccaggacagcgagatgaagaagtgcagcgactacgagagcatcgaggtgcccgacagctacaccggccccagactgagcttccccctgctgcccgaccacgccaccgccctggtggaggccttcagactgaagcagcagctgcacgccagatacgtgctgaacctgctgtacgagaccaagaagcacctggtgcagctgcccaacatcaacagagtgagcacctgctacagcgaggagatcaccgtgtgcggcgacctgcacggccagctggacgacctgatcttcatcttctacaagaacggcctgcccagccccgagagaagctacgtgttcaacggcgacttcgtggacagaggcaaggacagcgtggagatcctgatgatcctgttcgccttcatgctggtgtaccccaaggagttccacctgaacagaggcaaccacgaggaccacatggtgaacctgagatacggcttcaccaaggaggtgatgaacaagtacaaggtgcacggcaaggagatcctgagaaccctgcaggacgtgttctgctggctgcccctggccaccctgatcgacgagaaggtgctgatcctgcacggcggcgtgagcgacatcaccgacctggagctgctggacaagatcgagagaagcaagatcgtgagcaccatgagatgcaagaccagacagaagagcgagaagcagatggaggagaagagaagagccaaccagaagagcagcgcccagggccccatcccctggttcctgcccgagagcagaagcctgcccagcagccccctgagactgggcagctacaaggcccagaagaccagcagaagcagcagcatcccctgcagcggcagcctggacggcagagagctgagcagacaggtgagaagcagcgtggagctggagctggagagatgcagacagcaggccggcctgctggtgaccggcgagaaggaggagcccagcagaagcgccagcgaggccgacagcgaggccggcgagctgagaaagcccacccaggaggagtggagacaggtggtggacatcctgtggagcgaccccatggcccaggagggctgcaaggccaacaccatcagaggcggcggctgctacttcggccccgacgtgacccagcagctgctgcagaagtacaacatgcagttcctgatcagaagccacgagtgcaagcccgagggctacgagttctgccacaacagaaaggtgctgaccatcttcagcgccagcaactactacgaggtgggcagcaacagaggcgcctacgtgaagctgggccccgccctgaccccccacatcgtgcagtaccaggccaacaaggtgacccacaccctgaccatgagacagagaatcagcagagtggaggagagcgccctgagagccctgagagagaagctgttcgcccacagcagcgacctgctgagcgagttcaagaagcacgacgccgacaaggtgggcctggccagcagccagctgtgctactaccagcagaagtag

SEQ ID NO: 95418 - DNA, 1440 bp, synthetic construct
  misc_feature 1..1440: note = Description of Artificial Sequence: Synthetic coding sequence
  source 1..1440: mol_type = other DNA
atgggcgccttcctggacaagcccaagaccgagaagcacaacgcccacggcgccggcaacggcctgagatacggcctgagcagcatgcagggctggagagtggagatggaggacgcccacaccgccgtggtgggcatcccccacggcctggaggactggagcttcttcgccgtgtacgacggccacgccggcagcagagtggccaactactgcagcacccacctgctggagcacatcaccaccaacgaggacttcagagccgccggcaagagcggcagcgccctggagctgagcgtggagaacgtgaagaacggcatcagaaccggcttcctgaagatcgacgagtacatgagaaacttcagcgacctgagaaacggcatggacagaagcggcagcaccgccgtgggcgtgatgatcagccccaagcacatctacttcatcaactgcggcgacagcagagccgtgctgtacagaaacggccaggtgtgcttcagcacccaggaccacaagccctgcaaccccagagagaaggagagaatccagaacgccggcggcagcgtgatgatccagagagtgaacggcagcctggccgtgagcagagccctgggcgactacgactacaagtgcgtggacggcaagggccccaccgagcagctggtgagccccgagcccgaggtgtacgagatcctgagagccgaggaggacgagttcatcatcctggcctgcgacggcatctgggacgtgatgagcaacgaggagctgtgcgagtacgtgaagagcagactggaggtgagcgacgacctggagaacgtgtgcaactgggtggtggacacctgcctgcacaagggcagcagagacaacatgagcatcgtgctggtgtgcttcagcaacgcccccaaggtgagcgacgaggccgtgaagaaggacagcgagctggacaagcacctggagagcagagtggaggagatcatggagaagagcggcgaggagggcatgcccgacctggcccacgtgatgagaatcctgagcgccgagaacatccccaacctgccccccggcggcggcctggccggcaagagaaacgtgatcgaggccgtgtacagcagactgaacccccacagagagagcgacggcgccagcgacgaggccgaggagagcggcagccagggcaagctggtggaggccctgagacagatgagaatcaaccacagaggcaactacagacagctgctggaggagatgctgaccagctacagactggccaaggtggagggcgaggagagccccgccgagcccgccgccaccgccaccagcagcaacagcgacgccggcaaccccgtgaccatgcaggagagccacaccgagagcgagagcggcctggccgagctggacagcagcaacgaggacgccggcaccaagatgagcggcgagaagatctag

SEQ ID NO: 95419 - DNA, 579 bp, synthetic construct
  misc_feature 1..579: note = Description of Artificial Sequence: Synthetic coding sequence
  source 1..579: mol_type = other DNA
atgagcatcgtgctggtgtgcttcagcaacgcccccaaggtgagcgacgaggccgtgaagaaggacagcgagctggacaagcacctggagagcagagtggaggagatcatggagaagagcggcgaggagggcatgcccgacctggcccacgtgatgagaatcctgagcgccgagaacatccccaacctgccccccggcggcggcctggccggcaagagaaacgtgatcgaggccgtgtacagcagactgaacccccacagagagagcgacggcgccagcgacgaggccgaggagagcggcagccagggcaagctggtggaggccctgagacagatgagaatcaaccacagaggcaactacagacagctgctggaggagatgctgaccagctacagactggccaaggtggagggcgaggagagccccgccgagcccgccgccaccgccaccagcagcaacagcgacgccggcaaccccgtgaccatgcaggagagccacaccgagagcgagagcggcctggccgagctggacagcagcaacgaggacgccggcaccaagatgagcggcgagaagatctag

SEQ ID NO: 95420 - DNA, 1164 bp, synthetic construct
  misc_feature 1..1164: note = Description of Artificial Sequence: Synthetic coding sequence
  source 1..1164: mol_type = other DNA
atgggcgccttcctggacaagcccaagaccgagaagcacaacgcccacggcgccggcaacggcctgagatacggcctgagcagcatgcagggctggagagtggagatggaggacgcccacaccgccgtggtgggcatcccccacggcctggaggactggagcttcttcgccgtgtacgacggccacgccggcagcagagtggccaactactgcagcacccacctgctggagcacatcaccaccaacgaggacttcagagccgccggcaagagcggcagcgccctggagctgagcgtggagaacgtgaagaacggcatcagaaccggcttcctgaagatcgacgagtacatgagaaacttcagcgacctgagaaacggcatggacagaagcggcagcaccgccgtgggcgtgatgatcagccccaagcacatctacttcatcaactgcggcgacagcagagccgtgctgtacagaaacggccaggtgtgcttcagcacccaggaccacaagccctgcaaccccagagagaaggagagaatccagaacgccggcggcagcgtgatgatccagagagtgaacggcagcctggccgtgagcagagccctgggcgactacgactacaagtgcgtggacggcaagggccccaccgagcagctggtgagccccgagcccgaggtgtacgagatcctgagagccgaggaggacgagttcatcatcctggcctgcgacggcatctgggacgtgatgagcaacgaggagctgtgcgagtacgtgaagagcagactggaggtgagcgacgacctggagaacgtgtgcaactgggtggtggacacctgcctgcacaagggcagcagagacaacatgagcatcgtgctggtgtgcttcagcaacgcccccaaggtgagcgacgaggccgtgaagaaggacagcgagctggacaagcacctggagagcagagtggaggagatcatggagaagagcggcgaggagggcatgcccgacctggcccacgtgatgagaatcctgagcgccgagaacatccccaacctgccccccggcggcggcctggccggcaagagaaacgtgatcgaggccgtgtacagcagactgaacccccacagagagagcgacggcggcgccggcgacctggaggacccctggtag

SEQ ID NO: 95421 - DNA, 1143 bp, synthetic construct
  misc_feature 1..1143: note = Description of Artificial Sequence: Synthetic coding sequence
  source 1..1143: mol_type = other DNA
atgggcgccttcctggacaagcccaagaccgagaagcacaacgcccacggcgccggcaacggcctgagatacggcctgagcagcatgcagggctggagagtggagatggaggacgcccacaccgccgtggtgggcatcccccacggcctggaggactggagcttcttcgccgtgtacgacggccacgccggcagcagagtggccaactactgcagcacccacctgctggagcacatcaccaccaacgaggacttcagagccgccggcaagagcggcagcgccctggagctgagcgtggagaacgtgaagaacggcatcagaaccggcttcctgaagatcgacgagtacatgagaaacttcagcgacctgagaaacggcatggacagaagcggcagcaccgccgtgggcgtgatgatcagccccaagcacatctacttcatcaactgcggcgacagcagagccgtgctgtacagaaacggccaggtgtgcttcagcacccaggaccacaagccctgcaaccccagagagaaggagagaatccagaacgccggcggcagcgtgatgatccagagagtgaacggcagcctggccgtgagcagagccctgggcgactacgactacaagtgcgtggacggcaagggccccaccgagcagctggtgagccccgagcccgaggtgtacgagatcctgagagccgaggaggacgagttcatcatcctggcctgcgacggcatctgggacgtgatgagcaacgaggagctgtgcgagtacgtgaagagcagactggaggtgagcgacgacctggagaacgtgtgcaactgggtggtggacacctgcctgcacaagggcagcagagacaacatgagcatcgtgctggtgtgcttcagcaacgcccccaaggtgagcgacgaggccgtgaagaaggacagcgagctggacaagcacctggagagcagagtggaggagatcatggagaagagcggcgaggagggcatgcccgacctggcccacgtgatgagaatcctgagcgccgagaacatccccaacctgccccccggcggcggcctggccggcaagagaaacgtgatcgaggccgtgtacagcagactgaacccccacagagagagcgacggccagaagtag

SEQ ID NO: 95422 - DNA, 984 bp, synthetic construct
  misc_feature 1..984: note = Description of Artificial Sequence: Synthetic coding sequence
  source 1..984: mol_type = other DNA
atgggcgccttcctggacaagcccaagaccgagaagcacaacgcccacggcgccggcaacggcctgagatacggcctgagcagcatgcagggctggagagtggagatggaggacgcccacaccgccgtggtgggcatcccccacggcctggaggactggagcttcttcgccgtgtacgacggccacgccggcagcagagtggccaactactgcagcacccacctgctggagcacatcaccaccaacgaggacttcagagccgccggcaagagcggcagcgccctggagctgagcgtggagaacgtgaagaacggcatcagaaccggcttcctgaagatcgacgagtacatgagaaacttcagcgacctgagaaacggcatggacagaagcggcagcaccgccgtgggcgtgatgatcagccccaagcacatctacttcatcaactgcggcgacagcagagccgtgctgtacagaaacggccaggtgtgcttcagcacccaggaccacaagccctgcaaccccagagagaaggagagaatccagaacgccggcggcagcgtgatgatccagagagtgaacggcagcctggccgtgagcagagccctgggcgactacgactacaagtgcgtggacggcaagggccccaccgagcagctggtgagccccgagcccgaggtgtacgagatcctgagagccgaggaggacgagttcatcatcctggcctgcgacggcatctgggacgtgatgagcaacgaggagctgtgcgagtacgtgaagagcagactggaggtgagcgacgacctggagaacgtgtgcaactgggtggtggacacctgcctgcacaagggcagcagagacaacatgagcatcgtgctggtgtgcttcagcaacgcccccaaggtgagcgacgaggccgtgaagaaggacagcgagctggacaagcacctggagagcagagtggagggcaagaccaacgccttctag

SEQ ID NO: 95423 - DNA, 1137 bp, synthetic construct
  misc_feature 1..1137: note = Description of Artificial Sequence: Synthetic coding sequence
  source 1..1137: mol_type = other DNA
atgggcgccttcctggacaagcccaagaccgagaagcacaacgcccacggcgccggcaacggcctgagatacggcctgagcagcatgcagggctggagagtggagatggaggacgcccacaccgccgtggtgggcatcccccacggcctggaggactggagcttcttcgccgtgtacgacggccacgccggcagcagagtggccaactactgcagcacccacctgctggagcacatcaccaccaacgaggacttcagagccgccggcaagagcggcagcgccctggagctgagcgtggagaacgtgaagaacggcatcagaaccggcttcctgaagatcgacgagtacatgagaaacttcagcgacctgagaaacggcatggacagaagcggcagcaccgccgtgggcgtgatgatcagccccaagcacatctacttcatcaactgcggcgacagcagagccgtgctgtacagaaacggccaggtgtgcttcagcacccaggaccacaagccctgcaaccccagagagaaggagagaatccagaacgccggcggcagcgtgatgatccagagagtgaacggcagcctggccgtgagcagagccctgggcgactacgactacaagtgcgtggacggcaagggccccaccgagcagctggtgagccccgagcccgaggtgtacgagatcctgagagccgaggaggacgagttcatcatcctggcctgcgacggcatctgggacgtgatgagcaacgaggagctgtgcgagtacgtgaagagcagactggaggtgagcgacgacctggagaacgtgtgcaactgggtggtggacacctgcctgcacaagggcagcagagacaacatgagcatcgtgctggtgtgcttcagcaacgcccccaaggtgagcgacgaggccgtgaagaaggacagcgagctggacaagcacctggagagcagagtggaggagatcatggagaagagcggcgaggagggcatgcccgacctggcccacgtgatgagaatcctgagcgccgagaacatccccaacctgccccccggcggcggcctggccggcaagagaaacgtgatcgaggccgtgtacagcagactgaacccccacagagagagcgacggctag

SEQ ID NO: 95424 - DNA, 1518 bp, synthetic construct
  misc_feature 1..1518: note = Description of Artificial Sequence: Synthetic coding sequence
  source 1..1518: mol_type = other DNA
atgctgaacagagtgagaagcgccgtggcccacctggtgagcagcggcggcgcccccccccccagacccaagagccccgacctgcccaacgccgccagcgccccccccgccgccgcccccgaggcccccagaagcccccccgccaaggccggcagcggcagcgccacccccgccaaggccgtggaggccagagccagcttcagcagacccaccttcctgcagctgagccccggcggcctgagaagagccgacgaccacgccggcagagccgtgcagagcccccccgacaccggcagaagactgccctggagcaccggctacgccgaggtgatcaacgccggcaagagcagacacaacgaggaccaggcctgctgcgaggtggtgtacgtggagggcagaagaagcgtgaccggcgtgcccagagagcccagcagaggccagggcctgtgcttctactactggggcctgttcgacggccacgccggcggcggcgccgccgagatggccagcagactgctgcacagacacatcagagagcagctgaaggacctggtggagatcctgcaggaccccagccccccccccctgtgcctgcccaccacccccggcacccccgacagcagcgaccccagccacctgctgggcccccagagctgctggagcagccagaaggaggtgagccacgagagcctggtggtgggcgccgtggagaacgccttccagctgatggacgagcagatggccagagagagaagaggccaccaggtggagggcggctgctgcgccctggtggtgatctacctgctgggcaaggtgtacgtggccaacgccggcgacagcagagccatcatcgtgagaaacggcgagatcatccccatgagcagagagttcacccccgagaccgagagacagagactgcagctgctgggcttcctgaagcccgagctgctgggcagcgagttcacccacctggagttccccagaagagtgctgcccaaggagctgggccagagaatgctgtacagagaccagaacatgaccggctgggcctacaagaagatcgagctggaggacctgagattccccctggtgtgcggcgagggcaagaaggccagagtgatggccaccatcggcgtgaccagaggcctgggcgaccacagcctgaaggtgtgcagcagcaccctgcccatcaagcccttcctgagctgcttccccgaggtgagagtgtacgacctgacccagtacgagcactgccccgacgacgtgctggtgctgggcaccgacggcctgtgggacgtgaccaccgactgcgaggtggccgccaccgtggacagagtgctgagcgcctacgagcccaacgaccacagcagatacaccgccctggcccaggccctggtgctgggcgccagaggcacccccagagacagaggctggagactgcccaacaacaagctgggcagcggcgacgacatcagcgtgttcgtgatccccctgggcggccccggcagctacagctag

SEQ ID NO: 95425 - DNA, 900 bp, synthetic construct
  misc_feature 1..900: note = Description of Artificial Sequence: Synthetic coding sequence
  source 1..900: mol_type = other DNA
atggccagcagactgctgcacagacacatcagagagcagctgaaggacctgaaggaggtgagccacgagagcctggtggtgggcgccgtggagaacgccttccagctgatggacgagcagatggccagagagagaagaggccaccaggtggagggcggctgctgcgccctggtggtgatctacctgctgggcaaggtgtacgtggccaacgccggcgacagcagagccatcatcgtgagaaacggcgagatcatccccatgagcagagagttcacccccgagaccgagagacagagactgcagctgctgggcttcctgaagcccgagctgctgggcagcgagttcacccacctggagttccccagaagagtgctgcccaaggagctgggccagagaatgctgtacagagaccagaacatgaccggctgggcctacaagaagatcgagctggaggacctgagattccccctggtgtgcggcgagggcaagaaggccagagtgatggccaccatcggcgtgaccagaggcctgggcgaccacagcctgaaggtgtgcagcagcaccctgcccatcaagcccttcctgagctgcttccccgaggtgagagtgtacgacctgacccagtacgagcactgccccgacgacgtgctggtgctgggcaccgacggcctgtgggacgtgaccaccgactgcgaggtggccgccaccgtggacagagtgctgagcgcctacgagcccaacgaccacagcagatacaccgccctggcccaggccctggtgctgggcgccagaggcacccccagagacagaggctggagactgcccaacaacaagctgggcagcggcgacgacatcagcgtgttcgtgatccccctgggcggccccggcagctacagctag

SEQ ID NO: 95426 - DNA, 1119 bp, synthetic construct
  misc_feature 1..1119: note = Description of Artificial Sequence: Synthetic coding sequence
  source 1..1119: mol_type = other DNA
atgagcaccgccgccctgatcaccctggtgagaagcggcggcaaccaggtgagaagaagagtgctgctgagcagcagactgctgcaggacgacagaagagtgacccccacctgccacagcagcaccagcgagcccagatgcagcagattcgaccccgacggcagcggcagccccgccacctgggacaacttcggcatctgggacaacagaatcgacgagcccatcctgctgccccccagcatcaagtacggcaagcccatccccaagatcagcctggagaacgtgggctgcgccagccagatcggcaagagaaaggagaacgaggacagattcgacttcgcccagctgaccgacgaggtgctgtacttcgccgtgtacgacggccacggcggccccgccgccgccgacttctgccacacccacatggagaagtgcatcatggacctgctgcccaaggagaagaacctggagaccctgctgaccctggccttcctggagatcgacaaggccttcagcagccacgccagactgagcgccgacgccaccctgctgaccagcggcaccaccgccaccgtggccctgctgagagacggcatcgagctggtggtggccagcgtgggcgacagcagagccatcctgtgcagaaagggcaagcccatgaagctgaccatcgaccacacccccgagagaaaggacgagaaggagagaatcaagaagtgcggcggcttcgtggcctggaacagcctgggccagccccacgtgaacggcagactggccatgaccagaagcatcggcgacctggacctgaagaccagcggcgtgatcgccgagcccgagaccaagagaatcaagctgcaccacgccgacgacagcttcctggtgctgaccaccgacggcatcaacttcatggtgaacagccaggagatctgcgacttcgtgaaccagtgccacgaccccaacgaggccgcccacgccgtgaccgagcaggccatccagtacggcaccgaggacaacagcaccgccgtggtggtgcccttcggcgcctggggcaagtacaagaacagcgagatcaacttcagcttcagcagaagcttcgccagcagcggcagatgggcctag

SEQ ID NO: 95427 - DNA, 702 bp, synthetic construct
  misc_feature 1..702: note = Description of Artificial Sequence: Synthetic coding sequence
  source 1..702: mol_type = other DNA
atgagcaccgccgccctgatcaccctggtgagaagcggcggcaaccaggtgagaagaagagtgctgctgagcagcagactgctgcaggacgacagaagagtgacccccacctgccacagcagcaccagcgagcccagatgcagcagattcgaccccgacggcagcggcagccccgccacctgggacaacttcggcatctgggacaacagaatcgacgagcccatcctgctgccccccagcatcaagtacggcaagcccatccccaagatcagcctggagaacgtgggctgcgccagccagatcggcaagagaaaggagaacgaggacagattcgacttcgcccagctgaccgacgaggtgctgtacttcgccgtgtacgacggccacggcggccccgccgccgccgacttctgccacacccacatggagaagtgcatcatggacctgctgcccaaggagaagaacctggagaccctgctgaccctggccttcctggagatcgacaaggccttcagcagccacgccagactgagcgccgacgagaactgcgcctggagcgccgccctggacctggagcccgtggacaccatctgcggcgccagcgtggagagagagatctgcctgatcctgagccaggtgaaggagagcagcggcagctaccccggcctgagagagggcagccacatcagcctgagccactag

SEQ ID NO: 95428 - DNA, 702 bp, synthetic construct; identical to SEQ ID NO: 95427
  misc_feature 1..702: note = Description of Artificial Sequence: Synthetic coding sequence
  source 1..702: mol_type = other DNA

SEQ ID NO: 95429 - DNA, 585 bp, synthetic construct
  misc_feature 1..585: note = Description of Artificial Sequence: Synthetic coding sequence
  source 1..585: mol_type = other DNA
atgatcgaggacaccatgaccctgctgagcctgctgggcagaatcatgagatacttcctgctgagacccgagaccctgttcctgctgtgcatcagcctggccctgtggagctacttcttccacaccgacgaggtgaagaccatcgtgaagagcagcagagacgccgtgaagatggtgaagggcaaggtggccgagatcatgcagaacgacagactgggcggcctggacgtgctggaggccgagttcagcaagacctgggagttcaagaaccacaacgtggccgtgtacagcatccagggcagaagagaccacatggaggacagattcgaggtgctgaccgacctggccaacaagacccaccccagcatcttcggcatcttcgacggccacggcggcgagaccgccgccgagtacgtgaagagcagactgcccgaggccctgaagcagcacctgcaggactacgagaaggacaaggagaacagcgtgctgagctaccagaccatcctggagcagcagatcctgagcatcgacagagagatgctggagaagctgaccgtgagctacgacgaggccgtgaccttctag

SEQ ID NO: 95430 - DNA, 1083 bp, synthetic construct
  misc_feature 1..1083: note = Description of Artificial Sequence: Synthetic coding sequence
  source 1..1083: mol_type = other DNA
atgatcgaggacaccatgaccctgctgagcctgctgggcagaatcatgagatacttcctgctgagacccgagaccctgttcctgctgtgcatcagcctggccctgtggagctacttcttccacaccgacgaggtgaagaccatcgtgaagagcagcagagacgccgtgaagatggtgaagggcaaggtggccgagatcatgcagaacgacagactgggcggcctggacgtgctggaggccgagttcagcaagacctgggagttcaagaaccacaacgtggccgtgtacagcatccagggcagaagagaccacatggaggacagattcgaggtgctgaccgacctggccaacaagacccaccccagcatcttcggcatcttcgacggccacggcggcgagaccgccgccgagtacgtgaagagcagactgcccgaggccctgaagcagcacctgcaggactacgagaaggacaaggagaacagcgtgctgagctaccagaccatcctggagcagcagatcctgagcatcgacagagagatgctggagaagctgaccgtgagctacgacgaggccggcaccacctgcctgatcgccctgctgagcgacaaggacctgaccgtggccaacgtgggcgacagcagaggcgtgctgtgcgacaaggacggcaacgccatccccctgagccacgaccacaagccctaccagctgaaggagagaaagagaatcaagagagccggcggcttcatcagcttcaacggcagctggagagtgcagggcatcctggccatgagcagaagcctgggcgactaccccctgaagaacctgaacgtggtgatccccgaccccgacatcctgaccttcgacctggacaagctgcagcccgagttcatgatcctggccagcgacggcctgtgggacgccttcagcaacgaggaggccgtgagattcatcaaggagagactggacgagccccacttcggcgccaagagcatcgtgctgcagagcttctacagaggctgccccgacaacatcaccgtgatggtggtgaagttcagaaacagcagcaagaccgaggagcagtag

SEQ ID NO: 95431 - DNA, 813 bp, synthetic construct
  misc_feature 1..813: note = Description of Artificial Sequence: Synthetic coding sequence
  source 1..813: mol_type = other DNA
atgcacctgaacggcagatgcatctgccccagcgacccccagttcgtggaggagaagggcatcagagccgaggacctggtgatcggcgccctggagagcgccttccaggagtgcgacgaggtgatcggcagagagctggaggccagcggccagatgggcggctgcaccgccctggtggccgtgagcctgcagggcaagctgtacatggccaacgccggcgacagcagagccatcctggtgagaagagacgagatcagacccctgagcttcgagttcacccccgagaccgagagacagagaatccagcagctggccttcgtgtaccccgagctgctggccggcgagttcaccagactggagttccccagaagactgaagggcgacgacctgggccagaaggtgctgttcagagaccaccacatgagcggctggagctacaagagagtggagaagagcgacctgaagtaccccctgatccacggccagggcagacaggccagactgctgggcaccctggccgtgagcagaggcctgggcgaccaccagctgagagtgctggacaccaacatccagctgaagcccttcctgctgagcgtgccccaggtgaccgtgctggacgtggaccagctggagctgcaggaggacgacgtggtggtgatggccaccgacggcctgtgggacgtgctgagcaacgagcaggtggcctggctggtgagaagcttcctgcccggcaaccaggaggacccccacagatactgcagctgctggggccccgcctgggcctgggtgggcgccagcagcaagcccaagtag

SEQ ID NO: 95432 - DNA, 897 bp, synthetic construct
  misc_feature 1..897: note = Description of Artificial Sequence: Synthetic coding sequence
  source 1..897: mol_type = other DNA
atgcacctgaacggcagatgcatctgccccagcgacccccagttcgtggaggagaagggcatcagagccgaggacctggtgatcggcgccctggagagcgccttccaggagtgcgacgaggtgatcggcagagagctggaggccagcggccagatgggcggctgcaccgccctggtggccgtgagcctgcagggcaagctgtacatggccaacgccggcgacagcagagccatcctggtgagaagagacgagatcagacccctgagcttcgagttcacccccgagaccgagagacagagaatccagcagctggccttcgtgtaccccgagctgctggccggcgagttcaccagactggagttccccagaagactgaagggcgacgacctgggccagaaggtgctgttcagagaccaccacatgagcggctggagctacaagagagtggagaagagcgacctgaagtaccccctgatccacggccagggcagacaggccagactgctgggcaccctggccgtgagcagaggcctgggcgaccaccagctgagagtgctggacaccaacatccagctgaagcccttcctgctgagcgtgccccaggtgaccgtgctggacgtggaccagctggagctgcaggaggacgacgtggtggtgatggccaccgacggcctgtgggacgtgctgagcaacgagcaggtggcctggctggtgagaagcttcctgcccggcaaccaggaggacccccacagattcagcaagctggcccagatgctgatccacagcacccagggcaaggaggacagcctgaccgaggagggccaggtgagctacgacgacgtgagcgtgttcgtgatccccctgcacagccagggccaggagagcagcgaccactag

SEQ ID NO: 95433 - DNA, 744 bp, synthetic construct
  misc_feature 1..744: note = Description of Artificial Sequence: Synthetic coding sequence
  source 1..744: mol_type = other DNA
atgggcggctgcaccgccctggtggccgtgagcctgcagggcaagctgtacatggccaacgccggcgacagcagagccatcctggtgagaagagacgagatcagacccctgagcttcgagttcacccccgagaccgagagacagagaatccagcagctggccttcgtgtaccccgagctgctggccggcgagttcaccagactggagttccccagaagactgaagggcgacgacctgggccagaaggtgctgttcagagaccaccacatgagcggctggagctacaagagagtggagaagagcgacctgaagtaccccctgatccacggccagggcagacaggccagactgctgggcaccctggccgtgagcagaggcctgggcgaccaccagctgagagtgctggacaccaacatccagctgaagcccttcctgctgagcgtgccccaggtgaccgtgctggacgtggaccagctggagctgcaggaggacgacgtggtggtgatggccaccgacggcctgtgggacgtgctgagcaacgagcaggtggcctggctggtgagaagcttcctgcccggcaaccaggaggacccccacagattcagcaagctggcccagatgctgatccacagcacccagggcaaggaggacagcctgaccgaggagggccaggtgagctacgacgacgtgagcgtgttcgtgatccccctgcacagccagggccaggagagcagcgaccactag

SEQ ID NO: 95434 - DNA, 1380 bp, synthetic construct
  misc_feature 1..1380: note = Description of Artificial Sequence: Synthetic coding sequence
  source 1..1380: mol_type = other DNA
atgagcgccggctggttcagaagaagattcctgcccggcgagcccctgcccgcccccagaccccccggcccccacgccagccccgtgccctacagaagacccagattcctgagaggcagcagcagcagccccggcgccgccgacgccagcagaagacccgacagcagacccgtgagaagccccgccagaggcagaaccctgccctggaacgccggctacgccgagatcatcaacgccgagaagagcgagttcaacgaggaccaggccgcctgcggcaagctgtgcatcagaagatgcgagttcggcgccgaggaggagtggctgaccctgtgccccgaggagttcctgaccggccactactgggccctgttcgacggccacggcggccccgccgccgccatcctggccgccaacaccctgcacagctgcctgagaagacagctggaggccgtggtggagggcctggtggccacccagccccccatgcacctgaacggcagatgcatctgccccagcgacccccagttcgtggaggagaagggcatcagagccgaggacctggtgatcggcgccctggagagcgccttccaggagtgcgacgaggtgatcggcagagagctggaggccagcggccagatgggcggctgcaccgccctggtggccgtgagcctgcagggcaagctgtacatggccaacgccggcgacagcagagccatcctggtgagaagagacgagatcagacccctgagcttcgagttcacccccgagaccgagagacagagaatccagcagctggccttcgtgtaccccgagctgctggccggcgagttcaccagactggagttccccagaagactgaagggcgacgacctgggccagaaggtgctgttcagagaccaccacatgagcggctggagctacaagagagtggagaagagcgacctgaagtaccccctgatccacggccagggcagacaggccagactgctgggcaccctggccgtgagcagaggcctgggcgaccaccagctgagagtgctggacaccaacatccagctgaagcccttcctgctgagcgtgccccaggtgaccgtgctggacgtggaccagctggagctgcaggaggacgacgtggtggtgatggccaccgacggcctgtgggacgtgctgagcaacgagcaggtggcctggctggtgagaagcttcctgcccggcaaccaggaggacccccacagattcagcaagctggcccagatgctgatccacagcacccagggcaaggaggacagcctgaccgaggagggccaggtgagctacgacgacgtgagcgtgttcgtgatccccctgcacagccagggccaggagagcagcgaccactag

SEQ ID NO: 95435 - DNA, 1821 bp, synthetic construct
  misc_feature 1..1821: note = Description of Artificial Sequence: Synthetic coding sequence
  source 1..1821: mol_type = other DNA
atgagaagaagcgaggtgctggccgaggagagcatcgtgtgcctgcagaaggccctgaaccacctgagagagatctgggagctgatcggcatccccgaggaccagagactgcagagaaccgaggtggtgaagaagcacatcaaggagctgctggacatgatgatcgccgaggaggagagcctgaaggagagactgatcaagagcatcagcgtgtgccagaaggagctgaacaccctgtgcagcgagctgcacgtggagcccttccaggaggagggcgagaccaccatcctgcagctggagaaggacctgagaacccaggtggagctgatgagaaagcagaagaaggagagaaagcaggagctgaagctgctgcaggagcaggaccaggagctgtgcgagatcctgtgcatgccccactacgacatcgacagcgccagcgtgcccagcctggaggagctgaaccagttcagacagcacgtgaccaccctgagagagaccaaggccagcagaagagaggagttcgtgagcatcaagagacagatcatcctgtgcatggaggccctggaccacacccccgacaccagcttcgagagagacgtggtgtgcgaggacgaggacgccttctgcctgagcctggagaacatcgccaccctgcagaagctgctgagacagctggagatgcagaagagccagaacgaggccgtgtgcgagggcctgagaacccagatcagagagctgtgggacagactgcagatccccgaggaggagagagaggccgtggccaccatcatgagcggcagcaaggccaaggtgagaaaggccctgcagctggaggtggacagactggaggagctgaagatgcagaacatgaagaaggtgatcgaggccatcagagtggagctggtgcagtactgggaccagtgcttctacagccaggagcagagacaggccttcgcccccttctgcgccgaggactacaccgagagcctgctgcagctgcacgacgccgagatcgtgagactgaagaactactacgaggtgcacaaggagctgttcgagggcgtgcagaagtgggaggagacctggagactgttcctggagttcgagagaaaggccagcgaccccaacagattcaccaacagaggcggcaacctgctgaaggaggagaagcagagagccaagctgcagaagatgctgcccaagctggaggaggagctgaaggccagaatcgagctgtgggagcaggagcacagcaaggccttcatggtgaacggccagaagttcatggagtacgtggccgagcagtgggagatgcacagactggagaaggagagagccaagcaggagagacagctgaagaacaagaagcagaccgagaccgagatgctgtacggcagcgcccccagaacccccagcaagagaagaggcctggcccccaacacccccggcaaggccagaaagctgaacaccaccaccatgagcaacgccaccgccaacagcagcatcagacccatcttcggcggcaccgtgtaccacagccccgtgagcagactgccccccagcggcagcaagcccgtggccgccagcacctgcagcggcaagaagacccccagaaccggcagacacggcgccaacaaggagaacctggagctgaacggcagcatcctgagcggcggctaccccggcagcgcccccctgcagagaaacttcagcatcaacagcgtggccagcacctacagcgagttcgccagagagctgagcaaggccagcaagagcgacgccaccagcggcatcctgaacagcaccaacatccagagctag

SEQ ID NO: 95436 - DNA, 1701 bp, synthetic construct
  misc_feature 1..1701: note = Description of Artificial Sequence: Synthetic coding sequence
  source 1..1701: mol_type = other DNA
atgagaagaagcgaggtgctggccgaggagagcatcgtgtgcctgcagaaggccctgaaccacctgagagagatctgggagctgatcggcatccccgaggaccagagactgcagagaaccgaggtggtgaagaagcacatcaaggagctgctggacatgatgatcgccgaggaggagagcctgaaggagagactgatcaagagcatcagcgtgtgccagaaggagctgaacaccctgtgcagcgagctgcacgtggagcccttccaggaggagggcgagaccaccatcctgcagctggagaaggacctgagaacccaggtggagctgatgagaaagcagaagaaggagagaaagcaggagctgaagctgctgcaggagcaggaccaggagctgtgcgagatcctgtgcatgccccactacgacatcgacagcgccagcgtgcccagcctggaggagctgaaccagttcagacagcacgtgaccaccctgagagagaccaaggccagcagaagagaggagttcgtgagcatcaagagacagatcatcctgtgcatggaggccctggaccacacccccgacaccagcttcgagagagacgtggtgtgcgaggacgaggacgccttctgcctgagcctggagaacatcgccaccctgcagaagctgctgagacagctggagatgcagaagagccagaacgaggccgtgtgcgagggcctgagaacccagatcagagagctgtgggacagactgcagatccccgaggaggagagagaggccgtggccaccatcatgagcggcagcaaggccaaggtgagaaaggccctgcagctggaggtggacagactggaggagctgaagatgcagaacatgaagaaggtgatcgaggccatcagagtggagctggtgcagtactgggaccagtgcttctacagccaggagcagagacaggccttcgcccccttctgcgccgaggactacaccgagagcctgctgcagctgcacgacgccgagatcgtgagactgaagaactactacgaggtgcacaaggagctgttcgagggcgtgcagaagtgggaggagacctggagactgttcctggagttcgagagaaaggccagcgaccccaacagattcaccaacagaggcggcaacctgctgaaggaggagaagcagagagccaagctgcagaagatgctgcccaagctggaggaggagctgaaggccagaatcgagctgtgggagcaggagcacagcaaggccttcatggtgaacggccagaagttcatggagtacgtggccgagcagtgggagatgcacagactggagaaggagagagccaagcaggagagacagctgaagaacaagaagcagaccgagaccgagatgctgtacggcagcgcccccagaacccccagcaagagaagaggcctggcccccaacacccccggcaaggccagaaagctgaacaccaccaccatgagcaacgccaccgccaacagcagcatcagacccatcttcggcggcaccgtgtaccacagccccgtgagcagactgccccccagcggcagcaagcccgtggccgccagcacctgcagcggcaagaagacccccagaaccggcagacacggcgccaacaaggagaacctggagctgaacggcagcatcctgagcgccagaaccttcaagggcttccagatctag

SEQ ID NO: 95437 - DNA, 1863 bp, synthetic construct
  misc_feature 1..1863: note = Description of Artificial Sequence: Synthetic coding sequence
  source 1..1863: mol_type = other DNA
atgagaagaagcgaggtgctggccgaggagagcatcgtgtgcctgcagaaggccctgaaccacctgagagagatctgggagctgatcggcatccccgaggaccagagactgcagagaaccgaggtggtgaagaagcacatcaaggagctgctggacatgatgatcgccgaggaggagagcctgaaggagagactgatcaagagcatcagcgtgtgccagaaggagctgaacaccctgtgcagcgagctgcacgtggagcccttccaggaggagggcgagaccaccatcctgcagctggagaaggacctgagaacccaggtggagctgatgagaaagcagaagaaggagagaaagcaggagctgaagctgctgcaggagcaggaccaggagctgtgcgagatcctgtgcatgccccactacgacatcgacagcgccagcgtgcccagcctggaggagctgaaccagttcagacagcacgtgaccaccctgagagagaccaaggccagcagaagagaggagttcgtgagcatcaagagacagatcatcctgtgcatggaggccctggaccacacccccgacaccagcttcgagagagacgtggtgtgcgaggacgaggacgccttctgcctgagcctggagaacatcgccaccctgcagaagctgctgagacagctggagatgcagaagagccagaacgaggccgtgtgcgagggcctgagaacccagatcagagagctgtgggacagactgcagatccccgaggaggagagagaggccgtggccaccatcatgagcggcagcaaggccaaggtgagaaaggccctgcagctggaggtggacagactggaggagctgaagatgcagaacatgaagaaggtgatcgaggccatcagagtggagctggtgcagtactgggaccagtgcttctacagccaggagcagagacaggccttcgcccccttctgcgccgaggactacaccgagagcctgctgcagctgcacgacgccgagatcgtgagactgaagaactactacgaggtgcacaaggagctgttcgagggcgtgcagaagtgggaggagacctggagactgttcctggagttcgagagaaaggccagcgaccccaacagattcaccaacagaggcggcaacctgctgaaggaggagaagcagagagccaagctgcagaagatgctgcccaagctggaggaggagctgaaggccagaatcgagctgtgggagcaggagcacagcaaggccttcatggtgaacggccagaagttcatggagtacgtggccgagcagtgggagatgcacagactggagaaggagagagccaagcaggagagacagctgaagaacaagaagcagaccgagaccgagatgctgtacggcagcgcccccagaacccccagcaagagaagaggcctggcccccaacacccccggcaaggccagaaagctgaacaccaccaccatgagcaacgccaccgccaacagcagcatcagacccatcttcggcggcaccgtgtaccacagccccgtgagcagactgccccccagcggcagcaagcccgtggccgccagcacctgcagcggcaagaagacccccagaaccggcagacacggcgccaacaaggagaacctggagctgaacggcagcatcctgagcggcggctaccccggcagcgcccccctgcagagaaacttcagcatcaacagcgtggccagcacctacagcgagttcgccaaggaccccagcctgagcgacagcagcaccgtgggcctgcagagagagctgagcaaggccagcaagagcgacgccaccagcggcatcctgaacagcaccaacatccagagctag

SEQ ID NO: 95438 - DNA, 1578 bp, synthetic construct
  misc_feature 1..1578: note = Description of Artificial Sequence: Synthetic coding sequence
  source 1..1578: mol_type = other DNA
atgagaagaagcgaggtgctggccgaggagagcatcgtgtgcctgcagaaggccctgaaccacctgagagagatctgggagctgatcggcatccccgaggaccagagactgcagagaaccgaggtggtgaagaagcacatcaaggaggagggcgagaccaccatcctgcagctggagaaggacctgagaacccaggtggagctgatgagaaagcagaagaaggagagaaagcaggagctgaagctgctgcaggagcaggaccaggagctgtgcgagatcctgtgcatgccccactacgacatcgacagcgccagcgtgcccagcctggaggagctgaaccagttcagacagcacgtgaccaccctgagagagaccaaggccagcagaagagaggagttcgtgagcatcaagagacagatcatcctgtgcatggaggccctggaccacacccccgacaccagcttcgagagagacgtggtgtgcgaggacgaggacgccttctgcctgagcctggagaacatcgccaccctgcagaagctgctgagacagctggagatgcagaagagccagaacgaggccgtgtgcgagggcctgagaacccagatcagagagctgtgggacagactgcagatccccgaggaggagagagaggccgtggccaccatcatgagcggcagcaaggccaaggtgagaaaggccctgcagctggaggtggacagactggaggagctgaagatgcagaacatgaagaaggtgatcgaggccatcagagtggagctggtgcagtactgggaccagtgcttctacagccaggagcagagacaggccttcgcccccttctgcgccgaggactacaccgagagcctgctgcagctgcacgacgccgagatcgtgagactgaagaactactacgaggtgcacaaggagctgttcgagggcgtgcagaagtgggaggagacctggagactgttcctggagttcgagagaaaggccagcgaccccaacagattcaccaacagaggcggcaacctgctgaaggaggagaagcagagagccaagctgcagaagatgctgcccaagctggaggaggagctgaaggccagaatcgagctgtgggagcaggagcacagcaaggccttcatggtgaacggccagaagttcatggagtacgtggccgagcagtgggagatgcacagactggagaaggagagagccaagcaggagagacagctgaagaacaagaagcagaccgagaccgagatgctgtacggcagcgcccccagaacccccagcaagagaagaggcctggcccccaacacccccggcaaggccagaaagctgaacaccaccaccatgagcaacgccaccgccaacagcagcatcagacccatcttcggcggcaccgtgtaccacagccccgtgagcagactgccccccagcggcagcaagcccgtggccgccagcacctgcagcggcaagaagacccccagaaccggcagacacggcgccaacaaggagaacctggagctgaacggcagcatcctgagcgccagaaccttcaagggcttccagatctag

SEQ ID NO: 95439 - DNA, 696 bp, synthetic construct
  misc_feature 1..696: note = Description of Artificial Sequence: Synthetic coding sequence
  source 1..696: mol_type = other DNA
atgagagtgctgggcggcagatgcggcgccctgctggcctgcctgctgctggtgctgcccgtgagcgaggccaacttctgcctgtacttcagaaacgacttcatctacaacagagcctgcatcagcgtgctggtgggcctgagcggctgcaacttcttctacagcatctgcttcctgagcaagcagcaggccagccaggtgctggtgagaaagagaagagccaacagcctgctggaggagaccaagcagggcaacctggagagagagtgcatcgaggagctgtgcaacaaggaggaggccagagaggtgttcgagaacgaccccgagaccgactacttctaccccaagtacctggtgtgcctgagaagcttccagaccggcctgttcaccgccgccagacagagcaccaacgcctaccccgacctgagaagctgcgtgaacgccatccccgaccagtgcagccccctgccctgcaacgaggacggctacatgagctgcaaggacggcaaggccagcttcacctgcacctgcaagcccggctggcagggcgagaagtgcgagttcgacatcaacgagtgcaaggaccccagcaacatcaacggcggctgcagccagatctgcgacaacacccccggcagctaccactgcagctgcaagaacggcttcgtgatgctgagcaacaagaaggactgctag

SEQ ID NO: 95440 - DNA, 2031 bp, synthetic construct
  misc_feature 1..2031: note = Description of Artificial Sequence: Synthetic coding sequence
  source 1..2031: mol_type = other DNA
atgagagtgctgggcggcagatgcggcgccctgctggcctgcctgctgctggtgctgcccgtgagcgaggccaacttcctgagcaagcagcaggccagccaggtgctggtgagaaagagaagagccaacagcctgctggaggagaccaagcagggcaacctggagagagagtgcatcgaggagctgtgcaacaaggaggaggccagagaggtgttcgagaacgaccccgagaccgactacttctaccccaagtacctggtgtgcctgagaagcttccagaccggcctgttcaccgccgccagacagagcaccaacgcctaccccgacctgagaagctgcgtgaacgccatccccgaccagtgcagccccctgccctgcaacgaggacggctacatgagctgcaaggacggcaaggccagcttcacctgcacctgcaagcccggctggcagggcgagaagtgcgagttcgacatcaacgagtgcaaggaccccagcaacatcaacggcggctgcagccagatctgcgacaacacccccggcagctaccactgcagctgcaagaacggcttcgtgatgctgagcaacaagaaggactgcaaggacgtggacgagtgcagcctgaagcccagcatctgcggcaccgccgtgtgcaagaacatccccggcgacttcgagtgcgagtgccccgagggctacagatacaacctgaagagcaagagctgcgaggacatcgacgagtgcagcgagaacatgtgcgcccagctgtgcgtgaactaccccggcggctacacctgctactgcgacggcaagaagggcttcaagctggcccaggaccagaagagctgcgaggtggtgagcgtgtgcctgcccctgaacctggacaccaagtacgagctgctgtacctggccgagcagttcgccggcgtggtgctgtacctgaagttcagactgcccgagatcagcagattcagcgccgagttcgacttcagaacctacgacagcgagggcgtgatcctgtacgccgagagcatcgaccacagcgcctggctgctgatcgccctgagaggcggcaagatcgaggtgcagctgaagaacgagcacaccagcaagatcaccaccggcggcgacgtgatcaacaacggcctgtggaacatggtgagcgtggaggagctggagcacagcatcagcatcaagatcgccaaggaggccgtgatggacatcaacaagcccggccccctgttcaagcccgagaacggcctgctggagaccaaggtgtacttcgccggcttccccagaaaggtggagagcgagctgatcaagcccatcaaccccagactggacggctgcatcagaagctggaacctgatgaagcagggcgccagcggcatcaaggagatcatccaggagaagcagaacaagcactgcctggtgaccgtggagaagggcagctactaccccggcagcggcatcgcccagttccacatcgactacaacaacgtgagcagcgccgagggctggcacgtgaacgtgaccctgaacatcagacccagcaccggcaccggcgtgatgctggccctggtgagcggcaacaacaccgtgcccttcgccgtgagcctggtggacagcaccagcgagaagagccaggacatcctgctgagcgtggagaacaccgtgatctacagaatccaggccctgagcctgtgcagcgaccagcagagccacctggagttcagagtgaacagaaacaacctggagctgagcacccccctgaagatcgagaccatcagccacgaggacctgcagagacagctggccgtgctggacaaggccatgaaggccaaggtggccacctacctgggcggcctgcccgacgtgcccttcagcgccacccccgtgaacgccttctacaacggctgcatggaggtgaacatcaacggcgtgcagctggacctggacgaggccatcagcaagcacaacgacatcagagcccacagctgccccagcgtgtggaagaagaccaagaacagctag

SEQ ID NO: 95441 - DNA, 1275 bp, synthetic construct
  misc_feature 1..1275: note = Description of Artificial Sequence: Synthetic coding sequence
  source 1..1275: mol_type = other DNA
atgggctgcggcaccagcaaggtgctgcccgagccccccaaggacgtgcagctggacctggtgaagaaggtggagcccttcagcggcaccaagagcgacgtgtacaagcacttcatcaccgaggtggacagcgtgggccccgtgaaggccggcttccccgccgccagccagtacgcccacccctgccccggcccccccaccgccggccacaccgagccccccagcgagccccccagaagagccagagtggccaagtacagagccaagttcgaccccagagtgaccgccaagtacgacatcaaggccctgatcggcagaggcagcttcagcagagtggtgagagtggagcacagagccaccagacagccctacgccatcaagatgatcgagaccaagtacagagagggcagagaggtgtgcgagagcgagctgagagtgctgagaagagtgagacacgccaacatcatccagctggtggaggtgttcgagacccaggagagagtgtacatggtgatggagctggccaccggcggcgagctgttcgacagaatcatcgccaagggcagcttcaccgagagagacgccaccagagtgctgcagatggtgctggacggcgtgagatacctgcacgccctgggcatcacccacagagacctgaagcccgagaacctgctgtactaccaccccggcaccgacagcaagatcatcatcaccgacttcggcctggccagcgccagaaagaagggcgacgactgcctgatgaagaccacctgcggcacccccgagtacatcgcccccgaggtgctggtgagaaagccctacaccaacagcgtggacatgtgggccctgggcgtgatcgcctacatcctgctgagcggcaccatgcccttcgaggacgacaacagaaccagactgtacagacagatcctgagaggcaagtacagctacagcggcgagccctggcccagcgtgagcaacctggccaaggacttcatcgacagactgctgaccgtggaccccggcgccagaatgaccgccctgcaggccctgagacacccctgggtggtgagcatggccgccagcagcagcatgaagaacctgcacagaagcatcagccagaacctgctgaagagagccagcagcagatgccagagcaccaagagcgcccagagcaccagaagcagcagaagcaccagaagcaacaagagcagaagagtgagagagagagagctgagagagctgaacctgagataccagcagcagtacaacggctag

SEQ ID NO: 95442 - DNA, 1953 bp, synthetic construct
  misc_feature 1..1953: note = Description of Artificial Sequence: Synthetic coding sequence
  source 1..1953: mol_type = other DNA
atggcctgcagagagttcgagatgggcagaaagaagtgcgagagatactggcccctgtacggcgaggaccccatcaccttcgcccccttcaagatcagctgcgaggacgagcaggccagaaccgactacttcatcagaaccctgctgctggagttccagaacgagagcagaagactgtaccagttccactacgtgaactggcccgaccacgacgtgcccagcagcttcgacagcatcctggacatgatcagcctgatgagaaagtaccaggagcacgaggacgtgcccatctgcatccactgcagcgccggctgcggcagaaccggcgccatctgcgccatcgactacacctggaacctgctgaaggccggcaagatccccgaggagttcaacgtgttcaacctgatccaggagatgagaacccagagacacagcgccgtgcagaccaaggagcagtacgagctggtgcacagagccatcgcccagctgttcgagaagcagctgcagctgtacgagatccacggcgcccagaagatcgccgacggcgtgaacgagatcaacaccgagaacatggtgagcagcatcgagcccgagaagcaggacagccccccccccaagccccccagaaccagaagctgcctggtggagggcgacgccaaggaggagatcctgcagccccccgagccccaccccgtgccccccatcctgacccccagcccccccagcgccttccccaccgtgaccaccgtgtggcaggacaacgacagataccaccccaagcccgtgctgcacatggtgagcagcgagcagcacagcgccgacctgaacagaaactacagcaagagcaccgagctgcccggcaagaacgagagcaccatcgagcagatcgacaagaagctggagagaaacctgagcttcgagatcaagaaggtgcccctgcaggagggccccaagagcttcgacggcaacaccctgctgaacagaggccacgccatcaagatcaagagcgccagcccctgcatcgccgacaagatcagcaagccccaggagctgagcagcgacctgaacgtgggcgacaccagccagaacagctgcgtggactgcagcgtgacccagagcaacaaggtgagcgtgaccccccccgaggagagccagaacagcgacaccccccccagacccgacagactgcccctggacgagaagggccacgtgacctggagcttccacggccccgagaacgccatccccatccccgacctgagcgagggcaacagcagcgacatcaactaccagaccagaaagaccgtgagcctgacccccagccccaccacccaggtggagacccccgacctggtggaccacgacaacaccagccccctgttcagaacccccctgagcttcaccaaccccctgcacagcgacgacagcgacagcgacgagagaaacagcgacggcgccgtgacccagaacaagaccaacatcagcaccgccagcgccaccgtgagcgccgccaccagcaccgagagcatcagcaccagaaaggtgctgcccatgagcatcgccagacacaacatcgccggcaccacccacagcggcgccgagaaggacgtggacgtgagcgaggacagccccccccccctgcccgagagaacccccgagagcttcgtgctggccagcgagcacaacacccccgtgagaagcgagtggagcgagctgcagagccaggagagaagcgagcagaagaagagcgagggcctgatcaccagcgagaacgagaagtgcgaccaccccgccggcggcatccactacgagatgtgcatcgagtgcccccccaccttcagcgacaagagagagcagatcagcgagaaccccaccgaggccaccgacatcggcttcggcaacagatgcggcaagcccaagggccccagagacccccccagcgagtggacctag

SEQ ID NO: 95443 - DNA, 1062 bp, synthetic construct
  misc_feature 1..1062: note = Description of Artificial Sequence: Synthetic coding sequence
  source 1..1062: mol_type = other DNA
atgagcagaagcctggacagcgccagaagcttcctggagagactggaggccagaggcggcagagagggcgccgtgctggccggcgagttcagcaagagatgcgagagatactgggcccaggagcaggagcccctgcagaccggcctgttctgcatcaccctgatcaaggagaagtggctgaacgaggacatcatgctgagaaccctgaaggtgaccttccagaaggagagcagaagcgtgtaccagctgcagtacatgagctggcccgacagaggcgtgcccagcagccccgaccacatgctggccatggtggaggaggccagaagactgcagggcagcggccccgagcccctgtgcgtgcactgcagcgccggctgcggcagaaccggcgtgctgtgcaccgtggactacgtgagacagctgctgctgacccagatgatcccccccgacttcagcctgttcgacgtggtgctgaagatgagaaagcagagacccgccgccgtgcagaccgaggagcagtacagattcctgtaccacaccgtggcccagatgttctgcagcaccctgcagaacgccagcccccactaccagaacatcaaggagaactgcgcccccctgtacgacgacgccctgttcctgagaaccccccaggccctgctggccatccccagaccccccggcggcgtgctgagaagcatcagcgtgcccggcagccccggccacgccatggccgacacctacgccgtggtgcagaagagaggcgcccccgccggcgccggcagcggcacccagaccggcaccggcaccggcaccggcgccagaagcgccgaggaggcccccctgtacagcaaggtgacccccagagcccagagacccggcgcccacgccgaggacgccagaggcaccctgcccggcagagtgcccgccgaccagagccccgccggcagcggcgcctacgaggacgtggccggcggcgcccagaccggcggcctgggcttcaacctgagaatcggcagacccaagggccccagagacccccccgccgagtggaccagagtgtag

SEQ ID NO: 95444 - DNA, 1233 bp, synthetic construct
  misc_feature 1..1233: note = Description of Artificial Sequence: Synthetic coding sequence
  source 1..1233: mol_type = other DNA
atgcccaccaccatcgagagagagttcgaggagctggacacccagagaagatggcagcccctgtacctggagatcagaaacgagagccacgactacccccacagagtggccaagttccccgagaacagaaacagaaacagatacagagacgtgagcccctacgaccacagcagagtgaagctgcagaacgccgagaacgactacatcaacgccagcctggtggacatcgaggaggcccagagaagctacatcctgacccagggccccctgcccaacacctgctgccacttctggctgatggtgtggcagcagaagaccaaggccgtggtgatgctgaacagaatcgtggagaaggagagcgtgaagtgcgcccagtactggcccaccgacgaccaggagatgctgttcaaggagaccggcttcagcgtgaagctgctgagcgaggacgtgaagagctactacaccgtgcacctgctgcagctggagaacatcaactacatcgagaacctgtggatcaccctgtacctgaagctgctgatgctggacgtgaagagaagcctgaagagcggcgagaccagaaccatcagccacttccactacaccacctggcccgacttcggcgtgcccgagagccccgccagcttcctgaacttcctgttcaaggtgagagagagcggcagcctgaaccccgaccacggccccgccgtgatccactgcagcgccggcatcggcagaagcggcaccttcagcctggtggacacctgcctggtgctgatggagaagggcgacgacatcaacatcaagcaggtgctgctgaacatgagaaagtacagaatgggcctgatccagacccccgaccagctgagattcagctacatggccatcatcgagggcgccaagtgcatcaagggcgacagcagcatccagaagagatggaaggagctgagcaaggaggacctgagccccgccttcgaccacagccccaacaagatcatgaccgagaagtacaacggcaacagaatcggcctggaggaggagaagctgaccggcgacagatgcaccggcctgagcagcaagatgcaggacaccatggaggagaacagcgagagcgccctgagaaagagaatcagagaggacagaaaggccaccaccgcccagaaggtgcagcagatgaagcagagactgaacgagaacgagagaaagagaaagagacccagactgaccgacacctag

SEQ ID NO: 95445 - DNA, 2259 bp, synthetic construct
  misc_feature 1..2259: note = Description of Artificial Sequence: Synthetic coding sequence
  source 1..2259: mol_type = other DNA
atggaccagagagagatcctgcagaagttcctggacgaggcccagagcaagaagatcaccaaggaggagttcgccaacgagttcctgaagctgaagagacagagcaccaagtacaaggccgacaagacctaccccaccaccgtggccgagaagcccaagaacatcaagaagaacagatacaaggacatcctgccctacgactacagcagagtggagctgagcctgatcaccagcgacgaggacagcagctacatcaacgccaacttcatcaagggcgtgtacggccccaaggcctacatcgccacccagggccccctgagcaccaccctgctggacttctggagaatgatctgggagtacagcgtgctgatcatcgtgatggcctgcatggagtacgagatgggcaagaagaagtgcgagagatactgggccgagcccggcgagatgcagctggagttcggccccttcagcgtgagctgcgaggccgagaagagaaagagcgactacatcatcagaaccctgaaggtgaagttcaacagcgagaccagaaccatctaccagttccactacaagaactggcccgaccacgacgtgcccagcagcatcgaccccatcctggagctgatctgggacgtgagatgctaccaggaggacgacagcgtgcccatctgcatccactgcagcgccggctgcggcagaaccggcgtgatctgcgccatcgactacacctggatgctgctgaaggacggcagccaggccaagcactgcatccccgagaagaaccacaccctgcaggccgacagctacagccccaacctgcccaagagcaccaccaaggccgccaagatgatgaaccagcagagaaccaagatggagatcaaggagagcagcagcttcgacttcagaaccagcgagatcagcgccaaggaggagctggtgctgcaccccgccaagagcagcaccagcttcgacttcctggagctgaactacagcttcgacaagaacgccgacaccaccatgaagtggcagaccaaggccttccccatcgtgggcgagcccctgcagaagcaccagagcctggacctgggcagcctgctgttcgagggctgcagcaacagcaagcccgtgaacgccgccggcagatacttcaacagcaaggtgcccatcaccagaaccaagagcacccccttcgagctgatccagcagagagagaccaaggaggtggacagcaaggagaacttcagctacctggagagccagccccacgacagctgcttcgtggagatgcaggcccagaaggtgatgcacgtgagcagcgccgagctgaactacagcctgccctacgacagcaagcaccagatcagaaacgccagcaacgtgaagcaccacgacagcagcgccctgggcgtgtacagctacatccccctggtggagaacccctacttcagcagctggccccccagcggcaccagcagcaagatgagcctggacctgcccgagaagcaggacggcaccgtgttccccagcagcctgctgcccaccagcagcaccagcctgttcagctactacaacagccacgacagcctgagcctgaacagccccaccaacatcagcagcctgctgaaccaggagagcgccgtgctggccaccgcccccagaatcgacgacgagatccccccccccctgcccgtgtggacccccgagagcttcatcgtggtggaggaggccggcgagttcagccccaacgtgcccaagagcctgagcagcgccgtgaaggtgaagatcggcaccagcctggagtggggcggcaccagcgagcccaagaagttcgacgacagcgtgatcctgagacccagcaagagcgtgaagctgagaagccccaagagcgagctgcaccaggacagaagcagcccccccccccccctgcccgagagaaccctggagagcttcttcctggccgacgaggactgcatgcaggcccagagcatcgagacctacagcaccagctaccccgacaccatggagaacagcaccagcagcaagcagaccctgaagacccccggcaagagcttcaccagaagcaagagcctgaagatcctgagaaacatgaagaagagcatctgcaacagctgcccccccaacaagcccgccgagagcgtgcagagcaacaacagcagcagcttcctgaacttcggcttcgccaacagattcagcaagcccaagggccccagaaaccccccccccacctggaacatctag

SEQ ID NO: 95446 - DNA, 5724 bp, synthetic construct
  misc_feature 1..5724: note = Description of Artificial Sequence: Synthetic coding sequence
  source 1..5724: mol_type = other DNA
atgctgagccacggcgccggcctggccctgtggatcaccctgagcctgctgcagaccggcctggccgagcccgagagatgcaacttcaccctggccgagagcaaggccagcagccacagcgtgagcatccagtggagaatcctgggcagcccctgcaacttcagcctgatctacagcagcgacaccctgggcgccgccctgtgccccaccttcagaatcgacaacaccacctacggctgcaacctgcaggacctgcaggccggcaccatctacaacttcagaatcatcagcctggacgaggagagaaccgtggtgctgcagaccgaccccctgccccccgccagattcggcgtgagcaaggagaagaccaccagcaccagcctgcacgtgtggtggacccccagcagcggcaaggtgaccagctacgaggtgcagctgttcgacgagaacaaccagaagatccagggcgtgcagatccaggagagcaccagctggaacgagtacaccttcttcaacctgaccgccggcagcaagtacaacatcgccatcaccgccgtgagcggcggcaagagaagcttcagcgtgtacaccaacggcagcaccgtgcccagccccgtgaaggacatcggcatcagcaccaaggccaacagcctgctgatcagctggagccacggcagcggcaacgtggagagatacagactgatgctgatggacaagggcatcctggtgcacggcggcgtggtggacaagcacgccaccagctacgccttccacggcctgacccccggctacctgtacaacctgaccgtgatgaccgaggccgccggcctgcagaactacagatggaagctggtgagaaccgcccccatggaggtgagcaacctgaaggtgaccaacgacggcagcctgaccagcctgaaggtgaagtggcagagaccccccggcaacgtggacagctacaacatcaccctgagccacaagggcaccatcaaggagagcagagtgctggccccctggatcaccgagacccacttcaaggagctggtgcccggcagactgtaccaggtgaccgtgagctgcgtgagcggcgagctgagcgcccagaagatggccgtgggcagaaccttccccgacaaggtggccaacctggaggccaacaacaacggcagaatgagaagcctggtggtgagctggagcccccccgccggcgactgggagcagtacagaatcctgctgttcaacgacagcgtggtgctgctgaacatcaccgtgggcaaggaggagacccagtacgtgatggacgacaccggcctggtgcccggcagacagtacgaggtggaggtgatcgtggagagcggcaacctgaagaacagcgagagatgccagggcagaaccgtgcccctggccgtgctgcagctgagagtgaagcacgccaacgagaccagcctgagcatcatgtggcagacccccgtggccgagtgggagaagtacatcatcagcctggccgacagagacctgctgctgatccacaagagcctgagcaaggacgccaaggagttcaccttcaccgacctggtgcccggcagaaagtacatggccaccgtgaccagcatcagcggcgacctgaagaacagcagcagcgtgaagggcagaaccgtgcccgcccaggtgaccgacctgcacgtggccaaccagggcatgaccagcagcctgttcaccaactggacccaggcccagggcgacgtggagttctaccaggtgctgctgatccacgagaacgtggtgatcaagaacgagagcatcagcagcgagaccagcagatacagcttccacagcctgaagagcggcagcctgtacagcgtggtggtgaccaccgtgagcggcggcatcagcagcagacaggtggtggtggagggcagaaccgtgcccagcagcgtgagcggcgtgaccgtgaacaacagcggcagaaacgactacctgagcgtgagctggctgctggcccccggcgacgtggacaactacgaggtgaccctgagccacgacggcaaggtggtgcagagcctggtgatcgccaagagcgtgagagagtgcagcttcagcagcctgacccccggcagactgtacaccgtgaccatcaccaccagaagcggcaagtacgagaaccacagcttcagccaggagagaaccgtgcccgacaaggtgcagggcgtgagcgtgagcaacagcgccagaagcgactacctgagagtgagctgggtgcacgccaccggcgacttcgaccactacgaggtgaccatcaagaacaagaacaacttcatccagaccaagagcatccccaagagcgagaacgagtgcgtgttcgtgcagctggtgcccggcagactgtacagcgtgaccgtgaccaccaagagcggccagtacgaggccaacgagcagggcaacggcagaaccatccccgagcccgtgaaggacctgaccctgagaaacagaagcaccgaggacctgcacgtgacctggagcggcgccaacggcgacgtggaccagtacgagatccagctgctgttcaacgacatgaaggtgttcccccccttccacctggtgaacaccgccaccgagtacagattcaccagcctgacccccggcagacagtacaagatcctggtgctgaccatcagcggcgacgtgcagcagagcgccttcatcgagggcttcaccgtgcccagcgccgtgaagaacatccacatcagccccaacggcgccaccgacagcctgaccgtgaactggacccccggcggcggcgacgtggacagctacaccgtgagcgccttcagacacagccagaaggtggacagccagaccatccccaagcacgtgttcgagcacaccttccacagactggaggccggcgagcagtaccagatcatgatcgccagcgtgagcggcagcctgaagaaccagatcaacgtggtgggcagaaccgtgcccgccgccgtgaccgacctgagaatcaccgagaacagcaccagacacctgagcttcagatggaccgccagcgagggcgagctgagctggtacaacatcttcctgtacaaccccgacggcaacctgcaggagagagcccaggtggaccccctggtgcagagcttcagcttccagaacctgctgcagggcagaatgtacaagatggtgatcgtgacccacagcggcgagctgagcaacgagagcttcatcttcggcagaaccgtgcccgccagcgtgagccacctgagaggcagcaacagaaacaccaccgacagcctgtggttcaactggagccccgccagcggcgacttcgacttctacgagctgatcctgtacaaccccaacggcaccaagaaggagaactggaaggacaaggacctgaccgagtggagattccagggcctggtgcccggcagaaagtacgtgctgtgggtggtgacccacagcggcgacctgagcaacaaggtgaccgccgagagcagaaccgcccccagcccccccagcctgatgagcttcgccgacatcgccaacaccagcctggccatcacctggaagggcccccccgactggaccgactacaacgacttcgagctgcagtggctgcccagagacgccctgaccgtgttcaacccctacaacaacagaaagagcgagggcagaatcgtgtacggcctgagacccggcagaagctaccagttcaacgtgaagaccgtgagcggcgacagctggaagacctacagcaagcccatcttcggcagcgtgagaaccaagcccgacaagatccagaacctgcactgcagaccccagaacagcaccgccatcgcctgcagctggatcccccccgacagcgacttcgacggctacagcatcgagtgcagaaagatggacacccaggaggtggagttcagcagaaagctggagaaggagaagagcctgctgaacatcatgatgctggtgccccacaagagatacctggtgagcatcaaggtgcagagcgccggcatgaccagcgaggtggtggaggacagcaccatcaccatgatcgacagacccccccccccccccccccacatcagagtgaacgagaaggacgtgctgatcagcaagagcagcatcaacttcaccgtgaactgcagctggttcagcgacaccaacggcgccgtgaagtacttcaccgtggtggtgagagaggccgacggcagcgacgagctgaagcccgagcagcagcaccccctgcccagctacctggagtacagacacaacgccagcatcagagtgtaccagaccaactacttcgccagcaagtgcgccgagaaccccaacagcaacagcaagagcttcaacatcaagctgggcgccgagatggagagcctgggcggcaagtgcgaccccacccagcagaagttctgcgacggccccctgaagccccacaccgcctacagaatcagcatcagagccttcacccagctgttcgacgaggacctgaaggagttcaccaagcccctgtacagcgacaccttcttcagcctgcccatcaccaccgagagcgagcccctgttcggcgccatcgagggcgtgagcgccggcctgttcctgatcggcatgctggtggccgtggtggccctgctgatctgcagacagaaggtgagccacggcagagagagacccagcgccagactgagcatcagaagagacagacccctgagcgtgcacctgaacctgggccagaagggcaacagaaagaccagctgccccatcaagatcaaccagttcgagggccacttcatgaagctgcaggccgacagcaactacctgctgagcaaggagtacgaggagctgaaggacgtgggcagaaaccagagctgcgacatcgccctgctgcccgagaacagaggcaagaacagatacaacaacatcctgccctacgacgccaccagagtgaagctgagcaacgtggacgacgacccctgcagcgactacatcaacgccagctacatccccggcaacaacttcagaagagagtacatcgtgacccagggccccctgcccggcaccaaggacgacttctggaagatggtgtgggagcagaacgtgcacaacatcgtgatggtgacccagtgcgtggagaagggcagagtgaagtgcgaccactactggcccgccgaccaggacagcctgtactacggcgacctgatcctgcagatgctgagcgagagcgtgctgcccgagtggaccatcagagagttcaagatctgcggcgaggagcagctggacgcccacagactgatcagacacttccactacaccgtgtggcccgaccacggcgtgcccgagaccacccagagcctgatccagttcgtgagaaccgtgagagactacatcaacagaagccccggcgccggccccaccgtggtgcactgcagcgccggcgtgggcagaaccggcaccttcatcgccctggacagaatcctgcagcagctggacagcaaggacagcgtggacatctacggcgccgtgcacgacctgagactgcacagagtgcacatggtgcagaccgagtgccagtacgtgtacctgcaccagtgcgtgagagacgtgctgagagccagaaagctgagaagcgagcaggagaaccccctgttccccatctacgagaacgtgaaccccgagtaccacagagaccccgtgtacagcagacactag

SEQ ID NO: 95447 - DNA, 4518 bp, synthetic construct
  misc_feature 1..4518: note = Description of Artificial Sequence: Synthetic coding sequence
  source 1..4518: mol_type = other DNA
atggtgcacgtggccagactgctgctgctgctgctgaccttcttcctgagaaccgacgccgagaccccccccagattcaccagaacccccgtggaccagaccggcgtgagcggcggcgtggccagcttcatctgccaggccaccggcgaccccagacccaagatcgtgtggaacaagaagggcaagaaggtgagcaaccagagattcgaggtgatcgagttcgacgacggcagcggcagcgtgctgagaatccagcccctgagaacccccagagacgaggccatctacgagtgcgtggccagcaacaacgtgggcgagatcagcgtgagcaccagactgaccgtgctgagagaggaccagatccccagaggcttccccaccatcgacatgggcccccagctgaaggtggtggagagaaccagaaccgccaccatgctgtgcgccgccagcggcaaccccgaccccgagatcacctggttcaaggacttcctgcccgtggacaccagcaacaacaacggcagaatcaagcagctgagaagcgagagcatcggcgccctgcagatcgagcagagcgaggagagcgaccagggcaagtacgagtgcgtggccaccaacagcgccggcaccagatacagcgcccccgccaacctgtacgtgagagtgagaagagtgccccccagattcagcatcccccccaccaaccacgagatcatgcccggcggcagcgtgaacatcacctgcgtggccgtgggcagccccatgccctacgtgaagtggatgctgggcgccgaggacctgacccccgaggacgacatgcccatcggcagaaacgtgctggagctgaacgacgtgagacagagcgccaactacacctgcgtggccatgagcaccctgggcgtgatcgaggccatcgcccagatcaccgtgaaggccctgcccaagccccccggcacccccgtggtgaccgagagcaccgccaccagcatcaccctgacctgggacagcggcaaccccgagcccgtgagctactacatcatccagcacaagcccaagaacagcgaggagctgtacaaggagatcgacggcgtggccaccaccagatacagcgtggccggcctgagcccctacagcgactacgagttcagagtggtggccgtgaacaacatcggcagaggcccccccagcgagcccgtgctgacccagaccagcgagcaggcccccagcagcgcccccagagacgtgcaggccagaatgctgagcagcaccaccatcctggtgcagtggaaggagcccgaggagcccaacggccagatccagggctacagagtgtactacaccatggaccccacccagcacgtgaacaactggatgaagcacaacgtggccgacagccagatcaccaccatcggcaacctggtgccccagaagacctacagcgtgaaggtgctggccttcaccagcatcggcgacggccccctgagcagcgacatccaggtgatcacccagaccggcgtgcccggccagcccctgaacttcaaggccgagcccgagagcgagaccagcatcctgctgagctggaccccccccagaagcgacaccatcgccaactacgagctggtgtacaaggacggcgagcacggcgaggagcagagaatcaccatcgagcccggcaccagctacagactgcagggcctgaagcccaacagcctgtactacttcagactggccgccagaagcccccagggcctgggcgccagcaccgccgagatcagcgccagaaccatgcagagcatgttcgccaagaacttccacgtgaaggccgtgatgaagaccagcgtgctgctgagctgggagatccccgagaactacaacagcgccatgcccttcaagatcctgtacgacgacggcaagatggtggaggaggtggacggcagagccacccagaagctgatcgtgaacctgaagcccgagaagagctacagcttcgtgctgaccaacagaggcaacagcgccggcggcctgcagcacagagtgaccgccaagaccgcccccgacgtgctgagaaccaagcccgccttcatcggcaagaccaacctggacggcatgatcaccgtgcagctgcccgaggtgcccgccaacgagaacatcaagggctactacatcatcatcgtgcccctgaagaagagcagaggcaagttcatcaagccctgggagagccccgacgagatggagctggacgagctgctgaaggagatcagcagaaagagaagaagcatcagatacggcagagaggtggagctgaagccctacatcgccgcccacttcgacgtgctgcccaccgagttcaccctgggcgacgacaagcactacggcggcttcaccaacaagcagctgcagagcggccaggagtacgtgttcttcgtgctggccgtgatggagcacgccgagagcaagatgtacgccaccagcccctacagcgaccccgtggtgagcatggacctggacccccagcccatcaccgacgaggaggagggcctgatctgggtggtgggccccgtgctggccgtggtgttcatcatctgcatcgtgatcgccatcctgctgtacaagagaaagagagccgagagcgacagcagaaagagcagcatccccaacaacaaggagatccccagccaccaccccaccgaccccgtggagctgagaagactgaacttccagacccccggcagcgacgacagcggctaccccggcaacctgcacagcagcagcatggccagccacccccccatccccatcctggagctggccgaccacatcgagagactgaaggccaacgacaacctgaagttcagccaggagtacgagagcatcgaccccggccagcagttcacctgggagcacagcaacctggaggtgaacaagcccaagaacagatacgccaacgtgatcgcctacgaccacagcagagtgctgctgagcgccatcgagggcatccccggcagcgactacgtgaacgccaactacatcgacggctacagaaagcagaacgcctacatcgccacccagggcagcctgcccgagaccttcggcgacttctggagaatgatctgggagcagagaagcgccaccgtggtgatgatgaccaagctggaggagagaagcagagtgaagtgcgaccagtactggcccagcagaggcaccgagacccacggcctggtgcaggtgaccctgctggacaccgtggagctggccacctactgcgtgagaaccttcgccctgtacaagaacggcagcagcgagaagagagaggtgagacagttccagttcaccgcctggcccgaccacggcgtgcccgagcaccccacccccttcctggccttcctgagaagagtgaagacctgcaacccccccgacgccggccccatggtggtgcactgcagcgccggcgtgggcagaaccggctgcttcatcgtgatcgacgccatgctggagagaatcaagcacgagaagaccgtggacatctacggccacgtgaccctgatgagagcccagagaaactacatggtgcagaccgaggaccagtacatcttcatccacgacgccctgctggaggccgtgacctgcggcaacaccgaggtgcccgccagaaacctgtacgcctacatccagaagctgacccagatcgagaccggcgagaacgtgaccggcatggagctggagttcaagagactggccagcagcaaggcccacaccagcagattcatcagcgccaacctgccctgcaacaagttcaagaacagactggtgaacatcatgccctacgagagcaccagagtgtgcctgcagcccatcagaggcgtggagggcagcgactacatcaacgccagcttcatcgacggctacagacagcagaaggcctacatcgccacccagggccccctggccgagaccaccgaggacttctggagaatgctgtgggagcacaacagcaccatcgtggtgatgctgaccaagctgagagagatgggcagagagaagtgccaccagtactggcccgccgagagaagcgccagataccagtacttcgtggtggaccccatggccgagtacaacatgccccagtacatcctgagagagttcaaggtgaccgacgccagagacggccagagcagaaccgtgagacagttccagttcaccgactggcccgagcagggcgtgcccaagagcggcgagggcttcatcgacttcatcggccaggtgcacaagaccaaggagcagttcggccaggacggccccatcagcgtgcactgcagcgccggcgtgggcagaaccggcgtgttcatcaccctgagcatcgtgctggagagaatgagatacgagggcgtggtggacatcttccagaccgtgaagatgctgagaacccagagacccgccatggtgcagaccgaggaccagtaccagttcagctacagagccgccctggagtacctgggcagcttcgaccactacgccacctag

SEQ ID NO: 95448 - DNA, 4398 bp, synthetic construct
  misc_feature 1..4398: note = Description of Artificial Sequence: Synthetic coding sequence
  source 1..4398: mol_type = other DNA
atgagaggcctgggcacctgcctggccaccctggccggcctgctgctgaccgccgccggcgagaccttcagcggcggctgcctgttcgacgagccctacagcacctgcggctacagccagagcgagggcgacgacttcaactgggagcaggtgaacaccctgaccaagcccaccagcgacccctggatgcccagcggcagcttcatgctggtgaacgccagcggcagacccgagggccagagagcccacctgctgctgccccagctgaaggagaacgacacccactgcatcgacttccactacttcgtgagcagcaagagcaacagcccccccggcctgctgaacgtgtacgtgaaggtgaacaacggccccctgggcaaccccatctggaacatcagcggcgaccccaccagaacctggaacagagccgagctggccatcagcaccttctggcccaacttctaccaggtgatcttcgaggtgatcaccagcggccaccagggctacctggccatcgacgaggtgaaggtgctgggccacccctgcaccagaaccccccacttcctgagaatccagaacgtggaggtgaacgccggccagttcgccaccttccagtgcagcgccatcggcagaaccgtggccggcgacagactgtggctgcagggcatcgacgtgagagacgcccccctgaaggagatcaaggtgaccagcagcagaagattcatcgccagcttcaacgtggtgaacaccaccaagagagacgccggcaagtacagatgcatgatcagaaccgagggcggcgtgggcatcagcaactacgccgagctggtggtgaaggagccccccgtgcccatcgcccccccccagctggccagcgtgggcgccacctacctgtggatccagctgaacgccaacagcatcaacggcgacggccccatcgtggccagagaggtggagtactgcaccgccagcggcagctggaacgacagacagcccgtggacagcaccagctacaagatcggccacctggaccccgacaccgagtacgagatcagcgtgctgctgaccagacccggcgagggcggcaccggcagccccggccccgccctgagaaccagaaccaagtgcgccgaccccatgagaggccccagaaagctggaggtggtggaggtgaagagcagacagatcaccatcagatgggagcccttcggctacaacgtgaccagatgccacagctacaacctgaccgtgcactactgctaccaggtgggcggccaggagcaggtgagagaggaggtgagctgggacaccgagaacagccacccccagcacaccatcaccaacctgagcccctacaccaacgtgagcgtgaagctgatcctgatgaaccccgagggcagaaaggagagccaggagctgatcgtgcagaccgacgaggacctgcccggcgccgtgcccaccgagagcatccagggcagcaccttcgaggagaagatcttcctgcagtggagagagcccacccagacctacggcgtgatcaccctgtacgagatcacctacaaggccgtgagcagcttcgaccccgagatcgacctgagcaaccagagcggcagagtgagcaagctgggcaacgagacccacttcctgttcttcggcctgtaccccggcaccacctacagcttcaccatcagagccagcaccgccaagggcttcggcccccccgccaccaaccagttcaccaccaagatcagcgcccccagcatgcccgcctacgagctggagacccccctgaaccagaccgacaacaccgtgaccgtgatgctgaagcccgcccacagcagaggcgcccccgtgagcgtgtaccagatcgtggtggaggaggagagacccagaagaaccaagaagaccaccgagatcctgaagtgctaccccgtgcccatccacttccagaacgccagcctgctgaacagccagtactacttcgccgccgagttccccgccgacagcctgcaggccgcccagcccttcaccatcggcgacaacaagacctacaacggctactggaacacccccctgctgccctacaagagctacagaatctacttccaggccgccagcagagccaacggcgagaccaagatcgactgcgtgcaggtggccaccaagggcgccgccacccccaagcccgtgcccgagcccgagaagcagaccgaccacaccgtgaagatcgccggcgtgatcgccggcatcctgctgttcgtgatcatcttcctgggcgtggtgctggtgatgaagaagagaaagctggccaagaagagaaaggagaccatgagcagcaccagacaggagatgaccgtgatggtgaacagcatggacaagagctacgccgagcagggcaccaactgcgacgaggccttcagcttcatggacacccacaacctgaacggcagaagcgtgagcagccccagcagcttcaccatgaagaccaacaccctgagcaccagcgtgcccaacagctactaccccgaccccttcgtgcccaccgccatcctggtgcccatcaacgacgagacccacaccatggccagcgacaccagcagcctggtgcagagccacacctacaagaagagagagcccgccgacgtgccctaccagaccggccagctgcaccccgccatcagagtggccgacctgctgcagcacatcacccagatgaagtgcgccgagggctacggcttcaaggaggagtacgagagcttcttcgagggccagagcgccccctgggacagcgccaagaaggacgagaacagaatgaagaacagatacggcaacatcatcgcctacgaccacagcagagtgagactgcagaccatcgagggcgacaccaacagcgactacatcaacggcaactacatcgacggctaccacagacccaaccactacatcgccacccagggccccatgcaggagaccatctacgacttctggagaatggtgtggcacgagaacaccgccagcatcatcatggtgaccaacctggtggaggtgggcagagtgaagtgctgcaagtactggcccgacgacaccgagatctacaaggacatcaaggtgaccctgatcgagaccgagctgctggccgagtacgtgatcagaaccttcgccgtggagaagagaggcgtgcacgagatcagagagatcagacagttccacttcaccggctggcccgaccacggcgtgccctaccacgccaccggcctgctgggcttcgtgagacaggtgaagagcaagagcccccccagcgccggccccctggtggtgcactgcagcgccggcgccggcagaaccggctgcttcatcgtgatcgacatcatgctggacatggccgagagagagggcgtggtggacatctacaactgcgtgagagagctgagaagcagaagagtgaacatggtgcagaccgaggagcagtacgtgttcatccacgacgccatcctggaggcctgcctgtgcggcgacaccagcgtgcccgccagccaggtgagaagcctgtactacgacatgaacaagctggacccccagaccaacagcagccagatcaaggaggagttcagaaccctgaacatggtgacccccaccctgagagtggaggactgcagcatcgccctgctgcccagaaaccacgagaagaacagatgcatggacatcctgccccccgacagatgcctgcccttcctgatcaccatcgacggcgagagcagcaactacatcaacgccgccctgatggacagctacaagcagcccagcgccttcatcgtgacccagcaccccctgcccaacaccgtgaaggacttctggagactggtgctggactaccactgcaccagcgtggtgatgctgaacgacgtggaccccgcccagctgtgcccccagtactggcccgagaacggcgtgcacagacacggccccatccaggtggagttcgtgagcgccgacctggaggaggacatcatcagcagaatcttcagaatctacaacgccgccagaccccaggacggctacagaatggtgcagcagttccagttcctgggctggcccatgtacagagacacccccgtgagcaagagaagcttcctgaagctgatcagacaggtggacaagtggcaggaggagtacaacggcggcgagggcagaaccgtggtgcactgcctgaacggcggcggcagaagcggcaccttctgcgccatcagcatcgtgtgcgagatgctgagacaccagagaaccgtggacgtgttccacgccgtgaagaccctgagaaacaacaagcccaacatggtggacctgctggaccagtacaagttctgctacgaggtggccctggagtacctgaacagcggctag

SEQ ID NO: 95449 - DNA, 4323 bp, synthetic construct
  misc_feature 1..4323: note = Description of Artificial Sequence: Synthetic coding sequence
  source 1..4323: mol_type = other DNA
atggccagagcccaggccctggtgctggccctgaccttccagctgtgcgcccccgagaccgagacccccgccgccggctgcaccttcgaggaggccagcgaccccgccgtgccctgcgagtacagccaggcccagtacgacgacttccagtgggagcaggtgagaatccaccccggcaccagagcccccgccgacctgccccacggcagctacctgatggtgaacaccagccagcacgcccccggccagagagcccacgtgatcttccagagcctgagcgagaacgacacccactgcgtgcagttcagctacttcctgtacagcagagacggccacagccccggcaccctgggcgtgtacgtgagagtgaacggcggccccctgggcagcgccgtgtggaacatgaccggcagccacggcagacagtggcaccaggccgagctggccgtgagcaccttctggcccaacgagtaccaggtgctgttcgaggccctgatcagccccgacagaagaggctacatgggcctggacgacatcctgctgctgagctacccctgcgccaaggccccccacttcagcagactgggcgacgtggaggtgaacgccggccagaacgccagcttccagtgcatggccgccggcagagccgccgaggccgagagattcctgctgcagagacagagcggcgccctggtgcccgccgccggcgtgagacacatcagccacagaagattcctggccaccttccccctggccgccgtgagcagagccgagcaggacctgtacagatgcgtgagccaggcccccagaggcgccggcgtgagcaacttcgccgagctgatcgtgaaggagccccccacccccatcgcccccccccagctgctgagagccggccccacctacctgatcatccagctgaacaccaacagcatcatcggcgacggccccatcgtgagaaaggagatcgagtacagaatggccagaggcccctgggccgaggtgcacgccgtgagcctgcagacctacaagctgtggcacctggaccccgacaccgagtacgagatcagcgtgctgctgaccagacccggcgacggcggcaccggcagacccggcccccccctgatcagcagaaccaagtgcgccgagcccatgagagcccccaagggcctggccttcgccgagatccaggccagacagctgaccctgcagtgggagcccctgggctacaacgtgaccagatgccacacctacaccgtgagcctgtgctaccactacaccctgggcagcagccacaaccagaccatcagagagtgcgtgaagaccgagcagggcgtgagcagatacaccatcaagaacctgctgccctacagaaacgtgcacgtgagactggtgctgaccaaccccgagggcagaaaggagggcaaggaggtgaccttccagaccgacgaggacgtgcccagcggcatcgccgccgagagcctgaccttcacccccctggaggacatgatcttcctgaagtgggaggagccccaggagcccaacggcctgatcacccagtacgagatcagctaccagagcatcgagagcagcgaccccgccgtgaacgtgcccggccccagaagaaccatcagcaagctgagaaacgagacctaccacgtgttcagcaacctgcaccccggcaccacctacctgttcagcgtgagagccagaaccggcaagggcttcggccaggccgccctgaccgagatcaccaccaacatcagcgcccccagcttcgactacgccgacatgcccagccccctgggcgagagcgagaacaccatcaccgtgctgctgagacccgcccagggcagaggcgcccccatcagcgtgtaccaggtgatcgtggaggaggagagagccagaagactgagaagagagcccggcggccaggactgcttccccgtgcccctgaccttcgaggccgccctggccagaggcctggtgcactacttcggcgccgagctggccgccagcagcctgcccgaggccatgcccttcaccgtgggcgacaaccagacctacagaggcttctggaacccccccctggagcccagaaaggcctacctgatctacttccaggccgccagccacctgaagggcgagaccagactgaactgcatcagaatcgccagaaaggccgcctgcaaggagagcaagagacccctggaggtgagccagagaagcgaggagatgggcctgatcctgggcatctgcgccggcggcctggccgtgctgatcctgctgctgggcgccatcatcgtgatcatcagaaagggcaagcccgtgaacatgaccaaggccaccgtgaactacagacaggagaagacccacatgatgagcgccgtggacagaagcttcaccgaccagagcaccctgcaggaggacgagagactgggcctgagcttcatggacacccacggctacagcaccagaggcgaccagagaagcggcggcgtgaccgaggccagcagcctgctgggcggcagccccagaagaccctgcggcagaaagggcagcccctaccacaccggccagctgcaccccgccgtgagagtggccgacctgctgcagcacatcaaccagatgaagaccgccgagggctacggcttcaagcaggagtacgagagcttcttcgagggctgggacgccaccaagaagaaggacaaggtgaagggcagcagacaggagcccatgcccgcctacgacagacacagagtgaagctgcaccccatgctgggcgaccccaacgccgactacatcaacgccaactacatcgacatcagaatcaacagagagggctaccacagaagcaaccacttcatcgccacccagggccccaagcccgagatggtgtacgacttctggagaatggtgtggcaggagcactgcagcagcatcgtgatgatcaccaagctggtggaggtgggcagagtgaagtgcagcagatactggcccgaggacagcgacacctacggcgacatcaagatcatgctggtgaagaccgagaccctggccgagtacgtggtgagaaccttcgccctggagagaagaggctacagcgccagacacgaggtgagacagttccacttcaccgcctggcccgagcacggcgtgccctaccacgccaccggcctgctggccttcatcagaagagtgaaggccagcaccccccccgacgccggccccatcgtgatccactgcagcgccggcaccggcagaaccggctgctacatcgtgctggacgtgatgctggacatggccgagtgcgagggcgtggtggacatctacaactgcgtgaagaccctgtgcagcagaagagtgaacatgatccagaccgaggagcagtacatcttcatccacgacgccatcctggaggcctgcctgtgcggcgagaccaccatccccgtgagcgagttcaaggccacctacaaggagatgatcagaatcgacccccagagcaacagcagccagctgagagaggagttccagaccctgaacagcgtgaccccccccctggacgtggaggagtgcagcatcgccctgctgcccagaaacagagacaagaacagaagcatggacgtgctgccccccgacagatgcctgcccttcctgatcagcaccgacggcgacagcaacaactacatcaacgccgccctgaccgacagctacaccagaagcgccgccttcatcgtgaccctgcaccccctgcagagcaccacccccgacttctggagactggtgtacgactacggctgcaccagcatcgtgatgctgaaccagctgaaccagagcaacagcgcctggccctgcctgcagtactggcccgagcccggcagacagcagtacggcctgatggaggtggagttcatgagcggcaccgccgacgaggacctggtggccagagtgttcagagtgcagaacatcagcagagagggccacctgctggtgagacacttccagttcctgagatggagcgcctacagagacacccccgacagcaagaaggccttcctgcacctgctggccgaggtggacaagtggcaggccgagagcggcgacggcagaaccatcgtgcactgcctgaacggcggcggcagaagcggcaccttctgcgcctgcgccaccgtgctggagatgatcagatgccacaacctggtggacgtgttcttcgccgccaagaccctgagaaactacaagcccaacatggtggagaccatggaccagtaccacttctgctacgacgtggccctggagtacctggagggcctggagagcagatag

SEQ ID NO: 95450 - DNA, 4347 bp, synthetic construct
  misc_feature 1..4347: note = Description of Artificial Sequence: Synthetic coding sequence
  source 1..4347: mol_type = other DNA
atgagaatcctgaagagattcctggcctgcatccagctgctgtgcgtgtgcagactggactgggccaacggctactacagacagcagagaaagctggtggaggagatcggctggagctacaccggcgccctgaaccagaagaactggggcaagaagtaccccacctgcaacagccccaagcagagccccatcaacatcgacgaggacctgacccaggtgaacgtgaacctgaagaagctgaagttccagggctgggacaagaccagcctggagaacaccttcatccacaacaccggcaagaccgtggagatcaacctgaccaacgactacagagtgagcggcggcgtgagcgagatggtgttcaaggccagcaagatcaccttccactggggcaagtgcaacatgagcagcgacggcagcgagcacagcctggagggccagaagttccccctggagatgcagatctactgcttcgacgccgacagattcagcagcttcgaggaggccgtgaagggcaagggcaagctgagagccctgagcatcctgttcgaggtgggcaccgaggagaacctggacttcaaggccatcatcgacggcgtggagagcgtgagcagattcggcaagcaggccgccctggaccccttcatcctgctgaacctgctgcccaacagcaccgacaagtactacatctacaacggcagcctgaccagccccccctgcaccgacaccgtggactggatcgtgttcaaggacaccgtgagcatcagcgagagccagctggccgtgttctgcgaggtgctgaccatgcagcagagcggctacgtgatgctgatggactacctgcagaacaacttcagagagcagcagtacaagttcagcagacaggtgttcagcagctacaccggcaaggaggagatccacgaggccgtgtgcagcagcgagcccgagaacgtgcaggccgaccccgagaactacaccagcctgctggtgacctgggagagacccagagtggtgtacgacaccatgatcgagaagttcgccgtgctgtaccagcagctggacggcgaggaccagaccaagcacgagttcctgaccgacggctaccaggacctgggcgccatcctgaacaacctgctgcccaacatgagctacgtgctgcagatcgtggccatctgcaccaacggcctgtacggcaagtacagcgaccagctgatcgtggacatgcccaccgacaaccccgagctggacctgttccccgagctgatcggcaccgaggagatcatcaaggaggaggaggagggcaaggacatcgaggagggcgccatcgtgaaccccggcagagacagcgccaccaaccagatcagaaagaaggagccccagatcagcaccaccacccactacaacagaatcggcaccaagtacaacgaggccaagaccaacagaagccccaccagaggcagcgagttcagcggcaagggcgacgtgcccaacaccagcctgaacagcaccagccagcccgtgaccaagctggccaccgagaaggacatcagcctgaccagccagaccgtgaccgagctgcccccccacaccgtggagggcaccagcgccagcctgaacgacggcagcaagaccgtgctgagaagcccccacatgaacctgagcggcaccgccgagagcctgaacaccgtgagcatcaccgagtacgaggaggagagcctgctgaccagcttcaagctggacaccggcgccgaggacagcagcggcagcagccccgccaccagcgccatccccttcatcagcgagaacatcagccagggctacatcttcagcagcgagaaccccgagaccatcacctacgacgtgctgatccccgagagcgccagaaacgccagcgaggacagcaccagcagcggcagcgaggagagcctgaaggaccccagcatggagggcaacgtgtggttccccagcagcaccgacatcaccgcccagcccgacgtgggcagcggcagagagagcttcctgcagaccaactacaccgagatcagagtggacgagagcgagaagaccaccaagagcttcagcgccggccccgtgatgagccagggccccagcgtgaccgacctggagatgccccactacagcaccttcgcctacttccccaccgaggtgaccccccacgccttcacccccagcagcagacagcaggacctggtgagcaccgtgaacgtggtgtacagccagaccacccagcccgtgtacaacgaggccagcaacagcagccacgagagcagaatcggcctggccgagggcctggagagcgagaagaaggccgtgatccccctggtgatcgtgagcgccctgaccttcatctgcctggtggtgctggtgggcatcctgatctactggagaaagtgcttccagaccgcccacttctacctggaggacagcaccagccccagagtgatcagcaccccccccacccccatcttccccatcagcgacgacgtgggcgccatccccatcaagcacttccccaagcacgtggccgacctgcacgccagcagcggcttcaccgaggagttcgaggaggtgcagagctgcaccgtggacctgggcatcaccgccgacagcagcaaccaccccgacaacaagcacaagaacagatacatcaacatcgtggcctacgaccacagcagagtgaagctggcccagctggccgagaaggacggcaagctgaccgactacatcaacgccaactacgtggacggctacaacagacccaaggcctacatcgccgcccagggccccctgaagagcaccgccgaggacttctggagaatgatctgggagcacaacgtggaggtgatcgtgatgatcaccaacctggtggagaagggcagaagaaagtgcgaccagtactggcccgccgacggcagcgaggagtacggcaacttcctggtgacccagaagagcgtgcaggtgctggcctactacaccgtgagaaacttcaccctgagaaacaccaagatcaagaagggcagccagaagggcagacccagcggcagagtggtgacccagtaccactacacccagtggcccgacatgggcgtgcccgagtacagcctgcccgtgctgaccttcgtgagaaaggccgcctacgccaagagacacgccgtgggccccgtggtggtgcactgcagcgccggcgtgggcagaaccggcacctacatcgtgctggacagcatgctgcagcagatccagcacgagggcaccgtgaacatcttcggcttcctgaagcacatcagaagccagagaaactacctggtgcagaccgaggagcagtacgtgttcatccacgacaccctggtggaggccatcctgagcaaggagaccgaggtgctggacagccacatccacgcctacgtgaacgccctgctgatccccggccccgccggcaagaccaagctggagaagcagttccagctgctgagccagagcaacatccagcagagcgactacagcgccgccctgaagcagtgcaacagagagaagaacagaaccagcagcatcatccccgtggagagaagcagagtgggcatcagcagcctgagcggcgagggcaccgactacatcaacgccagctacatcatgggctactaccagagcaacgagttcatcatcacccagcaccccctgctgcacaccatcaaggacttctggagaatgatctgggaccacaacgcccagctggtggtgatgatccccgacggccagaacatggccgaggacgagttcgtgtactggcccaacaaggacgagcccatcaactgcgagagcttcaaggtgaccctgatggccgaggagcacaagtgcctgagcaacgaggagaagctgatcatccaggacttcatcctggaggccacccaggacgactacgtgctggaggtgagacacttccagtgccccaagtggcccaaccccgacagccccatcagcaagaccttcgagctgatcagcgtgatcaaggaggaggccgccaacagagacggccccatgatcgtgcacgacgagcacggcggcgtgaccgccggcaccttctgcgccctgaccaccctgatgcaccagctggagaaggagaacagcgtggacgtgtaccaggtggccaagatgatcaacctgatgagacccggcgtgttcgccgacatcgagcagtaccagttcctgtacaaggtgatcctgagcctggtgagcaccagacaggaggagaaccccagcaccagcctggacagcaacggcgccgccctgcccgacggcaacatcgccgagagcctggagagcctggtgtag

SEQ ID NO: 95451 - DNA, 504 bp, synthetic construct
  misc_feature 1..504: note = Description of Artificial Sequence: Synthetic coding sequence
  source 1..504: mol_type = other DNA
atgaacagacccgcccccgtggagatcagctacgagaacatgagattcctgatcacccacaaccccaccaacgccaccctgaacaagttcaccgaggagctgaagaagtacggcgtgaccaccctggtgagagtgtgcgacgccacctacgacaaggcccccgtggagaaggagggcatccacgtgctggactggcccttcgacgacggcgcccccccccccaaccagatcgtggacgactggctgaacctgctgaagaccaagttcagagaggagcccggctgctgcgtggccgtgcactgcgtggccggcctgggcagagcccccgtgctggtggccctggccctgatcgagtgcggcatgaagtacgaggacgccgtgcagttcatcagacagaagagaagaggcgccttcaacagcaagcagctgctgtacctggagaagtacagacccaagatgagactgagattcagagacaccaacggccactgctgcgtgcagtag

SEQ ID NO: 95452 - DNA, 249 bp, synthetic construct
  misc_feature 1..249: note = Description of Artificial Sequence: Synthetic coding sequence
  source 1..249: mol_type = other DNA
atgaacagacccgcccccgtggagatcagctacgagaacatgagattcctgatcacccacaaccccaccaacgccaccctgaacaagttcaccgaggagctgaagaagtacggcgtgaccaccctggtgagagtgtgcgacgccacctacgacaaggcccccgtggagaaggagggcatccacgtgctgaagaagaagggcagcgtgcagttccagaccgccgccctgttcggcgagatccccacctag

SEQ ID NO: 95453 - DNA, 411 bp, synthetic construct
  misc_feature 1..411: note = Description of Artificial Sequence: Synthetic coding sequence
  source 1..411: mol_type = other DNA
atgaacagacccgcccccgtggagatcagctacgagaacatgagattcctgatcacccacaaccccaccaacgccaccctgaacaagttcaccgaggactggcccttcgacgacggcgcccccccccccaaccagatcgtggacgactggctgaacctgctgaagaccaagttcagagaggagcccggctgctgcgtggccgtgcactgcgtggccggcctgggcagagcccccgtgctggtggccctggccctgatcgagtgcggcatgaagtacgaggacgccgtgcagttcatcagacagaagagaagaggcgccttcaacagcaagcagctgctgtacctggagaagtacagacccaagatgagactgagattcagagacaccaacggccactgctgcgtgcagtag

SEQ ID NO: 95454 - DNA, 192 bp, synthetic construct
  misc_feature 1..192: note = Description of Artificial Sequence: Synthetic coding sequence
  source 1..192: mol_type = other DNA
atgaacagacccgcccccgtggagatcagctacgagaacatgagattcctgatcacccacaaccccaccaacgccaccctgaacaagttcaccgaggagctgaagaagtacggcgtgaccaccctggtgagagtgtgcgacgccacctacgacaaggcccccgtggagaaggagggcatccacgtgctgtag

SEQ ID NO: 95455 - DNA, 69 bp, synthetic construct
  misc_feature 1..69: note = Description of Artificial Sequence: Synthetic coding sequence
  source 1..69: mol_type = other DNA
atgaacagacccgcccccgtggagatcagctacgagaacatgagattcctgatcacccacaacccctag

SEQ ID NO: 95456 - DNA, 522 bp, synthetic construct
  misc_feature 1..522: note = Description of Artificial Sequence: Synthetic coding sequence
  source 1..522: mol_type = other DNA
atggccagaatgaacagacccgcccccgtggaggtgagctacaagcacatgagattcctgatcacccacaaccccaccaacgccaccctgagcaccttcatcgaggacctgaagaagtacggcgccaccaccgtggtgagagtgtgcgaggtgacctacgacaagacccccctggagaaggacggcatcaccgtggtggactggcccttcgacgacggcgcccccccccccggcaaggtggtggaggactggctgagcctggtgaaggccaagttctgcgaggcccccggcagctgcgtggccgtgcactgcgtggccggcctgggcagagcccccgtgctggtggccctggccctgatcgagagcggcatgaagtacgaggacgccatccagttcatcagacagaagagaagaggcgccatcaacagcaagcagctgacctacctggagaagtacagacccaagcagagactgagattcaaggacccccacacccacaagaccagatgctgcgtgatgtag

SEQ ID NO: 95457 - DNA, 447 bp, synthetic construct
  misc_feature 1..447: note = Description of Artificial Sequence: Synthetic coding sequence
  source 1..447: mol_type = other DNA
atggccagaatgaacagacccgcccccgtggaggtgagctacaagcacatgagattcctgatcacccacaaccccaccaacgccaccctgagcaccttcatcgaggacctgaagaagtacggcgccaccaccgtggtgagagtgtgcgaggtgacctacgacaagacccccctggagaaggacggcatcaccgtggtggactggcccttcgacgacggcgcccccccccccggcaaggtggtggaggactggctgagcctggtgaaggccaagttctgcgaggcccccggcagctgcgtggccgtgcactgcgtggccggcctgggcagaaagagaagaggcgccatcaacagcaagcagctgacctacctggagaagtacagacccaagcagagactgagattcaaggacccccacacccacaagaccagatgctgcgtgatgtag

SEQ ID NO: 95458 - DNA, 447 bp, synthetic construct; identical to SEQ ID NO: 95457
  misc_feature 1..447: note = Description of Artificial Sequence: Synthetic coding sequence
  source 1..447: mol_type = other DNA

SEQ ID NO: 95459 - DNA, 522 bp, synthetic construct; identical to SEQ ID NO: 95456
  misc_feature 1..522: note = Description of Artificial Sequence: Synthetic coding sequence
  source 1..522: mol_type = other DNA

SEQ ID NO: 95460 - DNA, 213 bp, synthetic construct
  misc_feature 1..213: note = Description of Artificial Sequence: Synthetic coding sequence
  source 1..213: mol_type = other DNA
atggccagaatgaacagacccgcccccgtggaggtgagctacaagcacatgagattcctgatcacccacaaccccaccaacgccaccctgagcaccttcatcgaggacctgaagaagtacggcgccaccaccgtggtgagagtgtgcgaggtgacctacgacaagacccccctggagaaggacggcatcaccgtggtggactggcccttctag

SEQ ID NO: 95461 - DNA, 2343 bp, synthetic construct
  misc_feature 1..2343: note = Description of Artificial Sequence: Synthetic coding sequence
  source 1..2343: mol_type = other DNA
atggagcaggtggagatcctgagaaagttcatccagagagtgcaggccatgaagagccccgaccacaacggcgaggacaacttcgccagagacttcatgagactgagaagactgagcaccaagtacagaaccgagaagatctaccccaccgccaccggcgagaaggaggagaacgtgaagaagaacagatacaaggacatcctgcccttcgaccacagcagagtgaagctgaccctgaagacccccagccaggacagcgactacatcaacgccaacttcatcaagggcgtgtacggccccaaggcctacgtggccacccagggccccctggccaacaccgtgatcgacttctggagaatgatctgggagtacaacgtggtgatcatcgtgatggcctgcagagagttcgagatgggcagaaagaagtgcgagagatactggcccctgtacggcgaggaccccatcaccttcgcccccttcaagatcagctgcgaggacgagcaggccagaaccgactacttcatcagaaccctgctgctggagttccagaacgagagcagaagactgtaccagttccactacgtgaactggcccgaccacgacgtgcccagcagcttcgacagcatcctggacatgatcagcctgatgagaaagtaccaggagcacgaggacgtgcccatctgcatccactgcagcgccggctgcggcagaaccggcgccatctgcgccatcgactacacctggaacctgctgaaggccggcaagatccccgaggagttcaacgtgttcaacctgatccaggagatgagaacccagagacacagcgccgtgcagaccaaggagcagtacgagctggtgcacagagccatcgcccagctgttcgagaagcagctgcagctgtacgagatccacggcgcccagaagatcgccgacggcgtgaacgagatcaacaccgagaacatggtgagcagcatcgagcccgagaagcaggacagccccccccccaagccccccagaaccagaagctgcctggtggagggcgacgccaaggaggagatcctgcagccccccgagccccaccccgtgccccccatcctgacccccagcccccccagcgccttccccaccgtgaccaccgtgtggcaggacaacgacagataccaccccaagcccgtgctgcacatggtgagcagcgagcagcacagcgccgacctgaacagaaactacagcaagagcaccgagctgcccggcaagaacgagagcaccatcgagcagatcgacaagaagctggagagaaacctgagcttcgagatcaagaaggtgcccctgcaggagggccccaagagcttcgacggcaacaccctgctgaacagaggccacgccatcaagatcaagagcgccagcccctgcatcgccgacaagatcagcaagccccaggagctgagcagcgacctgaacgtgggcgacaccagccagaacagctgcgtggactgcagcgtgacccagagcaacaaggtgagcgtgaccccccccgaggagagccagaacagcgacaccccccccagacccgacagactgcccctggacgagaagggccacgtgacctggagcttccacggccccgagaacgccatccccatccccgacctgagcgagggcaacagcagcgacatcaactaccagaccagaaagaccgtgagcctgacccccagccccaccacccaggtggagacccccgacctggtggaccacgacaacaccagccccctgttcagaacccccctgagcttcaccaaccccctgcacagcgacgacagcgacagcgacgagagaaacagcgacggcgccgtgacccagaacaagaccaacatcagcaccgccagcgccaccgtgagcgccgccaccagcaccgagagcatcagcaccagaaaggtgctgcccatgagcatcgccagacacaacatcgccggcaccacccacagcggcgccgagaaggacgtggacgtgagcgaggacagccccccccccctgcccgagagaacccccgagagcttcgtgctggccagcgagcacaacacccccgtgagaagcgagtggagcgagctgcagagccaggagagaagcgagcagaagaagagcgagggcctgatcaccagcgagaacgagaagtgcgaccaccccgccggcggcatccactacgagatgtgcatcgagtgcccccccaccttcagcgacaagagagagcagatcagcgagaaccccaccgaggccaccgacatcggcttcggcaacagatgcggcaagcccaagggccccagagacccccccagcgagtggacctag

SEQ ID NO: 95462 - DNA, 1986 bp, synthetic construct
  misc_feature 1..1986: note = Description of Artificial Sequence: Synthetic coding sequence
  source 1..1986: mol_type = other DNA
atgatctgggagtacaacgtggtgatcatcgtgatggcctgcagagagttcgagatgggcagaaagaagtgcgagagatactggcccctgtacggcgaggaccccatcaccttcgcccccttcaagatcagctgcgaggacgagcaggccagaaccgactacttcatcagaaccctgctgctggagttccagaacgagagcagaagactgtaccagttccactacgtgaactggcccgaccacgacgtgcccagcagcttcgacagcatcctggacatgatcagcctgatgagaaagtaccaggagcacgaggacgtgcccatctgcatccactgcagcgccggctgcggcagaaccggcgccatctgcgccatcgactacacctggaacctgctgaaggccggcaagatccccgaggagttcaacgtgttcaacctgatccaggagatgagaacccagagacacagcgccgtgcagaccaaggagcagtacgagctggtgcacagagccatcgcccagctgttcgagaagcagctgcagctgtacgagatccacggcgcccagaagatcgccgacggcgtgaacgagatcaacaccgagaacatggtgagcagcatcgagcccgagaagcaggacagccccccccccaagccccccagaaccagaagctgcctggtggagggcgacgccaaggaggagatcctgcagccccccgagccccaccccgtgccccccatcctgacccccagcccccccagcgccttccccaccgtgaccaccgtgtggcaggacaacgacagataccaccccaagcccgtgctgcacatggtgagcagcgagcagcacagcgccgacctgaacagaaactacagcaagagcaccgagctgcccggcaagaacgagagcaccatcgagcagatcgacaagaagctggagagaaacctgagcttcgagatcaagaaggtgcccctgcaggagggccccaagagcttcgacggcaacaccctgctgaacagaggccacgccatcaagatcaagagcgccagcccctgcatcgccgacaagatcagcaagccccaggagctgagcagcgacctgaacgtgggcgacaccagccagaacagctgcgtggactgcagcgtgacccagagcaacaaggtgagcgtgaccccccccgaggagagccagaacagcgacaccccccccagacccgacagactgcccctggacgagaagggccacgtgacctggagcttccacggccccgagaacgccatccccatccccgacctgagcgagggcaacagcagcgacatcaactaccagaccagaaagaccgtgagcctgacccccagccccaccacccaggtggagacccccgacctggtggaccacgacaacaccagccccctgttcagaacccccctgagcttcaccaaccccctgcacagcgacgacagcgacagcgacgagagaaacagcgacggcgccgtgacccagaacaagaccaacatcagcaccgccagcgccaccgtgagcgccgccaccagcaccgagagcatcagcaccagaaaggtgctgcccatgagcatcgccagacacaacatcgccggcaccacccacagcggcgccgagaaggacgtggacgtgagcgaggacagccccccccccctgcccgagagaacccccgagagcttcgtgctggccagcgagcacaacacccccgtgagaagcgagtggagcgagctgcagagccaggagagaagcgagcagaagaagagcgagggcctgatcaccagcgagaacgagaagtgcgaccaccccgccggcggcatccactacgagatgtgcatcgagtgcccccccaccttcagcgacaagagagagcagatcagcgagaaccccaccgaggccaccgacatcggcttcggcaacagatgcggcaagcccaagggccccagagacccccccagcgagtggacctag

SEQ ID NO: 95463 - DNA, 1632 bp, synthetic construct
  misc_feature 1..1632: note = Description of Artificial Sequence: Synthetic coding sequence
  source 1..1632: mol_type = other DNA
atgatctgggagtacaacgtggtgatcatcgtgatggcctgcagagagttcgagatgggcagaaagaagtgcgagagatactggcccctgtacggcgaggaccccatcaccttcgcccccttcaagatcagctgcgaggacgagcaggccagaaccgactacttcatcagaaccctgctgctggagttccagaacgagagcagaagactgtaccagttccactacgtgaactggcccgaccacgacgtgcccagcagcttcgacagcatcctggacatgatcagcctgatgagaaagtaccaggagcacgaggacgtgcccatctgcatccactgcagcgccggctgcggcagaaccggcgccatctgcgccatcgactacacctggaacctgctgaaggccggcaagatccccgaggagttcaacgtgttcaacctgatccaggagatgagaacccagagacacagcgccgtgcagaccaaggagcagtacgagctggtgcacagagccatcgcccagctgttcgagaagcagctgcagctgtacgagatccacggcgcccagaagatcgccgacggcgtgaacgagatcaacaccgagaacatggtgagcagcatcgagcccgagaagcaggacagccccccccccaagccccccagaaccagaagctgcctggtggagggcgacgccaaggaggagatcctgcagccccccgagccccaccccgtgccccccatcctgacccccagcccccccagcgccttccccaccgtgaccaccgtgtggcaggacaacgacagataccaccccaagcccgtgctgcacatggtgagcagcgagcagcacagcgccgacctgaacagaaactacagcaagagcaccgagctgcccggcaagaacgagagcaccatcgagcagatcgacaagaagctggagagaaacctgagcttcgagatcaagaaggtgcccctgcaggagggccccaagagcttcgacggcaacaccctgctgaacagaggccacgccatcaagatcaagagcgccagcccctgcatcgccgacaagatcagcaagccccaggagctgagcagcgacctgaacgtgggcgacaccagccagaacagctgcgtggactgcagcgtgacccagagcaacaaggtgagcgtgaccccccccgaggagagccagaacagcgacaccccccccagacccgacagactgcccctggacgagaagggccacgtgacctggagcttccacggccccgagaacgccatccccatccccgacctgagcgagggcaacagcagcgacatcaactaccagaccagaaagaccgtgagcctgacccccagccccaccacccaggtggagacccccgacctggtggaccacgacaacaccagccccctgttcagaacccccctgagcttcaccaaccccctgcacagcgacgacagcgacagcgacgagagaaacagcgacggcgccgtgacccagaacaagaccaacatcagcaccgccagcgccaccgtgagcgccgccaccagcaccgagagcatcagcaccagaaaggtgctgcccatgagcatcgccagacacaacagcagaaacaacaccttcagatgctag

SEQ ID NO: 95464 - DNA, 6885 bp, synthetic construct
  misc_feature 1..6885: note = Description of Artificial Sequence: Synthetic coding sequence
  source 1..6885: mol_type = other DNA
atgcacgtgagcctggccgaggccctggaggtgagaggcggccccctgcaggaggaggagatctgggccgtgctgaaccagagcgccgagagcctgcaggagctgttcagaaaggtgagcctggccgaccccgccgccctgggcttcatcatcagcccctggagcctgctgctgctgcccagcggcagcgtgagcttcaccgacgagaacatcagcaaccaggacctgagagccttcaccgcccccgaggtgctgcagaaccagagcctgaccagcctgagcgacgtggagaagatccacatctacagcctgggcatgaccctgtactggggcgccgactacgaggtgccccagagccagcccatcaagctgggcgaccacctgaacagcatcctgctgggcatgtgcgaggacgtgatctacgccagagtgagcgtgagaaccgtgctggacgcctgcagcgcccacatcagaaacagcaactgcgcccccagcttcagctacgtgaagcacctggtgaagctggtgctgggcaacctgagcggcaccgaccagctgagctgcaacagcgagcagaagcccgacagaagccaggccatcagagacagactgagaggcaagggcctgcccaccggcagaagcagcaccagcgacgtgctggacatccagaagccccccctgagccaccagaccttcctgaacaagggcctgagcaagagcatgggcttcctgagcatcaaggacacccaggacgagaactacttcaaggacatcctgagcgacaacagcggcagagaggacagcgagaacaccttcagcccctaccagttcaagaccagcggccccgagaagaagcccatccccggcatcgacgtgctgagcaagaagaagatctgggccagcagcatggacctgctgtgcaccgccgacagagacttcagcagcggcgagaccgccacctacagaagatgccaccccgaggccgtgaccgtgagaaccagcaccacccccagaaagaaggaggccagatacagcgacggcagcatcgccctggacatcttcggcccccagaagatggaccccatctaccacaccagagagctgcccaccagcagcgccatcagcagcgccctggacagaatcagagagagacagaagaagctgcaggtgctgagagaggccatgaacgtggaggagcccgtgagaagatacaagacctaccacggcgacgtgttcagcaccagcagcgagagccccagcatcatcagcagcgagagcgacttcagacaggtgagaagaagcgaggccagcaagagattcgagagcagcagcggcctgcccggcgtggacgagaccctgagccagggccagagccagagacccagcagacagtacgagacccccttcgagggcaacctgatcaaccaggagatcatgctgaagagacaggaggaggagctgatgcagctgcaggccaagatggccctgagacagagcagactgagcctgtaccccggcgacaccatcaaggccagcatgctggacatcaccagagaccccctgagagagatcgccctggagaccgccatgacccagagaaagctgagaaacttcttcggccccgagttcgtgaagatgaccatcgagcccttcatcagcctggacctgcccagaagcatcctgaccaagaagggcaagaacgaggacaacagaagaaaggtgaacatcatgctgctgaacggccagagactggagctgacctgcgacaccaagaccatctgcaaggacgtgttcgacatggtggtggcccacatcggcctggtggagcaccacctgttcgccctggccaccctgaaggacaacgagtacttcttcgtggaccccgacctgaagctgaccaaggtggcccccgagggctggaaggaggagcccaagaagaagaccaaggccaccgtgaacttcaccctgttcttcagaatcaagttcttcatggacgacgtgagcctgatccagcacaccctgacctgccaccagtactacctgcagctgagaaaggacatcctggaggagagaatgcactgcgacgacgagaccagcctgctgctggccagcctggccctgcaggccgagtacggcgactaccagcccgaggtgcacggcgtgagctacttcagaatggagcactacctgcccgccagagtgatggagaagctggacctgagctacatcaaggaggagctgcccaagctgcacaacacctacgtgggcgccagcgagaaggagaccgagctggagttcctgaaggtgtgccagagactgaccgagtacggcgtgcacttccacagagtgcaccccgagaagaagagccagaccggcatcctgctgggcgtgtgcagcaagggcgtgctggtgttcgaggtgcacaacggcgtgagaaccctggtgctgagattcccctggagagagaccaagaagatcagcttcagcaagaagaagatcaccctgcagaacaccagcgacggcatcaagcacggcttccagaccgacaacagcaagatctgccagtacctgctgcacctgtgcagctaccagcacaagttccagctgcagatgagagccagacagagcaaccaggacgcccaggacatcgacgtgctgcacaagagatggagcatcgtgagcagccccgagagagagatcaccctggtgaacctgaagaaggacgccaagtacggcctgggcttccagatcatcggcggcgagaagatgggcagactggacctgggcatcttcatcagcagcgtggcccccggcggccccgccgacctggacggctgcctgaagcccggcgacagactgatcagcgtgaacagcgtgagcctggagggcgtgagccaccacgccgccatcgagatcctgcagaacgcccccgaggacgtgaccctggtgatcagccagcccaaggagaagatcagcaaggtgcccagcacccccgtgcacctgaccaacgagatgaagaactacatgaagaagagcagctacatgcaggacagcgccatcgacagcagcagcaaggaccaccactggagcagaggcaccctgagacacatcagcgagaacagcttcggccccagcggcggcctgagagagggcagcctgagcagccaggacagcagaaccgagagcgccagcctgagccagagccaggtgaacggcttcttcgccagccacctgggcgaccagacctggcaggagagccagcacggcagccccagccccagcgtgatcagcaaggccaccgagaaggagaccttcaccgacagcaaccagagcaagaccaagaagcccggcatcagcgacgtgaccgactacagcgacagaggcgacagcgacatggacgaggccacctacagcagcagccaggaccaccagacccccaagcaggagagcagcagcagcgtgaacaccagcaacaagatgaacttcaagaccttcagcagcagcccccccaagcccggcgacatcttcgaggtggagctggccaagaacgacaacagcctgggcatcagcgtgaccggcggcgtgaacaccagcgtgagacacggcggcatctacgtgaaggccgtgatcccccagggcgccgccgagagcgacggcagaatccacaagggcgacagagtgctggccgtgaacggcgtgagcctggagggcgccacccacaagcaggccgtggagaccctgagaaacaccggccaggtggtgcacctgctgctggagaagggccagagccccaccagcaaggagcacgtgcccgtgaccccccagtgcaccctgagcgaccagaacgcccagggccagggccccgagaaggtgaagaagaccacccaggtgaaggactacagcttcgtgaccgaggagaacaccttcgaggtgaagctgttcaagaacagcagcggcctgggcttcagcttcagcagagaggacaacctgatccccgagcagatcaacgccagcatcgtgagagtgaagaagctgttccccggccagcccgccgccgagagcggcaagatcgacgtgggcgacgtgatcctgaaggtgaacggcgccagcctgaagggcctgagccagcaggaggtgatcagcgccctgagaggcaccgcccccgaggtgttcctgctgctgtgcagacccccccccggcgtgctgcccgagatcgacaccgccctgctgacccccctgcagagccccgcccaggtgctgcccaacagcagcaaggacagcagccagcccagctgcgtggagcagagcaccagcagcgacgagaacgagatgagcgacaagagcaagaagcagtgcaagagccccagcagaagagacagctacagcgacagcagcggcagcggcgaggacgacctggtgaccgcccccgccaacatcagcaacagcacctggagcagcgccctgcaccagaccctgagcaacatggtgagccaggcccagagccaccacgaggcccccaagagccaggaggacaccatctgcaccatgttctactacccccagaagatccccaacaagcccgagttcgaggacagcaaccccagccccctgccccccgacatggcccccggccagagctaccagccccagagcgagagcgccagcagcagcagcatggacaagtaccacatccaccacatcagcgagcccaccagacaggagaactggacccccctgaagaacgacctggagaaccacctggaggacttcgagctggaggtggagctgctgatcaccctgatcaagagcgagaagggcagcctgggcttcaccgtgaccaagggcaaccagagaatcggctgctacgtgcacgacgtgatccaggaccccgccaagagcgacggcagactgaagcccggcgacagactgatcaaggtgaacgacaccgacgtgaccaacatgacccacaccgacgccgtgaacctgctgagagccgccagcaagaccgtgagactggtgatcggcagagtgctggagctgcccagaatccccatgctgccccacctgctgcccgacatcaccctgacctgcaacaaggaggagctgggcttcagcctgtgcggcggccacgacagcctgtaccaggtggtgtacatcagcgacatcaaccccagaagcgtggccgccatcgagggcaacctgcagctgctggacgtgatccactacgtgaacggcgtgagcacccagggcatgaccctggaggaggtgaacagagccctggacatgagcctgcccagcctggtgctgaaggccaccagaaacgacctgcccgtggtgcccagcagcaagagaagcgccgtgagcgcccccaagagcaccaagggcaacggcagctacagcgtgggcagctgcagccagcccgccctgacccccaacgacagcttcagcaccgtggccggcgaggagatcaacgagatcagctaccccaagggcaagtgcagcacctaccagatcaagggcagccccaacctgaccctgcccaaggagagctacatccaggaggacgacatctacgacgacagccaggaggccgaggtgatccagagcctgctggacgtggtggacgaggaggcccagaacctgctgaacgagaacaacgccgccggctacagctgcggccccggcaccctgaagatgaacggcaagctgagcgaggagagaaccgaggacaccgactgcgacggcagccccctgcccgagtacttcaccgaggccaccaagatgaacggctgcgaggagtactgcgaggagaaggtgaagagcgagagcctgatccagaagccccaggagaagaagaccgacgacgacgagatcacctggggcaacgacgagctgcccatcgagagaaccaaccacgaggacagcgacaaggaccacagcttcctgaccaacgacgagctggccgtgctgcccgtggtgaaggtgctgcccagcggcaagtacaccggcgccaacctgaagagcgtgatcagagtgctgagaggcctgctggaccagggcatccccagcaaggagctggagaacctgcaggagctgaagcccctggaccagtgcctgatcggccagaccaaggagaacagaagaaagaacagatacaagaacatcctgccctacgacgccaccagagtgcccctgggcgacgagggcggctacatcaacgccagcttcatcaagatccccgtgggcaaggaggagttcgtgtacatcgcctgccagggccccctgcccaccaccgtgggcgacttctggcagatgatctgggagcagaagagcaccgtgatcgccatgatgacccaggaggtggagggcgagaagatcaagtgccagagatactggcccaacatcctgggcaagaccaccatggtgagcaacagactgagactggccctggtgagaatgcagcagctgaagggcttcgtggtgagagccatgaccctggaggacatccagaccagagaggtgagacacatcagccacctgaacttcaccgcctggcccgaccacgacacccccagccagcccgacgacctgctgaccttcatcagctacatgagacacatccacagaagcggccccatcatcacccactgcagcgccggcatcggcagaagcggcaccctgatctgcatcgacgtggtgctgggcctgatcagccaggacctggacttcgacatcagcgacctggtgagatgcatgagactgcagagacacggcatggtgcagaccgaggaccagtacatcttctgctaccaggtgatcctgtacgtgctgaccagactgcaggccgaggaggagcagaagcagcagccccagctgctgaagtag

SEQ ID NO: 95465 - DNA, 7305 bp, synthetic construct
  misc_feature 1..7305: note = Description of Artificial Sequence: Synthetic coding sequence
  source 1..7305: mol_type = other DNA
cagttcctgttcaccaaggtgagcctggccgaccccgccgccctgggcttcatcatcagcccctggagcctgctgctgctgcccagcggcagcgtgagcttcaccgacgagaacatcagcaaccaggacctgagagccttcaccgcccccgaggtgctgcagaaccagagcctgaccagcctgagcgacgtggagaagatccacatctacagcctgggcatgaccctgtactggggcgccgactacgaggtgccccagagccagcccatcaagctgggcgaccacctgaacagcatcctgctgggcatgtgcgaggacgtgatctacgccagagtgagcgtgagaaccgtgctggacgcctgcagcgcccacatcagaaacagcaactgcgcccccagcttcagctacgtgaagcacctggtgaagctggtgctgggcaacctgagcggcaccgaccagctgagctgcaacagcgagcagaagcccgacagaagccaggccatcagagacagactgagaggcaagggcctgcccaccggcagaagcagcaccagcgacgtgctggacatccagaagccccccctgagccaccagaccttcctgaacaagggcctgagcaagagcatgggcttcctgagcatcaaggacacccaggacgagaactacttcaaggacatcctgagcgacaacagcggcagagaggacagcgagaacaccttcagcccctaccagttcaagaccagcggccccgagaagaagcccatccccggcatcgacgtgctgagcaagaagaagatctgggccagcagcatggacctgctgtgcaccgccgacagagacttcagcagcggcgagaccgccacctacagaagatgccaccccgaggccgtgaccgtgagaaccagcaccacccccagaaagaaggaggccagatacagcgacggcagcatcgccctggacatcttcggcccccagaagatggaccccatctaccacaccagagagctgcccaccagcagcgccatcagcagcgccctggacagaatcagagagagacagaagaagctgcaggtgctgagagaggccatgaacgtggaggagcccgtgagaagatacaagacctaccacggcgacgtgttcagcaccagcagcgagagccccagcatcatcagcagcgagagcgacttcagacaggtgagaagaagcgaggccagcaagagattcgagagcagcagcggcctgcccggcgtggacgagaccctgagccagggccagagccagagacccagcagacagtacgagacccccttcgagggcaacctgatcaaccaggagatcatgctgaagagacaggaggaggagctgatgcagctgcaggccaagatggccctgagacagagcagactgagcctgtaccccggcgacaccatcaaggccagcatgctggacatcaccagagaccccctgagagagatcgccctggagaccgccatgacccagagaaagctgagaaacttcttcggccccgagttcgtgaagatgaccatcgagcccttcatcagcctggacctgcccagaagcatcctgaccaagaagggcaagaacgaggacaacagaagaaaggtgaacatcatgctgctgaacggccagagactggagctgacctgcgacaccaagaccatctgcaaggacgtgttcgacatggtggtggcccacatcggcctggtggagcaccacctgttcgccctggccaccctgaaggacaacgagtacttcttcgtggaccccgacctgaagctgaccaaggtggcccccgagggctggaaggaggagcccaagaagaagaccaaggccaccgtgaacttcaccctgttcttcagaatcaagttcttcatggacgacgtgagcctgatccagcacaccctgacctgccaccagtactacctgcagctgagaaaggacatcctggaggagagaatgcactgcgacgacgagaccagcctgctgctggccagcctggccctgcaggccgagtacggcgactaccagcccgaggtgcacggcgtgagctacttcagaatggagcactacctgcccgccagagtgatggagaagctggacctgagctacatcaaggaggagctgcccaagctgcacaacacctacgtgggcgccagcgagaaggagaccgagctggagttcctgaaggtgtgccagagactgaccgagtacggcgtgcacttccacagagtgcaccccgagaagaagagccagaccggcatcctgctgggcgtgtgcagcaagggcgtgctggtgttcgaggtgcacaacggcgtgagaaccctggtgctgagattcccctggagagagaccaagaagatcagcttcagcaagaagaagatcaccctgcagaacaccagcgacggcatcaagcacggcttccagaccgacaacagcaagatctgccagtacctgctgcacctgtgcagctaccagcacaagttccagctgcagatgagagccagacagagcaaccaggacgcccaggacatcgagagagccagcttcagaagcctgaacctgcaggccgagagcgtgagaggcttcaacatgggcagagccatcagcaccggcagcctggccagcagcaccctgaacaagctggccgtgagacccctgagcgtgcaggccgagatcctgaagagactgagctgcagcgagctgagcctgtaccagcccctgcagaacagcagcaaggagaagaacgacaaggccagctgggaggagaagcccagagagatgagcaagagctaccacgacctgagccaggccagcctgtacccccacagaaagaacgtgatcgtgaacatggagccccccccccagaccgtggccgagctggtgggcaagcccagccaccagatgagcagaagcgacgccgagagcctggccggcgtgaccaagctgaacaacagcaagagcgtggccagcctgaacagaagccccgagagaagaaagcacgagagcgacagcagcagcatcgaggaccccggccaggcctacgtgctggacgtgctgcacaagagatggagcatcgtgagcagccccgagagagagatcaccctggtgaacctgaagaaggacgccaagtacggcctgggcttccagatcatcggcggcgagaagatgggcagactggacctgggcatcttcatcagcagcgtggcccccggcggccccgccgacctggacggctgcctgaagcccggcgacagactgatcagcgtgaacagcgtgagcctggagggcgtgagccaccacgccgccatcgagatcctgcagaacgcccccgaggacgtgaccctggtgatcagccagcccaaggagaagatcagcaaggtgcccagcacccccgtgcacctgaccaacgagatgaagaactacatgaagaagagcagctacatgcaggacagcgccatcgacagcagcagcaaggaccaccactggagcagaggcaccctgagacacatcagcgagaacagcttcggccccagcggcggcctgagagagggcagcctgagcagccaggacagcagaaccgagagcgccagcctgagccagagccaggtgaacggcttcttcgccagccacctgggcgaccagacctggcaggagagccagcacggcagccccagccccagcgtgatcagcaaggccaccgagaaggagaccttcaccgacagcaaccagagcaagaccaagaagcccggcatcagcgacgtgaccgactacagcgacagaggcgacagcgacatggacgaggccacctacagcagcagccaggaccaccagacccccaagcaggagagcagcagcagcgtgaacaccagcaacaagatgaacttcaagaccttcagcagcagcccccccaagcccggcgacatcttcgaggtggagctggccaagaacgacaacagcctgggcatcagcgtgaccggcggcgtgaacaccagcgtgagacacggcggcatctacgtgaaggccgtgatcccccagggcgccgccgagagcgacggcagaatccacaagggcgacagagtgctggccgtgaacggcgtgagcctggagggcgccacccacaagcaggccgtggagaccctgagaaacaccggccaggtggtgcacctgctgctggagaagggccagagccccaccagcaaggagcacgtgcccgtgaccccccagtgcaccctgagcgaccagaacgcccagggccagggccccgagaaggtgaagaagaccacccaggtgaaggactacagcttcgtgaccgaggagaacaccttcgaggtgaagctgttcaagaacagcagcggcctgggcttcagcttcagcagagaggacaacctgatccccgagcagatcaacgccagcatcgtgagagtgaagaagctgttccccggccagcccgccgccgagagcggcaagatcgacgtgggcgacgtgatcctgaaggtgaacggcgccagcctgaagggcctgagccagcaggaggtgatcagcgccctgagaggcaccgcccccgaggtgttcctgctgctgtgcagacccccccccggcgtgctgcccgagatcgacaccgccctgctgacccccctgcagagccccgcccaggtgctgcccaacagcagcaaggacagcagccagcccagctgcgtggagcagagcaccagcagcgacgagaacgagatgagcgacaagagcaagaagcagtgcaagagccccagcagaagagacagctacagcgacagcagcggcagcggcgaggacgacctggtgaccgcccccgccaacatcagcaacagcacctggagcagcgccctgcaccagaccctgagcaacatggtgagccaggcccagagccaccacgaggcccccaagagccaggaggacaccatctgcaccatgttctactacccccagaagatccccaacaagcccgagttcgaggacagcaaccccagccccctgccccccgacatggcccccggccagagctaccagccccagagcgagagcgccagcagcagcagcatggacaagtaccacatccaccacatcagcgagcccaccagacaggagaactggacccccctgaagaacgacctggagaaccacctggaggacttcgagctggaggtggagctgctgatcaccctgatcaagagcgagaagggcagcctgggcttcaccgtgaccaagggcaaccagagaatcggctgctacgtgcacgacgtgatccaggaccccgccaagagcgacggcagactgaagcccggcgacagactgatcaaggtgaacgacaccgacgtgaccaacatgacccacaccgacgccgtgaacctgctgagagccgccagcaagaccgtgagactggtgatcggcagagtgctggagctgcccagaatccccatgctgccccacctgctgcccgacatcaccctgacctgcaacaaggaggagctgggcttcagcctgtgcggcggccacgacagcctgtaccaggtggtgtacatcagcgacatcaaccccagaagcgtggccgccatcgagggcaacctgcagctgctggacgtgatccactacgtgaacggcgtgagcacccagggcatgaccctggaggaggtgaacagagccctggacatgagcctgcccagcctggtgctgaaggccaccagaaacgacctgcccgtggtgcccagcagcaagagaagcgccgtgagcgcccccaagagcaccaagggcaacggcagctacagcgtgggcagctgcagccagcccgccctgacccccaacgacagcttcagcaccgtggccggcgaggagatcaacgagatcagctaccccaagggcaagtgcagcacctaccagatcaagggcagccccaacctgaccctgcccaaggagagctacatccaggaggacgacatctacgacgacagccaggaggccgaggtgatccagagcctgctggacgtggtggacgaggaggcccagaacctgctgaacgagaacaacgccgccggctacagctgcggccccggcaccctgaagatgaacggcaagctgagcgaggagagaaccgaggacaccgactgcgacggcagccccctgcccgagtacttcaccgaggccaccaagatgaacggctgcgaggagtactgcgaggagaaggtgaagagcgagagcctgatccagaagccccaggagaagaagaccgacgacgacgagatcacctggggcaacgacgagctgcccatcgagagaaccaaccacgaggacagcgacaaggaccacagcttcctgaccaacgacgagctggccgtgctgcccgtggtgaaggtgctgcccagcggcaagtacaccggcgccaacctgaagagcgtgatcagagtgctgagaggcctgctggaccagggcatccccagcaaggagctggagaacctgcaggagctgaagcccctggaccagtgcctgatcggccagaccaaggagaacagaagaaagaacagatacaagaacatcctgccctacgacgccaccagagtgcccctgggcgacgagggcggctacatcaacgccagcttcatcaagatccccgtgggcaaggaggagttcgtgtacatcgcctgccagggccccctgcccaccaccgtgggcgacttctggcagatgatctgggagcagaagagcaccgtgatcgccatgatgacccaggaggtggagggcgagaagatcaagtgccagagatactggcccaacatcctgggcaagaccaccatggtgagcaacagactgagactggccctggtgagaatgcagcagctgaagggcttcgtggtgagagccatgaccctggaggacatccagaccagagaggtgagacacatcagccacctgaacttcaccgcctggcccgaccacgacacccccagccagcccgacgacctgctgaccttcatcagctacatgagacacatccacagaagcggccccatcatcacccactgcagcgccggcatcggcagaagcggcaccctgatctgcatcgacgtggtgctgggcctgatcagccaggacctggacttcgacatcagcgacctggtgagatgcatgagactgcagagacacggcatggtgcagaccgaggaccagtacatcttctgctaccaggtgatcctgtacgtgctgaccagactgcaggccgaggaggagcagaagcagcagccccagctgctgaagtag

SEQ ID NO: 95466 - DNA, 7458 bp, synthetic construct
  misc_feature 1..7458: note = Description of Artificial Sequence: Synthetic coding sequence
  source 1..7458: mol_type = other DNA
atgcacgtgagcctggccgaggccctggaggtgagaggcggccccctgcaggaggaggagatctgggccgtgctgaaccagagcgccgagagcctgcaggagctgttcagaaaggtgagcctggccgaccccgccgccctgggcttcatcatcagcccctggagcctgctgctgctgcccagcggcagcgtgagcttcaccgacgagaacatcagcaaccaggacctgagagccttcaccgcccccgaggtgctgcagaaccagagcctgaccagcctgagcgacgtggagaagatccacatctacagcctgggcatgaccctgtactggggcgccgactacgaggtgccccagagccagcccatcaagctgggcgaccacctgaacagcatcctgctgggcatgtgcgaggacgtgatctacgccagagtgagcgtgagaaccgtgctggacgcctgcagcgcccacatcagaaacagcaactgcgcccccagcttcagctacgtgaagcacctggtgaagctggtgctgggcaacctgagcggcaccgaccagctgagctgcaacagcgagcagaagcccgacagaagccaggccatcagagacagactgagaggcaagggcctgcccaccggcagaagcagcaccagcgacgtgctggacatccagaagccccccctgagccaccagaccttcctgaacaagggcctgagcaagagcatgggcttcctgagcatcaaggacacccaggacgagaactacttcaaggacatcctgagcgacaacagcggcagagaggacagcgagaacaccttcagcccctaccagttcaagaccagcggccccgagaagaagcccatccccggcatcgacgtgctgagcaagaagaagatctgggccagcagcatggacctgctgtgcaccgccgacagagacttcagcagcggcgagaccgccacctacagaagatgccaccccgaggccgtgaccgtgagaaccagcaccacccccagaaagaaggaggccagatacagcgacggcagcatcgccctggacatcttcggcccccagaagatggaccccatctaccacaccagagagctgcccaccagcagcgccatcagcagcgccctggacagaatcagagagagacagaagaagctgcaggtgctgagagaggccatgaacgtggaggagcccgtgagaagatacaagacctaccacggcgacgtgttcagcaccagcagcgagagccccagcatcatcagcagcgagagcgacttcagacaggtgagaagaagcgaggccagcaagagattcgagagcagcagcggcctgcccggcgtggacgagaccctgagccagggccagagccagagacccagcagacagtacgagacccccttcgagggcaacctgatcaaccaggagatcatgctgaagagacaggaggaggagctgatgcagctgcaggccaagatggccctgagacagagcagactgagcctgtaccccggcgacaccatcaaggccagcatgctggacatcaccagagaccccctgagagagatcgccctggagaccgccatgacccagagaaagctgagaaacttcttcggccccgagttcgtgaagatgaccatcgagcccttcatcagcctggacctgcccagaagcatcctgaccaagaagggcaagaacgaggacaacagaagaaaggtgaacatcatgctgctgaacggccagagactggagctgacctgcgacaccaagaccatctgcaaggacgtgttcgacatggtggtggcccacatcggcctggtggagcaccacctgttcgccctggccaccctgaaggacaacgagtacttcttcgtggaccccgacctgaagctgaccaaggtggcccccgagggctggaaggaggagcccaagaagaagaccaaggccaccgtgaacttcaccctgttcttcagaatcaagttcttcatggacgacgtgagcctgatccagcacaccctgacctgccaccagtactacctgcagctgagaaaggacatcctggaggagagaatgcactgcgacgacgagaccagcctgctgctggccagcctggccctgcaggccgagtacggcgactaccagcccgaggtgcacggcgtgagctacttcagaatggagcactacctgcccgccagagtgatggagaagctggacctgagctacatcaaggaggagctgcccaagctgcacaacacctacgtgggcgccagcgagaaggagaccgagctggagttcctgaaggtgtgccagagactgaccgagtacggcgtgcacttccacagagtgcaccccgagaagaagagccagaccggcatcctgctgggcgtgtgcagcaagggcgtgctggtgttcgaggtgcacaacggcgtgagaaccctggtgctgagattcccctggagagagaccaagaagatcagcttcagcaagaagaagatcaccctgcagaacaccagcgacggcatcaagcacggcttccagaccgacaacagcaagatctgccagtacctgctgcacctgtgcagctaccagcacaagttccagctgcagatgagagccagacagagcaaccaggacgcccaggacatcgagagagccagcttcagaagcctgaacctgcaggccgagagcgtgagaggcttcaacatgggcagagccatcagcaccggcagcctggccagcagcaccctgaacaagctggccgtgagacccctgagcgtgcaggccgagatcctgaagagactgagctgcagcgagctgagcctgtaccagcccctgcagaacagcagcaaggagaagaacgacaaggccagctgggaggagaagcccagagagatgagcaagagctaccacgacctgagccaggccagcctgtacccccacagaaagaacgtgatcgtgaacatggagccccccccccagaccgtggccgagctggtgggcaagcccagccaccagatgagcagaagcgacgccgagagcctggccggcgtgaccaagctgaacaacagcaagagcgtggccagcctgaacagaagccccgagagaagaaagcacgagagcgacagcagcagcatcgaggaccccggccaggcctacgtgctgggcatgaccatgcacagcagcggcaacagcagcagccaggtgcccctgaaggagaacgacgtgctgcacaagagatggagcatcgtgagcagccccgagagagagatcaccctggtgaacctgaagaaggacgccaagtacggcctgggcttccagatcatcggcggcgagaagatgggcagactggacctgggcatcttcatcagcagcgtggcccccggcggccccgccgacctggacggctgcctgaagcccggcgacagactgatcagcgtgaacagcgtgagcctggagggcgtgagccaccacgccgccatcgagatcctgcagaacgcccccgaggacgtgaccctggtgatcagccagcccaaggagaagatcagcaaggtgcccagcacccccgtgcacctgaccaacgagatgaagaactacatgaagaagagcagctacatgcaggacagcgccatcgacagcagcagcaaggaccaccactggagcagaggcaccctgagacacatcagcgagaacagcttcggccccagcggcggcctgagagagggcagcctgagcagccaggacagcagaaccgagagcgccagcctgagccagagccaggtgaacggcttcttcgccagccacctgggcgaccagacctggcaggagagccagcacggcagccccagccccagcgtgatcagcaaggccaccgagaaggagaccttcaccgacagcaaccagagcaagaccaagaagcccggcatcagcgacgtgaccgactacagcgacagaggcgacagcgacatggacgaggccacctacagcagcagccaggaccaccagacccccaagcaggagagcagcagcagcgtgaacaccagcaacaagatgaacttcaagaccttcagcagcagcccccccaagcccggcgacatcttcgaggtggagctggccaagaacgacaacagcctgggcatcagcgtgaccggcggcgtgaacaccagcgtgagacacggcggcatctacgtgaaggccgtgatcccccagggcgccgccgagagcgacggcagaatccacaagggcgacagagtgctggccgtgaacggcgtgagcctggagggcgccacccacaagcaggccgtggagaccctgagaaacaccggccaggtggtgcacctgctgctggagaagggccagagccccaccagcaaggagcacgtgcccgtgaccccccagtgcaccctgagcgaccagaacgcccagggccagggccccgagaaggtgaagaagaccacccaggtgaaggactacagcttcgtgaccgaggagaacaccttcgaggtgaagctgttcaagaacagcagcggcctgggcttcagcttcagcagagaggacaacctgatccccgagcagatcaacgccagcatcgtgagagtgaagaagctgttccccggccagcccgccgccgagagcggcaagatcgacgtgggcgacgtgatcctgaaggtgaacggcgccagcctgaagggcctgagccagcaggaggtgatcagcgccctgagaggcaccgcccccgaggtgttcctgctgctgtgcagacccccccccggcgtgctgcccgagatcgacaccgccctgctgacccccctgcagagccccgcccaggtgctgcccaacagcagcaaggacagcagccagcccagctgcgtggagcagagcaccagcagcgacgagaacgagatgagcgacaagagcaagaagcagtgcaagagccccagcagaagagacagctacagcgacagcagcggcagcggcgaggacgacctggtgaccgcccccgccaacatcagcaacagcacctggagcagcgccctgcaccagaccctgagcaacatggtgagccaggcccagagccaccacgaggcccccaagagccaggaggacaccatctgcaccatgttctactacccccagaagatccccaacaagcccgagttcgaggacagcaaccccagccccctgccccccgacatggcccccggccagagctaccagccccagagcgagagcgccagcagcagcagcatggacaagtaccacatccaccacatcagcgagcccaccagacaggagaactggacccccctgaagaacgacctggagaaccacctggaggacttcgagctggaggtggagctgctgatcaccctgatcaagagcgagaagggcagcctgggcttcaccgtgaccaagggcaaccagagaatcggctgctacgtgcacgacgtgatccaggaccccgccaagagcgacggcagactgaagcccggcgacagactgatcaaggtgaacgacaccgacgtgaccaacatgacccacaccgacgccgtgaacctgctgagagccgccagcaagaccgtgagactggtgatcggcagagtgctggagctgcccagaatccccatgctgccccacctgctgcccgacatcaccctgacctgcaacaaggaggagctgggcttcagcctgtgcggcggccacgacagcctgtaccaggtggtgtacatcagcgacatcaaccccagaagcgtggccgccatcgagggcaacctgcagctgctggacgtgatccactacgtgaacggcgtgagcacccagggcatgaccctggaggaggtgaacagagccctggacatgagcctgcccagcctggtgctgaaggccaccagaaacgacctgcccgtggtgcccagcagcaagagaagcgccgtgagcgcccccaagagcaccaagggcaacggcagctacagcgtgggcagctgcagccagcccgccctgacccccaacgacagcttcagcaccgtggccggcgaggagatcaacgagatcagctaccccaagggcaagtgcagcacctaccagatcaagggcagccccaacctgaccctgcccaaggagagctacatccaggaggacgacatctacgacgacagccaggaggccgaggtgatccagagcctgctggacgtggtggacgaggaggcccagaacctgctgaacgagaacaacgccgccggctacagctgcggccccggcaccctgaagatgaacggcaagctgagcgaggagagaaccgaggacaccgactgcgacggcagccccctgcccgagtacttcaccgaggccaccaagatgaacggctgcgaggagtactgcgaggagaaggtgaagagcgagagcctgatccagaagccccaggagaagaagaccgacgacgacgagatcacctggggcaacgacgagctgcccatcgagagaaccaaccacgaggacagcgacaaggaccacagcttcctgaccaacgacgagctggccgtgctgcccgtggtgaaggtgctgcccagcggcaagtacaccggcgccaacctgaagagcgtgatcagagtgctgagaggcctgctggaccagggcatccccagcaaggagctggagaacctgcaggagctgaagcccctggaccagtgcctgatcggccagaccaaggagaacagaagaaagaacagatacaagaacatcctgccctacgacgccaccagagtgcccctgggcgacgagggcggctacatcaacgccagcttcatcaagatccccgtgggcaaggaggagttcgtgtacatcgcctgccagggccccctgcccaccaccgtgggcgacttctggcagatgatctgggagcagaagagcaccgtgatcgccatgatgacccaggaggtggagggcgagaagatcaagtgccagagatactggcccaacatcctgggcaagaccaccatggtgagcaacagactgagactggccctggtgagaatgcagcagctgaagggcttcgtggtgagagccatgaccctggaggacatccagaccagagaggtgagacacatcagccacctgaacttcaccgcctggcccgaccacgacacccccagccagcccgacgacctgctgaccttcatcagctacatgagacacatccacagaagcggccccatcatcacccactgcagcgccggcatcggcagaagcggcaccctgatctgcatcgacgtggtgctgggcctgatcagccaggacctggacttcgacatcagcgacctggtgagatgcatgagactgcagagacacggcatggtgcagaccgaggaccagtacatcttctgctaccaggtgatcctgtacgtgctgaccagactgcaggccgaggaggagcagaagcagcagccccagctgctgaagtag

SEQ ID NO: 95467 - DNA, 7401 bp, synthetic construct
  misc_feature 1..7401: note = Description of Artificial Sequence: Synthetic coding sequence
  source 1..7401: mol_type = other DNA
atgcacgtgagcctggccgaggccctggaggtgagaggcggccccctgcaggaggaggagatctgggccgtgctgaaccagagcgccgagagcctgcaggagctgttcagaaaggtgagcctggccgaccccgccgccctgggcttcatcatcagcccctggagcctgctgctgctgcccagcggcagcgtgagcttcaccgacgagaacatcagcaaccaggacctgagagccttcaccgcccccgaggtgctgcagaaccagagcctgaccagcctgagcgacgtggagaagatccacatctacagcctgggcatgaccctgtactggggcgccgactacgaggtgccccagagccagcccatcaagctgggcgaccacctgaacagcatcctgctgggcatgtgcgaggacgtgatctacgccagagtgagcgtgagaaccgtgctggacgcctgcagcgcccacatcagaaacagcaactgcgcccccagcttcagctacgtgaagcacctggtgaagctggtgctgggcaacctgagcggcaccgaccagctgagctgcaacagcgagcagaagcccgacagaagccaggccatcagagacagactgagaggcaagggcctgcccaccggcagaagcagcaccagcgacgtgctggacatccagaagccccccctgagccaccagaccttcctgaacaagggcctgagcaagagcatgggcttcctgagcatcaaggacacccaggacgagaactacttcaaggacatcctgagcgacaacagcggcagagaggacagcgagaacaccttcagcccctaccagttcaagaccagcggccccgagaagaagcccatccccggcatcgacgtgctgagcaagaagaagatctgggccagcagcatggacctgctgtgcaccgccgacagagacttcagcagcggcgagaccgccacctacagaagatgccaccccgaggccgtgaccgtgagaaccagcaccacccccagaaagaaggaggccagatacagcgacggcagcatcgccctggacatcttcggcccccagaagatggaccccatctaccacaccagagagctgcccaccagcagcgccatcagcagcgccctggacagaatcagagagagacagaagaagctgcaggtgctgagagaggccatgaacgtggaggagcccgtgagaagatacaagacctaccacggcgacgtgttcagcaccagcagcgagagccccagcatcatcagcagcgagagcgacttcagacaggtgagaagaagcgaggccagcaagagattcgagagcagcagcggcctgcccggcgtggacgagaccctgagccagggccagagccagagacccagcagacagtacgagacccccttcgagggcaacctgatcaaccaggagatcatgctgaagagacaggaggaggagctgatgcagctgcaggccaagatggccctgagacagagcagactgagcctgtaccccggcgacaccatcaaggccagcatgctggacatcaccagagaccccctgagagagatcgccctggagaccgccatgacccagagaaagctgagaaacttcttcggccccgagttcgtgaagatgaccatcgagcccttcatcagcctggacctgcccagaagcatcctgaccaagaagggcaagaacgaggacaacagaagaaaggtgaacatcatgctgctgaacggccagagactggagctgacctgcgacaccaagaccatctgcaaggacgtgttcgacatggtggtggcccacatcggcctggtggagcaccacctgttcgccctggccaccctgaaggacaacgagtacttcttcgtggaccccgacctgaagctgaccaaggtggcccccgagggctggaaggaggagcccaagaagaagaccaaggccaccgtgaacttcaccctgttcttcagaatcaagttcttcatggacgacgtgagcctgatccagcacaccctgacctgccaccagtactacctgcagctgagaaaggacatcctggaggagagaatgcactgcgacgacgagaccagcctgctgctggccagcctggccctgcaggccgagtacggcgactaccagcccgaggtgcacggcgtgagctacttcagaatggagcactacctgcccgccagagtgatggagaagctggacctgagctacatcaaggaggagctgcccaagctgcacaacacctacgtgggcgccagcgagaaggagaccgagctggagttcctgaaggtgtgccagagactgaccgagtacggcgtgcacttccacagagtgcaccccgagaagaagagccagaccggcatcctgctgggcgtgtgcagcaagggcgtgctggtgttcgaggtgcacaacggcgtgagaaccctggtgctgagattcccctggagagagaccaagaagatcagcttcagcaagaagaagatcaccctgcagaacaccagcgacggcatcaagcacggcttccagaccgacaacagcaagatctgccagtacctgctgcacctgtgcagctaccagcacaagttccagctgcagatgagagccagacagagcaaccaggacgcccaggacatcgagagagccagcttcagaagcctgaacctgcaggccgagagcgtgagaggcttcaacatgggcagagccatcagcaccggcagcctggccagcagcaccctgaacaagctggccgtgagacccctgagcgtgcaggccgagatcctgaagagactgagctgcagcgagctgagcctgtaccagcccctgcagaacagcagcaaggagaagaacgacaaggccagctgggaggagaagcccagagagatgagcaagagctaccacgacctgagccaggccagcctgtacccccacagaaagaacgtgatcgtgaacatggagccccccccccagaccgtggccgagctggtgggcaagcccagccaccagatgagcagaagcgacgccgagagcctggccggcgtgaccaagctgaacaacagcaagagcgtggccagcctgaacagaagccccgagagaagaaagcacgagagcgacagcagcagcatcgaggaccccggccaggcctacgtgctggacgtgctgcacaagagatggagcatcgtgagcagccccgagagagagatcaccctggtgaacctgaagaaggacgccaagtacggcctgggcttccagatcatcggcggcgagaagatgggcagactggacctgggcatcttcatcagcagcgtggcccccggcggccccgccgacctggacggctgcctgaagcccggcgacagactgatcagcgtgaacagcgtgagcctggagggcgtgagccaccacgccgccatcgagatcctgcagaacgcccccgaggacgtgaccctggtgatcagccagcccaaggagaagatcagcaaggtgcccagcacccccgtgcacctgaccaacgagatgaagaactacatgaagaagagcagctacatgcaggacagcgccatcgacagcagcagcaaggaccaccactggagcagaggcaccctgagacacatcagcgagaacagcttcggccccagcggcggcctgagagagggcagcctgagcagccaggacagcagaaccgagagcgccagcctgagccagagccaggtgaacggcttcttcgccagccacctgggcgaccagacctggcaggagagccagcacggcagccccagccccagcgtgatcagcaaggccaccgagaaggagaccttcaccgacagcaaccagagcaagaccaagaagcccggcatcagcgacgtgaccgactacagcgacagaggcgacagcgacatggacgaggccacctacagcagcagccaggaccaccagacccccaagcaggagagcagcagcagcgtgaacaccagcaacaagatgaacttcaagaccttcagcagcagcccccccaagcccggcgacatcttcgaggtggagctggccaagaacgacaacagcctgggcatcagcgtgaccggcggcgtgaacaccagcgtgagacacggcggcatctacgtgaaggccgtgatcccccagggcgccgccgagagcgacggcagaatccacaagggcgacagagtgctggccgtgaacggcgtgagcctggagggcgccacccacaagcaggccgtggagaccctgagaaacaccggccaggtggtgcacctgctgctggagaagggccagagccccaccagcaaggagcacgtgcccgtgaccccccagtgcaccctgagcgaccagaacgcccagggccagggccccgagaaggtgaagaagaccacccaggtgaaggactacagcttcgtgaccgaggagaacaccttcgaggtgaagctgttcaagaacagcagcggcctgggcttcagcttcagcagagaggacaacctgatccccgagcagatcaacgccagcatcgtgagagtgaagaagctgttccccggccagcccgccgccgagagcggcaagatcgacgtgggcgacgtgatcctgaaggtgaacggcgccagcctgaagggcctgagccagcaggaggtgatcagcgccctgagaggcaccgcccccgaggtgttcctgctgctgtgcagacccccccccggcgtgctgcccgagatcgacaccgccctgctgacccccctgcagagccccgcccaggtgctgcccaacagcagcaaggacagcagccagcccagctgcgtggagcagagcaccagcagcgacgagaacgagatgagcgacaagagcaagaagcagtgcaagagccccagcagaagagacagctacagcgacagcagcggcagcggcgaggacgacctggtgaccgcccccgccaacatcagcaacagcacctggagcagcgccctgcaccagaccctgagcaacatggtgagccaggcccagagccaccacgaggcccccaagagccaggaggacaccatctgcaccatgttctactacccccagaagatccccaacaagcccgagttcgaggacagcaaccccagccccctgccccccgacatggcccccggccagagctaccagccccagagcgagagcgccagcagcagcagcatggacaagtaccacatccaccacatcagcgagcccaccagacaggagaactggacccccctgaagaacgacctggagaaccacctggaggacttcgagctggaggtggagctgctgatcaccctgatcaagagcgagaagggcagcctgggcttcaccgtgaccaagggcaaccagagaatcggctgctacgtgcacgacgtgatccaggaccccgccaagagcgacggcagactgaagcccggcgacagactgatcaaggtgaacgacaccgacgtgaccaacatgacccacaccgacgccgtgaacctgctgagagccgccagcaagaccgtgagactggtgatcggcagagtgctggagctgcccagaatccccatgctgccccacctgctgcccgacatcaccctgacctgcaacaaggaggagctgggcttcagcctgtgcggcggccacgacagcctgtaccaggtggtgtacatcagcgacatcaaccccagaagcgtggccgccatcgagggcaacctgcagctgctggacgtgatccactacgtgaacggcgtgagcacccagggcatgaccctggaggaggtgaacagagccctggacatgagcctgcccagcctggtgctgaaggccaccagaaacgacctgcccgtggtgcccagcagcaagagaagcgccgtgagcgcccccaagagcaccaagggcaacggcagctacagcgtgggcagctgcagccagcccgccctgacccccaacgacagcttcagcaccgtggccggcgaggagatcaacgagatcagctaccccaagggcaagtgcagcacctaccagatcaagggcagccccaacctgaccctgcccaaggagagctacatccaggaggacgacatctacgacgacagccaggaggccgaggtgatccagagcctgctggacgtggtggacgaggaggcccagaacctgctgaacgagaacaacgccgccggctacagctgcggccccggcaccctgaagatgaacggcaagctgagcgaggagagaaccgaggacaccgactgcgacggcagccccctgcccgagtacttcaccgaggccaccaagatgaacggctgcgaggagtactgcgaggagaaggtgaagagcgagagcctgatccagaagccccaggagaagaagaccgacgacgacgagatcacctggggcaacgacgagctgcccatcgagagaaccaaccacgaggacagcgacaaggaccacagcttcctgaccaacgacgagctggccgtgctgcccgtggtgaaggtgctgcccagcggcaagtacaccggcgccaacctgaagagcgtgatcagagtgctgagaggcctgctggaccagggcatccccagcaaggagctggagaacctgcaggagctgaagcccctggaccagtgcctgatcggccagaccaaggagaacagaagaaagaacagatacaagaacatcctgccctacgacgccaccagagtgcccctgggcgacgagggcggctacatcaacgccagcttcatcaagatccccgtgggcaaggaggagttcgtgtacatcgcctgccagggccccctgcccaccaccgtgggcgacttctggcagatgatctgggagcagaagagcaccgtgatcgccatgatgacccaggaggtggagggcgagaagatcaagtgccagagatactggcccaacatcctgggcaagaccaccatggtgagcaacagactgagactggccctggtgagaatgcagcagctgaagggcttcgtggtgagagccatgaccctggaggacatccagaccagagaggtgagacacatcagccacctgaacttcaccgcctggcccgaccacgacacccccagccagcccgacgacctgctgaccttcatcagctacatgagacacatccacagaagcggccccatcatcacccactgcagcgccggcatcggcagaagcggcaccctgatctgcatcgacgtggtgctgggcctgatcagccaggacctggacttcgacatcagcgacctggtgagatgcatgagactgcagagacacggcatggtgcagaccgaggaccagtacatcttctgctaccaggtgatcctgtacgtgctgaccagactgcaggccgaggaggagcagaagcagcagccccagctgctgaagtag

SEQ ID NO: 95468 - DNA, 7473 bp, synthetic construct
  misc_feature 1..7473: note = Description of Artificial Sequence: Synthetic coding sequence
  source 1..7473: mol_type = other DNA
atgcacgtgagcctggccgaggccctggaggtgagaggcggccccctgcaggaggaggagatctgggccgtgctgaaccagagcgccgagagcctgcaggagctgttcagaaaggtgagcctggccgaccccgccgccctgggcttcatcatcagcccctggagcctgctgctgctgcccagcggcagcgtgagcttcaccgacgagaacatcagcaaccaggacctgagagccttcaccgcccccgaggtgctgcagaaccagagcctgaccagcctgagcgacgtggagaagatccacatctacagcctgggcatgaccctgtactggggcgccgactacgaggtgccccagagccagcccatcaagctgggcgaccacctgaacagcatcctgctgggcatgtgcgaggacgtgatctacgccagagtgagcgtgagaaccgtgctggacgcctgcagcgcccacatcagaaacagcaactgcgcccccagcttcagctacgtgaagcacctggtgaagctggtgctgggcaacctgagcggcaccgaccagctgagctgcaacagcgagcagaagcccgacagaagccaggccatcagagacagactgagaggcaagggcctgcccaccggcagaagcagcaccagcgacgtgctggacatccagaagccccccctgagccaccagaccttcctgaacaagggcctgagcaagagcatgggcttcctgagcatcaaggacacccaggacgagaactacttcaaggacatcctgagcgacaacagcggcagagaggacagcgagaacaccttcagcccctaccagttcaagaccagcggccccgagaagaagcccatccccggcatcgacgtgctgagcaagaagaagatctgggccagcagcatggacctgctgtgcaccgccgacagagacttcagcagcggcgagaccgccacctacagaagatgccaccccgaggccgtgaccgtgagaaccagcaccacccccagaaagaaggaggccagatacagcgacggcagcatcgccctggacatcttcggcccccagaagatggaccccatctaccacaccagagagctgcccaccagcagcgccatcagcagcgccctggacagaatcagagagagacagaagaagctgcaggtgctgagagaggccatgaacgtggaggagcccgtgagaagatacaagacctaccacggcgacgtgttcagcaccagcagcgagagccccagcatcatcagcagcgagagcgacttcagacaggtgagaagaagcgaggccagcaagagattcgagagcagcagcggcctgcccggcgtggacgagaccctgagccagggccagagccagagacccagcagacagtacgagacccccttcgagggcaacctgatcaaccaggagatcatgctgaagagacaggaggaggagctgatgcagctgcaggccaagatggccctgagacagagcagactgagcctgtaccccggcgacaccatcaaggccagcatgctggacatcaccagagaccccctgagagagatcgccctggagaccgccatgacccagagaaagctgagaaacttcttcggccccgagttcgtgaagatgaccatcgagcccttcatcagcctggacctgcccagaagcatcctgaccaagaagggcaagaacgaggacaacagaagaaaggtgaacatcatgctgctgaacggccagagactggagctgacctgcgacaccaagaccatctgcaaggacgtgttcgacatggtggtggcccacatcggcctggtggagcaccacctgttcgccctggccaccctgaaggacaacgagtacttcttcgtggaccccgacctgaagctgaccaaggtggcccccgagggctggaaggaggagcccaagaagaagaccaaggccaccgtgaacttcaccctgttcttcagaatcaagttcttcatggacgacgtgagcctgatccagcacaccctgacctgccaccagtactacctgcagctgagaaaggacatcctggaggagagaatgcactgcgacgacgagaccagcctgctgctggccagcctggccctgcaggccgagtacggcgactaccagcccgaggtgcacggcgtgagctacttcagaatggagcactacctgcccgccagagtgatggagaagctggacctgagctacatcaaggaggagctgcccaagctgcacaacacctacgtgggcgccagcgagaaggagaccgagctggagttcctgaaggtgtgccagagactgaccgagtacggcgtgcacttccacagagtgcaccccgagaagaagagccagaccggcatcctgctgggcgtgtgcagcaagggcgtgctggtgttcgaggtgcacaacggcgtgagaaccctggtgctgagattcccctggagagagaccaagaagatcagcttcagcaagaagaagatcaccctgcagaacaccagcgacggcatcaagcacggcttccagaccgacaacagcaagatctgccagtacctgctgcacctgtgcagctaccagcacaagttccagctgcagatgagagccagacagagcaaccaggacgcccaggacatcgagagagccagcttcagaagcctgaacctgcaggccgagagcgtgagaggcttcaacatgggcagagccatcagcaccggcagcctggccagcagcaccctgaacaagctggccgtgagacccctgagcgtgcaggccgagatcctgaagagactgagctgcagcgagctgagcctgtaccagcccctgcagaacagcagcaaggagaagaacgacaaggccagctgggaggagaagcccagagagatgagcaagagctaccacgacctgagccaggccagcctgtacccccacagaaagaacgtgatcgtgaacatggagccccccccccagaccgtggccgagctggtgggcaagcccagccaccagatgagcagaagcgacgccgagagcctggccggcgtgaccaagctgaacaacagcaagagcgtggccagcctgaacagaagccccgagagaagaaagcacgagagcgacagcagcagcatcgaggaccccggccaggcctacgtgctgggcatgaccatgcacagcagcggcaacagcagcagccaggtgcccctgaaggagaacgacgtgctgcacaagagatggagcatcgtgagcagccccgagagagagatcaccctggtgaacctgaagaaggacgccaagtacggcctgggcttccagatcatcggcggcgagaagatgggcagactggacctgggcatcttcatcagcagcgtggcccccggcggccccgccgacctggacggctgcctgaagcccggcgacagactgatcagcgtgaacagcgtgagcctggagggcgtgagccaccacgccgccatcgagatcctgcagaacgcccccgaggacgtgaccctggtgatcagccagcccaaggagaagatcagcaaggtgcccagcacccccgtgcacctgaccaacgagatgaagaactacatgaagaagagcagctacatgcaggacagcgccatcgacagcagcagcaaggaccaccactggagcagaggcaccctgagacacatcagcgagaacagcttcggccccagcggcggcctgagagagggcagcctgagcagccaggacagcagaaccgagagcgccagcctgagccagagccaggtgaacggcttcttcgccagccacctgggcgaccagacctggcaggagagccagcacggcagccccagccccagcgtgatcagcaaggccaccgagaaggagaccttcaccgacagcaaccagagcaagaccaagaagcccggcatcagcgacgtgaccgactacagcgacagaggcgacagcgacatggacgaggccacctacagcagcagccaggaccaccagacccccaagcaggagagcagcagcagcgtgaacaccagcaacaagatgaacttcaagaccttcagcagcagcccccccaagcccggcgacatcttcgaggtggagctggccaagaacgacaacagcctgggcatcagcgtgaccgtgctgttcgacaagggcggcgtgaacaccagcgtgagacacggcggcatctacgtgaaggccgtgatcccccagggcgccgccgagagcgacggcagaatccacaagggcgacagagtgctggccgtgaacggcgtgagcctggagggcgccacccacaagcaggccgtggagaccctgagaaacaccggccaggtggtgcacctgctgctggagaagggccagagccccaccagcaaggagcacgtgcccgtgaccccccagtgcaccctgagcgaccagaacgcccagggccagggccccgagaaggtgaagaagaccacccaggtgaaggactacagcttcgtgaccgaggagaacaccttcgaggtgaagctgttcaagaacagcagcggcctgggcttcagcttcagcagagaggacaacctgatccccgagcagatcaacgccagcatcgtgagagtgaagaagctgttccccggccagcccgccgccgagagcggcaagatcgacgtgggcgacgtgatcctgaaggtgaacggcgccagcctgaagggcctgagccagcaggaggtgatcagcgccctgagaggcaccgcccccgaggtgttcctgctgctgtgcagacccccccccggcgtgctgcccgagatcgacaccgccctgctgacccccctgcagagccccgcccaggtgctgcccaacagcagcaaggacagcagccagcccagctgcgtggagcagagcaccagcagcgacgagaacgagatgagcgacaagagcaagaagcagtgcaagagccccagcagaagagacagctacagcgacagcagcggcagcggcgaggacgacctggtgaccgcccccgccaacatcagcaacagcacctggagcagcgccctgcaccagaccctgagcaacatggtgagccaggcccagagccaccacgaggcccccaagagccaggaggacaccatctgcaccatgttctactacccccagaagatccccaacaagcccgagttcgaggacagcaaccccagccccctgccccccgacatggcccccggccagagctaccagccccagagcgagagcgccagcagcagcagcatggacaagtaccacatccaccacatcagcgagcccaccagacaggagaactggacccccctgaagaacgacctggagaaccacctggaggacttcgagctggaggtggagctgctgatcaccctgatcaagagcgagaagggcagcctgggcttcaccgtgaccaagggcaaccagagaatcggctgctacgtgcacgacgtgatccaggaccccgccaagagcgacggcagactgaagcccggcgacagactgatcaaggtgaacgacaccgacgtgaccaacatgacccacaccgacgccgtgaacctgctgagagccgccagcaagaccgtgagactggtgatcggcagagtgctggagctgcccagaatccccatgctgccccacctgctgcccgacatcaccctgacctgcaacaaggaggagctgggcttcagcctgtgcggcggccacgacagcctgtaccaggtggtgtacatcagcgacatcaaccccagaagcgtggccgccatcgagggcaacctgcagctgctggacgtgatccactacgtgaacggcgtgagcacccagggcatgaccctggaggaggtgaacagagccctggacatgagcctgcccagcctggtgctgaaggccaccagaaacgacctgcccgtggtgcccagcagcaagagaagcgccgtgagcgcccccaagagcaccaagggcaacggcagctacagcgtgggcagctgcagccagcccgccctgacccccaacgacagcttcagcaccgtggccggcgaggagatcaacgagatcagctaccccaagggcaagtgcagcacctaccagatcaagggcagccccaacctgaccctgcccaaggagagctacatccaggaggacgacatctacgacgacagccaggaggccgaggtgatccagagcctgctggacgtggtggacgaggaggcccagaacctgctgaacgagaacaacgccgccggctacagctgcggccccggcaccctgaagatgaacggcaagctgagcgaggagagaaccgaggacaccgactgcgacggcagccccctgcccgagtacttcaccgaggccaccaagatgaacggctgcgaggagtactgcgaggagaaggtgaagagcgagagcctgatccagaagccccaggagaagaagaccgacgacgacgagatcacctggggcaacgacgagctgcccatcgagagaaccaaccacgaggacagcgacaaggaccacagcttcctgaccaacgacgagctggccgtgctgcccgtggtgaaggtgctgcccagcggcaagtacaccggcgccaacctgaagagcgtgatcagagtgctgagaggcctgctggaccagggcatccccagcaaggagctggagaacctgcaggagctgaagcccctggaccagtgcctgatcggccagaccaaggagaacagaagaaagaacagatacaagaacatcctgccctacgacgccaccagagtgcccctgggcgacgagggcggctacatcaacgccagcttcatcaagatccccgtgggcaaggaggagttcgtgtacatcgcctgccagggccccctgcccaccaccgtgggcgacttctggcagatgatctgggagcagaagagcaccgtgatcgccatgatgacccaggaggtggagggcgagaagatcaagtgccagagatactggcccaacatcctgggcaagaccaccatggtgagcaacagactgagactggccctggtgagaatgcagcagctgaagggcttcgtggtgagagccatgaccctggaggacatccagaccagagaggtgagacacatcagccacctgaacttcaccgcctggcccgaccacgacacccccagccagcccgacgacctgctgaccttcatcagctacatgagacacatccacagaagcggccccatcatcacccactgcagcgccggcatcggcagaagcggcaccctgatctgcatcgacgtggtgctgggcctgatcagccaggacctggacttcgacatcagcgacctggtgagatgcatgagactgcagagacacggcatggtgcagaccgaggaccagtacatcttctgctaccaggtgatcctgtacgtgctgaccagactgcaggccgaggaggagcagaagcagcagccccagctgctgaagtag

SEQ ID NO: 95469 - DNA, 420 bp, synthetic construct
  misc_feature 1..420: note = Description of Artificial Sequence: Synthetic coding sequence
  source 1..420: mol_type = other DNA
atgcacgtgagcctggccgaggccctggaggtgagaggcggccccctgcaggaggaggagatctgggccgtgctgaaccagagcgccgagagcctgcaggagctgttcagaaaggtgagcctggccgaccccgccgccctgggcttcatcatcagcccctggagcctgctgctgctgcccagcggcagcgtgagcttcaccgacgagaacatcagcaaccaggacctgagagccttcaccgcccccgaggtgctgcagaaccagagcctgaccagcctgagcgacgtggagaagatccacatctacagcctgggcatgaccctgtactggggcgccgactacgaggtgccccagagccagcccatcaagctgggcgaccacctgaacagcatcctgctgggcatgtgcgaggacgtgtag

SEQ ID NO: 95470 - DNA, 7473 bp, synthetic construct; identical to SEQ ID NO: 95468
  misc_feature 1..7473: note = Description of Artificial Sequence: Synthetic coding sequence
  source 1..7473: mol_type = other DNA

SEQ ID NO: 95471 - DNA, 3564 bp, synthetic construct
  misc_feature 1..3564: note = Description of Artificial Sequence: Synthetic coding sequence
  source 1..3564: mol_type = other DNA
atgcccttcggcctgaagctgagaagaaccagaagatacaacgtgctgagcaagaactgcttcgtgaccagaatcagactgctggacagcaacgtgatcgagtgcaccctgagcgtggagagcaccggccaggagtgcctggaggccgtggcccagagactggagctgagagagacccactacttcggcctgtggttcctgagcaagagccagcaggccagatgggtggagctggagaagcccctgaagaagcacctggacaagttcgccaacgagcccctgctgttcttcggcgtgatgttctacgtgcccaacgtgagctggctgcagcaggaggccaccagataccagtactacctgcaggtgaagaaggacgtgctggagggcagactgagatgcaccctggaccaggtgatcagactggccggcctggccgtgcaggccgacttcggcgactacaaccagttcgacagccaggacttcctgagagagtacgtgctgttccccatggacctggccctggaggaggccgtgctggaggagctgacccagaaggtggcccaggagcacaaggcccacagcggcatcctgcccgccgaggccgagctgatgtacatcaacgaggtggagagactggacggcttcggccaggagatcttccccgtgaaggacaaccacggcaactgcgtgcacctgggcatcttcttcatgggcatcttcgtgagaaacagaatcggcagacaggccgtgatctacagatggaacgacatgggcaacatcacccacaacaagagcaccatcctggtggagctgatcaacaaggaggagaccgccctgttccacaccgacgacatcgagaacgccaagtacatcagcagactgttcgccaccagacacaagttctacaagcagaacaagatctgcaccgagcagagcaacagccccccccccatcagaagacagcccacctggagcagaagcagcctgcccagacagcagccctacatcctgccccccgtgcacgtgcagtgcggcgagcactacagcgagacccacaccagccaggacagcatcttccacggcaacgaggaggccctgtactgcaacagccacaacagcctggacctgaactacctgaacggcaccgtgaccaacggcagcgtgtgcagcgtgcacagcgtgaacagcctgaactgcagccagagcttcatccaggccagccccgtgagcagcaacctgagcatccccggcagcgacatcatgagagccgactacatccccagccacagacacagcgccatcatcgtgcccagctacagacccacccccgactacgagaccgtgatgagacagatgaagagaggcatcctgcacaccgacagccagagccagagcctgagaaacctgaacatcatcaacacccacgcctacaaccagcccgaggacctggtgtacagccagcccgagatgagagagagacacccctacaccgtgccctacggcccccagggcgtgtacagcaacaagctggtgagccccagcgaccagagaaaccccaagaacaacgtggtgcccagcaagcccggcgccagcgccatcagccacaccgtgagcacccccgagctggccaacatgcagctgcagggcagccacaactacagcaccgcccacatgctgaagaactacctgttcagacccccccccccctaccccagacccagacccgccaccagcacccccgacctggccagccacagacacaagtacgtgagcggcagcagccccgacctggtgaccagaaaggtgcagctgagcgtgaagaccttccaggaggacagcagccccgtggtgcaccagagcctgcaggaggtgagcgagcccctgaccgccaccaagcaccacggcaccgtgaacaagagacacagcctggaggtgatgaacagcatggtgagaggcatggaggccatgaccctgaagagcctgcacctgcccatggccagaagaaacaccctgagagagcagggcccccccgaggagggcagcggcagccacgaggtgccccagctgccccagtaccaccacaagaagaccttcagcgacgccaccatgctgatccacagcagcgagagcgaggaggaggaggaggaggcccccgagagcgtgccccagatccccatgctgagagagaagatggagtacagcgcccagctgcaggccgccctggccagaatccccaacaagcccccccccgagtaccccggccccagaaagagcgtgagcaacggcgccctgagacaggaccaggccagcctgccccccgccatggccagagccagagtgctgagacacggccccgccaaggccatcagcatgagcagaaccgacccccccgccgtgaacggcgccagcctgggccccagcatcagcgagcccgacctgaccagcgtgaaggagagagtgaagaaggagcccgtgaaggagagacccgtgagcgagatgttcagcctggaggacagcatcatcgagagagagatgatgatcagaaacctggagaagcagaagatggccggcctggaggcccagaagagacccctgatgctggccgccctgaacggcctgagcgtggccagagtgagcggcagagaggagaacagagtggacgccaccagagtgcccatggacgagagattcagaaccctgaagaagaagctggaggagggcatggtgttcaccgagtacgagcagatccccaagaagaaggccaacggcatcttcagcaccgccgccctgcccgagaacgccgagagaagcagaatcagagaggtggtgccctacgaggagaacagagtggagctgatccccaccaaggagaacaacaccggctacatcaacgccagccacatcaaggtggtggtgggcggcgccgagtggcactacatcgccacccagggccccctgccccacacctgccacgacttctggcagatggtgtgggagcagggcgtgaacgtgatcgccatggtgaccgccgaggaggagggcggcagaaccaagagccacagatactggcccaagctgggcagcaagcacagcagcgccacctacggcaagttcaaggtgaccaccaagttcagaaccgacagcgtgtgctacgccaccaccggcctgaaggtgaagcacctgctgagcggccaggagagaaccgtgtggcacctgcagtacaccgactggcccgaccacggctgccccgaggacgtgcagggcttcctgagctacctggaggagatccagagcgtgagaagacacaccaacagcatgctggagggcaccaagaacagacacccccccatcgtggtgcactgcagcgccggcgtgggcagaaccggcgtgctgatcctgagcgagctgatgatctactgcctggagcacaacgagaaggtggaggtgcccatgatgctgagactgctgagagagcagagaatgttcatgatccagaccatcgcccagtacaagttcgtgtaccaggtgctgatccagttcctgcagaacagcagactgatctag

SEQ ID NO: 95472 - DNA, 636 bp, synthetic construct
  misc_feature 1..636: note = Description of Artificial Sequence: Synthetic coding sequence
  source 1..636: mol_type = other DNA
atgcccttcggcctgaagctgagaagaaccagaagatacaacgtgctgagcaagaactgcttcgtgaccagaatcagactgctggacagcaacgtgatcgagtgcaccctgagcgtggagagcaccggccaggagtgcctggaggccgtggcccagagactggagctgagagagacccactacttcggcctgtggttcctgagcaagagccagcaggccagatgggtggagctggagaagcccctgaagaagcacctggacaagttcgccaacgagcccctgctgttcttcggcgtgatgttctacgtgcccaacgtgagctggctgcagcaggaggccaccagataccagtactacctgcaggtgaagaaggacgtgctggagggcagactgagatgcaccctggaccaggtgatcagactggccggcctggccgtgcaggccgacttcggcgactacaaccagttcgacagccaggacttcctgagagagtacgtgctgttccccatggacctggccctggaggaggccgtgctggaggagctgacccagaaggtggcccaggagcacaaggcccacagaaccatcatggagaccgtgtacaccctggccttcagcctgtggggcttcagctag

SEQ ID NO: 95473 - DNA, 1383 bp, synthetic construct
  misc_feature 1..1383: note = Description of Artificial Sequence: Synthetic coding sequence
  source 1..1383: mol_type = other DNA
atgagcagaagcctggacagcgccagaagcttcctggagagactggaggccagaggcggcagagagggcgccgtgctggccggcgagttcagcgacatccaggcctgcagcgccgcctggaaggccgacggcgtgtgcagcaccgtggccggcagcagacccgagaacgtgagaaagaacagatacaaggacgtgctgccctacgaccagaccagagtgatcctgagcctgctgcaggaggagggccacagcgactacatcaacggcaacttcatcagaggcgtggacggcagcctggcctacatcgccacccagggccccctgccccacaccctgctggacttctggagactggtgtgggagttcggcgtgaaggtgatcctgatggcctgcagagagatcgagaacggcagaaagagatgcgagagatactgggcccaggagcaggagcccctgcagaccggcctgttctgcatcaccctgatcaaggagaagtggctgaacgaggacatcatgctgagaaccctgaaggtgaccttccagaaggagagcagaagcgtgtaccagctgcagtacatgagctggcccgacagaggcgtgcccagcagccccgaccacatgctggccatggtggaggaggccagaagactgcagggcagcggccccgagcccctgtgcgtgcactgcagcgccggctgcggcagaaccggcgtgctgtgcaccgtggactacgtgagacagctgctgctgacccagatgatcccccccgacttcagcctgttcgacgtggtgctgaagatgagaaagcagagacccgccgccgtgcagaccgaggagcagtacagattcctgtaccacaccgtggcccagatgttctgcagcaccctgcagaacgccagcccccactaccagaacatcaaggagaactgcgcccccctgtacgacgacgccctgttcctgagaaccccccaggccctgctggccatccccagaccccccggcggcgtgctgagaagcatcagcgtgcccggcagccccggccacgccatggccgacacctacgccgtggtgcagaagagaggcgcccccgccggcgccggcagcggcacccagaccggcaccggcaccggcaccggcgccagaagcgccgaggaggcccccctgtacagcaaggtgacccccagagcccagagacccggcgcccacgccgaggacgccagaggcaccctgcccggcagagtgcccgccgaccagagccccgccggcagcggcgcctacgaggacgtggccggcggcgcccagaccggcggcctgggcttcaacctgagaatcggcagacccaagggccccagagacccccccgccgagtggaccagagtgtag

SEQ ID NO: 95474 - DNA, 1248 bp, synthetic construct
  misc_feature 1..1248: note = Description of Artificial Sequence: Synthetic coding sequence
  source 1..1248: mol_type = other DNA
atgcccaccaccatcgagagagagttcgaggagctggacacccagagaagatggcagcccctgtacctggagatcagaaacgagagccacgactacccccacagagtggccaagttccccgagaacagaaacagaaacagatacagagacgtgagcccctacgaccacagcagagtgaagctgcagaacgccgagaacgactacatcaacgccagcctggtggacatcgaggaggcccagagaagctacatcctgacccagggccccctgcccaacacctgctgccacttctggctgatggtgtggcagcagaagaccaaggccgtggtgatgctgaacagaatcgtggagaaggagagcgtgaagtgcgcccagtactggcccaccgacgaccaggagatgctgttcaaggagaccggcttcagcgtgaagctgctgagcgaggacgtgaagagctactacaccgtgcacctgctgcagctggagaacatcaacagcggcgagaccagaaccatcagccacttccactacaccacctggcccgacttcggcgtgcccgagagccccgccagcttcctgaacttcctgttcaaggtgagagagagcggcagcctgaaccccgaccacggccccgccgtgatccactgcagcgccggcatcggcagaagcggcaccttcagcctggtggacacctgcctggtgctgatggagaagggcgacgacatcaacatcaagcaggtgctgctgaacatgagaaagtacagaatgggcctgatccagacccccgaccagctgagattcagctacatggccatcatcgagggcgccaagtgcatcaagggcgacagcagcatccagaagagatggaaggagctgagcaaggaggacctgagccccgccttcgaccacagccccaacaagatcatgaccgagaagtacaacggcaacagaatcggcctggaggaggagaagctgaccggcgacagatgcaccggcctgagcagcaagatgcaggacaccatggaggagaacagcgagagcgccctgagaaagagaatcagagaggacagaaaggccaccaccgcccagaaggtgcagcagatgaagcagagactgaacgagaacgagagaaagagaaagagatggctgtactggcagcccatcctgaccaagatgggcttcatgagcgtgatcctggtgggcgccttcgtgggctggaccctgttcttccagcagaacgccctgtag

SEQ ID NO: 95475 - DNA, 1164 bp, synthetic construct
  misc_feature 1..1164: note = Description of Artificial Sequence: Synthetic coding sequence
  source 1..1164: mol_type = other DNA
atgcccaccaccatcgagagagagttcgaggagctggacacccagagaagatggcagcccctgtacctggagatcagaaacgagagccacgactacccccacagagtggccaagttccccgagaacagaaacagaaacagatacagagacgtgagcccctacgaccacagcagagtgaagctgcagaacgccgagaacgactacatcaacgccagcctggtggacatcgaggaggcccagagaagctacatcctgacccagggccccctgcccaacacctgctgccacttctggctgatggtgtggcagcagaagaccaaggccgtggtgatgctgaacagaatcgtggagaaggagagcgtgaagtgcgcccagtactggcccaccgacgaccaggagatgctgttcaaggagaccggcttcagcgtgaagctgctgagcgaggacgtgaagagctactacaccgtgcacctgctgcagctggagaacatcaacagcggcgagaccagaaccatcagccacttccactacaccacctggcccgacttcggcgtgcccgagagccccgccagcttcctgaacttcctgttcaaggtgagagagagcggcagcctgaaccccgaccacggccccgccgtgatccactgcagcgccggcatcggcagaagcggcaccttcagcctggtggacacctgcctggtgctgatggagaagggcgacgacatcaacatcaagcaggtgctgctgaacatgagaaagtacagaatgggcctgatccagacccccgaccagctgagattcagctacatggccatcatcgagggcgccaagtgcatcaagggcgacagcagcatccagaagagatggaaggagctgagcaaggaggacctgagccccgccttcgaccacagccccaacaagatcatgaccgagaagtacaacggcaacagaatcggcctggaggaggagaagctgaccggcgacagatgcaccggcctgagcagcaagatgcaggacaccatggaggagaacagcgagagcgccctgagaaagagaatcagagaggacagaaaggccaccaccgcccagaaggtgcagcagatgaagcagagactgaacgagaacgagagaaagagaaagagacccagactgaccgacacctag

SEQ ID NO: 95476 - DNA, 1179 bp, synthetic construct
  misc_feature 1..1179: note = Description of Artificial Sequence: Synthetic coding sequence
  source 1..1179: mol_type = other DNA
tgccagcaggagttcagaatgtacggcaaggacggcaagggcaccaactggatggaccagggcgacatggagtgcagaatgcaggagatcgacgaccacagcagagtgaagctgcagaacgccgagaacgactacatcaacgccagcctggtggacatcgaggaggcccagagaagctacatcctgacccagggccccctgcccaacacctgctgccacttctggctgatggtgtggcagcagaagaccaaggccgtggtgatgctgaacagaatcgtggagaaggagagcgtgaagtgcgcccagtactggcccaccgacgaccaggagatgctgttcaaggagaccggcttcagcgtgaagctgctgagcgaggacgtgaagagctactacaccgtgcacctgctgcagctggagaacatcaacagcggcgagaccagaaccatcagccacttccactacaccacctggcccgacttcggcgtgcccgagagccccgccagcttcctgaacttcctgttcaaggtgagagagagcggcagcctgaaccccgaccacggccccgccgtgatccactgcagcgccggcatcggcagaagcggcaccttcagcctggtggacacctgcctggtgctgatggagaagggcgacgacatcaacatcaagcaggtgctgctgaacatgagaaagtacagaatgggcctgatccagacccccgaccagctgagattcagctacatggccatcatcgagggcgccaagtgcatcaagggcgacagcagcatccagaagagatggaaggagctgagcaaggaggacctgagccccgccttcgaccacagccccaacaagatcatgaccgagaagtacaacggcaacagaatcggcctggaggaggagaagctgaccggcgacagatgcaccggcctgagcagcaagatgcaggacaccatggaggagaacagcgagagcgccctgagaaagagaatcagagaggacagaaaggccaccaccgcccagaaggtgcagcagatgaagcagagactgaacgagaacgagagaaagagaaagagatggctgtactggcagcccatcctgaccaagatgggcttcatgagcgtgatcctggtgggcgccttcgtgggctggaccctgttcttccagcagaacgccctgtag

SEQ ID NO: 95477 - DNA, 1062 bp, synthetic construct
  misc_feature 1..1062: note = Description of Artificial Sequence: Synthetic coding sequence
  source 1..1062: mol_type = other DNA
atgcccaccaccatcgagagagagttcgaggagctggacacccagagaagatggcagcccctgtacctggagatcagaaacgagagccacgactacccccacagagtggccaagttccccgagaacagaaacagaaacagatacagagacgtgagcccctacgaccacagcagagtgaagctgcagaacgccgagaacgactacatcaacgccagcctggtggacatcgaggaggcccagagaagctacatcctgacccagggccccctgcccaacacctgctgccacttctggctgatggtgtggcagcagaagaccaaggccgtggtgatgctgaacagaatcgtggagaaggagagcgtgaagtgcgcccagtactggcccaccgacgaccaggagatgctgttcaaggagaccggcttcagcgtgaagctgctgagcgaggacgtgaagagctactacaccgtgcacctgctgcagctggagaacatcaacagcggcgagaccagaaccatcagccacttccactacaccacctggcccgacttcggcgtgcccgagagccccgccagcttcctgaacttcctgttcaaggtgagagagagcggcagcctgaaccccgaccacggccccgccgtgatccactgcagcgccggcatcggcagaagcggcaccttcagcctggtggacacctgcctggtgctgatggagaagggcgacgacatcaacatcaagcaggtgctgctgaacatgagaaagtacagaatgggcctgatccagacccccgaccagctgagattcagctacatggccatcatcgagggcgccaagtgcatcaagggcgacagcagcatccagaagagatggaaggagctgagcaaggaggacctgagccccgccttcgaccacagccccaacaagatcatgaccgagaagtacaacggcaacagaatcggcctggaggaggagaagctgaccggcgacagatgcaccggcctgagcagcaagatgcaggacaccatggaggagaacagcgagagacccagactgaccgacacctag

SEQ ID NO: 95478 - DNA, 2424 bp, synthetic construct
  misc_feature 1..2424: note = Description of Artificial Sequence: Synthetic coding sequence
  source 1..2424: mol_type = other DNA
atggaccagagagagatcctgcagaagttcctggacgaggcccagagcaagaagatcaccaaggaggagttcgccaacgagttcctgaagctgaagagacagagcaccaagtacaaggccgacaagacctaccccaccaccgtggccgagaagcccaagaacatcaagaagaacagatacaaggacatcctgccctacgactacagcagagtggagctgagcctgatcaccagcgacgaggacagcagctacatcaacgccaacttcatcaagggcgtgtacggccccaaggcctacatcgccacccagggccccctgagcaccaccctgctggacttctggagaatgatctgggagtacagcgtgctgatcatcgtgatggcctgcatggagtacgagatgggcaagaagaagtgcgagagatactgggccgagcccggcgagatgcagctggagttcggccccttcagcgtgagctgcgaggccgagaagagaaagagcgactacatcatcagaaccctgaaggtgaagttcaacagcgagaccagaaccatctaccagttccactacaagaactggcccgaccacgacgtgcccagcagcatcgaccccatcctggagctgatctgggacgtgagatgctaccaggaggacgacagcgtgcccatctgcatccactgcagcgccggctgcggcagaaccggcgtgatctgcgccatcgactacacctggatgctgctgaaggacggcatcatccccgagaacttcagcgtgttcagcctgatcagagagatgagaacccagagacccagcctggtgcagacccaggagcagtacgagctggtgtacaacgccgtgctggagctgttcaagagacagatggacgtgatcagagacaagcacagcggcaccgagagccaggccaagcactgcatccccgagaagaaccacaccctgcaggccgacagctacagccccaacctgcccaagagcaccaccaaggccgccaagatgatgaaccagcagagaaccaagatggagatcaaggagagcagcagcttcgacttcagaaccagcgagatcagcgccaaggaggagctggtgctgcaccccgccaagagcagcaccagcttcgacttcctggagctgaactacagcttcgacaagaacgccgacaccaccatgaagtggcagaccaaggccttccccatcgtgggcgagcccctgcagaagcaccagagcctggacctgggcagcctgctgttcgagggctgcagcaacagcaagcccgtgaacgccgccggcagatacttcaacagcaaggtgcccatcaccagaaccaagagcacccccttcgagctgatccagcagagagagaccaaggaggtggacagcaaggagaacttcagctacctggagagccagccccacgacagctgcttcgtggagatgcaggcccagaaggtgatgcacgtgagcagcgccgagctgaactacagcctgccctacgacagcaagcaccagatcagaaacgccagcaacgtgaagcaccacgacagcagcgccctgggcgtgtacagctacatccccctggtggagaacccctacttcagcagctggccccccagcggcaccagcagcaagatgagcctggacctgcccgagaagcaggacggcaccgtgttccccagcagcctgctgcccaccagcagcaccagcctgttcagctactacaacagccacgacagcctgagcctgaacagccccaccaacatcagcagcctgctgaaccaggagagcgccgtgctggccaccgcccccagaatcgacgacgagatccccccccccctgcccgtgtggacccccgagagcttcatcgtggtggaggaggccggcgagttcagccccaacgtgcccaagagcctgagcagcgccgtgaaggtgaagatcggcaccagcctggagtggggcggcaccagcgagcccaagaagttcgacgacagcgtgatcctgagacccagcaagagcgtgaagctgagaagccccaagagcgagctgcaccaggacagaagcagcccccccccccccctgcccgagagaaccctggagagcttcttcctggccgacgaggactgcatgcaggcccagagcatcgagacctacagcaccagctaccccgacaccatggagaacagcaccagcagcaagcagaccctgaagacccccggcaagagcttcaccagaagcaagagcctgaagatcctgagaaacatgaagaagagcatctgcaacagctgcccccccaacaagcccgccgagagcgtgcagagcaacaacagcagcagcttcctgaacttcggcttcgccaacagattcagcaagcccaagggccccagaaaccccccccccacctggaacatctag

SEQ ID NO: 95479 - DNA, 1692 bp, synthetic construct
  misc_feature 1..1692: note = Description of Artificial Sequence: Synthetic coding sequence
  source 1..1692: mol_type = other DNA
atgctgctgaaggacggcatcatccccgagaacttcagcgtgttcagcctgatcagagagatgagaacccagagacccagcctggtgcagacccaggagcagtacgagctggtgtacaacgccgtgctggagctgttcaagagacagatggacgtgatcagagacaagcacagcggcaccgagagccaggccaagcactgcatccccgagaagaaccacaccctgcaggccgacagctacagccccaacctgcccaagagcaccaccaaggccgccaagatgatgaaccagcagagaaccaagatggagatcaaggagagcagcagcttcgacttcagaaccagcgagatcagcgccaaggaggagctggtgctgcaccccgccaagagcagcaccagcttcgacttcctggagctgaactacagcttcgacaagaacgccgacaccaccatgaagtggcagaccaaggccttccccatcgtgggcgagcccctgcagaagcaccagagcctggacctgggcagcctgctgttcgagggctgcagcaacagcaagcccgtgaacgccgccggcagatacttcaacagcaaggtgcccatcaccagaaccaagagcacccccttcgagctgatccagcagagagagaccaaggaggtggacagcaaggagaacttcagctacctggagagccagccccacgacagctgcttcgtggagatgcaggcccagaaggtgatgcacgtgagcagcgccgagctgaactacagcctgccctacgacagcaagcaccagatcagaaacgccagcaacgtgaagcaccacgacagcagcgccctgggcgtgtacagctacatccccctggtggagaacccctacttcagcagctggccccccagcggcaccagcagcaagatgagcctggacctgcccgagaagcaggacggcaccgtgttccccagcagcctgctgcccaccagcagcaccagcctgttcagctactacaacagccacgacagcctgagcctgaacagccccaccaacatcagcagcctgctgaaccaggagagcgccgtgctggccaccgcccccagaatcgacgacgagatccccccccccctgcccgtgtggacccccgagagcttcatcgtggtggaggaggccggcgagttcagccccaacgtgcccaagagcctgagcagcgccgtgaaggtgaagatcggcaccagcctggagtggggcggcaccagcgagcccaagaagttcgacgacagcgtgatcctgagacccagcaagagcgtgaagctgagaagccccaagagcgagctgcaccaggacagaagcagcccccccccccccctgcccgagagaaccctggagagcttcttcctggccgacgaggactgcatgcaggcccagagcatcgagacctacagcaccagctaccccgacaccatggagaacagcaccagcagcaagcagaccctgaagacccccggcaagagcttcaccagaagcaagagcctgaagatcctgagaaacatgaagaagagcatctgcaacagctgcccccccaacaagcccgccgagagcgtgcagagcaacaacagcagcagcttcctgaacttcggcttcgccaacagattcagcaagcccaagggccccagaaaccccccccccacctggaacatctag

SEQ ID NO: 95480 - DNA, 4911 bp, synthetic construct
  misc_feature 1..4911: note = Description of Artificial Sequence: Synthetic coding sequence
  source 1..4911: mol_type = other DNA
atggaggccgtgcccagaatgcccatgatctggctggacctgaaggaggccggcgacttccacttccagcccgccgtgaagaagttcgtgctgaagaactacggcgagaaccccgaggcctacaacgaggagctgaagaagctggagctgctgagacagaacgccgtgagagtgcccagagacttcgagggctgcagcgtgctgagaaagtacctgggccagctgcactacctgcagagcagagtgcccatgggcagcggccaggaggccgccgtgcccgtgacctggaccgagatcttcagcggcaagagcgtggcccacgaggacatcaagtacgagcaggcctgcatcctgtacaacctgggcgccctgcacagcatgctgggcgccatggacaagagagtgagcgaggagggcatgaaggtgagctgcacccacttccagtgcgccgccggcgccttcgcctacctgagagagcacttcccccaggcctacagcgtggacatgagcagacagatcctgaccctgaacgtgaacctgatgctgggccaggcccaggagtgcctgctggagaagagcatgctggacaacagaaagagcttcctggtggccagaatcagcgcccaggtggtggactactacaaggaggcctgcagagccctggagaaccccgacaccgccagcctgctgggcagaatccagaaggactggaagaagctggtgcagatgaagatctactacttcgccgccgtggcccacctgcacatgggcaagcaggccgaggagcagcagaagttcggcgagagagtggcctacttccagagcgccctggacaagctgaacgaggccatcaagctggccaagggccagcccgacaccgtgcaggacgccctgagattcaccatggacgtgatcggcggcaagtacaacagcgccaagaaggacaacgacttcatctaccacgaggccgtgcccgccctggacaccctgcagcccgtgaagggcgcccccctggtgaagcccctgcccgtgaaccccaccgaccccgccgtgaccggccccgacatcttcgccaagctggtgcccatggccgcccacgaggccagcagcctgtacagcgaggagaaggccaagctgctgagagagatgatggccaagatcgaggacaagaacgaggtgctggaccagttcatggacagcatgcagctggaccccgagaccgtggacaacctggacgcctacagccacatccccccccagctgatggagaagtgcgccgccctgagcgtgagacccgacaccgtgagaaacctggtgcagagcatgcaggtgctgagcggcgtgttcaccgacgtggaggccagcctgaaggacatcagagacctgctggaggaggacgagctgctggagcagaagttccaggaggccgtgggccaggccggcgccatcagcatcaccagcaaggccgagctggccgaggtgagaagagagtgggccaagtacatggaggtgcacgagaaggccagcttcaccaacagcgagctgcacagagccatgaacctgcacgtgggcaacctgagactgctgagcggccccctggaccaggtgagagccgccctgcccacccccgccctgagccccgaggacaaggccgtgctgcagaacctgaagagaatcctggccaaggtgcaggagatgagagaccagagagtgagcctggagcagcagctgagagagctgatccagaaggacgacatcaccgccagcctggtgaccaccgaccacagcgagatgaagaagctgttcgaggagcagctgaagaagtacgaccagctgaaggtgtacctggagcagaacctggccgcccaggacagagtgctgtgcgccctgaccgaggccaacgtgcagtacgccgccgtgagaagagtgctgagcgacctggaccagaagtggaacagcaccctgcagaccctggtggccagctacgaggcctacgaggacctgatgaagaagagccaggagggcagagacttctacgccgacctggagagcaaggtggccgccctgctggagagaacccagagcacctgccaggccagagaggccgccagacagcagctgctggacagagagctgaagaagaagcccccccccagacccaccgcccccaagcccctgctgcccagaagagaggagagcgaggccgtggaggccggcgacccccccgaggagctgagaagcctgccccccgacatggtggccggccccagactgcccgacaccttcctgggcagcgccacccccctgcacttcccccccagccccttccccagcagcaccggccccggcccccactacctgagcggccccctgccccccggcacctacagcggccccacccagctgatccagcccagagcccccggcccccacgccatgcccgtggcccccggccccgccctgtaccccgcccccgcctacacccccgagctgggcctggtgcccagaagcagcccccagcacggcgtggtgagcagcccctacgtgggcgtgggccccgccccccccgtggccggcctgcccagcgccccccccccccagttcagcggccccgagctggccatggccgtgagacccgccaccaccaccgtggacagcatccaggcccccatccccagccacaccgcccccagacccaaccccacccccgcccccccccccccctgcttccccgtgccccccccccagcccctgcccaccccctacacctaccccgccggcgccaagcagcccatccccgcccagcaccacttcagcagcggcatccccgccggcttccccgcccccagaatcggcccccagccccagccccacccccagccccaccccagccaggccttcggcccccagcccccccagcagcccctgcccctgcagcacccccacctgttccccccccaggcccccggcctgctgcccccccagagcccctacccctacgccccccagcccggcgtgctgggccagccccccccccccctgcacacccagctgtaccccggccccgcccaggaccccctgcccgcccacagcggcgccctgcccttccccagccccggccccccccagcccccccacccccccctggcctacggccccgcccccagcaccagacccatgggcccccaggccgcccccctgaccatcagaggccccagcagcgccggccagagcacccccagcccccacctggtgcccagccccgcccccagccccggccccggccccgtgccccccagaccccccgccgccgagccccccccctgcctgagaagaggcgccgccgccgccgacctgctgagcagcagccccgagagccagcacggcggcacccagagccccggcggcggccagcccctgctgcagcccaccaaggtggacgccgccgagggcagaagaccccaggccctgagactgatcgagagagacccctacgagcaccccgagagactgagacagctgcagcaggagctggaggccttcagaggccagctgggcgacgtgggcgccctggacaccgtgtggagagagctgcaggacgcccaggagcacgacgccagaggcagaagcatcgccatcgccagatgctacagcctgaagaacagacaccaggacgtgatgccctacgacagcaacagagtggtgctgagaagcggcaaggacgactacatcaacgccagctgcgtggagggcctgagcccctactgcccccccctggtggccacccaggcccccctgcccggcaccgccgccgacttctggctgatggtgcacgagcagaaggtgagcgtgatcgtgatgctggtgagcgaggccgagatggagaagcagaaggtggccagatacttccccaccgagagaggccagcccatggtgcacggcgccctgagcctggccctgagcagcgtgagaagcaccgagacccacgtggagagagtgctgagcctgcagttcagagaccagagcctgaagagaagcctggtgcacctgcacttccccacctggcccgagctgggcctgcccgacagccccagcaacctgctgagattcatccaggaggtgcacgcccactacctgcaccagagacccctgcacacccccatcatcgtgcactgcagcagcggcgtgggcagaaccggcgccttcgccctgctgtacgccgccgtgcaggaggtggaggccggcaacggcatccccgagctgccccagctggtgagaagaatgagacagcagagaaagcacatgctgcaggagaagctgcacctgagattctgctacgaggccgtggtgagacacgtggagcaggtgctgcagagacacggcgtgccccccccctgcaagcccctggccagcgccagcatcagccagaagaaccacctgccccaggacagccaggacctggtgctgggcggcgacgtgcccatcagcagcatccaggccaccatcgccaagctgagcatcagaccccccggcggcctggagagccccgtggccagcctgcccggccccgccgagccccccggcctgccccccgccagcctgcccgagagcacccccatccccagcagcagccccccccccctgagcagccccctgcccgaggccccccagcccaaggaggagccccccgtgcccgaggcccccagcagcggcccccccagcagcagcctggagctgctggccagcctgacccccgaggccttcagcctggacagcagcctgagaggcaagcagagaatgagcaagcacaacttcctgcaggcccacaacggccagggcctgagagccaccagacccagcgacgaccccctgagcctgctggaccccctgtggaccctgaacaagacctag

SEQ ID NO: 95481 - DNA, 2739 bp, synthetic construct
  misc_feature 1..2739: note = Description of Artificial Sequence: Synthetic coding sequence
  source 1..2739: mol_type = other DNA
atggaggccgtgcccagaatgcccatgatctggctggacctgaaggaggccggcgacttccacttccagcccgccgtgaagaagaacgccgtgagagtgcccagagacttcgagggctgcagcgtgctgagaaagtacctgggccagctgcactacctgcagagcagagtgcccatgggcagcggccaggaggccgccgtgcccgtgacctggaccgagatcttcagcggcaagagcgtggcccacgaggacatcaagtacgagcaggcctgcatcctgtacaacctgggcgccctgcacagcatgctgggcgccatggacaagagagtgagcgaggagtgcgccgccggcgccttcgcctacctgagagagcacttcccccaggcctacagcgtggacatgagcagacagatcctgaccctgaacgtgaacctgatgctgggccaggcccaggagtgcctgctggagaagagcatgctggacaacagaaagagcttcctggtggccagaatcagcgcccaggtggtggactactacaaggaggcctgcagagccctggagaaccccgacaccgccagcctgctgggcagaatccagaaggactggaagaagctggtgcagatgaagatctactacttcgccgccgtggcccacctgcacatgggcaagcaggccgaggagcagcagaagttcggcgagagagtggcctacttccagagcgccctggacaagctgaacgaggccatcaagctggccaagggccagcccgacaccgtgcaggacgccctgagattcaccatggacgtgatcggcggcaagtacaacagcgccaagaaggacaacgacttcatctaccacgaggccgtgcccgccctggacaccctgcagcccgtgaagggcgcccccctggtgaagcccctgcccgtgaaccccaccgaccccgccgtgaccggccccgacatcttcgccaagctggtgcccatggccgcccacgaggccagcagcctgtacagcgaggagaaggccaagctgctgagagagatgatggccaagatcgaggacaagaacgaggtgctggaccagttcatggacagcatgcagctggaccccgagaccgtggacaacctggacgcctacagccacatccccccccagctgatggagaagtgcgccgccctgagcgtgagacccgacaccgtgagaaacctggtgcagagcatgcaggtgctgagcggcgtgttcaccgacgtggaggccagcctgaaggacatcagagacctgctggaggaggacgagctgctggagcagaagttccaggaggccgtgggccaggccggcgccatcagcatcaccagcaaggccgagctggccgaggtgagaagagagtgggccaagtacatggaggtgcacgagaaggccagcttcaccaacagcgagctgcacagagccatgaacctgcacgtgggcaacctgagactgctgagcggccccctggaccaggtgagagccgccctgcccacccccgccctgagccccgaggacaaggccgtgctgcagaacctgaagagaatcctggccaaggtgcaggagatgagagaccagagagtgagcctggagcagcagctgagagagctgatccagaaggacgacatcaccgccagcctggtgaccaccgaccacagcgagatgaagaagctgttcgaggagcagctgaagaagtacgaccagctgaaggtgtacctggagcagaacctggccgcccaggacagagtgctgtgcgccctgaccgaggccaacgtgcagtacgccgccgtgagaagagtgctgagcgacctggaccagaagtggaacagcaccctgcagaccctggtggccagctacgaggcctacgaggacctgatgaagaagagccaggagggcagagacttctacgccgacctggagagcaaggtggccgccctgctggagagaacccagagcacctgccaggccagagaggccgccagacagcagctgctggacagagagctgaagaagaagcccccccccagacccaccgcccccaagcccctgctgcccagaagagaggagagcgaggccgtggaggccggcgacccccccgaggagctgagaagcctgccccccgacatggtggccggccccagactgcccgacaccttcctgggcagcgccacccccctgcacttcccccccagccccttccccagcagcaccggccccggcccccactacctgagcggccccctgccccccggcacctacagcggccccacccagctgatccagcccagagcccccggcccccacgccatgcccgtggcccccggccccgccctgtaccccgcccccagcagcgcccccagcttcaccagcgtgtgggccagcgcccccaccgccgcccccagcacccccgccagcaccagcctgcccacccccggccccagaacccccacccccaccatccccctgcccctgtgccccagcgcctggggccccggcgccgccgccaccccccccacccaccccgccctgcccagaagcagaagcagacccagcgccagccccctgagaggcagcgccttcccccagccctgggcccccagcgccagccccagccccaccggcatctggagctgccccttctaccagacccacggcccccccggcagccccagctaccacagcagagccctggtgtgctggcccgtgcacccctag

SEQ ID NO: 95482 - DNA, 1698 bp, synthetic construct
  misc_feature 1..1698: note = Description of Artificial Sequence: Synthetic coding sequence
  source 1..1698: mol_type = other DNA
atgaactacgagggcgccagaagcgagagagagaaccacgccgccgacgacagcgagggcggcgccctggacatgtgctgcagcgagagactgcccggcctgccccagcccatcgtgatggaggccctggacgaggccgagggcctgcaggacagccagagagagatgccccccccccccccccccagcccccccagcgaccccgcccagaagcccccccccagaggcgccggcagccacagcctgaccgtgagaagcagcctgtgcctgttcgccgccagccagttcctgctggcctgcggcgtgctgtggttcagcggctacggccacatctggagccagaacgccaccaacctggtgagcagcctgctgaccctgctgaagcagctggagcccaccgcctggctggacagcggcacctggggcgtgcccagcctgctgctggtgttcctgagcgtgggcctggtgctggtgaccaccctggtgtggcacctgctgagaaccccccccgagccccccacccccctgccccccgaggacagaagacagagcgtgagcagacagcccagcttcacctacagcgagtggatggaggagaagatcgaggacgacttcctggacctggaccccgtgcccgagacccccgtgttcgactgcgtgatggacatcaagcccgaggccgaccccaccagcctgaccgtgaagagcatgggcctgcaggagagaagaggcagcaacgtgagcctgaccctggacatgtgcacccccggctgcaacgaggagggcttcggctacctgatgagccccagagaggagagcgccagagagtacctgctgagcgccagcagagtgctgcaggccgaggagctgcacgagaaggccctggaccccttcctgctgcaggccgagttcttcgagatccccatgaacttcgtggaccccaaggagtacgacatccccggcctggtgagaaagaacagatacaagaccatcctgcccaacccccacagcagagtgtgcctgaccagccccgaccccgacgaccccctgagcagctacatcaacgccaactacatcagaggctacggcggcgaggagaaggtgtacatcgccacccagggccccatcgtgagcaccgtggccgacttctggagaatggtgtggcaggagcacacccccatcatcgtgatgatcaccaacatcgaggagatgaacgagaagtgcaccgagtactggcccgaggagcaggtggcctacgacggcgtggagatcaccgtgcagaaggtgatccacaccgaggactacagactgagactgatcagcctgaagagcggcaccgaggagagaggcctgaagcactactggttcaccagctggcccgaccagaagacccccgacagagccccccccctgctgcacctggtgagagaggtggaggaggccgcccagcaggagggcccccactgcgcccccatcatcgtgcactgcagcgccggcatcggcagaaccggctgcttcatcgccaccagcatctgctgccagcagctgagacaggagggcgtggtggacatcctgaagaccacctgccagctgagacaggacagaggcggcatgatccagacctgcgagcagtaccagttcgtgcaccacgtgatgagcctgtacgagaagcagctgagccaccagagccccgagtag

SEQ ID NO: 95483 - DNA, 1602 bp, synthetic construct
  misc_feature 1..1602: note = Description of Artificial Sequence: Synthetic coding sequence
  source 1..1602: mol_type = other DNA
atgaactacgagggcgccagaagcgagagagagaaccacgccgccgacgacagcgagggcggcgccctggacatgtgctgcagcgagagactgcccggcctgccccagcccatcgtgatggaggccctggacgaggccgagggcctgcaggacagccagagagagatgccccccccccccccccccagcccccccagcgaccccgcccagaagcccccccccagaggcgccggcagccacagcctgaccgtgagaagcagcctgtgcctgttcgccgccagccagttcctgctggagcccaccgcctggctggacagcggcacctggggcgtgcccagcctgctgctggtgttcctgagcgtgggcctggtgctggtgaccaccctggtgtggcacctgctgagaaccccccccgagccccccacccccctgccccccgaggacagaagacagagcgtgagcagacagcccagcttcacctacagcgagtggatggaggagaagatcgaggacgacttcctggacctggaccccgtgcccgagacccccgtgttcgactgcgtgatggacatcaagcccgaggccgaccccaccagcctgaccgtgaagagcatgggcctgcaggagagaagaggcagcaacgtgagcctgaccctggacatgtgcacccccggctgcaacgaggagggcttcggctacctgatgagccccagagaggagagcgccagagagtacctgctgagcgccagcagagtgctgcaggccgaggagctgcacgagaaggccctggaccccttcctgctgcaggccgagttcttcgagatccccatgaacttcgtggaccccaaggagtacgacatccccggcctggtgagaaagaacagatacaagaccatcctgcccaacccccacagcagagtgtgcctgaccagccccgaccccgacgaccccctgagcagctacatcaacgccaactacatcagaggctacggcggcgaggagaaggtgtacatcgccacccagggccccatcgtgagcaccgtggccgacttctggagaatggtgtggcaggagcacacccccatcatcgtgatgatcaccaacatcgaggagatgaacgagaagtgcaccgagtactggcccgaggagcaggtggcctacgacggcgtggagatcaccgtgcagaaggtgatccacaccgaggactacagactgagactgatcagcctgaagagcggcaccgaggagagaggcctgaagcactactggttcaccagctggcccgaccagaagacccccgacagagccccccccctgctgcacctggtgagagaggtggaggaggccgcccagcaggagggcccccactgcgcccccatcatcgtgcactgcagcgccggcatcggcagaaccggctgcttcatcgccaccagcatctgctgccagcagctgagacaggagggcgtggtggacatcctgaagaccacctgccagctgagacaggacagaggcggcatgatccagacctgcgagcagtaccagttcgtgcaccacgtgatgagcctgtacgagaagcagctgagccaccagagccccgagtag

SEQ ID NO: 95484 - DNA, 1698 bp, synthetic construct; identical to SEQ ID NO: 95482
  misc_feature 1..1698: note = Description of Artificial Sequence: Synthetic coding sequence
  source 1..1698: mol_type = other DNA

SEQ ID NO: 95485 - DNA, 1788 bp, synthetic construct
  misc_feature 1..1788: note = Description of Artificial Sequence: Synthetic coding sequence
  source 1..1788: mol_type = other DNA
atggtgagatggttccacagagacctgagcggcctggacgccgagaccctgctgaagggcagaggcgtgcacggcagcttcctggccagacccagcagaaagaaccagggcgacttcagcctgagcgtgagagtgggcgaccaggtgacccacatcagaatccagaacagcggcgacttctacgacctgtacggcggcgagaagttcgccaccctgaccgagctggtggagtactacacccagcagcagggcgtgctgcaggacagagacggcaccatcatccacctgaagtaccccctgaactgcagcgaccccaccagcgagagatggtaccacggccacatgagcggcggccaggccgagaccctgctgcaggccaagggcgagccctggaccttcctggtgagagagagcctgagccagcccggcgacttcgtgctgagcgtgctgagcgaccagcccaaggccggccccggcagccccctgagagtgacccacatcaaggtgatgtgcgagggcggcagatacaccgtgggcggcctggagaccttcgacagcctgaccgacctggtggagcacttcaagaagaccggcatcgaggaggccagcggcgccttcgtgtacctgagacagccctactacgccaccagagtgaacgccgccgacatcgagaacagagtgctggagctgaacaagaagcaggagagcgaggacaccgccaaggccggcttctgggaggagttcgagagcctgcagaagcaggaggtgaagaacctgcaccagagactggagggccagagacccgagaacaagggcaagaacagatacaagaacatcctgcccttcgaccacagcagagtgatcctgcagggcagagacagcaacatccccggcagcgactacatcaacgccaactacatcaagaaccagctgctgggccccgacgagaacgccaagacctacatcgccagccagggctgcctggaggccaccgtgaacgacttctggcagatggcctggcaggagaacagcagagtgatcgtgatgaccaccagagaggtggagaagggcagaaacaagtgcgtgccctactggcccgaggtgggcatgcagagagcctacggcccctacagcgtgaccaactgcggcgagcacgacaccaccgagtacaagctgagaaccctgcaggtgagccccctggacaacggcgacctgatcagagagatctggcactaccagtacctgagctggcccgaccacggcgtgcccagcgagcccggcggcgtgctgagcttcctggaccagatcaaccagagacaggagagcctgccccacgccggccccatcatcgtgcactgcagcgccggcatcggcagaaccggcaccatcatcgtgatcgacatgctgatggagaacatcagcaccaagggcctggactgcgacatcgacatccagaagaccatccagatggtgagagcccagagaagcggcatggtgcagaccgaggcccagtacaagttcatctacgtggccatcgcccagttcatcgagaccaccaagaagaagctggaggtgctgcagagccagaagggccaggagagcgagtacggcaacatcacctacccccccgccatgaagaacgcccacgccaaggccagcagaaccagcagcaagcacaaggaggacgtgtacgagaacctgcacaccaagaacaagagagaggagaaggtgaagaagcagagaagcgccgacaaggagaagagcaagggcagcctgaagagaaagtag

SEQ ID NO: 95486 - DNA, 1794 bp, synthetic construct
  misc_feature 1..1794: note = Description of Artificial Sequence: Synthetic coding sequence
  source 1..1794: mol_type = other DNA
atgctgagcagaggctggttccacagagacctgagcggcctggacgccgagaccctgctgaagggcagaggcgtgcacggcagcttcctggccagacccagcagaaagaaccagggcgacttcagcctgagcgtgagagtgggcgaccaggtgacccacatcagaatccagaacagcggcgacttctacgacctgtacggcggcgagaagttcgccaccctgaccgagctggtggagtactacacccagcagcagggcgtgctgcaggacagagacggcaccatcatccacctgaagtaccccctgaactgcagcgaccccaccagcgagagatggtaccacggccacatgagcggcggccaggccgagaccctgctgcaggccaagggcgagccctggaccttcctggtgagagagagcctgagccagcccggcgacttcgtgctgagcgtgctgagcgaccagcccaaggccggccccggcagccccctgagagtgacccacatcaaggtgatgtgcgagggcggcagatacaccgtgggcggcctggagaccttcgacagcctgaccgacctggtggagcacttcaagaagaccggcatcgaggaggccagcggcgccttcgtgtacctgagacagccctactacgccaccagagtgaacgccgccgacatcgagaacagagtgctggagctgaacaagaagcaggagagcgaggacaccgccaaggccggcttctgggaggagttcgagagcctgcagaagcaggaggtgaagaacctgcaccagagactggagggccagagacccgagaacaagggcaagaacagatacaagaacatcctgcccttcgaccacagcagagtgatcctgcagggcagagacagcaacatccccggcagcgactacatcaacgccaactacatcaagaaccagctgctgggccccgacgagaacgccaagacctacatcgccagccagggctgcctggaggccaccgtgaacgacttctggcagatggcctggcaggagaacagcagagtgatcgtgatgaccaccagagaggtggagaagggcagaaacaagtgcgtgccctactggcccgaggtgggcatgcagagagcctacggcccctacagcgtgaccaactgcggcgagcacgacaccaccgagtacaagctgagaaccctgcaggtgagccccctggacaacggcgacctgatcagagagatctggcactaccagtacctgagctggcccgaccacggcgtgcccagcgagcccggcggcgtgctgagcttcctggaccagatcaaccagagacaggagagcctgccccacgccggccccatcatcgtgcactgcagcgccggcatcggcagaaccggcaccatcatcgtgatcgacatgctgatggagaacatcagcaccaagggcctggactgcgacatcgacatccagaagaccatccagatggtgagagcccagagaagcggcatggtgcagaccgaggcccagtacaagttcatctacgtggccatcgcccagttcatcgagaccaccaagaagaagctggaggtgctgcagagccagaagggccaggagagcgagtacggcaacatcacctacccccccgccatgaagaacgcccacgccaaggccagcagaaccagcagcaagcacaaggaggacgtgtacgagaacctgcacaccaagaacaagagagaggagaaggtgaagaagcagagaagcgccgacaaggagaagagcaagggcagcctgaagagaaagtag

SEQ ID NO: 95487 - DNA, 1671 bp, synthetic construct
  misc_feature 1..1671: note = Description of Artificial Sequence: Synthetic coding sequence
  source 1..1671: mol_type = other DNA
atgctgagcagaggcgtgggcgaccaggtgacccacatcagaatccagaacagcggcgacttctacgacctgtacggcggcgagaagttcgccaccctgaccgagctggtggagtactacacccagcagcagggcgtgctgcaggacagagacggcaccatcatccacctgaagtaccccctgaactgcagcgaccccaccagcgagagatggtaccacggccacatgagcggcggccaggccgagaccctgctgcaggccaagggcgagccctggaccttcctggtgagagagagcctgagccagcccggcgacttcgtgctgagcgtgctgagcgaccagcccaaggccggccccggcagccccctgagagtgacccacatcaaggtgatgtgcgagggcggcagatacaccgtgggcggcctggagaccttcgacagcctgaccgacctggtggagcacttcaagaagaccggcatcgaggaggccagcggcgccttcgtgtacctgagacagccctactacgccaccagagtgaacgccgccgacatcgagaacagagtgctggagctgaacaagaagcaggagagcgaggacaccgccaaggccggcttctgggaggagttcgagagcctgcagaagcaggaggtgaagaacctgcaccagagactggagggccagagacccgagaacaagggcaagaacagatacaagaacatcctgcccttcgaccacagcagagtgatcctgcagggcagagacagcaacatccccggcagcgactacatcaacgccaactacatcaagaaccagctgctgggccccgacgagaacgccaagacctacatcgccagccagggctgcctggaggccaccgtgaacgacttctggcagatggcctggcaggagaacagcagagtgatcgtgatgaccaccagagaggtggagaagggcagaaacaagtgcgtgccctactggcccgaggtgggcatgcagagagcctacggcccctacagcgtgaccaactgcggcgagcacgacaccaccgagtacaagctgagaaccctgcaggtgagccccctggacaacggcgacctgatcagagagatctggcactaccagtacctgagctggcccgaccacggcgtgcccagcgagcccggcggcgtgctgagcttcctggaccagatcaaccagagacaggagagcctgccccacgccggccccatcatcgtgcactgcagcgccggcatcggcagaaccggcaccatcatcgtgatcgacatgctgatggagaacatcagcaccaagggcctggactgcgacatcgacatccagaagaccatccagatggtgagagcccagagaagcggcatggtgcagaccgaggcccagtacaagttcatctacgtggccatcgcccagttcatcgagaccaccaagaagaagctggaggtgctgcagagccagaagggccaggagagcgagtacggcaacatcacctacccccccgccatgaagaacgcccacgccaaggccagcagaaccagcagcaagcacaaggaggacgtgtacgagaacctgcacaccaagaacaagagagaggagaaggtgaagaagcagagaagcgccgacaaggagaagagcaagggcagcctgaagagaaagtag

SEQ ID NO: 95488 - DNA, 1875 bp, synthetic construct
  misc_feature 1..1875: note = Description of Artificial Sequence: Synthetic coding sequence
  source 1..1875: mol_type = other DNA
atggtgagatggttccacagagacctgagcggcctggacgccgagaccctgctgaagggcagaggcgtgcacggcagcttcctggccagacccagcagaaagaaccagggcgacttcagcctgagcgtgagagtgggcgaccaggtgacccacatcagaatccagaacagcggcgacttctacgacctgtacggcggcgagaagttcgccaccctgaccgagctggtggagtactacacccagcagcagggcgtgctgcaggacagagacggcaccatcatccacctgaagtaccccctgaactgcagcgaccccaccagcgagagatggtaccacggccacatgagcggcggccaggccgagaccctgctgcaggccaagggcgagccctggaccttcctggtgagagagagcctgagccagcccggcgacttcgtgctgagcgtgctgagcgaccagcccaaggccggccccggcagccccctgagagtgacccacatcaaggtgatgtgcgagggcggcagatacaccgtgggcggcctggagaccttcgacagcctgaccgacctggtggagcacttcaagaagaccggcatcgaggaggccagcggcgccttcgtgtacctgagacagccctactacgccaccagagtgaacgccgccgacatcgagaacagagtgctggagctgaacaagaagcaggagagcgaggacaccgccaaggccggcttctgggaggagttcgagagcctgcagaagcaggaggtgaagaacctgcaccagagactggagggccagagacccgagaacaagggcaagaacagatacaagaacatcctgcccttcgaccacagcagagtgatcctgcagggcagagacagcaacatccccggcagcgactacatcaacgccaactacatcaagaaccagctgctgggccccgacgagaacgccaagacctacatcgccagccagggctgcctggaggccaccgtgaacgacttctggcagatggcctggcaggagaacagcagagtgatcgtgatgaccaccagagaggtggagaagggcagaaacaagtgcgtgccctactggcccgaggtgggcatgcagagagcctacggcccctacagcgtgaccaactgcggcgagcacgacaccaccgagtacaagctgagaaccctgcaggtgagccccctggacaacggcgacctgatcagagagatctggcactaccagtacctgagctggcccgaccacggcgtgcccagcgagcccggcggcgtgctgagcttcctggaccagatcaaccagagacaggagagcctgccccacgccggccccatcatcgtgcactgcagcgccggcatcggcagaaccggcaccatcatcgtgatcgacatgctgatggagaacatcagcaccaagggcctggactgcgacatcgacatccagaagaccatccagatggtgagagcccagagaagcggcatggtgcagaccgaggcccagtacaagttcatctacgtggccatcgcccagttcatcgagaccaccaagaagaagctggaggtgctgcagagccagaagggccaggagagcgagtacggcaacatcacctacccccccgccatgaagaacgcccacgccaaggccagcagaaccagcagcaagagcctggagagcagcgccggcaccgtggccgccagccccgtgagaagaggcggccagagaggcctgcccgtgcccggcccccccgtgctgagccccgacctgcaccagctgcccgtgctggcccccctgcaccccgccgccgacaccagaagaatgtgcatgagaacctgcaccctgagaaccagaggcagaagaaagtag

SEQ ID NO: 95489 - DNA, 1083 bp, synthetic construct
  misc_feature 1..1083: note = Description of Artificial Sequence: Synthetic coding sequence
  source 1..1083: mol_type = other DNA
atggtgcaggcccacggcggcagaagcagagcccagcccctgaccctgagcctgggcgccgccatgacccagcccccccccgagaagacccccgccaagaagcacgtgagactgcaggagagaagaggcagcaacgtggccctgatgctggacgtgagaagcctgggcgccgtggagcccatctgcagcgtgaacacccccagagaggtgaccctgcacttcctgagaaccgccggccaccccctgaccagatgggccctgcagagacagccccccagccccaagcagctggaggaggagttcctgaagatccccagcaacttcgtgagccccgaggacctggacatccccggccacgccagcaaggacagatacaagaccatcctgcccaacccccagagcagagtgtgcctgggcagagcccagagccaggaggacggcgactacatcaacgccaactacatcagaggctacgacggcaaggagaaggtgtacatcgccacccagggccccatgcccaacaccgtgagcgacttctgggagatggtgtggcaggaggaggtgagcctgatcgtgatgctgacccagctgagagagggcaaggagaagtgcgtgcactactggcccaccgaggaggagacctacggccccttccagatcagaatccaggacatgaaggagtgccccgagtacaccgtgagacagctgaccatccagtaccaggaggagagaagaagcgtgaagcacatcctgttcagcgcctggcccgaccaccagacccccgagagcgccggccccctgctgagactggtggccgaggtggaggagagccccgagaccgccgcccaccccggccccatcgtggtgcactgcagcgccggcatcggcagaaccggctgcttcatcgccaccagaatcggctgccagcagctgaaggccagaggcgaggtggacatcctgggcatcgtgtgccagctgagactggacagaggcggcatgatccagaccgccgagcagtaccagttcctgcaccacaccctggccctgtacgccggccagctgcccgaggagcccagcccctag

SEQ ID NO: 95490 - DNA, 1398 bp, synthetic construct
  misc_feature 1..1398: note = Description of Artificial Sequence: Synthetic coding sequence
  source 1..1398: mol_type = other DNA
atggtgggcaaggcctggcccctgacccacagccagggcaccggcccctgggcccccgagggccacagaagagaggccgccgacccctggtggcagagacagcaggcccaggagggcagaatgcagctgggctgcgcctgggtggccgccagaagaggcggcggcagaaagctggccagctggagcctgctgagcccccagagacagaccgacagacagaccgacagctggcaggaggccgcctggggcccccagctgctgcagcagaccagctggctgagcgagccccccctgggccccgccccccacctgagcatggtgcaggcccacggcggcagaagcagagcccagcccctgaccctgagcctgggcgccgccatgacccagcccccccccgagaagacccccgccaagaagcacgtgagactgcaggagagaagaggcagcaacgtggccctgatgctggacgtgagaagcctgggcgccgtggagcccatctgcagcgtgaacacccccagagaggtgaccctgcacttcctgagaaccgccggccaccccctgaccagatgggccctgcagagacagccccccagccccaagcagctggaggaggagttcctgaagatccccagcaacttcgtgagccccgaggacctggacatccccggccacgccagcaaggacagatacaagaccatcctgcccaacccccagagcagagtgtgcctgggcagagcccagagccaggaggacggcgactacatcaacgccaactacatcagaggctacgacggcaaggagaaggtgtacatcgccacccagggccccatgcccaacaccgtgagcgacttctgggagatggtgtggcaggaggaggtgagcctgatcgtgatgctgacccagctgagagagggcaaggagaagtgcgtgcactactggcccaccgaggaggagacctacggccccttccagatcagaatccaggacatgaaggagtgccccgagtacaccgtgagacagctgaccatccagtaccaggaggagagaagaagcgtgaagcacatcctgttcagcgcctggcccgaccaccagacccccgagagcgccggccccctgctgagactggtggccgaggtggaggagagccccgagaccgccgcccaccccggccccatcgtggtgcactgcagcgccggcatcggcagaaccggctgcttcatcgccaccagaatcggctgccagcagctgaaggccagaggcgaggtggacatcctgggcatcgtgtgccagctgagactggacagaggcggcatgatccagaccgccgagcagtaccagttcctgcaccacaccctggccctgtacgccggccagctgcccgaggagcccagcccctag

SEQ ID NO: 95491 - DNA, 1200 bp, synthetic construct
  misc_feature 1..1200: note = Description of Artificial Sequence: Synthetic coding sequence
  source 1..1200: mol_type = other DNA
atgggcgccagcttctggcccatcagacaggccagagagcagcagagaagagccctgagcttcagacagaccagctggctgagcgagccccccctgggccccgccccccacctgagcatggtgcaggcccacggcggcagaagcagagcccagcccctgaccctgagcctgggcgccgccatgacccagcccccccccgagaagacccccgccaagaagcacgtgagactgcaggagagaagaggcagcaacgtggccctgatgctggacgtgagaagcctgggcgccgtggagcccatctgcagcgtgaacacccccagagaggtgaccctgcacttcctgagaaccgccggccaccccctgaccagatgggccctgcagagacagccccccagccccaagcagctggaggaggagttcctgaagatccccagcaacttcgtgagccccgaggacctggacatccccggccacgccagcaaggacagatacaagaccatcctgcccaacccccagagcagagtgtgcctgggcagagcccagagccaggaggacggcgactacatcaacgccaactacatcagaggctacgacggcaaggagaaggtgtacatcgccacccagggccccatgcccaacaccgtgagcgacttctgggagatggtgtggcaggaggaggtgagcctgatcgtgatgctgacccagctgagagagggcaaggagaagtgcgtgcactactggcccaccgaggaggagacctacggccccttccagatcagaatccaggacatgaaggagtgccccgagtacaccgtgagacagctgaccatccagtaccaggaggagagaagaagcgtgaagcacatcctgttcagcgcctggcccgaccaccagacccccgagagcgccggccccctgctgagactggtggccgaggtggaggagagccccgagaccgccgcccaccccggccccatcgtggtgcactgcagcgccggcatcggcagaaccggctgcttcatcgccaccagaatcggctgccagcagctgaaggccagaggcgaggtggacatcctgggcatcgtgtgccagctgagactggacagaggcggcatgatccagaccgccgagcagtaccagttcctgcaccacaccctggccctgtacgccggccagctgcccgaggagcccagcccctag

SEQ ID NO: 95492 - DNA, 465 bp, synthetic construct
  misc_feature 1..465: note = Description of Artificial Sequence: Synthetic coding sequence
  source 1..465: mol_type = other DNA
atggtgcaggcccacggcggcagaagcagagcccagcccctgaccctgagcctgggcgccgccatgacccagcccccccccgagaagacccccgccaagaagcacgtgagactgcaggagagaagaggcagcaacgtggccctgatgctggacgtgagaagcctgggcgccgtggagcccatctgcagcgtgaacacccccagagaggtgaccctgcacttcctgagaaccgccggccaccccctgaccagatgggccctgcagagacagccccccagccccaagcagctggaggaggagttcctgaagatccccagcaacttcgtgagccccgaggacctggacatccccggccacgccagcaaggacagatacaagaccatcctgcccaacccccagagcagagtgtgcctgggcagagcccagagccaggaggacggcgactacatcaacgccaactactag

SEQ ID NO: 95493 - DNA, 1326 bp, synthetic construct
  misc_feature 1..1326: note = Description of Artificial Sequence: Synthetic coding sequence
  source 1..1326: mol_type = other DNA
aagagaagaagagccgccagcatgaacagactgggctgctggcccgccagaagcctgcccagaagcggcagaggcagcggccagagaagcctgggcctgggcggccaccccagcggccccagacaccccggcacccccgccgccaagagaacctgggagagccccggcgtgagagccagagactgccccctgagcaccagctggctgagcgagccccccctgggccccgccccccacctgagcatggtgcaggcccacggcggcagaagcagagcccagcccctgaccctgagcctgggcgccgccatgacccagcccccccccgagaagacccccgccaagaagcacgtgagactgcaggagagaagaggcagcaacgtggccctgatgctggacgtgagaagcctgggcgccgtggagcccatctgcagcgtgaacacccccagagaggtgaccctgcacttcctgagaaccgccggccaccccctgaccagatgggccctgcagagacagccccccagccccaagcagctggaggaggagttcctgaagatccccagcaacttcgtgagccccgaggacctggacatccccggccacgccagcaaggacagatacaagaccatcctgcccaacccccagagcagagtgtgcctgggcagagcccagagccaggaggacggcgactacatcaacgccaactacatcagaggctacgacggcaaggagaaggtgtacatcgccacccagggccccatgcccaacaccgtgagcgacttctgggagatggtgtggcaggaggaggtgagcctgatcgtgatgctgacccagctgagagagggcaaggagaagtgcgtgcactactggcccaccgaggaggagacctacggccccttccagatcagaatccaggacatgaaggagtgccccgagtacaccgtgagacagctgaccatccagtaccaggaggagagaagaagcgtgaagcacatcctgttcagcgcctggcccgaccaccagacccccgagagcgccggccccctgctgagactggtggccgaggtggaggagagccccgagaccgccgcccaccccggccccatcgtggtgcactgcagcgccggcatcggcagaaccggctgcttcatcgccaccagaatcggctgccagcagctgaaggccagaggcgaggtggacatcctgggcatcgtgtgccagctgagactggacagaggcggcatgatccagaccgccgagcagtaccagttcctgcaccacaccctggccctgtacgccggccagctgcccgaggagcccagcccctag

SEQ ID NO: 95494 - DNA, 423 bp, synthetic construct
  misc_feature 1..423: note = Description of Artificial Sequence: Synthetic coding sequence
  source 1..423: mol_type = other DNA
atggtgcaggcccacggcggcagaagcagagcccagcccctgaccctgagcctgggcgccgccatgacccagcccccccccgagaagacccccgccaagaagcacgtgagactgcaggagagaagaggcagcaacgtggccctgatgctggacgtgagaagcctgggcgccgtggagcccatctgcagcgtgaacacccccagagaggtgaccctgcacttcctgagaaccgccggccaccccctgaccagatgggccctgcagagacagccccccagccccaagcagctggaggaggagttcctgaagatccccagcaacttcgtgagccccgaggacctggacatccccggccacgccagcaaggacagatacaagaccatcctgcccaacccccagagcagagtgtgcctgggcagatag

SEQ ID NO: 95495 - DNA, 1083 bp, synthetic construct; identical to SEQ ID NO: 95489
  misc_feature 1..1083: note = Description of Artificial Sequence: Synthetic coding sequence
  source 1..1083: mol_type = other DNA

SEQ ID NO: 95496 - DNA, 570 bp, synthetic construct
  misc_feature 1..570: note = Description of Artificial Sequence: Synthetic coding sequence
  source 1..570: mol_type = other DNA
atgcccaacaccgtgagcgacttctgggagatggtgtggcaggaggaggtgagcctgatcgtgatgctgacccagctgagagagggcaaggagaagtgcgtgcactactggcccaccgaggaggagacctacggccccttccagatcagaatccaggacatgaaggagtgccccgagtacaccgtgagacagctgaccatccagtaccaggaggagagaagaagcgtgaagcacatcctgttcagcgcctggcccgaccaccagacccccgagagcgccggccccctgctgagactggtggccgaggtggaggagagccccgagaccgccgcccaccccggccccatcgtggtgcactgcagcgccggcatcggcagaaccggctgcttcatcgccaccagaatcggctgccagcagctgaaggccagaggcgaggtggacatcctgggcatcgtgtgccagctgagactggacagaggcggcatgatccagaccgccgagcagtaccagttcctgcaccacaccctggccctgtacgccggccagctgcccgaggagcccagcccctag

SEQ ID NO: 95497 - DNA, 411 bp, synthetic construct
  misc_feature 1..411: note = Description of Artificial Sequence: Synthetic coding sequence
  source 1..411: mol_type = other DNA
atgaaggagtgccccgagtacaccgtgagacagctgaccatccagtaccaggaggagagaagaagcgtgaagcacatcctgttcagcgcctggcccgaccaccagacccccgagagcgccggccccctgctgagactggtggccgaggtggaggagagccccgagaccgccgcccaccccggccccatcgtggtgcactgcagcgccggcatcggcagaaccggctgcttcatcgccaccagaatcggctgccagcagctgaaggccagaggcgaggtggacatcctgggcatcgtgtgccagctgagactggacagaggcggcatgatccagaccgccgagcagtaccagttcctgcaccacaccctggccctgtacgccggccagctgcccgaggagcccagcccctag

SEQ ID NO: 95498 - DNA, 1545 bp, synthetic construct
  misc_feature 1..1545: note = Description of Artificial Sequence: Synthetic coding sequence
  source 1..1545: mol_type = other DNA
atgagcagccccatcagcaagagcagaagcctggccgccttcctgcagcagctgagaagccccagacagccccccagactggtgaccagcaccgcctacaccagcccccagcccagagaggtgcccgtgtgccccctgaccgccggcggcgagacccagaacgccgccgccctgcccggccccaccagctggcccctgctgggcagcctgctgcagatcctgtggaagggcggcctgaagaagcagcacgacaccctggtggagtaccacaagaagtacggcaagatcttcagaatgaagctgggcagcttcgagagcgtgcacctgggcagcccctgcctgctggaggccctgtacagaaccgagagcgcctacccccagagactggagatcaagccctggaaggcctacagagactacagaaaggagggctacggcctgctgatcctggagggcgaggactggcagagagtgagaagcgccttccagaagaagctgatgaagcccggcgaggtgatgaagctggacaacaagatcaacgaggtgctggccgacttcatgggcagaatcgacgagctgtgcgacgagagaggccacgtggaggacctgtacagcgagctgaacaagtggagcttcgagagcatctgcctggtgctgtacgagaagagattcggcctgctgcagaagaacgccggcgacgaggccgtgaacttcatcatggccatcaagaccatgatgagcaccttcggcagaatgatggtgacccccgtggagctgcacaagagcctgaacaccaaggtgtggcaggaccacaccctggcctgggacaccatcttcaagagcgtgaaggcctgcatcgacaacagactggagaagtacagccagcagcccagcgccgacttcctgtgcgacatctaccaccagaacagactgagcaagaaggagctgtacgccgccgtgaccgagctgcagctggccgccgtggagaccaccgccaacagcctgatgtggatcctgtacaacctgagcagaaacccccaggtgcagcagaagctgctgaaggagatccagagcgtgctgcccgagaaccaggtgcccagagccgaggacctgagaaacatgccctacctgaaggcctgcctgaaggagagcatgagactgacccccagcgtgcccttcaccaccagaaccctggacaaggccaccgtgctgggcgagtacgccctgcccaagggcaccgtgctgatgctgaacacccaggtgctgggcagcagcgaggacaacttcgaggacagcagccagttcagacccgagagatggctgcaggagaaggagaagatcaaccccttcgcccacctgcccttcggcgtgggcaagagaatgtgcatcggcagaagactggccgagctgcagctgcacctggccctgtgctggatcgtgagaaagtacgacatccaggccaccgacaacgagcccgtggagatgctgcacagcggcaccctggtgcccagcagagagctgcccatcgccttctgccagagatag

SEQ ID NO: 95499 - DNA, 2382 bp, synthetic construct
  misc_feature 1..2382: note = Description of Artificial Sequence: Synthetic coding sequence
  source 1..2382: mol_type = other DNA
atggacagctggttcatcctggtgctgctgggcagcggcctgatctgcgtgagcgccaacaacgccaccaccgtggcccccagcgtgggcatcaccagactgatcaacagcagcaccgccgagcccgtgaaggaggaggccaagaccagcaaccccaccagcagcctgaccagcctgagcgtggcccccaccttcagccccaacatcaccctgggccccacctacctgaccaccgtgaacagcagcgacagcgacaacggcaccaccagaaccgccagcaccaacagcatcggcatcaccatcagccccaacggcacctggctgcccgacaaccagttcaccgacgccagaaccgagccctgggagggcaacagcagcaccgccgccaccacccccgagaccttcccccccagcgacgagacccccatcatcgccgtgatggtggccctgagcagcctgctggtgatcgtgttcatcatcatcgtgctgtacatgctgagattcaagaagtacaagcaggccggcagccacagcaacagcttcagactgagcaacggcagaaccgaggacgtggagccccagagcgtgcccctgctggccagaagccccagcaccaacagaaagtacccccccctgcccgtggacaagctggaggaggagatcaacagaagaatggccgacgacaacaagctgttcagagaggagttcaacgccctgcccgcctgccccatccaggccacctgcgaggccgccagcaaggaggagaacaaggagaagaacagatacgtgaacatcctgccctacgaccacagcagagtgcacctgacccccgtggagggcgtgcccgacagcgactacatcaacgccagcttcatcaacggctaccaggagaagaacaagttcatcgccgcccagggccccaaggaggagaccgtgaacgacttctggagaatgatctgggagcagaacaccgccaccatcgtgatggtgaccaacctgaaggagagaaaggagtgcaagtgcgcccagtactggcccgaccagggctgctggacctacggcaacatcagagtgagcgtggaggacgtgaccgtgctggtggactacaccgtgagaaagttctgcatccagcaggtgggcgacatgaccaacagaaagccccagagactgatcacccagttccacttcaccagctggcccgacttcggcgtgcccttcacccccatcggcatgctgaagttcctgaagaaggtgaaggcctgcaacccccagtacgccggcgccatcgtggtgcactgcagcgccggcgtgggcagaaccggcaccttcgtggtgatcgacgccatgctggacatgatgcacaccgagagaaaggtggacgtgtacggcttcgtgagcagaatcagagcccagagatgccagatggtgcagaccgacatgcagtacgtgttcatctaccaggccctgctggagcactacctgtacggcgacaccgagctggaggtgaccagcctggagacccacctgcagaagatctacaacaagatccccggcaccagcaacaacggcctggaggaggagttcaagaagctgaccagcatcaagatccagaacgacaagatgagaaccggcaacctgcccgccaacatgaagaagaacagagtgctgcagatcatcccctacgagttcaacagagtgatcatccccgtgaagagaggcgaggagaacaccgactacgtgaacgccagcttcatcgacggctacagacagaaggacagctacatcgccagccagggccccctgctgcacaccatcgaggacttctggagaatgatctgggagtggaagagctgcagcatcgtgatgctgaccgagctggaggagagaggccaggagaagtgcgcccagtactggcccagcgacggcctggtgagctacggcgacatcaccgtggagctgaagaaggaggaggagtgcgagagctacaccgtgagagacctgctggtgaccaacaccagagagaacaagagcagacagatcagacagttccacttccacggctggcccgaggtgggcatccccagcgacggcaagggcatgatcagcatcatcgccgccgtgcagaagcagcagcagcagagcggcaaccaccccatcaccgtgcactgcagcgccggcgccggcagaaccggcaccttctgcgccctgagcaccgtgctggagagagtgaaggccgagggcatcctggacgtgttccagaccgtgaagagcctgagactgcagagaccccacatggtgcagaccctggagcagtacgagttctgctacaaggtggtgcaggagtacatcgacgccttcagcgactacgccaacttcaagtag

SEQ ID NO: 95500 - DNA, 2382 bp, synthetic construct; identical to SEQ ID NO: 95499
  misc_feature 1..2382: note = Description of Artificial Sequence: Synthetic coding sequence
  source 1..2382: mol_type = other DNA

SEQ ID NO: 95501 - DNA, 1977 bp, synthetic construct
  misc_feature 1..1977: note = Description of Artificial Sequence: Synthetic coding sequence
  source 1..1977: mol_type = other DNA
atggtggccctgagcagcctgctggtgatcgtgttcatcatcatcgtgctgtacatgctgagaagattcagaaaggccgagctgatgagcagaaacaccgagaagtacaagcaggccggcagccacagcaacagcttcagactgagcaacggcagaaccgaggacgtggagccccagagcgtgcccctgctggccagaagccccagcaccaacagaaagtacccccccctgcccgtggacaagctggaggaggagatcaacagaagaatggccgacgacaacaagctgttcagagaggagttcaacgccctgcccgcctgccccatccaggccacctgcgaggccgccagcaaggaggagaacaaggagaagaacagatacgtgaacatcctgccctacgaccacagcagagtgcacctgacccccgtggagggcgtgcccgacagcgactacatcaacgccagcttcatcaacggctaccaggagaagaacaagttcatcgccgcccagggccccaaggaggagaccgtgaacgacttctggagaatgatctgggagcagaacaccgccaccatcgtgatggtgaccaacctgaaggagagaaaggagtgcaagtgcgcccagtactggcccgaccagggctgctggacctacggcaacatcagagtgagcgtggaggacgtgaccgtgctggtggactacaccgtgagaaagttctgcatccagcaggtgggcgacatgaccaacagaaagccccagagactgatcacccagttccacttcaccagctggcccgacttcggcgtgcccttcacccccatcggcatgctgaagttcctgaagaaggtgaaggcctgcaacccccagtacgccggcgccatcgtggtgcactgcagcgccggcgtgggcagaaccggcaccttcgtggtgatcgacgccatgctggacatgatgcacaccgagagaaaggtggacgtgtacggcttcgtgagcagaatcagagcccagagatgccagatggtgcagaccgacatgcagtacgtgttcatctaccaggccctgctggagcactacctgtacggcgacaccgagctggaggtgaccagcctggagacccacctgcagaagatctacaacaagatccccggcaccagcaacaacggcctggaggaggagttcaagaagctgaccagcatcaagatccagaacgacaagatgagaaccggcaacctgcccgccaacatgaagaagaacagagtgctgcagatcatcccctacgagttcaacagagtgatcatccccgtgaagagaggcgaggagaacaccgactacgtgaacgccagcttcatcgacggctacagacagaaggacagctacatcgccagccagggccccctgctgcacaccatcgaggacttctggagaatgatctgggagtggaagagctgcagcatcgtgatgctgaccgagctggaggagagaggccaggagaagtgcgcccagtactggcccagcgacggcctggtgagctacggcgacatcaccgtggagctgaagaaggaggaggagtgcgagagctacaccgtgagagacctgctggtgaccaacaccagagagaacaagagcagacagatcagacagttccacttccacggctggcccgaggtgggcatccccagcgacggcaagggcatgatcagcatcatcgccgccgtgcagaagcagcagcagcagagcggcaaccaccccatcaccgtgcactgcagcgccggcgccggcagaaccggcaccttctgcgccctgagcaccgtgctggagagagtgaaggccgagggcatcctggacgtgttccagaccgtgaagagcctgagactgcagagaccccacatggtgcagaccctggagcagtacgagttctgctacaaggtggtgcaggagtacatcgacgccttcagcgactacgccaacttcaagtag

SEQ ID NO: 95502 - DNA, 2409 bp, synthetic construct
  misc_feature 1..2409: note = Description of Artificial Sequence: Synthetic coding sequence
  source 1..2409: mol_type = other DNA
atggacagctggttcatcctggtgctgctgggcagcggcctgatctgcgtgagcgccaacaacgccaccaccgtggcccccagcgtgggcatcaccagactgatcaacagcagcaccgccgagcccgtgaaggaggaggccaagaccagcaaccccaccagcagcctgaccagcctgagcgtggcccccaccttcagccccaacatcaccctgggccccacctacctgaccaccgtgaacagcagcgacagcgacaacggcaccaccagaaccgccagcaccaacagcatcggcatcaccatcagccccaacggcacctggctgcccgacaaccagttcaccgacgccagaaccgagccctgggagggcaacagcagcaccgccgccaccacccccgagaccttcccccccagcggcaacagcgacagcaaggacagaagagacgagacccccatcatcgccgtgatggtggccctgagcagcctgctggtgatcgtgttcatcatcatcgtgctgtacatgctgagattcaagaagtacaagcaggccggcagccacagcaacagcttcagactgagcaacggcagaaccgaggacgtggagccccagagcgtgcccctgctggccagaagccccagcaccaacagaaagtacccccccctgcccgtggacaagctggaggaggagatcaacagaagaatggccgacgacaacaagctgttcagagaggagttcaacgccctgcccgcctgccccatccaggccacctgcgaggccgccagcaaggaggagaacaaggagaagaacagatacgtgaacatcctgccctacgaccacagcagagtgcacctgacccccgtggagggcgtgcccgacagcgactacatcaacgccagcttcatcaacggctaccaggagaagaacaagttcatcgccgcccagggccccaaggaggagaccgtgaacgacttctggagaatgatctgggagcagaacaccgccaccatcgtgatggtgaccaacctgaaggagagaaaggagtgcaagtgcgcccagtactggcccgaccagggctgctggacctacggcaacatcagagtgagcgtggaggacgtgaccgtgctggtggactacaccgtgagaaagttctgcatccagcaggtgggcgacatgaccaacagaaagccccagagactgatcacccagttccacttcaccagctggcccgacttcggcgtgcccttcacccccatcggcatgctgaagttcctgaagaaggtgaaggcctgcaacccccagtacgccggcgccatcgtggtgcactgcagcgccggcgtgggcagaaccggcaccttcgtggtgatcgacgccatgctggacatgatgcacaccgagagaaaggtggacgtgtacggcttcgtgagcagaatcagagcccagagatgccagatggtgcagaccgacatgcagtacgtgttcatctaccaggccctgctggagcactacctgtacggcgacaccgagctggaggtgaccagcctggagacccacctgcagaagatctacaacaagatccccggcaccagcaacaacggcctggaggaggagttcaagaagctgaccagcatcaagatccagaacgacaagatgagaaccggcaacctgcccgccaacatgaagaagaacagagtgctgcagatcatcccctacgagttcaacagagtgatcatccccgtgaagagaggcgaggagaacaccgactacgtgaacgccagcttcatcgacggctacagacagaaggacagctacatcgccagccagggccccctgctgcacaccatcgaggacttctggagaatgatctgggagtggaagagctgcagcatcgtgatgctgaccgagctggaggagagaggccaggagaagtgcgcccagtactggcccagcgacggcctggtgagctacggcgacatcaccgtggagctgaagaaggaggaggagtgcgagagctacaccgtgagagacctgctggtgaccaacaccagagagaacaagagcagacagatcagacagttccacttccacggctggcccgaggtgggcatccccagcgacggcaagggcatgatcagcatcatcgccgccgtgcagaagcagcagcagcagagcggcaaccaccccatcaccgtgcactgcagcgccggcgccggcagaaccggcaccttctgcgccctgagcaccgtgctggagagagtgaaggccgagggcatcctggacgtgttccagaccgtgaagagcctgagactgcagagaccccacatggtgcagaccctggagcagtacgagttctgctacaaggtggtgcaggagtacatcgacgccttcagcgactacgccaacttcaagtag

SEQ ID NO: 95503 - DNA, 2409 bp, synthetic construct; identical to SEQ ID NO: 95502
  misc_feature 1..2409: note = Description of Artificial Sequence: Synthetic coding sequence
  source 1..2409: mol_type = other DNA

SEQ ID NO: 95504 - DNA, 603 bp, synthetic construct
  misc_feature 1..603: note = Description of Artificial Sequence: Synthetic coding sequence
  source 1..603: mol_type = other DNA
atggacagctggttcatcctggtgctgctgggcagcggcctgatctgcgtgagcgccaacaacgccaccaccgtggcccccagcgtgggcatcaccagactgatcaacagcagcaccgccgagcccgtgaaggaggaggccaagaccagcaaccccaccagcagcctgaccagcctgagcgtggcccccaccttcagccccaacatcaccctgggccccacctacctgaccaccgtgaacagcagcgacagcgacaacggcaccaccagaaccgccagcaccaacagcatcggcatcaccatcagccccaacggcacctggctgcccgacaaccagttcaccgacgccagaaccgagccctgggagggcaacagcagcaccgccgccaccacccccgagaccttcccccccagcggcaacagcgacagcaaggacagaagagacgagacccccatcatcgccgtgatggtggccctgagcagcctgctggtgatcgtgttcatcatcatcgtgctgtacatgctgagattcaagaagtacaagcaggccggcagccacagcaacagcttcagactgagcaacggcagaaccgaggacgtgtag

SEQ ID NO: 95505 - DNA, 2442 bp, synthetic construct
  misc_feature 1..2442: note = Description of Artificial Sequence: Synthetic coding sequence
  source 1..2442: mol_type = other DNA
atggacgacgccgtgcagatcaccaagatcagcatggacagctggttcatcctggtgctgctgggcagcggcctgatctgcgtgagcgccaacaacgccaccaccgtggcccccagcgtgggcatcaccagactgatcaacagcagcaccgccgagcccgtgaaggaggaggccaagaccagcaaccccaccagcagcctgaccagcctgagcgtggcccccaccttcagccccaacatcaccctgggccccacctacctgaccaccgtgaacagcagcgacagcgacaacggcaccaccagaaccgccagcaccaacagcatcggcatcaccatcagccccaacggcacctggctgcccgacaaccagttcaccgacgccagaaccgagccctgggagggcaacagcagcaccgccgccaccacccccgagaccttcccccccagcggcaacagcgacagcaaggacagaagagacgagacccccatcatcgccgtgatggtggccctgagcagcctgctggtgatcgtgttcatcatcatcgtgctgtacatgctgagattcaagaagtacaagcaggccggcagccacagcaacagcttcagactgagcaacggcagaaccgaggacgtggagccccagagcgtgcccctgctggccagaagccccagcaccaacagaaagtacccccccctgcccgtggacaagctggaggaggagatcaacagaagaatggccgacgacaacaagctgttcagagaggagttcaacgccctgcccgcctgccccatccaggccacctgcgaggccgccagcaaggaggagaacaaggagaagaacagatacgtgaacatcctgccctacgaccacagcagagtgcacctgacccccgtggagggcgtgcccgacagcgactacatcaacgccagcttcatcaacggctaccaggagaagaacaagttcatcgccgcccagggccccaaggaggagaccgtgaacgacttctggagaatgatctgggagcagaacaccgccaccatcgtgatggtgaccaacctgaaggagagaaaggagtgcaagtgcgcccagtactggcccgaccagggctgctggacctacggcaacatcagagtgagcgtggaggacgtgaccgtgctggtggactacaccgtgagaaagttctgcatccagcaggtgggcgacatgaccaacagaaagccccagagactgatcacccagttccacttcaccagctggcccgacttcggcgtgcccttcacccccatcggcatgctgaagttcctgaagaaggtgaaggcctgcaacccccagtacgccggcgccatcgtggtgcactgcagcgccggcgtgggcagaaccggcaccttcgtggtgatcgacgccatgctggacatgatgcacaccgagagaaaggtggacgtgtacggcttcgtgagcagaatcagagcccagagatgccagatggtgcagaccgacatgcagtacgtgttcatctaccaggccctgctggagcactacctgtacggcgacaccgagctggaggtgaccagcctggagacccacctgcagaagatctacaacaagatccccggcaccagcaacaacggcctggaggaggagttcaagaagctgaccagcatcaagatccagaacgacaagatgagaaccggcaacctgcccgccaacatgaagaagaacagagtgctgcagatcatcccctacgagttcaacagagtgatcatccccgtgaagagaggcgaggagaacaccgactacgtgaacgccagcttcatcgacggctacagacagaaggacagctacatcgccagccagggccccctgctgcacaccatcgaggacttctggagaatgatctgggagtggaagagctgcagcatcgtgatgctgaccgagctggaggagagaggccaggagaagtgcgcccagtactggcccagcgacggcctggtgagctacggcgacatcaccgtggagctgaagaaggaggaggagtgcgagagctacaccgtgagagacctgctggtgaccaacaccagagagaacaagagcagacagatcagacagttccacttccacggctggcccgaggtgggcatccccagcgacggcaagggcatgatcagcatcatcgccgccgtgcagaagcagcagcagcagagcggcaaccaccccatcaccgtgcactgcagcgccggcgccggcagaaccggcaccttctgcgccctgagcaccgtgctggagagagtgaaggccgagggcatcctggacgtgttccagaccgtgaagagcctgagactgcagagaccccacatggtgcagaccctggagcagtacgagttctgctacaaggtggtgcaggagtacatcgacgccttcagcgactacgccaacttcaagtag

SEQ ID NO: 95506 - DNA, 528 bp, synthetic construct
  misc_feature 1..528: note = Description of Artificial Sequence: Synthetic coding sequence
  source 1..528: mol_type = other DNA
atggacagctggttcatcctggtgctgctgggcagcggcctgatctgcgtgagcgccaacaacgccaccaccgtggcccccagcgtgggcatcaccagactgatcaacagcagcaccgccgagcccgtgaaggaggaggccaagaccagcaaccccaccagcagcctgaccagcctgagcgtggcccccaccttcagccccaacatcaccctgggccccacctacctgaccaccgtgaacagcagcgacagcgacaacggcaccaccagaaccgccagcaccaacagcatcggcatcaccatcagccccaacggcacctggctgcccgacaaccagttcaccgacgccagaaccgagccctgggagggcaacagcagcaccgccgccaccacccccgagaccttcccccccagcggcaacagcgacagcaaggacagaagagacgagacccccatcatcgccgtgatggtggccctgagcagcctgctggtgatcgtgttcatcatcatcgtgctgtacatgctgtag

SEQ ID NO: 95507 - DNA, 417 bp, synthetic construct
  misc_feature 1..417: note = Description of Artificial Sequence: Synthetic coding sequence
  source 1..417: mol_type = other DNA
atggacagctggttcatcctggtgctgctgggcagcggcctgatctgcgtgagcgccaacaacgccaccaccgtggcccccagcgtgggcatcaccagactgatcaacagcagcaccgccgagcccgtgaaggaggaggccaagaccagcaaccccaccagcagcctgaccagcctgagcgtggcccccaccttcagccccaacatcaccctgggccccacctacctgaccaccgtgaacagcagcgacagcgacaacggcaccaccagaaccgccagcaccaacagcatcggcatcaccatcagccccaacggcacctggctgcccgacaaccagttcaccgacgccagaaccgagccctgggagggcaacagcagcaccgccgccaccacccccgagaccttcccccccagctag

SEQ ID NO: 95508 - DNA, 762 bp, synthetic construct
  misc_feature 1..762: note = Description of Artificial Sequence: Synthetic coding sequence
  source 1..762: mol_type = other DNA
atggacagctggttcatcctggtgctgctgggcagcggcctgatctgcgtgagcgccaacaacgccaccaccgtggcccccagcgtgggcatcaccagactgatcaacagcagcaccgccgagcccgtgaaggaggaggccaagaccagcaaccccaccagcagcctgaccagcctgagcgtggcccccaccttcagccccaacatcaccctgggccccacctacctgaccaccgtgaacagcagcgacagcgacaacggcaccaccagaaccgccagcaccaacagcatcggcatcaccatcagccccaacggcacctggctgcccgacaaccagttcaccgacgccagaaccgagccctgggagggcaacagcagcaccgccgccaccacccccgagaccttcccccccagcgacgagacccccatcatcgccgtgatggtggccctgagcagcctgctggtgatcgtgttcatcatcatcgtgctgtacatgctgagattcaagaagtacaagcaggccggcagccacagcaacagcttcagactgagcaacggcagaaccgaggacgtggagccccagagcgtgcccctgctggccagaagccccagcaccaacagaaagtacccccccctgcccgtggacaagctggaggaggagatcaacagaagaatggccgacgacaacaagctgttcagagaggagttcaacgccctgcccgcctgccccatccaggccacctgcgaggccgccagcaagtag

SEQ ID NO: 95509 - DNA, 1239 bp, synthetic construct
  misc_feature 1..1239: note = Description of Artificial Sequence: Synthetic coding sequence
  source 1..1239: mol_type = other DNA
atgaccaacagaaagccccagagactgatcacccagttccacttcaccagctggcccgacttcggcgtgcccttcacccccatcggcatgctgaagttcctgaagaaggtgaaggcctgcaacccccagtacgccggcgccatcgtggtgcactgcagcgccggcgtgggcagaaccggcaccttcgtggtgatcgacgccatgctggacatgatgcacaccgagagaaaggtggacgtgtacggcttcgtgagcagaatcagagcccagagatgccagatggtgcagaccgacatgcagtacgtgttcatctaccaggccctgctggagcactacctgtacggcgacaccgagctggaggtgaccagcctggagacccacctgcagaagatctacaacaagatccccggcaccagcaacaacggcctggaggaggagttcaagaagctgaccagcatcaagatccagaacgacaagatgagaaccggcaacctgcccgccaacatgaagaagaacagagtgctgcagatcatcccctacgagttcaacagagtgatcatccccgtgaagagaggcgaggagaacaccgactacgtgaacgccagcttcatcgacggctacagacagaaggacagctacatcgccagccagggccccctgctgcacaccatcgaggacttctggagaatgatctgggagtggaagagctgcagcatcgtgatgctgaccgagctggaggagagaggccaggagaagtgcgcccagtactggcccagcgacggcctggtgagctacggcgacatcaccgtggagctgaagaaggaggaggagtgcgagagctacaccgtgagagacctgctggtgaccaacaccagagagaacaagagcagacagatcagacagttccacttccacggctggcccgaggtgggcatccccagcgacggcaagggcatgatcagcatcatcgccgccgtgcagaagcagcagcagcagagcggcaaccaccccatcaccgtgcactgcagcgccggcgccggcagaaccggcaccttctgcgccctgagcaccgtgctggagagagtgaaggccgagggcatcctggacgtgttccagaccgtgaagagcctgagactgcagagaccccacatggtgcagaccctggagcagtacgagttctgctacaaggtggtgcaggagtacatcgacgccttcagcgactacgccaacttcaagtag

SEQ ID NO: 95510 - DNA, 5994 bp, synthetic construct
  misc_feature 1..5994: note = Description of Artificial Sequence: Synthetic coding sequence
  source 1..5994: mol_type = other DNA
atgctgagccacggcgccggcctggccctgtggatcaccctgagcctgctgcagaccggcctggccgagcccgagagatgcaacttcaccctggccgagagcaaggccagcagccacagcgtgagcatccagtggagaatcctgggcagcccctgcaacttcagcctgatctacagcagcgacaccctgggcgccgccctgtgccccaccttcagaatcgacaacaccacctacggctgcaacctgcaggacctgcaggccggcaccatctacaacttcagaatcatcagcctggacgaggagagaaccgtggtgctgcagaccgaccccctgccccccgccagattcggcgtgagcaaggagaagaccaccagcaccagcctgcacgtgtggtggacccccagcagcggcaaggtgaccagctacgaggtgcagctgttcgacgagaacaaccagaagatccagggcgtgcagatccaggagagcaccagctggaacgagtacaccttcttcaacctgaccgccggcagcaagtacaacatcgccatcaccgccgtgagcggcggcaagagaagcttcagcgtgtacaccaacggcagcaccgtgcccagccccgtgaaggacatcggcatcagcaccaaggccaacagcctgctgatcagctggagccacggcagcggcaacgtggagagatacagactgatgctgatggacaagggcatcctggtgcacggcggcgtggtggacaagcacgccaccagctacgccttccacggcctgacccccggctacctgtacaacctgaccgtgatgaccgaggccgccggcctgcagaactacagatggaagctggtgagaaccgcccccatggaggtgagcaacctgaaggtgaccaacgacggcagcctgaccagcctgaaggtgaagtggcagagaccccccggcaacgtggacagctacaacatcaccctgagccacaagggcaccatcaaggagagcagagtgctggccccctggatcaccgagacccacttcaaggagctggtgcccggcagactgtaccaggtgaccgtgagctgcgtgagcggcgagctgagcgcccagaagatggccgtgggcagaaccttccccgacaaggtggccaacctggaggccaacaacaacggcagaatgagaagcctggtggtgagctggagcccccccgccggcgactgggagcagtacagaatcctgctgttcaacgacagcgtggtgctgctgaacatcaccgtgggcaaggaggagacccagtacgtgatggacgacaccggcctggtgcccggcagacagtacgaggtggaggtgatcgtggagagcggcaacctgaagaacagcgagagatgccagggcagaaccgtgcccctggccgtgctgcagctgagagtgaagcacgccaacgagaccagcctgagcatcatgtggcagacccccgtggccgagtgggagaagtacatcatcagcctggccgacagagacctgctgctgatccacaagagcctgagcaaggacgccaaggagttcaccttcaccgacctggtgcccggcagaaagtacatggccaccgtgaccagcatcagcggcgacctgaagaacagcagcagcgtgaagggcagaaccgtgcccgcccaggtgaccgacctgcacgtggccaaccagggcatgaccagcagcctgttcaccaactggacccaggcccagggcgacgtggagttctaccaggtgctgctgatccacgagaacgtggtgatcaagaacgagagcatcagcagcgagaccagcagatacagcttccacagcctgaagagcggcagcctgtacagcgtggtggtgaccaccgtgagcggcggcatcagcagcagacaggtggtggtggagggcagaaccgtgcccagcagcgtgagcggcgtgaccgtgaacaacagcggcagaaacgactacctgagcgtgagctggctgctggcccccggcgacgtggacaactacgaggtgaccctgagccacgacggcaaggtggtgcagagcctggtgatcgccaagagcgtgagagagtgcagcttcagcagcctgacccccggcagactgtacaccgtgaccatcaccaccagaagcggcaagtacgagaaccacagcttcagccaggagagaaccgtgcccgacaaggtgcagggcgtgagcgtgagcaacagcgccagaagcgactacctgagagtgagctgggtgcacgccaccggcgacttcgaccactacgaggtgaccatcaagaacaagaacaacttcatccagaccaagagcatccccaagagcgagaacgagtgcgtgttcgtgcagctggtgcccggcagactgtacagcgtgaccgtgaccaccaagagcggccagtacgaggccaacgagcagggcaacggcagaaccatccccgagcccgtgaaggacctgaccctgagaaacagaagcaccgaggacctgcacgtgacctggagcggcgccaacggcgacgtggaccagtacgagatccagctgctgttcaacgacatgaaggtgttcccccccttccacctggtgaacaccgccaccgagtacagattcaccagcctgacccccggcagacagtacaagatcctggtgctgaccatcagcggcgacgtgcagcagagcgccttcatcgagggcttcaccgtgcccagcgccgtgaagaacatccacatcagccccaacggcgccaccgacagcctgaccgtgaactggacccccggcggcggcgacgtggacagctacaccgtgagcgccttcagacacagccagaaggtggacagccagaccatccccaagcacgtgttcgagcacaccttccacagactggaggccggcgagcagtaccagatcatgatcgccagcgtgagcggcagcctgaagaaccagatcaacgtggtgggcagaaccgtgcccgccagcgtgcagggcgtgatcgccgacaacgcctacagcagctacagcctgatcgtgagctggcagaaggccgccggcgtggccgagagatacgacatcctgctgctgaccgagaacggcatcctgctgagaaacaccagcgagcccgccaccaccaagcagcacaagttcgaggacctgacccccggcaagaagtacaagatccagatcctgaccgtgagcggcggcctgttcagcaaggaggcccagaccgagggcagaaccgtgcccgccgccgtgaccgacctgagaatcaccgagaacagcaccagacacctgagcttcagatggaccgccagcgagggcgagctgagctggtacaacatcttcctgtacaaccccgacggcaacctgcaggagagagcccaggtggaccccctggtgcagagcttcagcttccagaacctgctgcagggcagaatgtacaagatggtgatcgtgacccacagcggcgagctgagcaacgagagcttcatcttcggcagaaccgtgcccgccagcgtgagccacctgagaggcagcaacagaaacaccaccgacagcctgtggttcaactggagccccgccagcggcgacttcgacttctacgagctgatcctgtacaaccccaacggcaccaagaaggagaactggaaggacaaggacctgaccgagtggagattccagggcctggtgcccggcagaaagtacgtgctgtgggtggtgacccacagcggcgacctgagcaacaaggtgaccgccgagagcagaaccgcccccagcccccccagcctgatgagcttcgccgacatcgccaacaccagcctggccatcacctggaagggcccccccgactggaccgactacaacgacttcgagctgcagtggctgcccagagacgccctgaccgtgttcaacccctacaacaacagaaagagcgagggcagaatcgtgtacggcctgagacccggcagaagctaccagttcaacgtgaagaccgtgagcggcgacagctggaagacctacagcaagcccatcttcggcagcgtgagaaccaagcccgacaagatccagaacctgcactgcagaccccagaacagcaccgccatcgcctgcagctggatcccccccgacagcgacttcgacggctacagcatcgagtgcagaaagatggacacccaggaggtggagttcagcagaaagctggagaaggagaagagcctgctgaacatcatgatgctggtgccccacaagagatacctggtgagcatcaaggtgcagagcgccggcatgaccagcgaggtggtggaggacagcaccatcaccatgatcgacagacccccccccccccccccccacatcagagtgaacgagaaggacgtgctgatcagcaagagcagcatcaacttcaccgtgaactgcagctggttcagcgacaccaacggcgccgtgaagtacttcaccgtggtggtgagagaggccgacggcagcgacgagctgaagcccgagcagcagcaccccctgcccagctacctggagtacagacacaacgccagcatcagagtgtaccagaccaactacttcgccagcaagtgcgccgagaaccccaacagcaacagcaagagcttcaacatcaagctgggcgccgagatggagagcctgggcggcaagtgcgaccccacccagcagaagttctgcgacggccccctgaagccccacaccgcctacagaatcagcatcagagccttcacccagctgttcgacgaggacctgaaggagttcaccaagcccctgtacagcgacaccttcttcagcctgcccatcaccaccgagagcgagcccctgttcggcgccatcgagggcgtgagcgccggcctgttcctgatcggcatgctggtggccgtggtggccctgctgatctgcagacagaaggtgagccacggcagagagagacccagcgccagactgagcatcagaagagacagacccctgagcgtgcacctgaacctgggccagaagggcaacagaaagaccagctgccccatcaagatcaaccagttcgagggccacttcatgaagctgcaggccgacagcaactacctgctgagcaaggagtacgaggagctgaaggacgtgggcagaaaccagagctgcgacatcgccctgctgcccgagaacagaggcaagaacagatacaacaacatcctgccctacgacgccaccagagtgaagctgagcaacgtggacgacgacccctgcagcgactacatcaacgccagctacatccccggcaacaacttcagaagagagtacatcgtgacccagggccccctgcccggcaccaaggacgacttctggaagatggtgtgggagcagaacgtgcacaacatcgtgatggtgacccagtgcgtggagaagggcagagtgaagtgcgaccactactggcccgccgaccaggacagcctgtactacggcgacctgatcctgcagatgctgagcgagagcgtgctgcccgagtggaccatcagagagttcaagatctgcggcgaggagcagctggacgcccacagactgatcagacacttccactacaccgtgtggcccgaccacggcgtgcccgagaccacccagagcctgatccagttcgtgagaaccgtgagagactacatcaacagaagccccggcgccggccccaccgtggtgcactgcagcgccggcgtgggcagaaccggcaccttcatcgccctggacagaatcctgcagcagctggacagcaaggacagcgtggacatctacggcgccgtgcacgacctgagactgcacagagtgcacatggtgcagaccgagtgccagtacgtgtacctgcaccagtgcgtgagagacgtgctgagagccagaaagctgagaagcgagcaggagaaccccctgttccccatctacgagaacgtgaaccccgagtaccacagagaccccgtgtacagcagacactag

SEQ ID NO: 95511 - DNA, 6648 bp, synthetic construct
  misc_feature 1..6648: note = Description of Artificial Sequence: Synthetic coding sequence
  source 1..6648: mol_type = other DNA
atggaggccgagttctacatggtgatcctgacctgcctgatcttcagaaacagcgagggcttccagatcgtgcacgtgcagaagcagcagtgcctgttcaagaacgagaaggtggtggtgggcagctgcaacagaaccatccagaaccagcagtggatgtggaccgaggacgagaagctgctgcacgtgaagagcgccctgtgcctggccatcagcaacagcagcagaggccccagcagaagcgccatcctggacagatgcagccaggcccccagatggacctgctacgaccaggagggcttcctggaggtggagaacgccagcctgttcctgcagaagcagggcagcagagtggtggtgaagaaggccagaaagtacctgcacagctggatgaagatcgacgtgaacaaggagggcaagctggtgaacgagagcctgtgcctgcagaaggccggcctgggcgccgaggtgagcgtgagaagcaccagaaacaccgcccccccccagatcctgaccaccttcaacgccgtgcccgacggcctggtgttcctgatcagaaacaccaccgaggccttcatcagaaacgccgccgagaactacagccagaacagcagcgagagacagcaccccaacctgcacatgaccggcatcaccgacaccagctgggtgctgagcaccacccagcccttcagcagcaccaccgaggagaccggcctggccgagcccgagagatgcaacttcaccctggccgagagcaaggccagcagccacagcgtgagcatccagtggagaatcctgggcagcccctgcaacttcagcctgatctacagcagcgacaccctgggcgccgccctgtgccccaccttcagaatcgacaacaccacctacggctgcaacctgcaggacctgcaggccggcaccatctacaacttcagaatcatcagcctggacgaggagagaaccgtggtgctgcagaccgaccccctgccccccgccagattcggcgtgagcaaggagaagaccaccagcaccagcctgcacgtgtggtggacccccagcagcggcaaggtgaccagctacgaggtgcagctgttcgacgagaacaaccagaagatccagggcgtgcagatccaggagagcaccagctggaacgagtacaccttcttcaacctgaccgccggcagcaagtacaacatcgccatcaccgccgtgagcggcggcaagagaagcttcagcgtgtacaccaacggcagcaccgtgcccagccccgtgaaggacatcggcatcagcaccaaggccaacagcctgctgatcagctggagccacggcagcggcaacgtggagagatacagactgatgctgatggacaagggcatcctggtgcacggcggcgtggtggacaagcacgccaccagctacgccttccacggcctgacccccggctacctgtacaacctgaccgtgatgaccgaggccgccggcctgcagaactacagatggaagctggtgagaaccgcccccatggaggtgagcaacctgaaggtgaccaacgacggcagcctgaccagcctgaaggtgaagtggcagagaccccccggcaacgtggacagctacaacatcaccctgagccacaagggcaccatcaaggagagcagagtgctggccccctggatcaccgagacccacttcaaggagctggtgcccggcagactgtaccaggtgaccgtgagctgcgtgagcggcgagctgagcgcccagaagatggccgtgggcagaaccttccccgacaaggtggccaacctggaggccaacaacaacggcagaatgagaagcctggtggtgagctggagcccccccgccggcgactgggagcagtacagaatcctgctgttcaacgacagcgtggtgctgctgaacatcaccgtgggcaaggaggagacccagtacgtgatggacgacaccggcctggtgcccggcagacagtacgaggtggaggtgatcgtggagagcggcaacctgaagaacagcgagagatgccagggcagaaccgtgcccctggccgtgctgcagctgagagtgaagcacgccaacgagaccagcctgagcatcatgtggcagacccccgtggccgagtgggagaagtacatcatcagcctggccgacagagacctgctgctgatccacaagagcctgagcaaggacgccaaggagttcaccttcaccgacctggtgcccggcagaaagtacatggccaccgtgaccagcatcagcggcgacctgaagaacagcagcagcgtgaagggcagaaccgtgcccgcccaggtgaccgacctgcacgtggccaaccagggcatgaccagcagcctgttcaccaactggacccaggcccagggcgacgtggagttctaccaggtgctgctgatccacgagaacgtggtgatcaagaacgagagcatcagcagcgagaccagcagatacagcttccacagcctgaagagcggcagcctgtacagcgtggtggtgaccaccgtgagcggcggcatcagcagcagacaggtggtggtggagggcagaaccgtgcccagcagcgtgagcggcgtgaccgtgaacaacagcggcagaaacgactacctgagcgtgagctggctgctggcccccggcgacgtggacaactacgaggtgaccctgagccacgacggcaaggtggtgcagagcctggtgatcgccaagagcgtgagagagtgcagcttcagcagcctgacccccggcagactgtacaccgtgaccatcaccaccagaagcggcaagtacgagaaccacagcttcagccaggagagaaccgtgcccgacaaggtgcagggcgtgagcgtgagcaacagcgccagaagcgactacctgagagtgagctgggtgcacgccaccggcgacttcgaccactacgaggtgaccatcaagaacaagaacaacttcatccagaccaagagcatccccaagagcgagaacgagtgcgtgttcgtgcagctggtgcccggcagactgtacagcgtgaccgtgaccaccaagagcggccagtacgaggccaacgagcagggcaacggcagaaccatccccgagcccgtgaaggacctgaccctgagaaacagaagcaccgaggacctgcacgtgacctggagcggcgccaacggcgacgtggaccagtacgagatccagctgctgttcaacgacatgaaggtgttcccccccttccacctggtgaacaccgccaccgagtacagattcaccagcctgacccccggcagacagtacaagatcctggtgctgaccatcagcggcgacgtgcagcagagcgccttcatcgagggcttcaccgtgcccagcgccgtgaagaacatccacatcagccccaacggcgccaccgacagcctgaccgtgaactggacccccggcggcggcgacgtggacagctacaccgtgagcgccttcagacacagccagaaggtggacagccagaccatccccaagcacgtgttcgagcacaccttccacagactggaggccggcgagcagtaccagatcatgatcgccagcgtgagcggcagcctgaagaaccagatcaacgtggtgggcagaaccgtgcccgccagcgtgcagggcgtgatcgccgacaacgcctacagcagctacagcctgatcgtgagctggcagaaggccgccggcgtggccgagagatacgacatcctgctgctgaccgagaacggcatcctgctgagaaacaccagcgagcccgccaccaccaagcagcacaagttcgaggacctgacccccggcaagaagtacaagatccagatcctgaccgtgagcggcggcctgttcagcaaggaggcccagaccgagggcagaaccgtgcccgccgccgtgaccgacctgagaatcaccgagaacagcaccagacacctgagcttcagatggaccgccagcgagggcgagctgagctggtacaacatcttcctgtacaaccccgacggcaacctgcaggagagagcccaggtggaccccctggtgcagagcttcagcttccagaacctgctgcagggcagaatgtacaagatggtgatcgtgacccacagcggcgagctgagcaacgagagcttcatcttcggcagaaccgtgcccgccagcgtgagccacctgagaggcagcaacagaaacaccaccgacagcctgtggttcaactggagccccgccagcggcgacttcgacttctacgagctgatcctgtacaaccccaacggcaccaagaaggagaactggaaggacaaggacctgaccgagtggagattccagggcctggtgcccggcagaaagtacgtgctgtgggtggtgacccacagcggcgacctgagcaacaaggtgaccgccgagagcagaaccgcccccagcccccccagcctgatgagcttcgccgacatcgccaacaccagcctggccatcacctggaagggcccccccgactggaccgactacaacgacttcgagctgcagtggctgcccagagacgccctgaccgtgttcaacccctacaacaacagaaagagcgagggcagaatcgtgtacggcctgagacccggcagaagctaccagttcaacgtgaagaccgtgagcggcgacagctggaagacctacagcaagcccatcttcggcagcgtgagaaccaagcccgacaagatccagaacctgcactgcagaccccagaacagcaccgccatcgcctgcagctggatcccccccgacagcgacttcgacggctacagcatcgagtgcagaaagatggacacccaggaggtggagttcagcagaaagctggagaaggagaagagcctgctgaacatcatgatgctggtgccccacaagagatacctggtgagcatcaaggtgcagagcgccggcatgaccagcgaggtggtggaggacagcaccatcaccatgatcgacagacccccccccccccccccccacatcagagtgaacgagaaggacgtgctgatcagcaagagcagcatcaacttcaccgtgaactgcagctggttcagcgacaccaacggcgccgtgaagtacttcaccgtggtggtgagagaggccgacggcagcgacgagctgaagcccgagcagcagcaccccctgcccagctacctggagtacagacacaacgccagcatcagagtgtaccagaccaactacttcgccagcaagtgcgccgagaaccccaacagcaacagcaagagcttcaacatcaagctgggcgccgagatggagagcctgggcggcaagtgcgaccccacccagcagaagttctgcgacggccccctgaagccccacaccgcctacagaatcagcatcagagccttcacccagctgttcgacgaggacctgaaggagttcaccaagcccctgtacagcgacaccttcttcagcctgcccatcaccaccgagagcgagcccctgttcggcgccatcgagggcgtgagcgccggcctgttcctgatcggcatgctggtggccgtggtggccctgctgatctgcagacagaaggtgagccacggcagagagagacccagcgccagactgagcatcagaagagacagacccctgagcgtgcacctgaacctgggccagaagggcaacagaaagaccagctgccccatcaagatcaaccagttcgagggccacttcatgaagctgcaggccgacagcaactacctgctgagcaaggagtacgaggagctgaaggacgtgggcagaaaccagagctgcgacatcgccctgctgcccgagaacagaggcaagaacagatacaacaacatcctgccctacgacgccaccagagtgaagctgagcaacgtggacgacgacccctgcagcgactacatcaacgccagctacatccccggcaacaacttcagaagagagtacatcgtgacccagggccccctgcccggcaccaaggacgacttctggaagatggtgtgggagcagaacgtgcacaacatcgtgatggtgacccagtgcgtggagaagggcagagtgaagtgcgaccactactggcccgccgaccaggacagcctgtactacggcgacctgatcctgcagatgctgagcgagagcgtgctgcccgagtggaccatcagagagttcaagatctgcggcgaggagcagctggacgcccacagactgatcagacacttccactacaccgtgtggcccgaccacggcgtgcccgagaccacccagagcctgatccagttcgtgagaaccgtgagagactacatcaacagaagccccggcgccggccccaccgtggtgcactgcagcgccggcgtgggcagaaccggcaccttcatcgccctggacagaatcctgcagcagctggacagcaaggacagcgtggacatctacggcgccgtgcacgacctgagactgcacagagtgcacatggtgcagaccgagtgccagtacgtgtacctgcaccagtgcgtgagagacgtgctgagagccagaaagctgagaagcgagcaggagaaccccctgttccccatctacgagaacgtgaaccccgagtaccacagagaccccgtgtacagcagacactag

SEQ ID NO: 95512 - DNA, 5724 bp, synthetic construct
  misc_feature 1..5724: note = Description of Artificial Sequence: Synthetic coding sequence
  source 1..5724: mol_type = other DNA
atgctgagccacggcgccggcctggccctgtggatcaccctgagcctgctgcagaccggcctggccgagcccgagagatgcaacttcaccctggccgagagcaaggccagcagccacagcgtgagcatccagtggagaatcctgggcagcccctgcaacttcagcctgatctacagcagcgacaccctgggcgccgccctgtgccccaccttcagaatcgacaacaccacctacggctgcaacctgcaggacctgcaggccggcaccatctacaacttcagaatcatcagcctggacgaggagagaaccgtggtgctgcagaccgaccccctgccccccgccagattcggcgtgagcaaggagaagaccaccagcaccagcctgcacgtgtggtggacccccagcagcggcaaggtgaccagctacgaggtgcagctgttcgacgagaacaaccagaagatccagggcgtgcagatccaggagagcaccagctggaacgagtacaccttcttcaacctgaccgccggcagcaagtacaacatcgccatcaccgccgtgagcggcggcaagagaagcttcagcgtgtacaccaacggcagcaccgtgcccagccccgtgaaggacatcggcatcagcaccaaggccaacagcctgctgatcagctggagccacggcagcggcaacgtggagagatacagactgatgctgatggacaagggcatcctggtgcacggcggcgtggtggacaagcacgccaccagctacgccttccacggcctgacccccggctacctgtacaacctgaccgtgatgaccgaggccgccggcctgcagaactacagatggaagctggtgagaaccgcccccatggaggtgagcaacctgaaggtgaccaacgacggcagcctgaccagcctgaaggtgaagtggcagagaccccccggcaacgtggacagctacaacatcaccctgagccacaagggcaccatcaaggagagcagagtgctggccccctggatcaccgagacccacttcaaggagctggtgcccggcagactgtaccaggtgaccgtgagctgcgtgagcggcgagctgagcgcccagaagatggccgtgggcagaaccttccccctggccgtgctgcagctgagagtgaagcacgccaacgagaccagcctgagcatcatgtggcagacccccgtggccgagtgggagaagtacatcatcagcctggccgacagagacctgctgctgatccacaagagcctgagcaaggacgccaaggagttcaccttcaccgacctggtgcccggcagaaagtacatggccaccgtgaccagcatcagcggcgacctgaagaacagcagcagcgtgaagggcagaaccgtgcccgcccaggtgaccgacctgcacgtggccaaccagggcatgaccagcagcctgttcaccaactggacccaggcccagggcgacgtggagttctaccaggtgctgctgatccacgagaacgtggtgatcaagaacgagagcatcagcagcgagaccagcagatacagcttccacagcctgaagagcggcagcctgtacagcgtggtggtgaccaccgtgagcggcggcatcagcagcagacaggtggtggtggagggcagaaccgtgcccagcagcgtgagcggcgtgaccgtgaacaacagcggcagaaacgactacctgagcgtgagctggctgctggcccccggcgacgtggacaactacgaggtgaccctgagccacgacggcaaggtggtgcagagcctggtgatcgccaagagcgtgagagagtgcagcttcagcagcctgacccccggcagactgtacaccgtgaccatcaccaccagaagcggcaagtacgagaaccacagcttcagccaggagagaaccgtgcccgacaaggtgcagggcgtgagcgtgagcaacagcgccagaagcgactacctgagagtgagctgggtgcacgccaccggcgacttcgaccactacgaggtgaccatcaagaacaagaacaacttcatccagaccaagagcatccccaagagcgagaacgagtgcgtgttcgtgcagctggtgcccggcagactgtacagcgtgaccgtgaccaccaagagcggccagtacgaggccaacgagcagggcaacggcagaaccatccccgagcccgtgaaggacctgaccctgagaaacagaagcaccgaggacctgcacgtgacctggagcggcgccaacggcgacgtggaccagtacgagatccagctgctgttcaacgacatgaaggtgttcccccccttccacctggtgaacaccgccaccgagtacagattcaccagcctgacccccggcagacagtacaagatcctggtgctgaccatcagcggcgacgtgcagcagagcgccttcatcgagggcttcaccgtgcccagcgccgtgaagaacatccacatcagccccaacggcgccaccgacagcctgaccgtgaactggacccccggcggcggcgacgtggacagctacaccgtgagcgccttcagacacagccagaaggtggacagccagaccatccccaagcacgtgttcgagcacaccttccacagactggaggccggcgagcagtaccagatcatgatcgccagcgtgagcggcagcctgaagaaccagatcaacgtggtgggcagaaccgtgcccgccagcgtgcagggcgtgatcgccgacaacgcctacagcagctacagcctgatcgtgagctggcagaaggccgccggcgtggccgagagatacgacatcctgctgctgaccgagaacggcatcctgctgagaaacaccagcgagcccgccaccaccaagcagcacaagttcgaggacctgacccccggcaagaagtacaagatccagatcctgaccgtgagcggcggcctgttcagcaaggaggcccagaccgagggcagaaccgtgcccgccgccgtgaccgacctgagaatcaccgagaacagcaccagacacctgagcttcagatggaccgccagcgagggcgagctgagctggtacaacatcttcctgtacaaccccgacggcaacctgcaggagagagcccaggtggaccccctggtgcagagcttcagcttccagaacctgctgcagggcagaatgtacaagatggtgatcgtgacccacagcggcgagctgagcaacgagagcttcatcttcggcagaaccgtgcccgccagcgtgagccacctgagaggcagcaacagaaacaccaccgacagcctgtggttcaactggagccccgccagcggcgacttcgacttctacgagctgatcctgtacaaccccaacggcaccaagaaggagaactggaaggacaaggacctgaccgagtggagattccagggcctggtgcccggcagaaagtacgtgctgtgggtggtgacccacagcggcgacctgagcaacaaggtgaccgccgagagcagaaccgcccccagcccccccagcctgatgagcttcgccgacatcgccaacaccagcctggccatcacctggaagggcccccccgactggaccgactacaacgacttcgagctgcagtggctgcccagagacgccctgaccgtgttcaacccctacaacaacagaaagagcgagggcagaatcgtgtacggcctgagacccggcagaagctaccagttcaacgtgaagaccgtgagcggcgacagctggaagacctacagcaagcccatcttcggcagcgtgagaaccaagcccgacaagatccagaacctgcactgcagaccccagaacagcaccgccatcgcctgcagctggatcccccccgacagcgacttcgacggctacagcatcgagtgcagaaagatggacacccaggaggtggagttcagcagaaagctggagaaggagaagagcctgctgaacatcatgatgctggtgccccacaagagatacctggtgagcatcaaggtgcagagcgccggcatgaccagcgaggtggtggaggacagcaccatcaccatgatcgacagacccccccccccccccccccacatcagagtgaacgagaaggacgtgctgatcagcaagagcagcatcaacttcaccgtgaactgcagctggttcagcgacaccaacggcgccgtgaagtacttcaccgtggtggtgagagaggccgacggcaacgacgagctgaagcccgagcagcagcaccccctgcccagctacctggagtacagacacaacgccagcatcagagtgtaccagaccaactacttcgccagcaagtgcgccgagaaccccaacagcaacagcaagagcttcaacatcaagctgggcgccgagatggagagcctgggcggcaagtgcgaccccacccagcagaagttctgcgacggccccctgaagccccacaccgcctacagaatcagcatcagagccttcacccagctgttcgacgaggacctgaaggagttcaccaagcccctgtacagcgacaccttcttcagcctgcccatcaccaccgagagcgagcccctgttcggcgccatcgagggcgtgagcgccggcctgttcctgatcggcatgctggtggccgtggtggccctgctgatctgcagacagaaggtgagccacggcagagagagacccagcgccagactgagcatcagaagagacagacccctgagcgtgcacctgaacctgggccagaagggcaacagaaagaccagctgccccatcaagatcaaccagttcgagggccacttcatgaagctgcaggccgacagcaactacctgctgagcaaggagtacgaggagctgaaggacgtgggcagaaaccagagctgcgacatcgccctgctgcccgagaacagaggcaagaacagatacaacaacatcctgccctacgacgccaccagagtgaagctgagcaacgtggacgacgacccctgcagcgactacatcaacgccagctacatccccggcaacaacttcagaagagagtacatcgtgacccagggccccctgcccggcaccaaggacgacttctggaagatggtgtgggagcagaacgtgcacaacatcgtgatggtgacccagtgcgtggagaagggcagagtgaagtgcgaccactactggcccgccgaccaggacagcctgtactacggcgacctgatcctgcagatgctgagcgagagcgtgctgcccgagtggaccatcagagagttcaagatctgcggcgaggagcagctggacgcccacagactgatcagacacttccactacaccgtgtggcccgaccacggcgtgcccgagaccacccagagcctgatccagttcgtgagaaccgtgagagactacatcaacagaagccccggcgccggccccaccgtggtgcactgcagcgccggcgtgggcagaaccggcaccttcatcgccctggacagaatcctgcagcagctggacagcaaggacagcgtggacatctacggcgccgtgcacgacctgagactgcacagagtgcacatggtgcagaccgagtgccagtacgtgtacctgcaccagtgcgtgagagacgtgctgagagccagaaagctgagaagcgagcaggagaaccccctgttccccatctacgagaacgtgaaccccgagtaccacagagaccccgtgtacagcagacactag

SEQ ID NO: 95513 - DNA, 2760 bp, synthetic construct
  misc_feature 1..2760: note = Description of Artificial Sequence: Synthetic coding sequence
  source 1..2760: mol_type = other DNA
atggaggccgagttctacatggtgatcctgacctgcctgatcttcagaaacagcgagggcttccagatcgtgcacgtgcagaagcagcagtgcctgttcaagaacgagaaggtggtggtgggcagctgcaacagaaccatccagaaccagcagtggatgtggaccgaggacgagaagctgctgcacgtgaagagcgccctgtgcctggccatcagcaacagcagcagaggccccagcagaagcgccatcctggacagatgcagccaggcccccagatggacctgctacgaccaggagggcttcctggaggtggagaacgccagcctgttcctgcagaagcagggcagcagagtggtggtgaagaaggccagaaagtacctgcacagctggatgaagatcgacgtgaacaaggagggcaagctggtgaacgagagcctgtgcctgcagaaggccggcctgggcgccgaggtgagcgtgagaagcaccagaaacaccgcccccccccagatcctgaccaccttcaacgccgtgcccgacggcctggtgttcctgatcagaaacaccaccgaggccttcatcagaaacgccgccgagaactacagccagaacagcagcgagagacagcaccccaacctgcacatgaccggcatcaccgacaccagctgggtgctgagcaccacccagcccttcagcagcaccaccgaggagaccggcctggccgagcccgagagatgcaacttcaccctggccgagagcaaggccagcagccacagcgtgagcatccagtggagaatcctgggcagcccctgcaacttcagcctgatctacagcagcgacaccctgggcgccgccctgtgccccaccttcagaatcgacaacaccacctacggctgcaacctgcaggacctgcaggccggcaccatctacaacttcagaatcatcagcctggacgaggagagaaccgtggtgctgcagaccgaccccctgccccccgccagattcggcgtgagcaaggagaagaccaccagcaccagcctgcacgtgtggtggacccccagcagcggcaaggtgaccagctacgaggtgcagctgttcgacgagaacaaccagaagatccagggcgtgcagatccaggagagcaccagctggaacgagtacaccttcttcaacctgaccgccggcagcaagtacaacatcgccatcaccgccgtgagcggcggcaagagaagcttcagcgtgtacaccaacggcagcaccgtgcccagccccgtgaaggacatcggcatcagcaccaaggccaacagcctgctgatcagctggagccacggcagcggcaacgtggagagatacagactgatgctgatggacaagggcatcctggtgcacggcggcgtggtggacaagcacgccaccagctacgccttccacggcctgacccccggctacctgtacaacctgaccgtgatgaccgaggccgccggcctgcagaactacagatggaagctggtgagaaccgcccccatggaggtgagcaacctgaaggtgaccaacgacggcagcctgaccagcctgaaggtgaagtggcagagaccccccggcaacgtggacagctacaacatcaccctgagccacaagggcaccatcaaggagagcagagtgctggccccctggatcaccgagacccacttcaaggagctggtgcccggcagactgtaccaggtgaccgtgagctgcgtgagcggcgagctgagcgcccagaagatggccgtgggcagaaccttccccgacaaggtggccaacctggaggccaacaacaacggcagaatgagaagcctggtggtgagctggagcccccccgccggcgactgggagcagtacagaatcctgctgttcaacgacagcgtggtgctgctgaacatcaccgtgggcaaggaggagacccagtacgtgatggacgacaccggcctggtgcccggcagacagtacgaggtggaggtgatcgtggagagcggcaacctgaagaacagcgagagatgccagggcagaaccgtgcccctggccgtgctgcagctgagagtgaagcacgccaacgagaccagcctgagcatcatgtggcagacccccgtggccgagtgggagaagtacatcatcagcctggccgacagagacctgctgctgatccacaagagcctgagcaaggacgccaaggagttcaccttcaccgacctggtgcccggcagaaagtacatggccaccgtgaccagcatcagcggcgacctgaagaacagcagcagcgtgaagggcagaaccgtgcccgcccaggtgaccgacctgcacgtggccaaccagggcatgaccagcagcctgttcaccaactggacccaggcccagggcgacgtggagttctaccaggtgctgctgatccacgagaacgtggtgatcaagaacgagagcatcagcagcgagaccagcagatacagcttccacagcctgaagagcggcagcctgtacagcgtggtggtgaccaccgtgagcggcggcatcagcagcagacaggtggtggtggagggcagaaccgtgcccgacaaggtgcagggcgtgagcgtgagcaacagcgccagaagcgactacctgagagtgagctgggtgcacgccaccggcgacttcgaccactacgaggtgaccatcaagaacaagaacaacttcatccagaccaaggccttccccagccagaagaccaacgtgtacctgttcagctag

SEQ ID NO: 95514 - DNA, 5724 bp, synthetic construct
  misc_feature 1..5724: note = Description of Artificial Sequence: Synthetic coding sequence
  source 1..5724: mol_type = other DNA
atgctgagccacggcgccggcctggccctgtggatcaccctgagcctgctgcagaccggcctggccgagcccgagagatgcaacttcaccctggccgagagcaaggccagcagccacagcgtgagcatccagtggagaatcctgggcagcccctgcaacttcagcctgatctacagcagcgacaccctgggcgccgccctgtgccccaccttcagaatcgacaacaccacctacggctgcaacctgcaggacctgcaggccggcaccatctacaacttcagaatcatcagcctggacgaggagagaaccgtggtgctgcagaccgaccccctgccccccgccagattcggcgtgagcaaggagaagaccaccagcaccagcctgcacgtgtggtggacccccagcagcggcaaggtgaccagctacgaggtgcagctgttcgacgagaacaaccagaagatccagggcgtgcagatccaggagagcaccagctggaacgagtacaccttcttcaacctgaccgccggcagcaagtacaacatcgccatcaccgccgtgagcggcggcaagagaagcttcagcgtgtacaccaacggcagcaccgtgcccagccccgtgaaggacatcggcatcagcaccaaggccaacagcctgctgatcagctggagccacggcagcggcaacgtggagagatacagactgatgctgatggacaagggcatcctggtgcacggcggcgtggtggacaagcacgccaccagctacgccttccacggcctgacccccggctacctgtacaacctgaccgtgatgaccgaggccgccggcctgcagaactacagatggaagctggtgagaaccgcccccatggaggtgagcaacctgaaggtgaccaacgacggcagcctgaccagcctgaaggtgaagtggcagagaccccccggcaacgtggacagctacaacatcaccctgagccacaagggcaccatcaaggagagcagagtgctggccccctggatcaccgagacccacttcaaggagctggtgcccggcagactgtaccaggtgaccgtgagctgcgtgagcggcgagctgagcgcccagaagatggccgtgggcagaaccttccccctggccgtgctgcagctgagagtgaagcacgccaacgagaccagcctgagcatcatgtggcagacccccgtggccgagtgggagaagtacatcatcagcctggccgacagagacctgctgctgatccacaagagcctgagcaaggacgccaaggagttcaccttcaccgacctggtgcccggcagaaagtacatggccaccgtgaccagcatcagcggcgacctgaagaacagcagcagcgtgaagggcagaaccgtgcccgcccaggtgaccgacctgcacgtggccaaccagggcatgaccagcagcctgttcaccaactggacccaggcccagggcgacgtggagttctaccaggtgctgctgatccacgagaacgtggtgatcaagaacgagagcatcagcagcgagaccagcagatacagcttccacagcctgaagagcggcagcctgtacagcgtggtggtgaccaccgtgagcggcggcatcagcagcagacaggtggtggtggagggcagaaccgtgcccagcagcgtgagcggcgtgaccgtgaacaacagcggcagaaacgactacctgagcgtgagctggctgctggcccccggcgacgtggacaactacgaggtgaccctgagccacgacggcaaggtggtgcagagcctggtgatcgccaagagcgtgagagagtgcagcttcagcagcctgacccccggcagactgtacaccgtgaccatcaccaccagaagcggcaagtacgagaaccacagcttcagccaggagagaaccgtgcccgacaaggtgcagggcgtgagcgtgagcaacagcgccagaagcgactacctgagagtgagctgggtgcacgccaccggcgacttcgaccactacgaggtgaccatcaagaacaagaacaacttcatccagaccaagagcatccccaagagcgagaacgagtgcgtgttcgtgcagctggtgcccggcagactgtacagcgtgaccgtgaccaccaagagcggccagtacgaggccaacgagcagggcaacggcagaaccatccccgagcccgtgaaggacctgaccctgagaaacagaagcaccgaggacctgcacgtgacctggagcggcgccaacggcgacgtggaccagtacgagatccagctgctgttcaacgacatgaaggtgttcccccccttccacctggtgaacaccgccaccgagtacagattcaccagcctgacccccggcagacagtacaagatcctggtgctgaccatcagcggcgacgtgcagcagagcgccttcatcgagggcttcaccgtgcccagcgccgtgaagaacatccacatcagccccaacggcgccaccgacagcctgaccgtgaactggacccccggcggcggcgacgtggacagctacaccgtgagcgccttcagacacagccagaaggtggacagccagaccatccccaagcacgtgttcgagcacaccttccacagactggaggccggcgagcagtaccagatcatgatcgccagcgtgagcggcagcctgaagaaccagatcaacgtggtgggcagaaccgtgcccgccagcgtgcagggcgtgatcgccgacaacgcctacagcagctacagcctgatcgtgagctggcagaaggccgccggcgtggccgagagatacgacatcctgctgctgaccgagaacggcatcctgctgagaaacaccagcgagcccgccaccaccaagcagcacaagttcgaggacctgacccccggcaagaagtacaagatccagatcctgaccgtgagcggcggcctgttcagcaaggaggcccagaccgagggcagaaccgtgcccgccgccgtgaccgacctgagaatcaccgagaacagcaccagacacctgagcttcagatggaccgccagcgagggcgagctgagctggtacaacatcttcctgtacaaccccgacggcaacctgcaggagagagcccaggtggaccccctggtgcagagcttcagcttccagaacctgctgcagggcagaatgtacaagatggtgatcgtgacccacagcggcgagctgagcaacgagagcttcatcttcggcagaaccgtgcccgccagcgtgagccacctgagaggcagcaacagaaacaccaccgacagcctgtggttcaactggagccccgccagcggcgacttcgacttctacgagctgatcctgtacaaccccaacggcaccaagaaggagaactggaaggacaaggacctgaccgagtggagattccagggcctggtgcccggcagaaagtacgtgctgtgggtggtgacccacagcggcgacctgagcaacaaggtgaccgccgagagcagaaccgcccccagcccccccagcctgatgagcttcgccgacatcgccaacaccagcctggccatcacctggaagggcccccccgactggaccgactacaacgacttcgagctgcagtggctgcccagagacgccctgaccgtgttcaacccctacaacaacagaaagagcgagggcagaatcgtgtacggcctgagacccggcagaagctaccagttcaacgtgaagaccgtgagcggcgacagctggaagacctacagcaagcccatcttcggcagcgtgagaaccaagcccgacaagatccagaacctgcactgcagaccccagaacagcaccgccatcgcctgcagctggatcccccccgacagcgacttcgacggctacagcatcgagtgcagaaagatggacacccaggaggtggagttcagcagaaagctggagaaggagaagagcctgctgaacatcatgatgctggtgccccacaagagatacctggtgagcatcaaggtgcagagcgccggcatgaccagcgaggtggtggaggacagcaccatcaccatgatcgacagacccccccccccccccccccacatcagagtgaacgagaaggacgtgctgatcagcaagagcagcatcaacttcaccgtgaactgcagctggttcagcgacaccaacggcgccgtgaagtacttcaccgtggtggtgagagaggccgacggcagcgacgagctgaagcccgagcagcagcaccccctgcccagctacctggagtacagacacaacgccagcatcagagtgtaccagaccaactacttcgccagcaagtgcgccgagaaccccaacagcaacagcaagagcttcaacatcaagctgggcgccgagatggagagcctgggcggcaagtgcgaccccacccagcagaagttctgcgacggccccctgaagccccacaccgcctacagaatcagcatcagagccttcacccagctgttcgacgaggacctgaaggagttcaccaagcccctgtacagcgacaccttcttcagcctgcccatcaccaccgagagcgagcccctgttcggcgccatcgagggcgtgagcgccggcctgttcctgatcggcatgctggtggccgtggtggccctgctgatctgcagacagaaggtgagccacggcagagagagacccagcgccagactgagcatcagaagagacagacccctgagcgtgcacctgaacctgggccagaagggcaacagaaagaccagctgccccatcaagatcaaccagttcgagggccacttcatgaagctgcaggccgacagcaactacctgctgagcaaggagtacgaggagctgaaggacgtgggcagaaaccagagctgcgacatcgccctgctgcccgagaacagaggcaagaacagatacaacaacatcctgccctacgacgccaccagagtgaagctgagcaacgtggacgacgacccctgcagcgactacatcaacgccagctacatccccggcaacaacttcagaagagagtacatcgtgacccagggccccctgcccggcaccaaggacgacttctggaagatggtgtgggagcagaacgtgcacaacatcgtgatggtgacccagtgcgtggagaagggcagagtgaagtgcgaccactactggcccgccgaccaggacagcctgtactacggcgacctgatcctgcagatgctgagcgagagcgtgctgcccgagtggaccatcagagagttcaagatctgcggcgaggagcagctggacgcccacagactgatcagacacttccactacaccgtgtggcccgaccacggcgtgcccgagaccacccagagcctgatccagttcgtgagaaccgtgagagactacatcaacagaagccccggcgccggccccaccgtggtgcactgcagcgccggcgtgggcagaaccggcaccttcatcgccctggacagaatcctgcagcagctggacagcaaggacagcgtggacatctacggcgccgtgcacgacctgagactgcacagagtgcacatggtgcagaccgagtgccagtacgtgtacctgcaccagtgcgtgagagacgtgctgagagccagaaagctgagaagcgagcaggagaaccccctgttccccatctacgagaacgtgaaccccgagtaccacagagaccccgtgtacagcagacactag

SEQ ID NO: 95515 - DNA, 621 bp, synthetic construct
  misc_feature 1..621: note = Description of Artificial Sequence: Synthetic coding sequence
  source 1..621: mol_type = other DNA
atggccctgccctgcaccctgggcctgggcatgctgctggccctgcccggcgccctgggcagcggcggcagcgccgaggacagcgtgggcagcagcagcgtgaccgtggtgctgctgctgctgctgctgctgctgctggccaccggcctggccctggcctggagaagactgagcagagacagcggcggctactaccaccccgccagactgggcgccgccctgtggggcagaaccagaagactgctgtgggccagcccccccggcagatggctgcaggccagagccgagctgggcagcaccgacaacgacctggagagacaggaggacgagcaggacaccgactacgaccacgtggccgacggcggcctgcaggccgaccccggcgagggcgagcagcagtgcggcgaggccagcagccccgagcaggtgcccgtgagagccgaggaggccagagacagcgacaccgagggcgacctggtgctgggcagccccggccccgccagcgccggcggcagcgccgaggccctgctgagcgacctgcacgccttcgccggcagcgccgcctgggacgacagcgccagagccgccggcggccagggcctgcacgtgaccgccctgtag

SEQ ID NO: 95516 - DNA, 4152 bp, synthetic construct
  misc_feature 1..4152: note = Description of Artificial Sequence: Synthetic coding sequence
  source 1..4152: mol_type = other DNA
atggtgcacgtggccagactgctgctgctgctgctgaccttcttcctgagaaccgacgccgagaccccccccagattcaccagaacccccgtggaccagaccggcgtgagcggcggcgtggccagcttcatctgccaggccaccggcgaccccagacccaagatcgtgtggaacaagaagggcaagaaggtgagcaaccagagattcgaggtgatcgagttcgacgacggcagcggcagcgtgctgagaatccagcccctgagaacccccagagacgaggccatctacgagtgcgtggccagcaacaacgtgggcgagatcagcgtgagcaccagactgaccgtgctgagagaggaccagatccccagaggcttccccaccatcgacatgggcccccagctgaaggtggtggagagaaccagaaccgccaccatgctgtgcgccgccagcggcaaccccgaccccgagatcacctggttcaaggacttcctgcccgtggacaccagcaacaacaacggcagaatcaagcagctgagaagcgtgagcgtgtgcgccacctaccacaccggcgccctgcagatcgagcagagcgaggagagcgaccagggcaagtacgagtgcgtggccaccaacagcgccggcaccagatacagcgcccccgccaacctgtacgtgagagtgaacagaaaggtgagaagagtgccccccagattcagcatcccccccaccaaccacgagatcatgcccggcggcagcgtgaacatcacctgcgtggccgtgggcagccccatgccctacgtgaagtggatgctgggcgccgaggacctgacccccgaggacgacatgcccatcggcagaaacgtgctggagctgaacgacgtgagacagagcgccaactacacctgcgtggccatgagcaccctgggcgtgatcgaggccatcgcccagatcaccgtgaaggccctgcccaagccccccggcacccccgtggtgaccgagagcaccgccaccagcatcaccctgacctgggacagcggcaaccccgagcccgtgagctactacatcatccagcacaagcccaagaacagcgaggagctgtacaaggagatcgacggcgtggccaccaccagatacagcgtggccggcctgagcccctacagcgactacgagttcagagtggtggccgtgaacaacatcggcagaggcccccccagcgagcccgtgctgacccagaccagcgagcaggcccccagcagcgcccccagagacgtgcaggccagaatgctgagcagcaccaccatcctggtgcagtggaaggagcccgaggagcccaacggccagatccagggctacagagtgtactacaccatggaccccacccagcacgtgaacaactggatgaagcacaacgtggccgacagccagatcaccaccatcggcaacctggtgccccagaagacctacagcgtgaaggtgctggccttcaccagcatcggcgacggccccctgagcagcgacatccaggtgatcacccagaccggcgtgcccggccagcccctgaacttcaaggccgagcccgagagcgagaccagcatcctgctgagctggaccccccccagaagcgacaccatcgccaactacgagctggtgtacaaggacggcgagcacggcgaggagcagagaatcaccatcgagcccggcaccagctacagactgcagggcctgaagcccaacagcctgtactacttcagactggccgccagaagcccccagggcctgggcgccagcaccgccgagatcagcgccagaaccatgcagagcagcaagggctactacatcatcatcgtgcccctgaagaagagcagaggcaagttcatcaagccctgggagagccccgacgagatggagctggacgagctgctgaaggagatcagcagaaagagaagaagcatcagatacggcagagaggtggagctgaagccctacatcgccgcccacttcgacgtgctgcccaccgagttcaccctgggcgacgacaagcactacggcggcttcaccaacaagcagctgcagagcggccaggagtacgtgttcttcgtgctggccgtgatggagcacgccgagagcaagatgtacgccaccagcccctacagcgaccccgtggtgagcatggacctggacccccagcccatcaccgacgaggaggagggcctgatctgggtggtgggccccgtgctggccgtggtgttcatcatctgcatcgtgatcgccatcctgctgtacaagagaaagagagccgagagcgacagcagaaagagcagcatccccaacaacaaggagatccccagccaccaccccaccgaccccgtggagctgagaagactgaacttccagacccccggcatggccagccacccccccatccccatcctggagctggccgaccacatcgagagactgaaggccaacgacaacctgaagttcagccaggagtacgagagcatcgaccccggccagcagttcacctgggagcacagcaacctggaggtgaacaagcccaagaacagatacgccaacgtgatcgcctacgaccacagcagagtgctgctgagcgccatcgagggcatccccggcagcgactacgtgaacgccaactacatcgacggctacagaaagcagaacgcctacatcgccacccagggcagcctgcccgagaccttcggcgacttctggagaatgatctgggagcagagaagcgccaccgtggtgatgatgaccaagctggaggagagaagcagagtgaagtgcgaccagtactggcccagcagaggcaccgagacccacggcctggtgcaggtgaccctgctggacaccgtggagctggccacctactgcgtgagaaccttcgccctgtacaagaacggcagcagcgagaagagagaggtgagacagttccagttcaccgcctggcccgaccacggcgtgcccgagcaccccacccccttcctggccttcctgagaagagtgaagacctgcaacccccccgacgccggccccatggtggtgcactgcagcgccggcgtgggcagaaccggctgcttcatcgtgatcgacgccatgctggagagaatcaagcacgagaagaccgtggacatctacggccacgtgaccctgatgagagcccagagaaactacatggtgcagaccgaggaccagtacatcttcatccacgacgccctgctggaggccgtgacctgcggcaacaccgaggtgcccgccagaaacctgtacgcctacatccagaagctgacccagatcgagaccggcgagaacgtgaccggcatggagctggagttcaagagactggccagcagcaaggcccacaccagcagattcatcagcgccaacctgccctgcaacaagttcaagaacagactggtgaacatcatgccctacgagagcaccagagtgtgcctgcagcccatcagaggcgtggagggcagcgactacatcaacgccagcttcatcgacggctacagacagcagaaggcctacatcgccacccagggccccctggccgagaccaccgaggacttctggagaatgctgtgggagcacaacagcaccatcgtggtgatgctgaccaagctgagagagatgggcagagagaagtgccaccagtactggcccgccgagagaagcgccagataccagtacttcgtggtggaccccatggccgagtacaacatgccccagtacatcctgagagagttcaaggtgaccgacgccagagacggccagagcagaaccgtgagacagttccagttcaccgactggcccgagcagggcgtgcccaagagcggcgagggcttcatcgacttcatcggccaggtgcacaagaccaaggagcagttcggccaggacggccccatcagcgtgcactgcagcgccggcgtgggcagaaccggcgtgttcatcaccctgagcatcgtgctggagagaatgagatacgagggcgtggtggacatcttccagaccgtgaagatgctgagaacccagagacccgccatggtgcagaccgaggaccagtaccagttcagctacagagccgccctggagtacctgggcagcttcgaccactacgccacctag

SEQ ID NO: 95517 - DNA, 4521 bp, synthetic construct
  misc_feature 1..4521: note = Description of Artificial Sequence: Synthetic coding sequence
  source 1..4521: mol_type = other DNA
atggtgcacgtggccagactgctgctgctgctgctgaccttcttcctgagaaccgacgccgagaccccccccagattcaccagaacccccgtggaccagaccggcgtgagcggcggcgtggccagcttcatctgccaggccaccggcgaccccagacccaagatcgtgtggaacaagaagggcaagaaggtgagcaaccagagattcgaggtgatcgagttcgacgacggcagcggcagcgtgctgagaatccagcccctgagaacccccagagacgaggccatctacgagtgcgtggccagcaacaacgtgggcgagatcagcgtgagcaccagactgaccgtgctgagagaggaccagatccccagaggcttccccaccatcgacatgggcccccagctgaaggtggtggagagaaccagaaccgccaccatgctgtgcgccgccagcggcaaccccgaccccgagatcacctggttcaaggacttcctgcccgtggacaccagcaacaacaacggcagaatcaagcagctgagaagcgagagcatcggcggcacccccatcagaggcgccctgcagatcgagcagagcgaggagagcgaccagggcaagtacgagtgcgtggccaccaacagcgccggcaccagatacagcgcccccgccaacctgtacgtgagagagctgagagaggtgagaagagtgccccccagattcagcatcccccccaccaaccacgagatcatgcccggcggcagcgtgaacatcacctgcgtggccgtgggcagccccatgccctacgtgaagtggatgctgggcgccgaggacctgacccccgaggacgacatgcccatcggcagaaacgtgctggagctgaacgacgtgagacagagcgccaactacacctgcgtggccatgagcaccctgggcgtgatcgaggccatcgcccagatcaccgtgaaggccctgcccaagccccccggcacccccgtggtgaccgagagcaccgccaccagcatcaccctgacctgggacagcggcaaccccgagcccgtgagctactacatcatccagcacaagcccaagaacagcgaggagctgtacaaggagatcgacggcgtggccaccaccagatacagcgtggccggcctgagcccctacagcgactacgagttcagagtggtggccgtgaacaacatcggcagaggcccccccagcgagcccgtgctgacccagaccagcgagcaggcccccagcagcgcccccagagacgtgcaggccagaatgctgagcagcaccaccatcctggtgcagtggaaggagcccgaggagcccaacggccagatccagggctacagagtgtactacaccatggaccccacccagcacgtgaacaactggatgaagcacaacgtggccgacagccagatcaccaccatcggcaacctggtgccccagaagacctacagcgtgaaggtgctggccttcaccagcatcggcgacggccccctgagcagcgacatccaggtgatcacccagaccggcgtgcccggccagcccctgaacttcaaggccgagcccgagagcgagaccagcatcctgctgagctggaccccccccagaagcgacaccatcgccaactacgagctggtgtacaaggacggcgagcacggcgaggagcagagaatcaccatcgagcccggcaccagctacagactgcagggcctgaagcccaacagcctgtactacttcagactggccgccagaagcccccagggcctgggcgccagcaccgccgagatcagcgccagaaccatgcagagcatgttcgccaagaacttccacgtgaaggccgtgatgaagaccagcgtgctgctgagctgggagatccccgagaactacaacagcgccatgcccttcaagatcctgtacgacgacggcaagatggtggaggaggtggacggcagagccacccagaagctgatcgtgaacctgaagcccgagaagagctacagcttcgtgctgaccaacagaggcaacagcgccggcggcctgcagcacagagtgaccgccaagaccgcccccgacgtgctgagaaccaagcccgccttcatcggcaagaccaacctggacggcatgatcaccgtgcagctgcccgaggtgcccgccaacgagaacatcaagggctactacatcatcatcgtgcccctgaagaagagcagaggcaagttcatcaagccctgggagagccccgacgagatggagctggacgagctgctgaaggagatcagcagaaagagaagaagcatcagatacggcagagaggtggagctgaagccctacatcgccgcccacttcgacgtgctgcccaccgagttcaccctgggcgacgacaagcactacggcggcttcaccaacaagcagctgcagagcggccaggagtacgtgttcttcgtgctggccgtgatggagcacgccgagagcaagatgtacgccaccagcccctacagcgaccccgtggtgagcatggacctggacccccagcccatcaccgacgaggaggagggcctgatctgggtggtgggccccgtgctggccgtggtgttcatcatctgcatcgtgatcgccatcctgctgtacaagagcagcaagcccgacagaaagagagccgagagcgacagcagaaagagcagcatccccaacaacaaggagatccccagccaccaccccaccgaccccgtggagctgagaagactgaacttccagacccccggcatggccagccacccccccatccccatcctggagctggccgaccacatcgagagactgaaggccaacgacaacctgaagttcagccaggagtacgagagcatcgaccccggccagcagttcacctgggagcacagcaacctggaggtgaacaagcccaagaacagatacgccaacgtgatcgcctacgaccacagcagagtgctgctgagcgccatcgagggcatccccggcagcgactacgtgaacgccaactacatcgacggctacagaaagcagaacgcctacatcgccacccagggcagcctgcccgagaccttcggcgacttctggagaatgatctgggagcagagaagcgccaccgtggtgatgatgaccaagctggaggagagaagcagagtgaagtgcgaccagtactggcccagcagaggcaccgagacccacggcctggtgcaggtgaccctgctggacaccgtggagctggccacctactgcgtgagaaccttcgccctgtacaagaacggcagcagcgagaagagagaggtgagacagttccagttcaccgcctggcccgaccacggcgtgcccgagcaccccacccccttcctggccttcctgagaagagtgaagacctgcaacccccccgacgccggccccatggtggtgcactgcagcgccggcgtgggcagaaccggctgcttcatcgtgatcgacgccatgctggagagaatcaagcacgagaagaccgtggacatctacggccacgtgaccctgatgagagcccagagaaactacatggtgcagaccgaggaccagtacatcttcatccacgacgccctgctggaggccgtgacctgcggcaacaccgaggtgcccgccagaaacctgtacgcctacatccagaagctgacccagatcgagaccggcgagaacgtgaccggcatggagctggagttcaagagactggccagcagcaaggcccacaccagcagattcatcagcgccaacctgccctgcaacaagttcaagaacagactggtgaacatcatgccctacgagagcaccagagtgtgcctgcagcccatcagaggcgtggagggcagcgactacatcaacgccagcttcatcgacggctacagacagcagaaggcctacatcgccacccagggccccctggccgagaccaccgaggacttctggagaatgctgtgggagcacaacagcaccatcgtggtgatgctgaccaagctgagagagatgggcagagagaagtgccaccagtactggcccgccgagagaagcgccagataccagtacttcgtggtggaccccatggccgagtacaacatgccccagtacatcctgagagagttcaaggtgaccgacgccagagacggccagagcagaaccgtgagacagttccagttcaccgactggcccgagcagggcgtgcccaagagcggcgagggcttcatcgacttcatcggccaggtgcacaagaccaaggagcagttcggccaggacggccccatcagcgtgcactgcagcgccggcgtgggcagaaccggcgtgttcatcaccctgagcatcgtgctggagagaatgagatacgagggcgtggtggacatcttccagaccgtgaagatgctgagaacccagagacccgccatggtgcagaccgaggaccagtaccagttcagctacagagccgccctggagtacctgggcagcttcgaccactacgccacctag

SEQ ID NO: 95518 - DNA, 5739 bp, synthetic construct
  misc_feature 1..5739: note = Description of Artificial Sequence: Synthetic coding sequence
  source 1..5739: mol_type = other DNA
atggtgcacgtggccagactgctgctgctgctgctgaccttcttcctgagaaccgacgccgagaccccccccagattcaccagaacccccgtggaccagaccggcgtgagcggcggcgtggccagcttcatctgccaggccaccggcgaccccagacccaagatcgtgtggaacaagaagggcaagaaggtgagcaaccagagattcgaggtgatcgagttcgacgacggcagcggcagcgtgctgagaatccagcccctgagaacccccagagacgaggccatctacgagtgcgtggccagcaacaacgtgggcgagatcagcgtgagcaccagactgaccgtgctgagagaggaccagatccccagaggcttccccaccatcgacatgggcccccagctgaaggtggtggagagaaccagaaccgccaccatgctgtgcgccgccagcggcaaccccgaccccgagatcacctggttcaaggacttcctgcccgtggacaccagcaacaacaacggcagaatcaagcagctgagaagcgagagcatcggcggcacccccatcagaggcgccctgcagatcgagcagagcgaggagagcgaccagggcaagtacgagtgcgtggccaccaacagcgccggcaccagatacagcgcccccgccaacctgtacgtgagagagctgagagaggtgagaagagtgccccccagattcagcatcccccccaccaaccacgagatcatgcccggcggcagcgtgaacatcacctgcgtggccgtgggcagccccatgccctacgtgaagtggatgctgggcgccgaggacctgacccccgaggacgacatgcccatcggcagaaacgtgctggagctgaacgacgtgagacagagcgccaactacacctgcgtggccatgagcaccctgggcgtgatcgaggccatcgcccagatcaccgtgaaggccctgcccaagccccccggcacccccgtggtgaccgagagcaccgccaccagcatcaccctgacctgggacagcggcaaccccgagcccgtgagctactacatcatccagcacaagcccaagaacagcgaggagctgtacaaggagatcgacggcgtggccaccaccagatacagcgtggccggcctgagcccctacagcgactacgagttcagagtggtggccgtgaacaacatcggcagaggcccccccagcgagcccgtgctgacccagaccagcgagcaggcccccagcagcgcccccagagacgtgcaggccagaatgctgagcagcaccaccatcctggtgcagtggaaggagcccgaggagcccaacggccagatccagggctacagagtgtactacaccatggaccccacccagcacgtgaacaactggatgaagcacaacgtggccgacagccagatcaccaccatcggcaacctggtgccccagaagacctacagcgtgaaggtgctggccttcaccagcatcggcgacggccccctgagcagcgacatccaggtgatcacccagaccggcgtgcccggccagcccctgaacttcaaggccgagcccgagagcgagaccagcatcctgctgagctggaccccccccagaagcgacaccatcgccaactacgagctggtgtacaaggacggcgagcacggcgaggagcagagaatcaccatcgagcccggcaccagctacagactgcagggcctgaagcccaacagcctgtactacttcagactggccgccagaagcccccagggcctgggcgccagcaccgccgagatcagcgccagaaccatgcagagcaagcccagcgcccccccccaggacatcagctgcaccagccccagcagcaccagcatcctggtgagctggcagcccccccccgtggagaagcagaacggcatcatcaccgagtacagcatcaagtacaccgccgtggacggcgaggacgacaagccccacgagatcctgggcatccccagcgacaccaccaagtacctgctggagcagctggagaagtggaccgagtacagaatcaccgtgaccgcccacaccgacgtgggccccggccccgagagcctgagcgtgctgatcagaaccaacgaggacgtgcccagcggcccccccagaaaggtggaggtggaggccgtgaacagcaccagcgtgaaggtgagctggagaagccccgtgcccaacaagcagcacggccagatcagaggctaccaggtgcactacgtgagaatggagaacggcgagcccaagggccagcccatgctgaaggacgtgatgctggccgacgcccagtgggagttcgacgacaccaccgagcacgacatgatcatcagcggcctgcagcccgagaccagctacagcctgaccgtgaccgcctacaccaccaagggcgacggcgccagaagcaagcccaagctggtgagcaccaccggcgccgtgcccggcaagcccagactggtgatcaaccacacccagatgaacaccgccctgatccagtggcacccccccgtggacaccttcggccccctgcagggctacagactgaagttcggcagaaaggacatggagcccctgaccaccctggagttcagcgagaaggaggaccacttcaccgccaccgacatccacaagggcgccagctacgtgttcagactgagcgccagaaacaaggtgggcttcggcgaggagatggtgaaggagatcagcatccccgaggaggtgcccaccggcttcccccagaacctgcacagcgagggcaccaccagcaccagcgtgcagctgagctggcagccccccgtgctggccgagagaaacggcatcatcaccaagtacaccctgctgtacagagacatcaacatccccctgctgcccatggagcagctgatcgtgcccgccgacaccaccatgaccctgaccggcctgaagcccgacaccacctacgacgtgaaggtgagagcccacaccagcaagggccccggcccctacagccccagcgtgcagttcagaaccctgcccgtggaccaggtgttcgccaagaacttccacgtgaaggccgtgatgaagaccagcgtgctgctgagctgggagatccccgagaactacaacagcgccatgcccttcaagatcctgtacgacgacggcaagatggtggaggaggtggacggcagagccacccagaagctgatcgtgaacctgaagcccgagaagagctacagcttcgtgctgaccaacagaggcaacagcgccggcggcctgcagcacagagtgaccgccaagaccgcccccgacgtgctgagaaccaagcccgccttcatcggcaagaccaacctggacggcatgatcaccgtgcagctgcccgaggtgcccgccaacgagaacatcaagggctactacatcatcatcgtgcccctgaagaagagcagaggcaagttcatcaagccctgggagagccccgacgagatggagctggacgagctgctgaaggagatcagcagaaagagaagaagcatcagatacggcagagaggtggagctgaagccctacatcgccgcccacttcgacgtgctgcccaccgagttcaccctgggcgacgacaagcactacggcggcttcaccaacaagcagctgcagagcggccaggagtacgtgttcttcgtgctggccgtgatggagcacgccgagagcaagatgtacgccaccagcccctacagcgaccccgtggtgagcatggacctggacccccagcccatcaccgacgaggaggagggcctgatctgggtggtgggccccgtgctggccgtggtgttcatcatctgcatcgtgatcgccatcctgctgtacaagagaaagagagccgagagcgacagcagaaagagcagcatccccaacaacaaggagatccccagccaccaccccaccgaccccgtggagctgagaagactgaacttccagacccccggcatggccagccacccccccatccccatcctggagctggccgaccacatcgagagactgaaggccaacgacaacctgaagttcagccaggagtacgagagcatcgaccccggccagcagttcacctgggagcacagcaacctggaggtgaacaagcccaagaacagatacgccaacgtgatcgcctacgaccacagcagagtgctgctgagcgccatcgagggcatccccggcagcgactacgtgaacgccaactacatcgacggctacagaaagcagaacgcctacatcgccacccagggcagcctgcccgagaccttcggcgacttctggagaatgatctgggagcagagaagcgccaccgtggtgatgatgaccaagctggaggagagaagcagagtgaagtgcgaccagtactggcccagcagaggcaccgagacccacggcctggtgcaggtgaccctgctggacaccgtggagctggccacctactgcgtgagaaccttcgccctgtacaagaacggcagcagcgagaagagagaggtgagacagttccagttcaccgcctggcccgaccacggcgtgcccgagcaccccacccccttcctggccttcctgagaagagtgaagacctgcaacccccccgacgccggccccatggtggtgcactgcagcgccggcgtgggcagaaccggctgcttcatcgtgatcgacgccatgctggagagaatcaagcacgagaagaccgtggacatctacggccacgtgaccctgatgagagcccagagaaactacatggtgcagaccgaggaccagtacatcttcatccacgacgccctgctggaggccgtgacctgcggcaacaccgaggtgcccgccagaaacctgtacgcctacatccagaagctgacccagatcgagaccggcgagaacgtgaccggcatggagctggagttcaagagactggccagcagcaaggcccacaccagcagattcatcagcgccaacctgccctgcaacaagttcaagaacagactggtgaacatcatgccctacgagagcaccagagtgtgcctgcagcccatcagaggcgtggagggcagcgactacatcaacgccagcttcatcgacggctacagacagcagaaggcctacatcgccacccagggccccctggccgagaccaccgaggacttctggagaatgctgtgggagcacaacagcaccatcgtggtgatgctgaccaagctgagagagatgggcagagagaagtgccaccagtactggcccgccgagagaagcgccagataccagtacttcgtggtggaccccatggccgagtacaacatgccccagtacatcctgagagagttcaaggtgaccgacgccagagacggccagagcagaaccgtgagacagttccagttcaccgactggcccgagcagggcgtgcccaagagcggcgagggcttcatcgacttcatcggccaggtgcacaagaccaaggagcagttcggccaggacggccccatcagcgtgcactgcagcgccggcgtgggcagaaccggcgtgttcatcaccctgagcatcgtgctggagagaatgagatacgagggcgtggtggacatcttccagaccgtgaagatgctgagaacccagagacccgccatggtgcagaccgaggaccagtaccagttcagctacagagccgccctggagtacctgggcagcttcgaccactacgccacctag

SEQ ID NO: 95519 - DNA, 5673 bp, synthetic construct
  misc_feature 1..5673: note = Description of Artificial Sequence: Synthetic coding sequence
  source 1..5673: mol_type = other DNA
atggtgcacgtggccagactgctgctgctgctgctgaccttcttcctgagaaccgacgccgagaccccccccagattcaccagaacccccgtggaccagaccggcgtgagcggcggcgtggccagcttcatctgccaggccaccggcgaccccagacccaagatcgtgtggaacaagaagggcaagaaggtgagcaaccagagattcgaggtgatcgagttcgacgacggcagcggcagcgtgctgagaatccagcccctgagaacccccagagacgaggccatctacgagtgcgtggccagcaacaacgtgggcgagatcagcgtgagcaccagactgaccgtgctgagagaggaccagatccccagaggcttccccaccatcgacatgggcccccagctgaaggtggtggagagaaccagaaccgccaccatgctgtgcgccgccagcggcaaccccgaccccgagatcacctggttcaaggacttcctgcccgtggacaccagcaacaacaacggcagaatcaagcagctgagaagcggcgccctgcagatcgagcagagcgaggagagcgaccagggcaagtacgagtgcgtggccaccaacagcgccggcaccagatacagcgcccccgccaacctgtacgtgagagtgagaagagtgccccccagattcagcatcccccccaccaaccacgagatcatgcccggcggcagcgtgaacatcacctgcgtggccgtgggcagccccatgccctacgtgaagtggatgctgggcgccgaggacctgacccccgaggacgacatgcccatcggcagaaacgtgctggagctgaacgacgtgagacagagcgccaactacacctgcgtggccatgagcaccctgggcgtgatcgaggccatcgcccagatcaccgtgaaggccctgcccaagccccccggcacccccgtggtgaccgagagcaccgccaccagcatcaccctgacctgggacagcggcaaccccgagcccgtgagctactacatcatccagcacaagcccaagaacagcgaggagctgtacaaggagatcgacggcgtggccaccaccagatacagcgtggccggcctgagcccctacagcgactacgagttcagagtggtggccgtgaacaacatcggcagaggcccccccagcgagcccgtgctgacccagaccagcgagcaggcccccagcagcgcccccagagacgtgcaggccagaatgctgagcagcaccaccatcctggtgcagtggaaggagcccgaggagcccaacggccagatccagggctacagagtgtactacaccatggaccccacccagcacgtgaacaactggatgaagcacaacgtggccgacagccagatcaccaccatcggcaacctggtgccccagaagacctacagcgtgaaggtgctggccttcaccagcatcggcgacggccccctgagcagcgacatccaggtgatcacccagaccggcgtgcccggccagcccctgaacttcaaggccgagcccgagagcgagaccagcatcctgctgagctggaccccccccagaagcgacaccatcgccaactacgagctggtgtacaaggacggcgagcacggcgaggagcagagaatcaccatcgagcccggcaccagctacagactgcagggcctgaagcccaacagcctgtactacttcagactggccgccagaagcccccagggcctgggcgccagcaccgccgagatcagcgccagaaccatgcagagcaagcccagcgcccccccccaggacatcagctgcaccagccccagcagcaccagcatcctggtgagctggcagcccccccccgtggagaagcagaacggcatcatcaccgagtacagcatcaagtacaccgccgtggacggcgaggacgacaagccccacgagatcctgggcatccccagcgacaccaccaagtacctgctggagcagctggagaagtggaccgagtacagaatcaccgtgaccgcccacaccgacgtgggccccggccccgagagcctgagcgtgctgatcagaaccaacgaggacgtgcccagcggcccccccagaaaggtggaggtggaggccgtgaacagcaccagcgtgaaggtgagctggagaagccccgtgcccaacaagcagcacggccagatcagaggctaccaggtgcactacgtgagaatggagaacggcgagcccaagggccagcccatgctgaaggacgtgatgctggccgacgcccaggacatgatcatcagcggcctgcagcccgagaccagctacagcctgaccgtgaccgcctacaccaccaagggcgacggcgccagaagcaagcccaagctggtgagcaccaccggcgccgtgcccggcaagcccagactggtgatcaaccacacccagatgaacaccgccctgatccagtggcacccccccgtggacaccttcggccccctgcagggctacagactgaagttcggcagaaaggacatggagcccctgaccaccctggagttcagcgagaaggaggaccacttcaccgccaccgacatccacaagggcgccagctacgtgttcagactgagcgccagaaacaaggtgggcttcggcgaggagatggtgaaggagatcagcatccccgaggaggtgcccaccggcttcccccagaacctgcacagcgagggcaccaccagcaccagcgtgcagctgagctggcagccccccgtgctggccgagagaaacggcatcatcaccaagtacaccctgctgtacagagacatcaacatccccctgctgcccatggagcagctgatcgtgcccgccgacaccaccatgaccctgaccggcctgaagcccgacaccacctacgacgtgaaggtgagagcccacaccagcaagggccccggcccctacagccccagcgtgcagttcagaaccctgcccgtggaccaggtgttcgccaagaacttccacgtgaaggccgtgatgaagaccagcgtgctgctgagctgggagatccccgagaactacaacagcgccatgcccttcaagatcctgtacgacgacggcaagatggtggaggaggtggacggcagagccacccagaagctgatcgtgaacctgaagcccgagaagagctacagcttcgtgctgaccaacagaggcaacagcgccggcggcctgcagcacagagtgaccgccaagaccgcccccgacgtgctgagaaccaagcccgccttcatcggcaagaccaacctggacggcatgatcaccgtgcagctgcccgaggtgcccgccaacgagaacatcaagggctactacatcatcatcgtgcccctgaagaagagcagaggcaagttcatcaagccctgggagagccccgacgagatggagctggacgagctgctgaaggagatcagcagaaagagaagaagcatcagatacggcagagaggtggagctgaagccctacatcgccgcccacttcgacgtgctgcccaccgagttcaccctgggcgacgacaagcactacggcggcttcaccaacaagcagctgcagagcggccaggagtacgtgttcttcgtgctggccgtgatggagcacgccgagagcaagatgtacgccaccagcccctacagcgaccccgtggtgagcatggacctggacccccagcccatcaccgacgaggaggagggcctgatctgggtggtgggccccgtgctggccgtggtgttcatcatctgcatcgtgatcgccatcctgctgtacaagagaaagagagccgagagcgacagcagaaagagcagcatccccaacaacaaggagatccccagccaccaccccaccgaccccgtggagctgagaagactgaacttccagacccccggcatggccagccacccccccatccccatcctggagctggccgaccacatcgagagactgaaggccaacgacaacctgaagttcagccaggagtacgagagcatcgaccccggccagcagttcacctgggagcacagcaacctggaggtgaacaagcccaagaacagatacgccaacgtgatcgcctacgaccacagcagagtgctgctgagcgccatcgagggcatccccggcagcgactacgtgaacgccaactacatcgacggctacagaaagcagaacgcctacatcgccacccagggcagcctgcccgagaccttcggcgacttctggagaatgatctgggagcagagaagcgccaccgtggtgatgatgaccaagctggaggagagaagcagagtgaagtgcgaccagtactggcccagcagaggcaccgagacccacggcctggtgcaggtgaccctgctggacaccgtggagctggccacctactgcgtgagaaccttcgccctgtacaagaacggcagcagcgagaagagagaggtgagacagttccagttcaccgcctggcccgaccacggcgtgcccgagcaccccacccccttcctggccttcctgagaagagtgaagacctgcaacccccccgacgccggccccatggtggtgcactgcagcgccggcgtgggcagaaccggctgcttcatcgtgatcgacgccatgctggagagaatcaagcacgagaagaccgtggacatctacggccacgtgaccctgatgagagcccagagaaactacatggtgcagaccgaggaccagtacatcttcatccacgacgccctgctggaggccgtgacctgcggcaacaccgaggtgcccgccagaaacctgtacgcctacatccagaagctgacccagatcgagaccggcgagaacgtgaccggcatggagctggagttcaagagactggccagcagcaaggcccacaccagcagattcatcagcgccaacctgccctgcaacaagttcaagaacagactggtgaacatcatgccctacgagagcaccagagtgtgcctgcagcccatcagaggcgtggagggcagcgactacatcaacgccagcttcatcgacggctacagacagcagaaggcctacatcgccacccagggccccctggccgagaccaccgaggacttctggagaatgctgtgggagcacaacagcaccatcgtggtgatgctgaccaagctgagagagatgggcagagagaagtgccaccagtactggcccgccgagagaagcgccagataccagtacttcgtggtggaccccatggccgagtacaacatgccccagtacatcctgagagagttcaaggtgaccgacgccagagacggccagagcagaaccgtgagacagttccagttcaccgactggcccgagcagggcgtgcccaagagcggcgagggcttcatcgacttcatcggccaggtgcacaagaccaaggagcagttcggccaggacggccccatcagcgtgcactgcagcgccggcgtgggcagaaccggcgtgttcatcaccctgagcatcgtgctggagagaatgagatacgagggcgtggtggacatcttccagaccgtgaagatgctgagaacccagagacccgccatggtgcagaccgaggaccagtaccagttcagctacagagccgccctggagtacctgggcagcttcgaccactacgccacctag

SEQ ID NO: 95520 - DNA, 5700 bp, synthetic construct
  misc_feature 1..5700: note = Description of Artificial Sequence: Synthetic coding sequence
  source 1..5700: mol_type = other DNA
atggtgcacgtggccagactgctgctgctgctgctgaccttcttcctgagaaccgacgccgagaccccccccagattcaccagaacccccgtggaccagaccggcgtgagcggcggcgtggccagcttcatctgccaggccaccggcgaccccagacccaagatcgtgtggaacaagaagggcaagaaggtgagcaaccagagattcgaggtgatcgagttcgacgacggcagcggcagcgtgctgagaatccagcccctgagaacccccagagacgaggccatctacgagtgcgtggccagcaacaacgtgggcgagatcagcgtgagcaccagactgaccgtgctgagagaggaccagatccccagaggcttccccaccatcgacatgggcccccagctgaaggtggtggagagaaccagaaccgccaccatgctgtgcgccgccagcggcaaccccgaccccgagatcacctggttcaaggacttcctgcccgtggacaccagcaacaacaacggcagaatcaagcagctgagaagcggcgccctgcagatcgagcagagcgaggagagcgaccagggcaagtacgagtgcgtggccaccaacagcgccggcaccagatacagcgcccccgccaacctgtacgtgagagtgagaagagtgccccccagattcagcatcccccccaccaaccacgagatcatgcccggcggcagcgtgaacatcacctgcgtggccgtgggcagccccatgccctacgtgaagtggatgctgggcgccgaggacctgacccccgaggacgacatgcccatcggcagaaacgtgctggagctgaacgacgtgagacagagcgccaactacacctgcgtggccatgagcaccctgggcgtgatcgaggccatcgcccagatcaccgtgaaggccctgcccaagccccccggcacccccgtggtgaccgagagcaccgccaccagcatcaccctgacctgggacagcggcaaccccgagcccgtgagctactacatcatccagcacaagcccaagaacagcgaggagctgtacaaggagatcgacggcgtggccaccaccagatacagcgtggccggcctgagcccctacagcgactacgagttcagagtggtggccgtgaacaacatcggcagaggcccccccagcgagcccgtgctgacccagaccagcgagcaggcccccagcagcgcccccagagacgtgcaggccagaatgctgagcagcaccaccatcctggtgcagtggaaggagcccgaggagcccaacggccagatccagggctacagagtgtactacaccatggaccccacccagcacgtgaacaactggatgaagcacaacgtggccgacagccagatcaccaccatcggcaacctggtgccccagaagacctacagcgtgaaggtgctggccttcaccagcatcggcgacggccccctgagcagcgacatccaggtgatcacccagaccggcgtgcccggccagcccctgaacttcaaggccgagcccgagagcgagaccagcatcctgctgagctggaccccccccagaagcgacaccatcgccaactacgagctggtgtacaaggacggcgagcacggcgaggagcagagaatcaccatcgagcccggcaccagctacagactgcagggcctgaagcccaacagcctgtactacttcagactggccgccagaagcccccagggcctgggcgccagcaccgccgagatcagcgccagaaccatgcagagcaagcccagcgcccccccccaggacatcagctgcaccagccccagcagcaccagcatcctggtgagctggcagcccccccccgtggagaagcagaacggcatcatcaccgagtacagcatcaagtacaccgccgtggacggcgaggacgacaagccccacgagatcctgggcatccccagcgacaccaccaagtacctgctggagcagctggagaagtggaccgagtacagaatcaccgtgaccgcccacaccgacgtgggccccggccccgagagcctgagcgtgctgatcagaaccaacgaggacgtgcccagcggcccccccagaaaggtggaggtggaggccgtgaacagcaccagcgtgaaggtgagctggagaagccccgtgcccaacaagcagcacggccagatcagaggctaccaggtgcactacgtgagaatggagaacggcgagcccaagggccagcccatgctgaaggacgtgatgctggccgacgcccagtgggagttcgacgacaccaccgagcacgacatgatcatcagcggcctgcagcccgagaccagctacagcctgaccgtgaccgcctacaccaccaagggcgacggcgccagaagcaagcccaagctggtgagcaccaccggcgccgtgcccggcaagcccagactggtgatcaaccacacccagatgaacaccgccctgatccagtggcacccccccgtggacaccttcggccccctgcagggctacagactgaagttcggcagaaaggacatggagcccctgaccaccctggagttcagcgagaaggaggaccacttcaccgccaccgacatccacaagggcgccagctacgtgttcagactgagcgccagaaacaaggtgggcttcggcgaggagatggtgaaggagatcagcatccccgaggaggtgcccaccggcttcccccagaacctgcacagcgagggcaccaccagcaccagcgtgcagctgagctggcagccccccgtgctggccgagagaaacggcatcatcaccaagtacaccctgctgtacagagacatcaacatccccctgctgcccatggagcagctgatcgtgcccgccgacaccaccatgaccctgaccggcctgaagcccgacaccacctacgacgtgaaggtgagagcccacaccagcaagggccccggcccctacagccccagcgtgcagttcagaaccctgcccgtggaccaggtgttcgccaagaacttccacgtgaaggccgtgatgaagaccagcgtgctgctgagctgggagatccccgagaactacaacagcgccatgcccttcaagatcctgtacgacgacggcaagatggtggaggaggtggacggcagagccacccagaagctgatcgtgaacctgaagcccgagaagagctacagcttcgtgctgaccaacagaggcaacagcgccggcggcctgcagcacagagtgaccgccaagaccgcccccgacgtgctgagaaccaagcccgccttcatcggcaagaccaacctggacggcatgatcaccgtgcagctgcccgaggtgcccgccaacgagaacatcaagggctactacatcatcatcgtgcccctgaagaagagcagaggcaagttcatcaagccctgggagagccccgacgagatggagctggacgagctgctgaaggagatcagcagaaagagaagaagcatcagatacggcagagaggtggagctgaagccctacatcgccgcccacttcgacgtgctgcccaccgagttcaccctgggcgacgacaagcactacggcggcttcaccaacaagcagctgcagagcggccaggagtacgtgttcttcgtgctggccgtgatggagcacgccgagagcaagatgtacgccaccagcccctacagcgaccccgtggtgagcatggacctggacccccagcccatcaccgacgaggaggagggcctgatctgggtggtgggccccgtgctggccgtggtgttcatcatctgcatcgtgatcgccatcctgctgtacaagagaaagagagccgagagcgacagcagaaagagcagcatccccaacaacaaggagatccccagccaccaccccaccgaccccgtggagctgagaagactgaacttccagacccccggcatggccagccacccccccatccccatcctggagctggccgaccacatcgagagactgaaggccaacgacaacctgaagttcagccaggagtacgagagcatcgaccccggccagcagttcacctgggagcacagcaacctggaggtgaacaagcccaagaacagatacgccaacgtgatcgcctacgaccacagcagagtgctgctgagcgccatcgagggcatccccggcagcgactacgtgaacgccaactacatcgacggctacagaaagcagaacgcctacatcgccacccagggcagcctgcccgagaccttcggcgacttctggagaatgatctgggagcagagaagcgccaccgtggtgatgatgaccaagctggaggagagaagcagagtgaagtgcgaccagtactggcccagcagaggcaccgagacccacggcctggtgcaggtgaccctgctggacaccgtggagctggccacctactgcgtgagaaccttcgccctgtacaagaacggcagcagcgagaagagagaggtgagacagttccagttcaccgcctggcccgaccacggcgtgcccgagcaccccacccccttcctggccttcctgagaagagtgaagacctgcaacccccccgacgccggccccatggtggtgcactgcagcgccggcgtgggcagaaccggctgcttcatcgtgatcgacgccatgctggagagaatcaagcacgagaagaccgtggacatctacggccacgtgaccctgatgagagcccagagaaactacatggtgcagaccgaggaccagtacatcttcatccacgacgccctgctggaggccgtgacctgcggcaacaccgaggtgcccgccagaaacctgtacgcctacatccagaagctgacccagatcgagaccggcgagaacgtgaccggcatggagctggagttcaagagactggccagcagcaaggcccacaccagcagattcatcagcgccaacctgccctgcaacaagttcaagaacagactggtgaacatcatgccctacgagagcaccagagtgtgcctgcagcccatcagaggcgtggagggcagcgactacatcaacgccagcttcatcgacggctacagacagcagaaggcctacatcgccacccagggccccctggccgagaccaccgaggacttctggagaatgctgtgggagcacaacagcaccatcgtggtgatgctgaccaagctgagagagatgggcagagagaagtgccaccagtactggcccgccgagagaagcgccagataccagtacttcgtggtggaccccatggccgagtacaacatgccccagtacatcctgagagagttcaaggtgaccgacgccagagacggccagagcagaaccgtgagacagttccagttcaccgactggcccgagcagggcgtgcccaagagcggcgagggcttcatcgacttcatcggccaggtgcacaagaccaaggagcagttcggccaggacggccccatcagcgtgcactgcagcgccggcgtgggcagaaccggcgtgttcatcaccctgagcatcgtgctggagagaatgagatacgagggcgtggtggacatcttccagaccgtgaagatgctgagaacccagagacccgccatggtgcagaccgaggaccagtaccagttcagctacagagccgccctggagtacctgggcagcttcgaccactacgccacctag

SEQ ID NO: 95521 - DNA, 5739 bp, synthetic construct; identical to SEQ ID NO: 95518
  misc_feature 1..5739: note = Description of Artificial Sequence: Synthetic coding sequence
  source 1..5739: mol_type = other DNA

SEQ ID NO: 95522 - DNA, 4509 bp, synthetic construct
  misc_feature 1..4509: note = Description of Artificial Sequence: Synthetic coding sequence
  source 1..4509: mol_type = other DNA
atggtgcacgtggccagactgctgctgctgctgctgaccttcttcctgagaaccgacgccgagaccccccccagattcaccagaacccccgtggaccagaccggcgtgagcggcggcgtggccagcttcatctgccaggccaccggcgaccccagacccaagatcgtgtggaacaagaagggcaagaaggtgagcaaccagagattcgaggtgatcgagttcgacgacggcagcggcagcgtgctgagaatccagcccctgagaacccccagagacgaggccatctacgagtgcgtggccagcaacaacgtgggcgagatcagcgtgagcaccagactgaccgtgctgagagaggaccagatccccagaggcttccccaccatcgacatgggcccccagctgaaggtggtggagagaaccagaaccgccaccatgctgtgcgccgccagcggcaaccccgaccccgagatcacctggttcaaggacttcctgcccgtggacaccagcaacaacaacggcagaatcaagcagctgagaagcggcggcacccccatcagaggcgccctgcagatcgagcagagcgaggagagcgaccagggcaagtacgagtgcgtggccaccaacagcgccggcaccagatacagcgcccccgccaacctgtacgtgagagagctgagagaggtgagaagagtgccccccagattcagcatcccccccaccaaccacgagatcatgcccggcggcagcgtgaacatcacctgcgtggccgtgggcagccccatgccctacgtgaagtggatgctgggcgccgaggacctgacccccgaggacgacatgcccatcggcagaaacgtgctggagctgaacgacgtgagacagagcgccaactacacctgcgtggccatgagcaccctgggcgtgatcgaggccatcgcccagatcaccgtgaaggccctgcccaagccccccggcacccccgtggtgaccgagagcaccgccaccagcatcaccctgacctgggacagcggcaaccccgagcccgtgagctactacatcatccagcacaagcccaagaacagcgaggagctgtacaaggagatcgacggcgtggccaccaccagatacagcgtggccggcctgagcccctacagcgactacgagttcagagtggtggccgtgaacaacatcggcagaggcccccccagcgagcccgtgctgacccagaccagcgagcaggcccccagcagcgcccccagagacgtgcaggccagaatgctgagcagcaccaccatcctggtgcagtggaaggagcccgaggagcccaacggccagatccagggctacagagtgtactacaccatggaccccacccagcacgtgaacaactggatgaagcacaacgtggccgacagccagatcaccaccatcggcaacctggtgccccagaagacctacagcgtgaaggtgctggccttcaccagcatcggcgacggccccctgagcagcgacatccaggtgatcacccagaccggcgtgcccggccagcccctgaacttcaaggccgagcccgagagcgagaccagcatcctgctgagctggaccccccccagaagcgacaccatcgccaactacgagctggtgtacaaggacggcgagcacggcgaggagcagagaatcaccatcgagcccggcaccagctacagactgcagggcctgaagcccaacagcctgtactacttcagactggccgccagaagcccccagggcctgggcgccagcaccgccgagatcagcgccagaaccatgcagagcatgttcgccaagaacttccacgtgaaggccgtgatgaagaccagcgtgctgctgagctgggagatccccgagaactacaacagcgccatgcccttcaagatcctgtacgacgacggcaagatggtggaggaggtggacggcagagccacccagaagctgatcgtgaacctgaagcccgagaagagctacagcttcgtgctgaccaacagaggcaacagcgccggcggcctgcagcacagagtgaccgccaagaccgcccccgacgtgctgagaaccaagcccgccttcatcggcaagaccaacctggacggcatgatcaccgtgcagctgcccgaggtgcccgccaacgagaacatcaagggctactacatcatcatcgtgcccctgaagaagagcagaggcaagttcatcaagccctgggagagccccgacgagatggagctggacgagctgctgaaggagatcagcagaaagagaagaagcatcagatacggcagagaggtggagctgaagccctacatcgccgcccacttcgacgtgctgcccaccgagttcaccctgggcgacgacaagcactacggcggcttcaccaacaagcagctgcagagcggccaggagtacgtgttcttcgtgctggccgtgatggagcacgccgagagcaagatgtacgccaccagcccctacagcgaccccgtggtgagcatggacctggacccccagcccatcaccgacgaggaggagggcctgatctgggtggtgggccccgtgctggccgtggtgttcatcatctgcatcgtgatcgccatcctgctgtacaagagcaagcccgacagaaagagagccgagagcgacagcagaaagagcagcatccccaacaacaaggagatccccagccaccaccccaccgaccccgtggagctgagaagactgaacttccagacccccggcatggccagccacccccccatccccatcctggagctggccgaccacatcgagagactgaaggccaacgacaacctgaagttcagccaggagtacgagagcatcgaccccggccagcagttcacctgggagcacagcaacctggaggtgaacaagcccaagaacagatacgccaacgtgatcgcctacgaccacagcagagtgctgctgagcgccatcgagggcatccccggcagcgactacgtgaacgccaactacatcgacggctacagaaagcagaacgcctacatcgccacccagggcagcctgcccgagaccttcggcgacttctggagaatgatctgggagcagagaagcgccaccgtggtgatgatgaccaagctggaggagagaagcagagtgaagtgcgaccagtactggcccagcagaggcaccgagacccacggcctggtgcaggtgaccctgctggacaccgtggagctggccacctactgcgtgagaaccttcgccctgtacaagaacggcagcagcgagaagagagaggtgagacagttccagttcaccgcctggcccgaccacggcgtgcccgagcaccccacccccttcctggccttcctgagaagagtgaagacctgcaacccccccgacgccggccccatggtggtgcactgcagcgccggcgtgggcagaaccggctgcttcatcgtgatcgacgccatgctggagagaatcaagcacgagaagaccgtggacatctacggccacgtgaccctgatgagagcccagagaaactacatggtgcagaccgaggaccagtacatcttcatccacgacgccctgctggaggccgtgacctgcggcaacaccgaggtgcccgccagaaacctgtacgcctacatccagaagctgacccagatcgagaccggcgagaacgtgaccggcatggagctggagttcaagagactggccagcagcaaggcccacaccagcagattcatcagcgccaacctgccctgcaacaagttcaagaacagactggtgaacatcatgccctacgagagcaccagagtgtgcctgcagcccatcagaggcgtggagggcagcgactacatcaacgccagcttcatcgacggctacagacagcagaaggcctacatcgccacccagggccccctggccgagaccaccgaggacttctggagaatgctgtgggagcacaacagcaccatcgtggtgatgctgaccaagctgagagagatgggcagagagaagtgccaccagtactggcccgccgagagaagcgccagataccagtacttcgtggtggaccccatggccgagtacaacatgccccagtacatcctgagagagttcaaggtgaccgacgccagagacggccagagcagaaccgtgagacagttccagttcaccgactggcccgagcagggcgtgcccaagagcggcgagggcttcatcgacttcatcggccaggtgcacaagaccaaggagcagttcggccaggacggccccatcagcgtgcactgcagcgccggcgtgggcagaaccggcgtgttcatcaccctgagcatcgtgctggagagaatgagatacgagggcgtggtggacatcttccagaccgtgaagatgctgagaacccagagacccgccatggtgcagaccgaggaccagtaccagttcagctacagagccgccctggagtacctgggcagcttcgaccactacgccacctag

SEQ ID NO: 95523 - DNA, 4518 bp, synthetic construct
  misc_feature 1..4518: note = Description of Artificial Sequence: Synthetic coding sequence
  source 1..4518: mol_type = other DNA
atggtgcacgtggccagactgctgctgctgctgctgaccttcttcctgagaaccgacgccgagaccccccccagattcaccagaacccccgtggaccagaccggcgtgagcggcggcgtggccagcttcatctgccaggccaccggcgaccccagacccaagatcgtgtggaacaagaagggcaagaaggtgagcaaccagagattcgaggtgatcgagttcgacgacggcagcggcagcgtgctgagaatccagcccctgagaacccccagagacgaggccatctacgagtgcgtggccagcaacaacgtgggcgagatcagcgtgagcaccagactgaccgtgctgagagaggaccagatccccagaggcttccccaccatcgacatgggcccccagctgaaggtggtggagagaaccagaaccgccaccatgctgtgcgccgccagcggcaaccccgaccccgagatcacctggttcaaggacttcctgcccgtggacaccagcaacaacaacggcagaatcaagcagctgagaagcgtgagcatcggcgccctgcagatcgagcagagcgaggagagcgaccagggcaagtacgagtgcgtggccaccaacagcgccggcaccagatacagcgcccccgccaacctgtacgtgagagtgagaagagtgccccccagattcagcatcccccccaccaaccacgagatcatgcccggcggcagcgtgaacatcacctgcgtggccgtgggcagccccatgccctacgtgaagtggatgctgggcgccgaggacctgacccccgaggacgacatgcccatcggcagaaacgtgctggagctgaacgacgtgagacagagcgccaactacacctgcgtggccatgagcaccctgggcgtgatcgaggccatcgcccagatcaccgtgaaggccctgcccaagccccccggcacccccgtggtgaccgagagcaccgccaccagcatcaccctgacctgggacagcggcaaccccgagcccgtgagctactacatcatccagcacaagcccaagaacagcgaggagctgtacaaggagatcgacggcgtggccaccaccagatacagcgtggccggcctgagcccctacagcgactacgagttcagagtggtggccgtgaacaacatcggcagaggcccccccagcgagcccgtgctgacccagaccagcgagcaggcccccagcagcgcccccagagacgtgcaggccagaatgctgagcagcaccaccatcctggtgcagtggaaggagcccgaggagcccaacggccagatccagggctacagagtgtactacaccatggaccccacccagcacgtgaacaactggatgaagcacaacgtggccgacagccagatcaccaccatcggcaacctggtgccccagaagacctacagcgtgaaggtgctggccttcaccagcatcggcgacggccccctgagcagcgacatccaggtgatcacccagaccggcgtgcccggccagcccctgaacttcaaggccgagcccgagagcgagaccagcatcctgctgagctggaccccccccagaagcgacaccatcgccaactacgagctggtgtacaaggacggcgagcacggcgaggagcagagaatcaccatcgagcccggcaccagctacagactgcagggcctgaagcccaacagcctgtactacttcagactggccgccagaagcccccagggcctgggcgccagcaccgccgagatcagcgccagaaccatgcagagcatgttcgccaagaacttccacgtgaaggccgtgatgaagaccagcgtgctgctgagctgggagatccccgagaactacaacagcgccatgcccttcaagatcctgtacgacgacggcaagatggtggaggaggtggacggcagagccacccagaagctgatcgtgaacctgaagcccgagaagagctacagcttcgtgctgaccaacagaggcaacagcgccggcggcctgcagcacagagtgaccgccaagaccgcccccgacgtgctgagaaccaagcccgccttcatcggcaagaccaacctggacggcatgatcaccgtgcagctgcccgaggtgcccgccaacgagaacatcaagggctactacatcatcatcgtgcccctgaagaagagcagaggcaagttcatcaagccctgggagagccccgacgagatggagctggacgagctgctgaaggagatcagcagaaagagaagaagcatcagatacggcagagaggtggagctgaagccctacatcgccgcccacttcgacgtgctgcccaccgagttcaccctgggcgacgacaagcactacggcggcttcaccaacaagcagctgcagagcggccaggagtacgtgttcttcgtgctggccgtgatggagcacgccgagagcaagatgtacgccaccagcccctacagcgaccccgtggtgagcatggacctggacccccagcccatcaccgacgaggaggagggcctgatctgggtggtgggccccgtgctggccgtggtgttcatcatctgcatcgtgatcgccatcctgctgtacaagagaaagagagccgagagcgacagcagaaagagcagcatccccaacaacaaggagatccccagccaccaccccaccgaccccgtggagctgagaagactgaacttccagacccccggcagcgacgacagcggctaccccggcaacctgcacagcagcagcatggccagccacccccccatccccatcctggagctggccgaccacatcgagagactgaaggccaacgacaacctgaagttcagccaggagtacgagagcatcgaccccggccagcagttcacctgggagcacagcaacctggaggtgaacaagcccaagaacagatacgccaacgtgatcgcctacgaccacagcagagtgctgctgagcgccatcgagggcatccccggcagcgactacgtgaacgccaactacatcgacggctacagaaagcagaacgcctacatcgccacccagggcagcctgcccgagaccttcggcgacttctggagaatgatctgggagcagagaagcgccaccgtggtgatgatgaccaagctggaggagagaagcagagtgaagtgcgaccagtactggcccagcagaggcaccgagacccacggcctggtgcaggtgaccctgctggacaccgtggagctggccacctactgcgtgagaaccttcgccctgtacaagaacggcagcagcgagaagagagaggtgagacagttccagttcaccgcctggcccgaccacggcgtgcccgagcaccccacccccttcctggccttcctgagaagagtgaagacctgcaacccccccgacgccggccccatggtggtgcactgcagcgccggcgtgggcagaaccggctgcttcatcgtgatcgacgccatgctggagagaatcaagcacgagaagaccgtggacatctacggccacgtgaccctgatgagagcccagagaaactacatggtgcagaccgaggaccagtacatcttcatccacgacgccctgctggaggccgtgacctgcggcaacaccgaggtgcccgccagaaacctgtacgcctacatccagaagctgacccagatcgagaccggcgagaacgtgaccggcatggagctggagttcaagagactggccagcagcaaggcccacaccagcagattcatcagcgccaacctgccctgcaacaagttcaagaacagactggtgaacatcatgccctacgagagcaccagagtgtgcctgcagcccatcagaggcgtggagggcagcgactacatcaacgccagcttcatcgacggctacagacagcagaaggcctacatcgccacccagggccccctggccgagaccaccgaggacttctggagaatgctgtgggagcacaacagcaccatcgtggtgatgctgaccaagctgagagagatgggcagagagaagtgccaccagtactggcccgccgagagaagcgccagataccagtacttcgtggtggaccccatggccgagtacaacatgccccagtacatcctgagagagttcaaggtgaccgacgccagagacggccagagcagaaccgtgagacagttccagttcaccgactggcccgagcagggcgtgcccaagagcggcgagggcttcatcgacttcatcggccaggtgcacaagaccaaggagcagttcggccaggacggccccatcagcgtgcactgcagcgccggcgtgggcagaaccggcgtgttcatcaccctgagcatcgtgctggagagaatgagatacgagggcgtggtggacatcttccagaccgtgaagatgctgagaacccagagacccgccatggtgcagaccgaggaccagtaccagttcagctacagagccgccctggagtacctgggcagcttcgaccactacgccacctag

SEQ ID NO: 95524 - DNA, 282 bp, synthetic construct
  misc_feature 1..282: note = Description of Artificial Sequence: Synthetic coding sequence
  source 1..282: mol_type = other DNA
atggtgcacgtggccagactgctgctgctgctgctgaccttcttcctgagaaccgacgccgagaccccccccagattcaccagaacccccgtggaccagaccggcgtgagcggcggcgtggccagcttcatctgccaggccaccggcgaccccagacccaagatcgtgtggaacaagaagggcaagaaggtgagcaaccagagattcgaggtgatcgagttcgacgacggcagcggcagcgtgctgagaatccagcccctgagaacccccagagacgagtag

SEQ ID NO: 95525 - DNA, 4518 bp, synthetic construct
  misc_feature 1..4518: note = Description of Artificial Sequence: Synthetic coding sequence
  source 1..4518: mol_type = other DNA
atggtgcacgtggccagactgctgctgctgctgctgaccttcttcctgagaaccgacgccgagaccccccccagattcaccagaacccccgtggaccagaccggcgtgagcggcggcgtggccagcttcatctgccaggccaccggcgaccccagacccaagatcgtgtggaacaagaagggcaagaaggtgagcaaccagagattcgaggtgatcgagttcgacgacggcagcggcagcgtgctgagaatccagcccctgagaacccccagagacgaggccatctacgagtgcgtggccagcaacaacgtgggcgagatcagcgtgagcaccagactgaccgtgctgagagaggaccagatccccagaggcttccccaccatcgacatgggcccccagctgaaggtggtggagagaaccagaaccgccaccatgctgtgcgccgccagcggcaaccccgaccccgagatcacctggttcaaggacttcctgcccgtggacaccagcaacaacaacggcagaatcaagcagctgagaagcgagagcatcggcggcacccccatcagaggcgccctgcagatcgagcagagcgaggagagcgaccagggcaagtacgagtgcgtggccaccaacagcgccggcaccagatacagcgcccccgccaacctgtacgtgagagagctgagagaggtgagaagagtgccccccagattcagcatcccccccaccaaccacgagatcatgcccggcggcagcgtgaacatcacctgcgtggccgtgggcagccccatgccctacgtgaagtggatgctgggcgccgaggacctgacccccgaggacgacatgcccatcggcagaaacgtgctggagctgaacgacgtgagacagagcgccaactacacctgcgtggccatgagcaccctgggcgtgatcgaggccatcgcccagatcaccgtgaaggccctgcccaagccccccggcacccccgtggtgaccgagagcaccgccaccagcatcaccctgacctgggacagcggcaaccccgagcccgtgagctactacatcatccagcacaagcccaagaacagcgaggagctgtacaaggagatcgacggcgtggccaccaccagatacagcgtggccggcctgagcccctacagcgactacgagttcagagtggtggccgtgaacaacatcggcagaggcccccccagcgagcccgtgctgacccagaccagcgagcaggcccccagcagcgcccccagagacgtgcaggccagaatgctgagcagcaccaccatcctggtgcagtggaaggagcccgaggagcccaacggccagatccagggctacagagtgtactacaccatggaccccacccagcacgtgaacaactggatgaagcacaacgtggccgacagccagatcaccaccatcggcaacctggtgccccagaagacctacagcgtgaaggtgctggccttcaccagcatcggcgacggccccctgagcagcgacatccaggtgatcacccagaccggcgtgcccggccagcccctgaacttcaaggccgagcccgagagcgagaccagcatcctgctgagctggaccccccccagaagcgacaccatcgccaactacgagctggtgtacaaggacggcgagcacggcgaggagcagagaatcaccatcgagcccggcaccagctacagactgcagggcctgaagcccaacagcctgtactacttcagactggccgccagaagcccccagggcctgggcgccagcaccgccgagatcagcgccagaaccatgcagagcatgttcgccaagaacttccacgtgaaggccgtgatgaagaccagcgtgctgctgagctgggagatccccgagaactacaacagcgccatgcccttcaagatcctgtacgacgacggcaagatggtggaggaggtggacggcagagccacccagaagctgatcgtgaacctgaagcccgagaagagctacagcttcgtgctgaccaacagaggcaacagcgccggcggcctgcagcacagagtgaccgccaagaccgcccccgacgtgctgagaaccaagcccgccttcatcggcaagaccaacctggacggcatgatcaccgtgcagctgcccgaggtgcccgccaacgagaacatcaagggctactacatcatcatcgtgcccctgaagaagagcagaggcaagttcatcaagccctgggagagccccgacgagatggagctggacgagctgctgaaggagatcagcagaaagagaagaagcatcagatacggcagagaggtggagctgaagccctacatcgccgcccacttcgacgtgctgcccaccgagttcaccctgggcgacgacaagcactacggcggcttcaccaacaagcagctgcagagcggccaggagtacgtgttcttcgtgctggccgtgatggagcacgccgagagcaagatgtacgccaccagcccctacagcgaccccgtggtgagcatggacctggacccccagcccatcaccgacgaggaggagggcctgatctgggtggtgggccccgtgctggccgtggtgttcatcatctgcatcgtgatcgccatcctgctgtacaagagcaagcccgacagaaagagagccgagagcgacagcagaaagagcagcatccccaacaacaaggagatccccagccaccaccccaccgaccccgtggagctgagaagactgaacttccagacccccggcatggccagccacccccccatccccatcctggagctggccgaccacatcgagagactgaaggccaacgacaacctgaagttcagccaggagtacgagagcatcgaccccggccagcagttcacctgggagcacagcaacctggaggtgaacaagcccaagaacagatacgccaacgtgatcgcctacgaccacagcagagtgctgctgagcgccatcgagggcatccccggcagcgactacgtgaacgccaactacatcgacggctacagaaagcagaacgcctacatcgccacccagggcagcctgcccgagaccttcggcgacttctggagaatgatctgggagcagagaagcgccaccgtggtgatgatgaccaagctggaggagagaagcagagtgaagtgcgaccagtactggcccagcagaggcaccgagacccacggcctggtgcaggtgaccctgctggacaccgtggagctggccacctactgcgtgagaaccttcgccctgtacaagaacggcagcagcgagaagagagaggtgagacagttccagttcaccgcctggcccgaccacggcgtgcccgagcaccccacccccttcctggccttcctgagaagagtgaagacctgcaacccccccgacgccggccccatggtggtgcactgcagcgccggcgtgggcagaaccggctgcttcatcgtgatcgacgccatgctggagagaatcaagcacgagaagaccgtggacatctacggccacgtgaccctgatgagagcccagagaaactacatggtgcagaccgaggaccagtacatcttcatccacgacgccctgctggaggccgtgacctgcggcaacaccgaggtgcccgccagaaacctgtacgcctacatccagaagctgacccagatcgagaccggcgagaacgtgaccggcatggagctggagttcaagagactggccagcagcaaggcccacaccagcagattcatcagcgccaacctgccctgcaacaagttcaagaacagactggtgaacatcatgccctacgagagcaccagagtgtgcctgcagcccatcagaggcgtggagggcagcgactacatcaacgccagcttcatcgacggctacagacagcagaaggcctacatcgccacccagggccccctggccgagaccaccgaggacttctggagaatgctgtgggagcacaacagcaccatcgtggtgatgctgaccaagctgagagagatgggcagagagaagtgccaccagtactggcccgccgagagaagcgccagataccagtacttcgtggtggaccccatggccgagtacaacatgccccagtacatcctgagagagttcaaggtgaccgacgccagagacggccagagcagaaccgtgagacagttccagttcaccgactggcccgagcagggcgtgcccaagagcggcgagggcttcatcgacttcatcggccaggtgcacaagaccaaggagcagttcggccaggacggccccatcagcgtgcactgcagcgccggcgtgggcagaaccggcgtgttcatcaccctgagcatcgtgctggagagaatgagatacgagggcgtggtggacatcttccagaccgtgaagatgctgagaacccagagacccgccatggtgcagaccgaggaccagtaccagttcagctacagagccgccctggagtacctgggcagcttcgaccactacgccacctag

SEQ ID NO: 95526 - DNA, 4509 bp, synthetic construct
  misc_feature 1..4509: note = Description of Artificial Sequence: Synthetic coding sequence
  source 1..4509: mol_type = other DNA
atggtgcacgtggccagactgctgctgctgctgctgaccttcttcctgagaaccgacgccgagaccccccccagattcaccagaacccccgtggaccagaccggcgtgagcggcggcgtggccagcttcatctgccaggccaccggcgaccccagacccaagatcgtgtggaacaagaagggcaagaaggtgagcaaccagagattcgaggtgatcgagttcgacgacggcagcggcagcgtgctgagaatccagcccctgagaacccccagagacgaggccatctacgagtgcgtggccagcaacaacgtgggcgagatcagcgtgagcaccagactgaccgtgctgagagaggaccagatccccagaggcttccccaccatcgacatgggcccccagctgaaggtggtggagagaaccagaaccgccaccatgctgtgcgccgccagcggcaaccccgaccccgagatcacctggttcaaggacttcctgcccgtggacaccagcaacaacaacggcagaatcaagcagctgagaagcggcagagtgttccacaccggcgccctgcagatcgagcagagcgaggagagcgaccagggcaagtacgagtgcgtggccaccaacagcgccggcaccagatacagcgcccccgccaacctgtacgtgagagtgaacagaaaggtgagaagagtgccccccagattcagcatcccccccaccaaccacgagatcatgcccggcggcagcgtgaacatcacctgcgtggccgtgggcagccccatgccctacgtgaagtggatgctgggcgccgaggacctgacccccgaggacgacatgcccatcggcagaaacgtgctggagctgaacgacgtgagacagagcgccaactacacctgcgtggccatgagcaccctgggcgtgatcgaggccatcgcccagatcaccgtgaaggccctgcccaagccccccggcacccccgtggtgaccgagagcaccgccaccagcatcaccctgacctgggacagcggcaaccccgagcccgtgagctactacatcatccagcacaagcccaagaacagcgaggagctgtacaaggagatcgacggcgtggccaccaccagatacagcgtggccggcctgagcccctacagcgactacgagttcagagtggtggccgtgaacaacatcggcagaggcccccccagcgagcccgtgctgacccagaccagcgagcaggcccccagcagcgcccccagagacgtgcaggccagaatgctgagcagcaccaccatcctggtgcagtggaaggagcccgaggagcccaacggccagatccagggctacagagtgtactacaccatggaccccacccagcacgtgaacaactggatgaagcacaacgtggccgacagccagatcaccaccatcggcaacctggtgccccagaagacctacagcgtgaaggtgctggccttcaccagcatcggcgacggccccctgagcagcgacatccaggtgatcacccagaccggcgtgcccggccagcccctgaacttcaaggccgagcccgagagcgagaccagcatcctgctgagctggaccccccccagaagcgacaccatcgccaactacgagctggtgtacaaggacggcgagcacggcgaggagcagagaatcaccatcgagcccggcaccagctacagactgcagggcctgaagcccaacagcctgtactacttcagactggccgccagaagcccccagggcctgggcgccagcaccgccgagatcagcgccagaaccatgcagagcatgttcgccaagaacttccacgtgaaggccgtgatgaagaccagcgtgctgctgagctgggagatccccgagaactacaacagcgccatgcccttcaagatcctgtacgacgacggcaagatggtggaggaggtggacggcagagccacccagaagctgatcgtgaacctgaagcccgagaagagctacagcttcgtgctgaccaacagaggcaacagcgccggcggcctgcagcacagagtgaccgccaagaccgcccccgacgtgctgagaaccaagcccgccttcatcggcaagaccaacctggacggcatgatcaccgtgcagctgcccgaggtgcccgccaacgagaacatcaagggctactacatcatcatcgtgcccctgaagaagagcagaggcaagttcatcaagccctgggagagccccgacgagatggagctggacgagctgctgaaggagatcagcagaaagagaagaagcatcagatacggcagagaggtggagctgaagccctacatcgccgcccacttcgacgtgctgcccaccgagttcaccctgggcgacgacaagcactacggcggcttcaccaacaagcagctgcagagcggccaggagtacgtgttcttcgtgctggccgtgatggagcacgccgagagcaagatgtacgccaccagcccctacagcgaccccgtggtgagcatggacctggacccccagcccatcaccgacgaggaggagggcctgatctgggtggtgggccccgtgctggccgtggtgttcatcatctgcatcgtgatcgccatcctgctgtacaagagaaagccctacagaaagagagccgagagcgacagcagaaagagcagcatccccaacaacaaggagatccccagccaccaccccaccgaccccgtggagctgagaagactgaacttccagacccccggcatggccagccacccccccatccccatcctggagctggccgaccacatcgagagactgaaggccaacgacaacctgaagttcagccaggagtacgagagcatcgaccccggccagcagttcacctgggagcacagcaacctggaggtgaacaagcccaagaacagatacgccaacgtgatcgcctacgaccacagcagagtgctgctgagcgccatcgagggcatccccggcagcgactacgtgaacgccaactacatcgacggctacagaaagcagaacgcctacatcgccacccagggcagcctgcccgagaccttcggcgacttctggagaatgatctgggagcagagaagcgccaccgtggtgatgatgaccaagctggaggagagaagcagagtgaagtgcgaccagtactggcccagcagaggcaccgagacccacggcctggtgcaggtgaccctgctggacaccgtggagctggccacctactgcgtgagaaccttcgccctgtacaagaacggcagcagcgagaagagagaggtgagacagttccagttcaccgcctggcccgaccacggcgtgcccgagcaccccacccccttcctggccttcctgagaagagtgaagacctgcaacccccccgacgccggccccatggtggtgcactgcagcgccggcgtgggcagaaccggctgcttcatcgtgatcgacgccatgctggagagaatcaagcacgagaagaccgtggacatctacggccacgtgaccctgatgagagcccagagaaactacatggtgcagaccgaggaccagtacatcttcatccacgacgccctgctggaggccgtgacctgcggcaacaccgaggtgcccgccagaaacctgtacgcctacatccagaagctgacccagatcgagaccggcgagaacgtgaccggcatggagctggagttcaagagactggccagcagcaaggcccacaccagcagattcatcagcgccaacctgccctgcaacaagttcaagaacagactggtgaacatcatgccctacgagagcaccagagtgtgcctgcagcccatcagaggcgtggagggcagcgactacatcaacgccagcttcatcgacggctacagacagcagaaggcctacatcgccacccagggccccctggccgagaccaccgaggacttctggagaatgctgtgggagcacaacagcaccatcgtggtgatgctgaccaagctgagagagatgggcagagagaagtgccaccagtactggcccgccgagagaagcgccagataccagtacttcgtggtggaccccatggccgagtacaacatgccccagtacatcctgagagagttcaaggtgaccgacgccagagacggccagagcagaaccgtgagacagttccagttcaccgactggcccgagcagggcgtgcccaagagcggcgagggcttcatcgacttcatcggccaggtgcacaagaccaaggagcagttcggccaggacggccccatcagcgtgcactgcagcgccggcgtgggcagaaccggcgtgttcatcaccctgagcatcgtgctggagagaatgagatacgagggcgtggtggacatcttccagaccgtgaagatgctgagaacccagagacccgccatggtgcagaccgaggaccagtaccagttcagctacagagccgccctggagtacctgggcagcttcgaccactacgccacctag

SEQ ID NO: 95527 - DNA, 5739 bp, synthetic construct; identical to SEQ ID NO: 95518
  misc_feature 1..5739: note = Description of Artificial Sequence: Synthetic coding sequence
  source 1..5739: mol_type = other DNA

SEQ ID NO: 95528 - DNA, 2103 bp, synthetic construct
  misc_feature 1..2103: note = Description of Artificial Sequence: Synthetic coding sequence
  source 1..2103: mol_type = other DNA
atggagcccctgtgccccctgctgctggtgggcttcagcctgcccctggccagagccctgagaggcaacgagaccaccgccgacagcaacgagaccaccaccaccagcggcccccccgaccccggcgccagccagcccctgctggcctggctgctgctgcccctgctgctgctgctgctggtgctgctgctggccgcctacttcttcagattcagaaagcagagaaaggccgtggtgagcaccagcgacaagaagatgcccaacggcatcctggaggagcaggagcagcagagagtgatgctgctgagcagaagccccagcggccccaagaagtacttccccatccccgtggagcacctggaggaggagatcagaatcagaagcgccgacgactgcaagcagttcagagaggagttcaacagcctgcccagcggccacatccagggcaccttcgagctggccaacaaggaggagaacagagagaagaacagataccccaacatcctgcccaacgaccacagcagagtgatcctgagccagctggacggcatcccctgcagcgactacatcaacgccagctacatcgacggctacaaggagaagaacaagttcatcgccgcccagggccccaagcaggagaccgtgaacgacttctggagaatggtgtgggagcagaagagcgccaccatcgtgatgctgaccaacctgaaggagagaaaggaggagaagtgccaccagtactggcccgaccagggctgctggacctacggcaacatcagagtgtgcgtggaggactgcgtggtgctggtggactacaccatcagaaagttctgcatccagccccagctgcccgacggctgcaaggcccccagactggtgagccagctgcacttcaccagctggcccgacttcggcgtgcccttcacccccatcggcatgctgaagttcctgaagaaggtgaagaccctgaaccccgtgcacgccggccccatcgtggtgcactgcagcgccggcgtgggcagaaccggcaccttcatcgtgatcgacgccatgatggccatgatgcacgccgagcagaaggtggacgtgttcgagttcgtgagcagaatcagaaaccagagaccccagatggtgcagaccgacatgcagtacaccttcatctaccaggccctgctggagtactacctgtacggcgacaccgagctggacgtgagcagcctggagaagcacctgcagaccatgcacggcaccaccacccacttcgacaagatcggcctggaggaggagttcagaaagctgaccaacgtgagaatcatgaaggagaacatgagaaccggcaacctgcccgccaacatgaagaaggccagagtgatccagatcatcccctacgacttcaacagagtgatcctgagcatgaagagaggccaggagtacaccgactacatcaacgccagcttcatcgacggctacagacagaaggactacttcatcgccacccagggccccctggcccacaccgtggaggacttctggagaatgatctgggagtggaagagccacaccatcgtgatgctgaccgaggtgcaggagagagagcaggacaagtgctaccagtactggcccaccgagggcagcgtgacccacggcgagatcaccatcgagatcaagaacgacaccctgagcgaggccatcagcatcagagacttcctggtgaccctgaaccagccccaggccagacaggaggagcaggtgagagtggtgagacagttccacttccacggctggcccgagatcggcatccccgccgagggcaagggcatgatcgacctgatcgccgccgtgcagaagcagcagcagcagaccggcaaccaccccatcaccgtgcactgcagcgccggcgccggcagaaccggcaccttcatcgccctgagcaacatcctggagagagtgaaggccgagggcctgctggacgtgttccaggccgtgaagagcctgagactgcagagaccccacatggtgcagaccctggagcagtacgagttctgctacaaggtggtgcaggacttcatcgacatcttcagcgactacgccaacttcaagtag

SEQ ID NO: 95529 - DNA, 1929 bp, synthetic construct
  misc_feature 1..1929: note = Description of Artificial Sequence: Synthetic coding sequence
  source 1..1929: mol_type = other DNA
atgagcaacagaagcagcttcagcagactgacctggttcagaaagcagagaaaggccgtggtgagcaccagcgacaagaagatgcccaacggcatcctggaggagcaggagcagcagagagtgatgctgctgagcagaagccccagcggccccaagaagtacttccccatccccgtggagcacctggaggaggagatcagaatcagaagcgccgacgactgcaagcagttcagagaggagttcaacagcctgcccagcggccacatccagggcaccttcgagctggccaacaaggaggagaacagagagaagaacagataccccaacatcctgcccaacgaccacagcagagtgatcctgagccagctggacggcatcccctgcagcgactacatcaacgccagctacatcgacggctacaaggagaagaacaagttcatcgccgcccagggccccaagcaggagaccgtgaacgacttctggagaatggtgtgggagcagaagagcgccaccatcgtgatgctgaccaacctgaaggagagaaaggaggagaagtgccaccagtactggcccgaccagggctgctggacctacggcaacatcagagtgtgcgtggaggactgcgtggtgctggtggactacaccatcagaaagttctgcatccagccccagctgcccgacggctgcaaggcccccagactggtgagccagctgcacttcaccagctggcccgacttcggcgtgcccttcacccccatcggcatgctgaagttcctgaagaaggtgaagaccctgaaccccgtgcacgccggccccatcgtggtgcactgcagcgccggcgtgggcagaaccggcaccttcatcgtgatcgacgccatgatggccatgatgcacgccgagcagaaggtggacgtgttcgagttcgtgagcagaatcagaaaccagagaccccagatggtgcagaccgacatgcagtacaccttcatctaccaggccctgctggagtactacctgtacggcgacaccgagctggacgtgagcagcctggagaagcacctgcagaccatgcacggcaccaccacccacttcgacaagatcggcctggaggaggagttcagaaagctgaccaacgtgagaatcatgaaggagaacatgagaaccggcaacctgcccgccaacatgaagaaggccagagtgatccagatcatcccctacgacttcaacagagtgatcctgagcatgaagagaggccaggagtacaccgactacatcaacgccagcttcatcgacggctacagacagaaggactacttcatcgccacccagggccccctggcccacaccgtggaggacttctggagaatgatctgggagtggaagagccacaccatcgtgatgctgaccgaggtgcaggagagagagcaggacaagtgctaccagtactggcccaccgagggcagcgtgacccacggcgagatcaccatcgagatcaagaacgacaccctgagcgaggccatcagcatcagagacttcctggtgaccctgaaccagccccaggccagacaggaggagcaggtgagagtggtgagacagttccacttccacggctggcccgagatcggcatccccgccgagggcaagggcatgatcgacctgatcgccgccgtgcagaagcagcagcagcagaccggcaaccaccccatcaccgtgcactgcagcgccggcgccggcagaaccggcaccttcatcgccctgagcaacatcctggagagagtgaaggccgagggcctgctggacgtgttccaggccgtgaagagcctgagactgcagagaccccacatggtgcagaccctggagcagtacgagttctgctacaaggtggtgcaggacttcatcgacatcttcagcgactacgccaacttcaagtag

SEQ ID NO: 95530 - DNA, 2103 bp, synthetic construct; identical to SEQ ID NO: 95528
  misc_feature 1..2103: note = Description of Artificial Sequence: Synthetic coding sequence
  source 1..2103: mol_type = other DNA

SEQ ID NO: 95531 - DNA, 438 bp, synthetic construct
  misc_feature 1..438: note = Description of Artificial Sequence: Synthetic coding sequence
  source 1..438: mol_type = other DNA
atggagcccctgtgccccctgctgctggtgggcttcagcctgcccctggccagagccctgagaggcaacgagaccaccgccgacagcaacgagaccaccaccaccagcggcccccccgaccccggcgccagccagcccctgctggcctggctgctgctgcccctgctgctgctgctgctggtgctgctgctggccgcctacttcttcagattcagaaagcagagaaaggccgtggtgagcaccagcgacaagaagatgcccaacggcatcctggaggagcaggagcagcagagagtgatgctgctgagcagaagccccagcggccccaagaagtacttccccatccccgtggagcacctggaggaggagatcagaatcagaagcgccgacgactgcaagcagttcagagaggagttcaacatgaccatcctgggctag

SEQ ID NO: 95532 - DNA, 2010 bp, synthetic construct
  misc_feature 1..2010: note = Description of Artificial Sequence: Synthetic coding sequence
  source 1..2010: mol_type = other DNA
atggtgagccagagactgcccagaaagaccagaggccccccctggagcccctgcgtgcacagctgctggtgggtgctggcctgcagaagccccggcctgagcggcgccaccagacccctgcccaccgccaccagacagcccagaccccaggccctgagaaccagagccccccccagcagatgctggcccggctgctactgcagatgctgcagcagcagcagctgcagcttcagcccccccaccagcagcggcagcggccccaagaagtacttccccatccccgtggagcacctggaggaggagatcagaatcagaagcgccgacgactgcaagcagttcagagaggagttcaacagcctgcccagcggccacatccagggcaccttcgagctggccaacaaggaggagaacagagagaagaacagataccccaacatcctgcccaacgaccacagcagagtgatcctgagccagctggacggcatcccctgcagcgactacatcaacgccagctacatcgacggctacaaggagaagaacaagttcatcgccgcccagggccccaagcaggagaccgtgaacgacttctggagaatggtgtgggagcagaagagcgccaccatcgtgatgctgaccaacctgaaggagagaaaggaggagaagtgccaccagtactggcccgaccagggctgctggacctacggcaacatcagagtgtgcgtggaggactgcgtggtgctggtggactacaccatcagaaagttctgcatccagccccagctgcccgacggctgcaaggcccccagactggtgagccagctgcacttcaccagctggcccgacttcggcgtgcccttcacccccatcggcatgctgaagttcctgaagaaggtgaagaccctgaaccccgtgcacgccggccccatcgtggtgcactgcagcgccggcgtgggcagaaccggcaccttcatcgtgatcgacgccatgatggccatgatgcacgccgagcagaaggtggacgtgttcgagttcgtgagcagaatcagaaaccagagaccccagatggtgcagaccgacatgcagtacaccttcatctaccaggccctgctggagtactacctgtacggcgacaccgagctggacgtgagcagcctggagaagcacctgcagaccatgcacggcaccaccacccacttcgacaagatcggcctggaggaggagttcagaaagctgaccaacgtgagaatcatgaaggagaacatgagaaccggcaacctgcccgccaacatgaagaaggccagagtgatccagatcatcccctacgacttcaacagagtgatcctgagcatgaagagaggccaggagtacaccgactacatcaacgccagcttcatcgacggctacagacagaaggactacttcatcgccacccagggccccctggcccacaccgtggaggacttctggagaatgatctgggagtggaagagccacaccatcgtgatgctgaccgaggtgcaggagagagagcaggacaagtgctaccagtactggcccaccgagggcagcgtgacccacggcgagatcaccatcgagatcaagaacgacaccctgagcgaggccatcagcatcagagacttcctggtgaccctgaaccagccccaggccagacaggaggagcaggtgagagtggtgagacagttccacttccacggctggcccgagatcggcatccccgccgagggcaagggcatgatcgacctgatcgccgccgtgcagaagcagcagcagcagaccggcaaccaccccatcaccgtgcactgcagaaacagcatgaacagcgccaccaagtggtacaagatcctgctgatctacttcctgatcatgctgatcagcaacgaggacagctgcctgaagatcttcttcaacctgatggagcagagaagaagccacttcccccaggacgccagactgagcccccccctgagcggcaccgccttcgccctgtag

SEQ ID NO: 95533 - DNA, 423 bp, synthetic construct
  misc_feature 1..423: note = Description of Artificial Sequence: Synthetic coding sequence
  source 1..423: mol_type = other DNA
atggagcccctgtgccccctgctgctggtgggcttcagcctgcccctggccagagccctgagaggcaacgagaccaccgccgacagcaacgagaccaccaccaccagcggcccccccgaccccggcgccagccagcccctgctggcctggctgctgctgcccctgctgctgctgctgctggtgctgctgctggccgcctacttcttcagattcagaaagcagagaaaggccgtggtgagcaccagcgacaagaagatgcccaacggcatcctggaggagcaggagcagcagagagtgatgctgctgagcagaagccccagcggccccaagaagtacttccccatccccgtggagcacctggaggaggagatcagaatcagaagcgccgacgactgcaagcagttcagagaggagttcaactag

SEQ ID NO: 95534 - DNA, 465 bp, synthetic construct
  misc_feature 1..465: note = Description of Artificial Sequence: Synthetic coding sequence
  source 1..465: mol_type = other DNA
atggagcccctgtgccccctgctgctggtgggcttcagcctgcccctggccagagccctgagaggcaacgagaccaccgccgacagcaacgagaccaccaccaccagcggcccccccgaccccggcgccagccagcccctgctggcctggctgctgctgcccctgctgctgctgctgctggtgctgctgctggccgcctacttcttcagattcagaaagcagagaaaggccgtggtgagcaccagcgacaagaagatgcccaacggcatcctggaggagcaggagcagcagagagtgatgctgctgagcagaagccccagcggccccaagaagtacttccccatccccgtggagcacctggaggaggagatcagaatcagaagcgccgacgactgcaagcagttcagagaggagttcaacagcctgcccagcggccacatccagggcaccttcgagctggcctag

SEQ ID NO: 95535 - DNA, 5724 bp, synthetic construct
  misc_feature 1..5724: note = Description of Artificial Sequence: Synthetic coding sequence
  source 1..5724: mol_type = other DNA
atggcccccgagcccgcccccggcagaaccatggtgcccctggtgcccgccctggtgatgctgggcctggtggccggcgcccacggcgacagcaagcccgtgttcatcaaggtgcccgaggaccagaccggcctgagcggcggcgtggccagcttcgtgtgccaggccaccggcgagcccaagcccagaatcacctggatgaagaagggcaagaaggtgagcagccagagattcgaggtgatcgagttcgacgacggcgccggcagcgtgctgagaatccagcccctgagagtgcagagagacgaggccatctacgagtgcaccgccaccaacagcctgggcgagatcaacaccagcgccaagctgagcgtgctggaggaggagcagctgccccccggcttccccagcatcgacatgggcccccagctgaaggtggtggagaaggccagaaccgccaccatgctgtgcgccgccggcggcaaccccgaccccgagatcagctggttcaaggacttcctgcccgtggaccccgccaccagcaacggcagaatcaagcagctgagaagcggcgccctgcagatcgagagcagcgaggagagcgaccagggcaagtacgagtgcgtggccaccaacagcgccggcaccagatacagcgcccccgccaacctgtacgtgagagtgagaagagtggcccccagattcagcatcccccccagcagccaggaggtgatgcccggcggcagcgtgaacctgacctgcgtggccgtgggcgcccccatgccctacgtgaagtggatgatgggcgccgaggagctgaccaaggaggacgagatgcccgtgggcagaaacgtgctggagctgagcaacgtggtgagaagcgccaactacacctgcgtggccatcagcagcctgggcatgatcgaggccaccgcccaggtgaccgtgaaggccctgcccaagccccccatcgacctggtggtgaccgagaccaccgccaccagcgtgaccctgacctgggacagcggcaacagcgagcccgtgacctactacggcatccagtacagagccgccggcaccgagggccccttccaggaggtggacggcgtggccaccaccagatacagcatcggcggcctgagccccttcagcgagtacgccttcagagtgctggccgtgaacagcatcggcagaggcccccccagcgaggccgtgagagccagaaccggcgagcaggcccccagcagcccccccagaagagtgcaggccagaatgctgagcgccagcaccatgctggtgcagtgggagccccccgaggagcccaacggcctggtgagaggctacagagtgtactacacccccgacagcagaagaccccccaacgcctggcacaagcacaacaccgacgccggcctgctgaccaccgtgggcagcctgctgcccggcatcacctacagcctgagagtgctggccttcaccgccgtgggcgacggcccccccagccccaccatccaggtgaagacccagcagggcgtgcccgcccagcccgccgacttccaggccgaggtggagagcgacaccagaatccagctgagctggctgctgcccccccaggagagaatcatcatgtacgagctggtgtactgggccgccgaggacgaggaccagcagcacaaggtgaccttcgaccccaccagcagctacaccctggaggacctgaagcccgacaccctgtacagattccagctggccgccagaagcgacatgggcgtgggcgtgttcacccccaccatcgaggccagaaccgcccagagcacccccagcgcccccccccagaaggtgatgtgcgtgagcatgggcagcaccaccgtgagagtgagctgggtgcccccccccgccgacagcagaaacggcgtgatcacccagtacagcgtggcctacgaggccgtggacggcgaggacagaggcagacacgtggtggacggcatcagcagagagcacagcagctgggacctggtgggcctggagaagtggaccgagtacagagtgtgggtgagagcccacaccgacgtgggccccggccccgagagcagccccgtgctggtgagaaccgacgaggacgtgcccagcggcccccccagaaaggtggaggtggagcccctgaacagcaccgccgtgcacgtgtactggaagctgcccgtgcccagcaagcagcacggccagatcagaggctaccaggtgacctacgtgagactggagaacggcgagcccagaggcctgcccatcatccaggacgtgatgctggccgaggcccagtggagacccgaggagagcgaggactacgagaccaccatcagcggcctgacccccgagaccacctacagcgtgaccgtggccgcctacaccaccaagggcgacggcgccagaagcaagcccaagatcgtgaccaccaccggcgccgtgcccggcagacccaccatgatgatcagcaccaccgccatgaacaccgccctgctgcagtggcacccccccaaggagctgcccggcgagctgctgggctacagactgcagtactgcagagccgacgaggccagacccaacaccatcgacttcggcaaggacgaccagcacttcaccgtgaccggcctgcacaagggcaccacctacatcttcagactggccgccaagaacagagccggcctgggcgaggagttcgagaaggagatcagaacccccgaggacctgcccagcggcttcccccagaacctgcacgtgaccggcctgaccaccagcaccaccgagctggcctgggacccccccgtgctggccgagagaaacggcagaatcatcagctacaccgtggtgttcagagacatcaacagccagcaggagctgcagaacatcaccaccgacaccagattcaccctgaccggcctgaagcccgacaccacctacgacatcaaggtgagagcctggaccagcaagggcagcggccccctgagccccagcatccagagcagaaccatgcccgtggagcaggtgttcgccaagaacttcagagtggccgccgccatgaagaccagcgtgctgctgagctgggaggtgcccgacagctacaagagcgccgtgcccttcaagatcctgtacaacggccagagcgtggaggtggacggccacagcatgagaaagctgatcgccgacctgcagcccaacaccgagtacagcttcgtgctgatgaacagaggcagcagcgccggcggcctgcagcacctggtgagcatcagaaccgcccccgacctgctgccccacaagcccctgcccgccagcgcctacatcgaggacggcagattcgacctgagcatgccccacgtgcaggaccccagcctggtgagatggttctacatcgtggtggtgcccatcgacagagtgggcggcagcatgctgacccccagatggagcacccccgaggagctggagctggacgagctgctggaggccatcgagcagggcggcgaggagcagagaagaagaagaagacaggccgagagactgaagccctacgtggccgcccagctggacgtgctgcccgagaccttcaccctgggcgacaagaagaactacagaggcttctacaacagacccctgagccccgacctgagctaccagtgcttcgtgctggccagcctgaaggagcccatggaccagaagagatacgccagcagcccctacagcgacgagatcgtggtgcaggtgacccccgcccagcagcaggaggagcccgagatgctgtgggtgaccggccccgtgctggccgtgatcctgatcatcctgatcgtgatcgccatcctgctgttcaagagaaagagaacccacagccccagcagcaaggacgagcagagcatcggcctgaaggacagcctgctggcccacagcagcgaccccgtggagatgagaagactgaactaccagacccccggcatgagagaccacccccccatccccatcaccgacctggccgacaacatcgagagactgaaggccaacgacggcctgaagttcagccaggagtacgagagcatcgaccccggccagcagttcacctgggagaacagcaacctggaggtgaacaagcccaagaacagatacgccaacgtgatcgcctacgaccacagcagagtgatcctgaccagcatcgacggcgtgcccggcagcgactacatcaacgccaactacatcgacggctacagaaagcagaacgcctacatcgccacccagggccccctgcccgagaccatgggcgacttctggagaatggtgtgggagcagagaaccgccaccgtggtgatgatgaccagactggaggagaagagcagagtgaagtgcgaccagtactggcccgccagaggcaccgagacctgcggcctgatccaggtgaccctgctggacaccgtggagctggccacctacaccgtgagaaccttcgccctgcacaagagcggcagcagcgagaagagagagctgagacagttccagttcatggcctggcccgaccacggcgtgcccgagtaccccacccccatcctggccttcctgagaagagtgaaggcctgcaaccccctggacgccggccccatggtggtgcactgcagcgccggcgtgggcagaaccggctgcttcatcgtgatcgacgccatgctggagagaatgaagcacgagaagaccgtggacatctacggccacgtgacctgcatgagaagccagagaaactacatggtgcagaccgaggaccagtacgtgttcatccacgaggccctgctggaggccgccacctgcggccacaccgaggtgcccgccagaaacctgtacgcccacatccagaagctgggccaggtgccccccggcgagagcgtgaccgccatggagctggagttcaagctgctggccagcagcaaggcccacaccagcagattcatcagcgccaacctgccctgcaacaagttcaagaacagactggtgaacatcatgccctacgagctgaccagagtgtgcctgcagcccatcagaggcgtggagggcagcgactacatcaacgccagcttcctggacggctacagacagcagaaggcctacatcgccacccagggccccctggccgagagcaccgaggacttctggagaatgctgtgggagcacaacagcaccatcatcgtgatgctgaccaagctgagagagatgggcagagagaagtgccaccagtactggcccgccgagagaagcgccagataccagtacttcgtggtggaccccatggccgagtacaacatgccccagtacatcctgagagagttcaaggtgaccgacgccagagacggccagagcagaaccatcagacagttccagttcaccgactggcccgagcagggcgtgcccaagaccggcgagggcttcatcgacttcatcggccaggtgcacaagaccaaggagcagttcggccaggacggccccatcaccgtgcactgcagcgccggcgtgggcagaaccggcgtgttcatcaccctgagcatcgtgctggagagaatgagatacgagggcgtggtggacatgttccagaccgtgaagaccctgagaacccagagacccgccatggtgcagaccgaggaccagtaccagctgtgctacagagccgccctggagtacctgggcagcttcgaccactacgccacctag

SEQ ID NO: 95536 - DNA, 5697 bp, synthetic construct
  misc_feature 1..5697: note = Description of Artificial Sequence: Synthetic coding sequence
  source 1..5697: mol_type = other DNA
atggcccccgagcccgcccccggcagaaccatggtgcccctggtgcccgccctggtgatgctgggcctggtggccggcgcccacggcgacagcaagcccgtgttcatcaaggtgcccgaggaccagaccggcctgagcggcggcgtggccagcttcgtgtgccaggccaccggcgagcccaagcccagaatcacctggatgaagaagggcaagaaggtgagcagccagagattcgaggtgatcgagttcgacgacggcgccggcagcgtgctgagaatccagcccctgagagtgcagagagacgaggccatctacgagtgcaccgccaccaacagcctgggcgagatcaacaccagcgccaagctgagcgtgctggaggaggagcagctgccccccggcttccccagcatcgacatgggcccccagctgaaggtggtggagaaggccagaaccgccaccatgctgtgcgccgccggcggcaaccccgaccccgagatcagctggttcaaggacttcctgcccgtggaccccgccaccagcaacggcagaatcaagcagctgagaagcggcgccctgcagatcgagagcagcgaggagagcgaccagggcaagtacgagtgcgtggccaccaacagcgccggcaccagatacagcgcccccgccaacctgtacgtgagagtgagaagagtggcccccagattcagcatcccccccagcagccaggaggtgatgcccggcggcagcgtgaacctgacctgcgtggccgtgggcgcccccatgccctacgtgaagtggatgatgggcgccgaggagctgaccaaggaggacgagatgcccgtgggcagaaacgtgctggagctgagcaacgtggtgagaagcgccaactacacctgcgtggccatcagcagcctgggcatgatcgaggccaccgcccaggtgaccgtgaaggccctgcccaagccccccatcgacctggtggtgaccgagaccaccgccaccagcgtgaccctgacctgggacagcggcaacagcgagcccgtgacctactacggcatccagtacagagccgccggcaccgagggccccttccaggaggtggacggcgtggccaccaccagatacagcatcggcggcctgagccccttcagcgagtacgccttcagagtgctggccgtgaacagcatcggcagaggcccccccagcgaggccgtgagagccagaaccggcgagcaggcccccagcagcccccccagaagagtgcaggccagaatgctgagcgccagcaccatgctggtgcagtgggagccccccgaggagcccaacggcctggtgagaggctacagagtgtactacacccccgacagcagaagaccccccaacgcctggcacaagcacaacaccgacgccggcctgctgaccaccgtgggcagcctgctgcccggcatcacctacagcctgagagtgctggccttcaccgccgtgggcgacggcccccccagccccaccatccaggtgaagacccagcagggcgtgcccgcccagcccgccgacttccaggccgaggtggagagcgacaccagaatccagctgagctggctgctgcccccccaggagagaatcatcatgtacgagctggtgtactgggccgccgaggacgaggaccagcagcacaaggtgaccttcgaccccaccagcagctacaccctggaggacctgaagcccgacaccctgtacagattccagctggccgccagaagcgacatgggcgtgggcgtgttcacccccaccatcgaggccagaaccgcccagagcacccccagcgcccccccccagaaggtgatgtgcgtgagcatgggcagcaccaccgtgagagtgagctgggtgcccccccccgccgacagcagaaacggcgtgatcacccagtacagcgtggcctacgaggccgtggacggcgaggacagaggcagacacgtggtggacggcatcagcagagagcacagcagctgggacctggtgggcctggagaagtggaccgagtacagagtgtgggtgagagcccacaccgacgtgggccccggccccgagagcagccccgtgctggtgagaaccgacgaggacgtgcccagcggcccccccagaaaggtggaggtggagcccctgaacagcaccgccgtgcacgtgtactggaagctgcccgtgcccagcaagcagcacggccagatcagaggctaccaggtgacctacgtgagactggagaacggcgagcccagaggcctgcccatcatccaggacgtgatgctggccgaggcccaggagaccaccatcagcggcctgacccccgagaccacctacagcgtgaccgtggccgcctacaccaccaagggcgacggcgccagaagcaagcccaagatcgtgaccaccaccggcgccgtgcccggcagacccaccatgatgatcagcaccaccgccatgaacaccgccctgctgcagtggcacccccccaaggagctgcccggcgagctgctgggctacagactgcagtactgcagagccgacgaggccagacccaacaccatcgacttcggcaaggacgaccagcacttcaccgtgaccggcctgcacaagggcaccacctacatcttcagactggccgccaagaacagagccggcctgggcgaggagttcgagaaggagatcagaacccccgaggacctgcccagcggcttcccccagaacctgcacgtgaccggcctgaccaccagcaccaccgagctggcctgggacccccccgtgctggccgagagaaacggcagaatcatcagctacaccgtggtgttcagagacatcaacagccagcaggagctgcagaacatcaccaccgacaccagattcaccctgaccggcctgaagcccgacaccacctacgacatcaaggtgagagcctggaccagcaagggcagcggccccctgagccccagcatccagagcagaaccatgcccgtggagcaggtgttcgccaagaacttcagagtggccgccgccatgaagaccagcgtgctgctgagctgggaggtgcccgacagctacaagagcgccgtgcccttcaagatcctgtacaacggccagagcgtggaggtggacggccacagcatgagaaagctgatcgccgacctgcagcccaacaccgagtacagcttcgtgctgatgaacagaggcagcagcgccggcggcctgcagcacctggtgagcatcagaaccgcccccgacctgctgccccacaagcccctgcccgccagcgcctacatcgaggacggcagattcgacctgagcatgccccacgtgcaggaccccagcctggtgagatggttctacatcgtggtggtgcccatcgacagagtgggcggcagcatgctgacccccagatggagcacccccgaggagctggagctggacgagctgctggaggccatcgagcagggcggcgaggagcagagaagaagaagaagacaggccgagagactgaagccctacgtggccgcccagctggacgtgctgcccgagaccttcaccctgggcgacaagaagaactacagaggcttctacaacagacccctgagccccgacctgagctaccagtgcttcgtgctggccagcctgaaggagcccatggaccagaagagatacgccagcagcccctacagcgacgagatcgtggtgcaggtgacccccgcccagcagcaggaggagcccgagatgctgtgggtgaccggccccgtgctggccgtgatcctgatcatcctgatcgtgatcgccatcctgctgttcaagagaaagagaacccacagccccagcagcaaggacgagcagagcatcggcctgaaggacagcctgctggcccacagcagcgaccccgtggagatgagaagactgaactaccagacccccggcatgagagaccacccccccatccccatcaccgacctggccgacaacatcgagagactgaaggccaacgacggcctgaagttcagccaggagtacgagagcatcgaccccggccagcagttcacctgggagaacagcaacctggaggtgaacaagcccaagaacagatacgccaacgtgatcgcctacgaccacagcagagtgatcctgaccagcatcgacggcgtgcccggcagcgactacatcaacgccaactacatcgacggctacagaaagcagaacgcctacatcgccacccagggccccctgcccgagaccatgggcgacttctggagaatggtgtgggagcagagaaccgccaccgtggtgatgatgaccagactggaggagaagagcagagtgaagtgcgaccagtactggcccgccagaggcaccgagacctgcggcctgatccaggtgaccctgctggacaccgtggagctggccacctacaccgtgagaaccttcgccctgcacaagagcggcagcagcgagaagagagagctgagacagttccagttcatggcctggcccgaccacggcgtgcccgagtaccccacccccatcctggccttcctgagaagagtgaaggcctgcaaccccctggacgccggccccatggtggtgcactgcagcgccggcgtgggcagaaccggctgcttcatcgtgatcgacgccatgctggagagaatgaagcacgagaagaccgtggacatctacggccacgtgacctgcatgagaagccagagaaactacatggtgcagaccgaggaccagtacgtgttcatccacgaggccctgctggaggccgccacctgcggccacaccgaggtgcccgccagaaacctgtacgcccacatccagaagctgggccaggtgccccccggcgagagcgtgaccgccatggagctggagttcaagctgctggccagcagcaaggcccacaccagcagattcatcagcgccaacctgccctgcaacaagttcaagaacagactggtgaacatcatgccctacgagctgaccagagtgtgcctgcagcccatcagaggcgtggagggcagcgactacatcaacgccagcttcctggacggctacagacagcagaaggcctacatcgccacccagggccccctggccgagagcaccgaggacttctggagaatgctgtgggagcacaacagcaccatcatcgtgatgctgaccaagctgagagagatgggcagagagaagtgccaccagtactggcccgccgagagaagcgccagataccagtacttcgtggtggaccccatggccgagtacaacatgccccagtacatcctgagagagttcaaggtgaccgacgccagagacggccagagcagaaccatcagacagttccagttcaccgactggcccgagcagggcgtgcccaagaccggcgagggcttcatcgacttcatcggccaggtgcacaagaccaaggagcagttcggccaggacggccccatcaccgtgcactgcagcgccggcgtgggcagaaccggcgtgttcatcaccctgagcatcgtgctggagagaatgagatacgagggcgtggtggacatgttccagaccgtgaagaccctgagaacccagagacccgccatggtgcagaccgaggaccagtaccagctgtgctacagagccgccctggagtacctgggcagcttcgaccactacgccacctag

SEQ ID NO: 95537 - DNA, 5724 bp, synthetic construct; identical to SEQ ID NO: 95535
  misc_feature 1..5724: note = Description of Artificial Sequence: Synthetic coding sequence
  source 1..5724: mol_type = other DNA

SEQ ID NO: 95538 - DNA, 3801 bp, synthetic construct
  misc_feature 1..3801: note = Description of Artificial Sequence: Synthetic coding sequence
  source 1..3801: mol_type = other DNA
atgtacgagctggtgtactgggccgccgaggacgaggaccagcagcacaaggtgaccttcgaccccaccagcagctacaccctggaggacctgaagcccgacaccctgtacagattccagctggccgccagaagcgacatgggcgtgggcgtgttcacccccaccatcgaggccagaaccgcccagagcatgcccagcggcccccccagaaaggtggaggtggagcccctgaacagcaccgccgtgcacgtgtactggaagctgcccgtgcccagcaagcagcacggccagatcagaggctaccaggtgacctacgtgagactggagaacggcgagcccagaggcctgcccatcatccaggacgtgatgctggccgaggcccaggagaccaccatcagcggcctgacccccgagaccacctacagcgtgaccgtggccgcctacaccaccaagggcgacggcgccagaagcaagcccaagatcgtgaccaccaccggcgccgtgcccggcagacccaccatgatgatcagcaccaccgccatgaacaccgccctgctgcagtggcacccccccaaggagctgcccggcgagctgctgggctacagactgcagtactgcagagccgacgaggccagacccaacaccatcgacttcggcaaggacgaccagcacttcaccgtgaccggcctgcacaagggcaccacctacatcttcagactggccgccaagaacagagccggcctgggcgaggagttcgagaaggagatcagaacccccgaggacctgcccagcggcttcccccagaacctgcacgtgaccggcctgaccaccagcaccaccgagctggcctgggacccccccgtgctggccgagagaaacggcagaatcatcagctacaccgtggtgttcagagacatcaacagccagcaggagctgcagaacatcaccaccgacaccagattcaccctgaccggcctgaagcccgacaccacctacgacatcaaggtgagagcctggaccagcaagggcagcggccccctgagccccagcatccagagcagaaccatgcccgtggagcaggtgttcgccaagaacttcagagtggccgccgccatgaagaccagcgtgctgctgagctgggaggtgcccgacagctacaagagcgccgtgcccttcaagatcctgtacaacggccagagcgtggaggtggacggccacagcatgagaaagctgatcgccgacctgcagcccaacaccgagtacagcttcgtgctgatgaacagaggcagcagcgccggcggcctgcagcacctggtgagcatcagaaccgcccccgacctgctgccccacaagcccctgcccgccagcgcctacatcgaggacggcagattcgacctgagcatgccccacgtgcaggaccccagcctggtgagatggttctacatcgtggtggtgcccatcgacagagtgggcggcagcatgctgacccccagatggagcacccccgaggagctggagctggacgagctgctggaggccatcgagcagggcggcgaggagcagagaagaagaagaagacaggccgagagactgaagccctacgtggccgcccagctggacgtgctgcccgagaccttcaccctgggcgacaagaagaactacagaggcttctacaacagacccctgagccccgacctgagctaccagtgcttcgtgctggccagcctgaaggagcccatggaccagaagagatacgccagcagcccctacagcgacgagatcgtggtgcaggtgacccccgcccagcagcaggaggagcccgagatgctgtgggtgaccggccccgtgctggccgtgatcctgatcatcctgatcgtgatcgccatcctgctgttcaagagaaagagaacccacagccccagcagcaaggacgagcagagcatcggcctgaaggacagcctgctggcccacagcagcgaccccgtggagatgagaagactgaactaccagacccccggcagcagcgtgcccagctgccccaacaccagcagcatgagagaccacccccccatccccatcaccgacctggccgacaacatcgagagactgaaggccaacgacggcctgaagttcagccaggagtacgagagcatcgaccccggccagcagttcacctgggagaacagcaacctggaggtgaacaagcccaagaacagatacgccaacgtgatcgcctacgaccacagcagagtgatcctgaccagcatcgacggcgtgcccggcagcgactacatcaacgccaactacatcgacggctacagaaagcagaacgcctacatcgccacccagggccccctgcccgagaccatgggcgacttctggagaatggtgtgggagcagagaaccgccaccgtggtgatgatgaccagactggaggagaagagcagagtgaagtgcgaccagtactggcccgccagaggcaccgagacctgcggcctgatccaggtgaccctgctggacaccgtggagctggccacctacaccgtgagaaccttcgccctgcacaagagcggcagcagcgagaagagagagctgagacagttccagttcatggcctggcccgaccacggcgtgcccgagtaccccacccccatcctggccttcctgagaagagtgaaggcctgcaaccccctggacgccggccccatggtggtgcactgcagcgccggcgtgggcagaaccggctgcttcatcgtgatcgacgccatgctggagagaatgaagcacgagaagaccgtggacatctacggccacgtgacctgcatgagaagccagagaaactacatggtgcagaccgaggaccagtacgtgttcatccacgaggccctgctggaggccgccacctgcggccacaccgaggtgcccgccagaaacctgtacgcccacatccagaagctgggccaggtgccccccggcgagagcgtgaccgccatggagctggagttcaagctgctggccagcagcaaggcccacaccagcagattcatcagcgccaacctgccctgcaacaagttcaagaacagactggtgaacatcatgccctacgagctgaccagagtgtgcctgcagcccatcagaggcgtggagggcagcgactacatcaacgccagcttcctggacggctacagacagcagaaggcctacatcgccacccagggccccctggccgagagcaccgaggacttctggagaatgctgtgggagcacaacagcaccatcatcgtgatgctgaccaagctgagagagatgggcagagagaagtgccaccagtactggcccgccgagagaagcgccagataccagtacttcgtggtggaccccatggccgagtacaacatgccccagtacatcctgagagagttcaaggtgaccgacgccagagacggccagagcagaaccatcagacagttccagttcaccgactggcccgagcagggcgtgcccaagaccggcgagggcttcatcgacttcatcggccaggtgcacaagaccaaggagcagttcggccaggacggccccatcaccgtgcactgcagcgccggcgtgggcagaaccggcgtgttcatcaccctgagcatcgtgctggagagaatgagatacgagggcgtggtggacatgttccagaccgtgaagaccctgagaacccagagacccgccatggtgcagaccgaggaccagtaccagctgtgctacagagccgccctggagtacctgggcagcttcgaccactacgccacctag

SEQ ID NO: 95539 - DNA, 5697 bp, synthetic construct; identical to SEQ ID NO: 95536
  misc_feature 1..5697: note = Description of Artificial Sequence: Synthetic coding sequence
  source 1..5697: mol_type = other DNA

SEQ ID NO: 95540 - DNA, 3609 bp, synthetic construct
  misc_feature 1..3609: note = Description of Artificial Sequence: Synthetic coding sequence
  source 1..3609: mol_type = other DNA
atgatgtgcgaggtgatgcccaccatcagcgaggccgagggcccccccggcggcggcggcggccacggcagcggcagccccagccagcccgacgccgacagccacttcgagcagctgatggtgagcatgctggaggagagagacagactgctggacaccctgagagagacccaggagaccctggccctgacccagggcaagctgcacgaggtgggccacgagagagacagcctgcagagacagctgaacaccgccctgccccaggagttcgccgccctgaccaaggagctgaacgtgtgcagagagcagctgctggagagagaggaggagatcgccgagctgaaggccgagagaaacaacaccagactgctgctggagcacctggagtgcctggtgagcagacacgagagaagcctgagaatgaccgtggtgaagagacaggcccagagccccgccggcgtgagcagcgaggtggaggtgctgaaggccctgaagagcctgttcgagcaccacaaggccctggacgagaaggtgagagagagactgagagtggccctggagagatgcagcctgctggaggaggagctgggcgccacccacaaggagctgatgatcctgaaggagcagaacaaccagaagaagaccctgaccgacggcgtgctggacatcaaccacgagcaggagaacacccccagcaccagcggcaagagaagcagcgacggcagcctgagccacgaggaggacctggccaaggtgatcgagctgcaggagatcatcagcaagcagagcagagagcagagccagatgaaggagagactggccagcctgagcagccacgtgaccgagctggaggaggacctggacaccgccagaaaggacctgatcaagagcgaggagatgaacaccaagctgcagagagacgtgagagaggccatggcccagaaggaggacatggaggagagaatcaccaccctggagaagagatacctggccgcccagagagaggccaccagcgtgcacgacctgaacgacaagctggagaacgagatcgccaacaaggacagcatgcacagacagaccgaggacaagaacagacagctgcaggagagactggagctggccgagcagaagctgcagcagaccctgagaaaggccgagaccctgcccgaggtggaggccgagctggcccagagagtggccgccctgagcaaggccgaggagagacacggcaacatcgaggagagactgagacagatggaggcccagctggaggagaagaaccaggagctgcagagagccagacagagagagaagatgaacgaggagcacaacaagagactgagcgacaccgtggacaagctgctgagcgagagcaacgagagactgcagctgcacctgaaggagagaatggccgccctggaggacaagaacagcctgctgagagaggtggagagcgccaagaagcagctggaggagacccagcacgacaaggaccagctggtgctgaacatcgaggccctgagagccgagctggaccacatgagactgagaggcgccagcctgcaccacggcagaccccacctgggcagcgtgcccgacttcagattccccatggccgacggccacaccgacagctacagcaccagcgccgtgctgagaagaccccagaagggcagactggccgccctgagagacgagcccagcaaggtgcagaccctgaacgagcaggactgggagagagcccagcaggccagcgtgctggccaacgtggcccaggccttcgagagcgacgccgacgtgagcgacggcgaggacgacagagacaccctgctgagcagcgtggacctgctgagccccagcggccaggccgacgcccacaccctggccatgatgctgcaggagcagctggacgccatcaacaaggagatcagactgatccaggaggagaaggagaacaccgagcagagagccgaggagatcgagagcagagtgggcagcggcagcctggacaacctgggcagattcagaagcatgagcagcatccccccctaccccgccagcagcctggccagcagcagcccccccggcagcggcagaagcacccccagaagaatcccccacagccccgccagagaggtggacagactgggcgtgatgaccctgctgccccccagcagagaggaggtgagagacgacaagaccaccatcaagtgcgagaccagcccccccagcagccccagagccctgagactggacagactgcacaagggcgccctgcacaccgtgagccacgaggacatcagagacatcagaaacagcaccggcagccaggacggccccgtgagcaaccccagcagcagcaacagcagccaggacagcctgcacaaggcccccaagaagaagggcatcaagagcagcatcggcagactgttcggcaagaaggagaagggcagacccggccagaccggcaaggaggccctgggccaggccggcgtgagcgagaccgacaacagcagccaggacgccctgggcctgagcaagctgggcggccaggccgagaagaacagaaagctgcagaagaagcacgagctgctggaggaggccagaagacagggcctgcccttcgcccagtgggacggccccaccgtggtggtgtggctggagctgtgggtgggcatgcccgcctggtacgtggccgcctgcagagccaacgtgaagagcggcgccatcatgagcgccctgagcgacaccgagatccagagagagatcggcatcagcaaccccctgcacagactgaagctgagactggccatccaggagatcatgagcctgaccagccccagcgccccccccaccagcagaaccaccctggcctacggcgacatgaaccacgagtggatcggcaacgagtggctgcccagcctgggcctgccccagtacagaagctacttcatggagtgcctggtggacgccagaatgctggaccacctgaccaagaaggacctgagaggccagctgaagatggtggacagcttccacagaaacagcttccagtgcggcatcatgtgcctgagaagactgaactacgacagaaaggagctggagagaaagagagaggagagccagagcgagatcaaggacgtgctggtgtggagcaacgacagagtgatcagatggatcctgagcatcggcctgaaggagtacgccaacaacctgatcgagagcggcgtgcacggcgccctgctggccctggacgagaccttcgacttcagcgccctggccctgctgctgcagatccccacccagaacacccaggccagagccgtgctggagagagagttcaacaacctgctggtgatgggcaccgacagaagattcgacgaggacgacgacaagagcttcagaagagcccccagctggagaaagaagttcagacccaaggacatcagaggcctggccgccggcagcgccgagaccctgcccgccaacttcagagtgaccagcagcatgagcagccccagcatgcagcccaagaagatgcagatggacggcaacgtgagcggcacccagagactggacagcgccaccgtgagaacctacagctgctag

SEQ ID NO: 95541 - DNA, 3558 bp, synthetic construct
  misc_feature 1..3558: note = Description of Artificial Sequence: Synthetic coding sequence
  source 1..3558: mol_type = other DNA
atgatgtgcgaggtgatgcccaccatcagcgaggccgagggcccccccggcggcggcggcggccacggcagcggcagccccagccagcccgacgccgacagccacttcgagcagctgatggtgagcatgctggaggagagagacagactgctggacaccctgagagagacccaggagaccctggccctgacccagggcaagctgcacgaggtgggccacgagagagacagcctgcagagacagctgaacaccgccctgccccaggagttcgccgccctgaccaaggagctgaacgtgtgcagagagcagctgctggagagagaggaggagatcgccgagctgaaggccgagagaaacaacaccagactgctgctggagcacctggagtgcctggtgagcagacacgagagaagcctgagaatgaccgtggtgaagagacaggcccagagccccgccggcgtgagcagcgaggtggaggtgctgaaggccctgaagagcctgttcgagcaccacaaggccctggacgagaaggtgagagagagactgagagtggccctggagagatgcagcctgctggaggaggagctgggcgccacccacaaggagctgatgatcctgaaggagcagaacaaccagaagaagaccctgaccgacggcgtgctggacatcaaccacgagcaggagaacacccccagcaccagcggcaagagaagcagcgacggcagcctgagccacgaggaggacctggccaaggtgatcgagctgcaggagatcatcagcaagcagagcagagagcagagccagatgaaggagagactggccagcctgagcagccacgtgaccgagctggaggaggacctggacaccgccagaaaggacctgatcaagagcgaggagatgaacaccaagctgcagagagacgtgagagaggccatggcccagaaggaggacatggaggagagaatcaccaccctggagaagagatacctggccgcccagagagaggccaccagcgtgcacgacctgaacgacaagctggagaacgagatcgccaacaaggacagcatgcacagacagaccgaggacaagaacagacagctgcaggagagactggagctggccgagcagaagctgcagcagaccctgagaaaggccgagaccctgcccgaggtggaggccgagctggcccagagagtggccgccctgagcaaggccgaggagagacacggcaacatcgaggagagactgagacagatggaggcccagctggaggagaagaaccaggagctgcagagagccagacagagagagaagatgaacgaggagcacaacaagagactgagcgacaccgtggacaagctgctgagcgagagcaacgagagactgcagctgcacctgaaggagagaatggccgccctggaggacaagaacagcctgctgagagaggtggagagcgccaagaagcagctggaggagacccagcacgacaaggaccagctggtgctgaacatcgaggccctgagagccgagctggaccacatgagactgagaggcgccagcctgcaccacggcagaccccacctgggcagcgtgcccgacttcagattccccatggccgacggccacaccgacagctacagcaccagcgccgtgctgagaagaccccagaagggcagactggccgccctgagagacgagcccagcaaggtgcagaccctgaacgagcaggactgggagagagcccagcaggccagcgtgctggccaacgtggcccaggccttcgagagcgacgccgacgtgagcgacggcgaggacgacagagacaccctgctgagcagcgtggacctgctgagccccagcggccaggccgacgcccacaccctggccatgatgctgcaggagcagctggacgccatcaacaaggagatcagactgatccaggaggagaaggagaacaccgagcagagagccgaggagatcgagagcagagtgggcagcggcagcctggacaacctgggcagattcagaagcatgagcagcatccccccctaccccgccagcagcctggccagcagcagcccccccggcagcggcagaagcacccccagaagaatcccccacagccccgccagagaggtggacagactgggcgtgatgaccctgctgccccccagcagagaggaggtgagagacgacaagaccaccatcaagtgcgagaccagcccccccagcagccccagagccctgagactggacagactgcacaagggcgccctgcacaccgtgagccacgaggacatcagagacatcagaaacagcaccggcagccaggacggccccgtgagcaaccccagcagcagcaacagcagccaggacagcctgcacaaggcccccaagaagaagggcatcaagagcagcatcggcagactgttcggcaagaaggagaagggcagacccggccagaccggcaaggaggccctgggccaggccggcgtgagcgagaccgacaacagcagccaggacgccctgggcctgagcaagctgggcggccaggccgagaagaacagaaagctgcagaagaagcacgagctgctggaggaggccagaagacagggcctgcccttcgcccagtgggacggccccaccgtggtggtgtggctggagctgtgggtgggcatgcccgcctggtacgtggccgcctgcagagccaacgtgaagagcggcgccatcatgagcgccctgagcgacaccgagatccagagagagatcggcatcagcaaccccctgcacagactgaagctgagactggccatccaggagatcatgagcctgaccagccccagcgccccccccaccagcagaaccaccctggcctacggcgacatgaaccacgagtggatcggcaacgagtggctgcccagcctgggcctgccccagtacagaagctacttcatggagtgcctggtggacgccagaatgctggaccacctgaccaagaaggacctgagaggccagctgaagatggtggacagcttccacagaaacagcttccagtgcggcatcatgtgcctgagaagactgaactacgacagaaaggagctggagagaaagagagaggagagccagagcgagatcaaggacgtgctggtgtggagcaacgacagagtgatcagatggatcctgagcatcggcctgaaggagtacgccaacaacctgatcgagagcggcgtgcacggcgccctgctggccctggacgagaccttcgacttcagcgccctggccctgctgctgcagatccccacccagaacacccaggccagagccgtgctggagagagagttcaacaacctgctggtgatgggcaccgacagaagattcgacgaggacgacgacaagagcttcagaagagcccccagctggagaaagaagttcagacccaaggacatcagaggcctggccgccggcagcgccgagaccctgcccgccaacttcagagtgaccagcagcatgagcagccccagcatgcagcccaagaagatgcagatggacggcatgtag

SEQ ID NO: 95542 - DNA, 477 bp, synthetic construct
  misc_feature 1..477: note = Description of Artificial Sequence: Synthetic coding sequence
  source 1..477: mol_type = other DNA
atgatgtgcgaggtgatgcccaccatcagcgaggccgagggcccccccggcggcggcggcggccacggcagcggcagccccagccagcccgacgccgacagccacttcgagcagctgatggtgagcatgctggaggagagagacagactgctggacaccctgagagagacccaggagaccctggccctgacccagggcaagctgcacgaggtgggccacgagagagacagcctgcagagacagctgaacaccgccctgccccaggagttcgccgccctgaccaaggagctgaacgtgtgcagagagcagctgctggagagagaggaggagatcgccgagctgaaggccgagagaaacaacaccagactgctgctggagcacctggagtgcctggtgagcagacacgagagaagcctgagaatgaccgtggtgaagagacaggcccagagccccgccggcgtgagcagcgaggtgtag

SEQ ID NO: 95543 - DNA, 300 bp, synthetic construct
  misc_feature 1..300: note = Description of Artificial Sequence: Synthetic coding sequence
  source 1..300: mol_type = other DNA
atgatgtgcgaggtgatgcccaccatcagcgaggccgagggcccccccggcggcggcggcggccacggcagcggcagccccagccagcccgacgccgacagccacttcgagcagctgatggtgagcatgctggaggagagagacagactgctggacaccctgagagagacccaggagaccctggccctgacccagggcaagctgcacgaggtgggccacgagagagacagcctgcagagacagctgaacaccgccctgccccaggagttcgccgccctgaccaaggagctgaacgtgtag

SEQ ID NO: 95544 - DNA, 2100 bp, synthetic construct
  misc_feature 1..2100: note = Description of Artificial Sequence: Synthetic coding sequence
  source 1..2100: mol_type = other DNA
atgagactgagaggcgccagcctgcaccacggcagaccccacctgggcagcgtgcccgacttcagattccccatggccgacggccacaccgacagctacagcaccagcgccgtgctgagaagaccccagaagggcagactggccgccctgagagacgagcccagcaaggtgcagaccctgaacgagcaggactgggagagagcccagcaggccagcgtgctggccaacgtggcccaggccttcgagagcgacgccgacgtgagcgacggcgaggacgacagagacaccctgctgagcagcgtggacctgctgagccccagcggccaggccgacgcccacaccctggccatgatgctgcaggagcagctggacgccatcaacaaggagatcagactgatccaggaggagaaggagaacaccgagcagagagccgaggagatcgagagcagagtgggcagcggcagcctggacaacctgggcagattcagaagcatgagcagcatccccccctaccccgccagcagcctggccagcagcagcccccccggcagcggcagaagcacccccagaagaatcccccacagccccgccagagaggtggacagactgggcgtgatgaccctgcccagcgacctgagaaagcacagaagaaagctgccccccagcagagaggaggtgagagacgacaagaccaccatcaagtgcgagaccagcccccccagcagccccagagccctgagactggacagactgcacaagggcgccctgcacaccgtgagccacgaggacatcagagacatcagaaacagcaccggcagccaggacggccccgtgagcaaccccagcagcagcaacagcagccaggacagcctgcacaaggcccccaagaagaagggcatcaagagcagcatcggcagactgttcggcaagaaggagaagggcagacccggccagaccggcaaggaggccctgggccaggccggcgtgagcgagaccgacaacagcagccaggacgccctgggcctgagcaagctgggcggccaggccgagaagaacagaaagctgcagaagaagcacgagctgctggaggaggccagaagacagggcctgcccttcgcccagtgggacggccccaccgtggtggtgtggctggagctgtgggtgggcatgcccgcctggtacgtggccgcctgcagagccaacgtgaagagcggcgccatcatgagcgccctgagcgacaccgagatccagagagagatcggcatcagcaaccccctgcacagactgaagctgagactggccatccaggagatcatgagcctgaccagccccagcgccccccccaccagcagaaccaccctggcctacggcgacatgaaccacgagtggatcggcaacgagtggctgcccagcctgggcctgccccagtacagaagctacttcatggagtgcctggtggacgccagaatgctggaccacctgaccaagaaggacctgagaggccagctgaagatggtggacagcttccacagaaacagcttccagtgcggcatcatgtgcctgagaagactgaactacgacagaaaggagctggagagaaagagagaggagagccagagcgagatcaaggacgtgctggtgtggagcaacgacagagtgatcagatggatcctgagcatcggcctgaaggagtacgccaacaacctgatcgagagcggcgtgcacggcgccctgctggccctggacgagaccttcgacttcagcgccctggccctgctgctgcagatccccacccagaacacccaggccagagccgtgctggagagagagttcaacaacctgctggtgatgggcaccgacagaagattcgacgaggacgacgacaagagcttcagaagagcccccagctggagaaagaagttcagacccaaggacatcagaggcctggccgccggcagcgccgagaccctgcccgccaacttcagagtgaccagcagcatgagcagccccagcatgcagcccaagaagatgcagatggacggcaacgtgagcggcacccagagactggacagcgccaccgtgagaacctacagctgctag

SEQ ID NO: 95545 - DNA, 3585 bp, synthetic construct
  misc_feature 1..3585: note = Description of Artificial Sequence: Synthetic coding sequence
  source 1..3585: mol_type = other DNA
atgatgtgcgaggtgatgcccaccatcagcgaggacggcagaagaggcagcgccctgggccccgacgaggccggcggcgagctggagagactgatggtgaccatgctgaccgagagagagagactgctggagaccctgagagaggcccaggacggcctggccaccgcccagctgagactgagagagctgggccacgagaaggacagcctgcagagacagctgagcatcgccctgccccaggagttcgccgccctgaccaaggagctgaacctgtgcagagagcagctgctggagagagaggaggagatcgccgagctgaaggccgagagaaacaacaccagactgctgctggagcacctggagtgcctggtgagcagacacgagagaagcctgagaatgaccgtggtgaagagacaggcccagagccccggcggcgtgagcagcgaggtggaggtgctgaaggccctgaagagcctgttcgagcaccacaaggccctggacgagaaggtgagagagagactgagaatggccctggagagagtggccgtgctggaggaggagctggagctgagcaaccaggagaccctgaacctgagagagcagctgagcagaagaagaagcggcctggaggagcccggcaaggacggcgacggccagaccctggccaacggcctgggccccggcggcgacagcaacagaagaaccgccgagctggaggaggccctggagagacagagagccgaggtgtgccagctgagagagagactggccgtgctgtgcagacagatgagccagctggaggaggagctgggcaccgcccacagagagctgggcaaggccgaggaggccaacagcaagctgcagagagacctgaaggaggccctggcccagagagaggacatggaggagagaatcaccaccctggagaagagatacctgagcgcccagagagaggccaccagcctgcacgacgccaacgacaagctggagaacgagctggccagcaaggagagcctgtacagacagagcgaggagaagagcagacagctggccgagtggctggacgacgccaagcagaagctgcagcagaccctgcagaaggccgagaccctgcccgagatcgaggcccagctggcccagagagtggccgccctgaacaaggccgaggagagacacggcaacttcgaggagagactgagacagctggaggcccagctggaggagaagaaccaggagctgcagagagccagacagagagagaagatgaacgacgaccacaacaagagactgagcgagaccgtggacaagctgctgagcgagagcaacgagagactgcagctgcacctgaaggagagaatgggcgccctggaggagaagaacagcctgagcgaggagatcgccaacatgaagaagctgcaggacgagctgctgctgaacaaggagcagctgctggccgagatggagagaatgcagatggagatcgaccagctgagaggcagaccccccagcagctacagcagaagcctgcccggcagcgccctggagctgagatacagccaggcccccaccctgcccagcggcgcccacctggacccctacgtggccggcagcggcagagccggcaagagaggcagatggagcggcgtgaaggaggagcccagcaaggactgggagagaagcgcccccgccggcagcatccccccccccttccccggcgagctggacggcagcgacgaggaggaggccgagggcatgttcggcgccgagctgctgagccccagcggccaggccgacgtgcagaccctggccatcatgctgcaggagcagctggaggccatcaacaaggagatcaagctgatccaggaggagaaggagaccaccgagcagagagccgaggagctggagagcagagtgagcagcagcggcctggacagcctgggcagatacagaagcagctgcagcctgccccccagcctgaccaccagcaccctggccagccccagcccccccagcagcggccacagcacccccagactggccccccccagccccgccagagagggcaccgacaaggccaaccacgtgcccaaggaggaggccggcgcccccagaggcgagggccccgccatccccggcgacacccccccccccacccccagaagcgccagactggagagaatgacccaggccctggccctgcaggccggcagcctggaggacggcggcccccccagaggcagcgagggcacccccgacagcctgcacaaggcccccaagaagaagagcatcaagagcagcatcggcagactgttcggcaagaaggagaagggcagaatgggcccccccggcagagacagcagcagcctggccggcacccccagcgacgagaccctggccaccgaccccctgggcctggccaagctgaccggccccggcgacaaggacagaagaaacaagagaaagcacgagctgctggaggaggcctgcagacagggcctgcccttcgccgcctgggacggccccaccgtggtgagctggctggagctgtgggtgggcatgcccgcctggtacgtggccgcctgcagagccaacgtgaagagcggcgccatcatggccaacctgagcgacaccgagatccagagagagatcggcatcagcaaccccctgcacagactgaagctgagactggccatccaggagatggtgagcctgaccagccccagcgcccccgccagcagcagaaccagcaccggcaacgtgtggatgacccacgaggagatggagagcctgaccgccaccaccaagcccgagaccaaggagatcagctgggagcagatcctggcctacggcgacatgaaccacgagtgggtgggcaacgactggctgcccagcctgggcctgccccagtacagaagctacttcatggagagcctggtggacgccagaatgctggaccacctgaacaagaaggagctgagaggccagctgaagatggtggacagcttccacagagtgagcctgcactacggcatcatgtgcctgaagagactgaactacgacagaaaggacctggagagaagaagagaggagagccagacccagatcagagacgtgatggtgtggagcaacgagagagtgatgggctgggtgagcggcctgggcctgaaggagttcgccaccaacctgaccgagagcggcgtgcacggcgccctgctggccctggacgagaccttcgactacagcgacctggccctgctgctgcagatccccacccagaacgcccaggccagacagctgctggagaaggagttcagcaacctgatcagcctgggcaccgacagaagactggacgaggacagcgccaagagcttcagcagaagccccagctggagaaagatgttcagagagaaggacctgagaggcgtgacccccgacagcgccgagatgctgccccccaacttcagaagcgccgccgccggcgccctgggcagccccggcctgcccctgagaaagctgcagcccgagggccagaccagcggcagcagcagagccgacggcgtgagcgtgagaacctacagctgctag

SEQ ID NO: 95546 - DNA, 1731 bp, synthetic construct
  misc_feature 1..1731: note = Description of Artificial Sequence: Synthetic coding sequence
  source 1..1731: mol_type = other DNA
atgagcggccaggagttcgccgccctgaccaaggagctgaacctgtgcagagagcagctgctggagagagaggaggagatcgccgagctgaaggccgagagaaacaacaccagactgctgctggagcacctggagtgcctggtgagcagacacgagagaagcctgagaatgaccgtggtgaagagacaggcccagagccccggcggcgtgagcagcgaggtggaggtgctgaaggccctgaagagcctgttcgagcaccacaaggccctggacgagaaggtgagagagagactgagaatggccctggagagagtggccgtgctggaggaggagctggagctgagcaaccaggagaccctgaacctgagagagcagctgagcagaagaagaagcggcctggaggagcccggcaaggacggcgacggccagaccctggccaacggcctgggccccggcggcgacagcaacagaagaaccgccgagctggaggaggccctggagagacagagagccgaggtgtgccagctgagagagagactggccgtgctgtgcagacagatgagccagctggaggaggagctgggcaccgcccacagagagctgggcaaggccgaggaggccaacagcaagctgcagagagacctgaaggaggccctggcccagagagaggacatggaggagagaatcaccaccctggagaagagatacctgagcgcccagagagaggccaccagcctgcacgacgccaacgacaagctggagaacgagctggccagcaaggagagcctgtacagacagagcgaggagaagagcagacagctggccgagtggctggacgacgccaagcagaagctgcagcagaccctgcagaaggccgagaccctgcccgagatcgaggcccagctggcccagagagtggccgccctgaacaaggccgaggagagacacggcaacttcgaggagagactgagacagctggaggcccagctggaggagaagaaccaggagctgcagagagccagacagagagagaagatgaacgacgaccacaacaagagactgagcgagaccgtggacaagctgctgagcgagagcaacgagagactgcagctgcacctgaaggagagaatgggcgccctggaggagaagaacagcctgagcgaggagatcgccaacatgaagaagctgcaggacgagctgctgctgaacaaggagcagctgctggccgagatggagagaatgcagatggagatcgaccagctgagaggcagaccccccagcagctacagcagaagcctgcccggcagcgccctggagctgagatacagccaggcccccaccctgcccagcggcgcccacctggacccctacgtggccggcagcggcagagccggcaagagaggcagatggagcggcgtgaaggaggagcccagcaaggactgggagagaagcgcccccgccggcagcatccccccccccttccccggcgagctggacggcagcgacgaggaggaggccgagggcatgttcggcgccgagctgctgagccccagcggccaggccgacgtgcagaccctggccatcatgctgcaggagcagctggaggccatcaacaaggagatcaagatcatgagcctgagaagaaagctggagctgcacgagggcagaggcagacccagccaggagaccccccaccaccccctgcccgccctgcccgtgctgagagagtag

SEQ ID NO: 95547 - DNA, 4338 bp, synthetic construct
  misc_feature 1..4338: note = Description of Artificial Sequence: Synthetic coding sequence
  source 1..4338: mol_type = other DNA
atgagaagactgctggagccctgctggtggatcctgttcctgaagatcaccagcagcgtgctgcactacgtggtgtgcttccccgccctgaccgagggctacgtgggcgccctgcacgagaacagacacggcagcgccgtgcagatcagaagaagaaaggccagcggcgacccctactgggcctacagcggcgcctacggccccgagcactgggtgaccagcagcgtgagctgcggcggcagacaccagagccccatcgacatcctggaccagtacgccagagtgggcgaggagtaccaggagctgcagctggacggcttcgacaacgagagcagcaacaagacctggatgaagaacaccggcaagaccgtggccatcctgctgaaggacgactacttcgtgagcggcgccggcctgcccggcagattcaaggccgagaaggtggagttccactggggccacagcaacggcagcgccggcagcgagcacagcatcaacggcagaagattccccgtggagatgcagatcttcttctacaaccccgacgacttcgacagcttccagaccgccatcagcgagaacagaatcatcggcgccatggccatcttcttccaggtgagccccagagacaacagcgccctggaccccatcatccacggcctgaagggcgtggtgcaccacgagaaggagaccttcctggaccccttcgtgctgagagacctgctgcccgccagcctgggcagctactacagatacaccggcagcctgaccacccccccctgcagcgagatcgtggagtggatcgtgttcagaagacccgtgcccatcagctaccaccagctggaggccttctacagcatcttcaccaccgagcagcaggaccacgtgaagagcgtggagtacctgagaaacaacttcagaccccagcagagactgcacgacagagtggtgagcaagagcgccgtgagagacagctggaaccacgacatgaccgacttcctggagaaccccctgggcaccgaggccagcaaggtgtgcagcagcccccccatccacatgaaggtgcagcccctgaaccagaccgccctgcaggtgagctggagccagcccgagaccatctaccacccccccatcatgaactacatgatcagctacagctggaccaagaacgaggacgagaaggagaagaccttcaccaaggacagcgacaaggacctgaaggccaccatcagccacgtgagccccgacagcctgtacctgttcagagtgcaggccgtgtgcagaaacgacatgagaagcgacttcagccagaccatgctgttccaggccaacaccaccagaatcttccagggcaccagaatcgtgaagaccggcgtgcccaccgccagccccgccagcagcgccgacatggcccccatcagcagcggcagcagcacctggaccagcagcggcatccccttcagcttcgtgagcatggccaccggcatgggccccagcagcagcggcagccaggccaccgtggccagcgtggtgaccagcaccctgctggccggcctgggcttcggcggcggcggcatcagcagcttccccagcaccgtgtggcccaccagactgcccaccgccgccagcgccagcaagcaggccgccagacccgtgctggccaccaccgaggccctggccagccccggccccgacggcgacagcagccccaccaaggacggcgagggcaccgaggagggcgagaaggacgagaagagcgagagcgaggacggcgagagagagcacgaggaggacggcgagaaggacagcgagaagaaggagaagagcggcgtgacccacgccgccgaggagagaaaccagaccgagcccagccccacccccagcagccccaacagaaccgccgagggcggccaccagaccatccccggccacgagcaggaccacaccgccgtgcccaccgaccagaccggcggcagaagagacgccggccccggcctggaccccgacatggtgaccagcacccaggtgccccccaccgccaccgaggagcagtacgccggcagcgaccccaagagacccgagatgcccagcaagaagcccatgagcagaggcgacagattcagcgaggacagcagattcatcaccgtgaaccccgccgagaagaacaccagcggcatgatcagcagacccgcccccggcagaatggagtggatcatccccctgatcgtggtgagcgccctgaccttcgtgtgcctgatcctgctgatcgccgtgctggtgtactggagaggctgcaacaagatcaagagcaagggcttccccagaagattcagagaggtgcccagcagcggcgagagaggcgagaagggcagcagaaagtgcttccagaccgcccacttctacgtggaggacagcagcagccccagagtggtgcccaacgagagcatccccatcatccccatccccgacgacatggaggccatccccgtgaagcagttcgtgaagcacatcggcgagctgtacagcaacaaccagcacggcttcagcgaggacttcgaggaggtgcagagatgcaccgccgacatgaacatcaccgccgagcacagcaaccaccccgagaacaagcacaagaacagatacatcaacatcctggcctacgaccacagcagagtgaagctgagacccctgcccggcaaggacagcaagcacagcgactacatcaacgccaactacgtggacggctacaacaaggccaaggcctacatcgccacccagggccccctgaagagcaccttcgaggacttctggagaatgatctgggagcagaacaccggcatcatcgtgatgatcaccaacctggtggagaagggcagaagaaagtgcgaccagtactggcccaccgagaacagcgaggagtacggcaacatcatcgtgaccctgaagagcaccaagatccacgcctgctacaccgtgagaagattcagcatcagaaacaccaaggtgaagaagggccagaagggcaaccccaagggcagacagaacgagagagtggtgatccagtaccactacacccagtggcccgacatgggcgtgcccgagtacgccctgcccgtgctgaccttcgtgagaagaagcagcgccgccagaatgcccgagaccggccccgtgctggtgcactgcagcgccggcgtgggcagaaccggcacctacatcgtgatcgacagcatgctgcagcagatcaaggacaagagcaccgtgaacgtgctgggcttcctgaagcacatcagaacccagagaaactacctggtgcagaccgaggagcagtacatcttcatccacgacgccctgctggaggccatcctgggcaaggagaccgaggtgagcagcaaccagctgcacagctacgtgaacagcatcctgatccccggcgtgggcggcaagaccagactggagaagcagttcaagctggtgacccagtgcaacgccaagtacgtggagtgcttcagcgcccagaaggagtgcaacaaggagaagaacagaaacagcagcgtggtgcccagcgagagagccagagtgggcctggcccccctgcccggcatgaagggcaccgactacatcaacgccagctacatcatgggctactacagaagcaacgagttcatcatcacccagcaccccctgccccacaccaccaaggacttctggagaatgatctgggaccacaacgcccagatcatcgtgatgctgcccgacaaccagagcctggccgaggacgagttcgtgtactggcccagcagagaggagagcatgaactgcgaggccttcaccgtgaccctgatcagcaaggacagactgtgcctgagcaacgaggagcagatcatcatccacgacttcatcctggaggccacccaggacgactacgtgctggaggtgagacacttccagtgccccaagtggcccaaccccgacgcccccatcagcagcaccttcgagctgatcaacgtgatcaaggaggaggccctgaccagagacggccccaccatcgtgcacgacgagtacggcgccgtgagcgccggcatgctgtgcgccctgaccaccctgagccagcagctggagaacgagaacgccgtggacgtgttccaggtggccaagatgatcaacctgatgagacccggcgtgttcaccgacatcgagcagtaccagttcatctacaaggccatgctgagcctggtgagcaccaaggagaacggcaacggccccatgaccgtggacaagaacggcgccgtgctgatcgccgacgagagcgaccccgccgagagcatggagagcctggtgtag

SEQ ID NO: 95548 - DNA, 309 bp, synthetic construct
  misc_feature 1..309: note = Description of Artificial Sequence: Synthetic coding sequence
  source 1..309: mol_type = other DNA
atgagaagactgctggagccctgctggtggatcctgttcctgaagatcaccagcagcgtgctgcactacgtggtgtgcttccccgccctgaccgagggctacgtgggcgccctgcacgagaacagacacggcagcgccgtgcagatcagaagaagaaaggccagcggcgacccctactgggcctacagcggcaagagcagctgcagcaacggcgaccacaccggccagctgaccagccacagcacccacctgaaggcccacttcgagagcctgctgtgcctgagcagcgtgtgcagcaacctgagctag

SEQ ID NO: 95549 - DNA, 2814 bp, synthetic construct
  misc_feature 1..2814: note = Description of Artificial Sequence: Synthetic coding sequence
  source 1..2814: mol_type = other DNA
atggccggcgccggcggcggcctgggcgtgtggggcaacctggtgctgctgggcctgtgcagctggaccggcgccagagcccccgcccccaaccccggcagaaacctgaccgtggagacccagaccaccagcagcatcagcctgagctgggaggtgcccgacggcctggacagccagaacagcaactactgggtgcagtgcaccggcgacggcggcaccaccgagaccagaaacaccaccgccaccaacgtgaccgtggacggcctgggccccggcagcctgtacacctgcagcgtgtgggtggagaaggacggcgtgaacagcagcgtgggcaccgtgaccaccgccaccgcccccaaccccgtgagaaacctgaccgtggaggcccagaccaacagcagcatcgccctgacctgggaggtgcccgacggccccgacccccagaacagcacctacggcgtggagtacaccggcgacggcggcagagccggcaccagaagcaccgcccacaccaacatcaccgtggacagactggagcccggctgcctgtacgtgttcagcgtgtgggtgggcaagaacggcatcaacagcagcagagagaccagaaacgccaccaccgcccccaaccccgtgagaaacctgcacatggagacccagaccaacagcagcatcgccctgtgctgggaggtgcccgacggcccctacccccaggactacacctactgggtggagtacaccggcgacggcggcggcaccgagaccagaaacaccaccaacaccagcgtgaccgccgagagactggagcccggcaccctgtacaccttcagcgtgtgggccgagaagaacggcgccagaggcagcagacagaacgtgagcatcagcaccgtgcccaacgccgtgaccagcctgagcaagcaggactggaccaacagcaccatcgccctgagatggaccgccccccagggccccggccagagcagctacagctactgggtgagctgggtgagagagggcatgaccgaccccagaacccagagcaccagcggcaccgacatcaccctgaaggagctggaggccggcagcctgtaccacctgaccgtgtgggccgagagaaacgaggtgagaggctacaacagcaccctgaccgccgccaccgcccccaacgaggtgaccgacctgcagaacgagacccagaccaagaacagcgtgatgctgtggtggaaggcccccggcgacccccacagccagctgtacgtgtactgggtgcagtgggccagcaagggccaccccagaagaggccaggacccccaggccaactgggtgaaccagaccagcagaaccaacgagacctggtacaaggtggaggccctggagcccggcaccctgtacaacttcaccgtgtgggccgagagaaacgacgtggccagcagcacccagagcctgtgcgccagcacctaccccgacaccgtgaccatcaccagctgcgtgagcaccagcgccggctacggcgtgaacctgatctggagctgcccccagggcggctacgaggccttcgagctggaggtgggcggccagagaggcagccaggacagaagcagctgcggcgaggccgtgagcgtgctgggcctgggccccgccagaagctaccccgccaccatcaccaccatctgggacggcatgaaggtggtgagccacagcgtggtgtgccacaccgagagcgccggcgtgatcgccggcgccttcgtgggcatcctgctgttcctgatcctggtgggcctgctgatcttcttcctgaagagaagaaacaagaagaagcagcagaagcccgagctgagagacctggtgttcagcagccccggcgacatccccgccgaggacttcgccgaccacgtgagaaagaacgagagagacagcaactgcggcttcgccgacaagtaccagcagctgagcctggtgggccacagccagagccagatggtggccagcgccagcgagaacaacgccaagaacagatacagaaacgtgctgccctacgactggagcagagtgcccctgaagcccatccacgaggagcccggcagcgactacatcaacgccagcttcatgcccggcctgtggagcccccaggagttcatcgccacccagggccccctgccccagaccgtgggcgacttctggagactggtgtgggagcagcagagccacaccctggtgatgctgaccaactgcatggaggccggcagagtgaagtgcgagcactactggcccctggacagccagccctgcacccacggccacctgagagtgaccctggtgggcgaggaggtgatggagaactggaccgtgagagagctgctgctgctgcaggtggaggagcagaagaccctgagcgtgagacagttccactaccaggcctggcccgaccacggcgtgcccagcagccccgacaccctgctggccttctggagaatgctgagacagtggctggaccagaccatggagggcggcccccccatcgtgcactgcagcgccggcgtgggcagaaccggcaccctgatcgccctggacgtgctgctgagacagctgcagagcgagggcctgctgggccccttcagcttcgtgagaaagatgagagagagcagacccctgatggtgcagaccgaggcccagtacgtgttcctgcaccagtgcatcctgagattcctgcagcagagcgcccaggcccccgccgagaaggaggtgccctacgaggacgtggagaacctgatctacgagaacgtggccgccatccaggcccacaagctggaggtgtag

SEQ ID NO: 95550 - DNA, 3348 bp, synthetic construct
  misc_feature 1..3348: note = Description of Artificial Sequence: Synthetic coding sequence
  source 1..3348: mol_type = other DNA
atggccggcgccggcggcggcctgggcgtgtggggcaacctggtgctgctgggcctgtgcagctggaccggcgccagagcccccgcccccaaccccggcagaaacctgaccgtggagacccagaccaccagcagcatcagcctgagctgggaggtgcccgacggcctggacagccagaacagcaactactgggtgcagtgcaccggcgacggcggcaccaccgagaccagaaacaccaccgccaccaacgtgaccgtggacggcctgggccccggcagcctgtacacctgcagcgtgtgggtggagaaggacggcgtgaacagcagcgtgggcaccgtgaccaccgccaccgcccccaaccccgtgagaaacctgagagtggaggcccagaccaacagcagcatcgccctgacctgggaggtgcccgacggccccgacccccagaacagcacctacggcgtggagtacaccggcgacggcggcagagccggcaccagaagcaccgcccacaccaacatcaccgtggacggcctggagcccggctgcctgtacgccttcagcatgtgggtgggcaagaacggcatcaacagcagcagagagaccagaaacgccaccaccgcccacaaccccgtgagaaacctgagagtggaggcccagaccaccagcagcatcagcctgagctgggaggtgcccgacggcaccgacccccagaacagcacctactgcgtgcagtgcaccggcgacggcggcagaaccgagaccagaaacaccaccgacaccagagtgaccgtggacggcctgggccccggcagcctgtacacctgcagcgtgtgggtggagaaggacggcgtgaacagcagcgtggagatcgtgaccagcgccaccgcccccaaccccgtgagaaacctgaccgtggaggcccagaccaacagcagcatcgccctgacctgggaggtgcccgacggccccgacccccagaacagcacctacggcgtggagtacaccggcgacggcggcagagccggcaccagaagcaccgcccacaccaacatcaccgtggacagactggagcccggctgcctgtacgtgttcagcgtgtgggtgggcaagaacggcatcaacagcagcagagagaccagaaacgccaccaccgcccccaaccccgtgagaaacctgcacatggagacccagaccaacagcagcatcgccctgtgctgggaggtgcccgacggcccctacccccaggactacacctactgggtggagtacaccggcgacggcggcggcaccgagaccagaaacaccaccaacaccagcgtgaccgccgagagactggagcccggcaccctgtacaccttcagcgtgtgggccgagaagaacggcgccagaggcagcagacagaacgtgagcatcagcaccgtgcccaacgccgtgaccagcctgagcaagcaggactggaccaacagcaccatcgccctgagatggaccgccccccagggccccggccagagcagctacagctactgggtgagctgggtgagagagggcatgaccgaccccagaacccagagcaccagcggcaccgacatcaccctgaaggagctggaggccggcagcctgtaccacctgaccgtgtgggccgagagaaacgaggtgagaggctacaacagcaccctgaccgccgccaccgcccccaacgaggtgaccgacctgcagaacgagacccagaccaagaacagcgtgatgctgtggtggaaggcccccggcgacccccacagccagctgtacgtgtactgggtgcagtgggccagcaagggccaccccagaagaggccaggacccccaggccaactgggtgaaccagaccagcagaaccaacgagacctggtacaaggtggaggccctggagcccggcaccctgtacaacttcaccgtgtgggccgagagaaacgacgtggccagcagcacccagagcctgtgcgccagcacctaccccgacaccgtgaccatcaccagctgcgtgagcaccagcgccggctacggcgtgaacctgatctggagctgcccccagggcggctacgaggccttcgagctggaggtgggcggccagagaggcagccaggacagaagcagctgcggcgaggccgtgagcgtgctgggcctgggccccgccagaagctaccccgccaccatcaccaccatctgggacggcatgaaggtggtgagccacagcgtggtgtgccacaccgagagcgccggcgtgatcgccggcgccttcgtgggcatcctgctgttcctgatcctggtgggcctgctgatcttcttcctgaagagaagaaacaagaagaagcagcagaagcccgagctgagagacctggtgttcagcagccccggcgacatccccgccgaggacttcgccgaccacgtgagaaagaacgagagagacagcaactgcggcttcgccgacaagtaccagcagctgagcctggtgggccacagccagagccagatggtggccagcgccagcgagaacaacgccaagaacagatacagaaacgtgctgccctacgactggagcagagtgcccctgaagcccatccacgaggagcccggcagcgactacatcaacgccagcttcatgcccggcctgtggagcccccaggagttcatcgccacccagggccccctgccccagaccgtgggcgacttctggagactggtgtgggagcagcagagccacaccctggtgatgctgaccaactgcatggaggccggcagagtgaagtgcgagcactactggcccctggacagccagccctgcacccacggccacctgagagtgaccctggtgggcgaggaggtgatggagaactggaccgtgagagagctgctgctgctgcaggtggaggagcagaagaccctgagcgtgagacagttccactaccaggcctggcccgaccacggcgtgcccagcagccccgacaccctgctggccttctggagaatgctgagacagtggctggaccagaccatggagggcggcccccccatcgtgcactgcagcgccggcgtgggcagaaccggcaccctgatcgccctggacgtgctgctgagacagctgcagagcgagggcctgctgggccccttcagcttcgtgagaaagatgagagagagcagacccctgatggtgcagaccgaggcccagtacgtgttcctgcaccagtgcatcctgagattcctgcagcagagcgcccaggcccccgccgagaaggaggtgccctacgaggacgtggagaacctgatctacgagaacgtggccgccatccaggcccacaagctggaggtgtag

SEQ ID NO: 95551 - DNA, 1278 bp, synthetic construct
  misc_feature 1..1278: note = Description of Artificial Sequence: Synthetic coding sequence
  source 1..1278: mol_type = other DNA
atgaagcccgccgccagagaggccagactgccccccagaagccccggcctgagatgggccctgcccctgctgctgctgctgctgagactgggccagatcctgtgcgccggcggcacccccagccccatccccgaccccagcgtggccaccgtggccaccggcgagaacggcatcacccagatcagcagcaccgccgagagcttccacaagcagaacggcaccggcaccccccaggtggagaccaacaccagcgaggacggcgagagcagcggcgccaacgacagcctgagaacccccgagcagggcagcaacggcaccgacggcgccagccagaagacccccagcagcaccggccccagccccgtgttcgacatcaaggccgtgagcatcagccccaccaacgtgatcctgacctggaagagcaacgacaccgccgccagcgagtacaagtacgtggtgaagcacaagatggagaacgagaagaccatcaccgtggtgcaccagccctggtgcaacatcaccggcctgagacccgccaccagctacgtgttcagcatcacccccggcatcggcaacgagacctggggcgaccccagagtgatcaaggtgatcaccgagcccatccccgtgagcgacctgagagtggccctgaccggcgtgagaaaggccgccctgagctggagcaacggcaacggcaccgccagctgcagagtgctgctggagagcatcggcagccacgaggagctgacccaggacagcagactgcaggtgaacatcagcggcctgaagcccggcgtgcagtacaacatcaacccctacctgctgcagagcaacaagaccaagggcgaccccctgggcaccgagggcggcctggacgccagcaacaccgagagaagcagagccggcagccccaccgcccccgtgcacgacgagagcctggtgggccccgtggaccccagcagcggccagcagagcagagacaccgaggtgctgctggtgggcctggagcccggcaccagatacaacgccaccgtgtacagccaggccgccaacggcaccgagggccagccccaggccatcgagttcagaaccaacgccatccaggtgttcgacgtgaccgccgtgaacatcagcgccaccagcctgaccctgatctggaaggtgagcgacaacgagagcagcagcaactacacctacaagatccacgtggccggcgagaccgacagcagcaacctgaacgtgagcgagcccagagccgtgatccccggcctgagatag

SEQ ID NO: 95552 - DNA, 4014 bp, synthetic construct
  misc_feature 1..4014: note = Description of Artificial Sequence: Synthetic coding sequence
  source 1..4014: mol_type = other DNA
atgaagcccgccgccagagaggccagactgccccccagaagccccggcctgagatgggccctgcccctgctgctgctgctgctgagactgggccagatcctgtgcgccggcggcacccccagccccatccccgaccccagcgtggccaccgtggccaccggcgagaacggcatcacccagatcagcagcaccgccgagagcttccacaagcagaacggcaccggcaccccccaggtggagaccaacaccagcgaggacggcgagagcagcggcgccaacgacagcctgagaacccccgagcagggcagcaacggcaccgacggcgccagccagaagacccccagcagcaccggccccagccccgtgttcgacatcaaggccgtgagcatcagccccaccaacgtgatcctgacctggaagagcaacgacaccgccgccagcgagtacaagtacgtggtgaagcacaagatggagaacgagaagaccatcaccgtggtgcaccagccctggtgcaacatcaccggcctgagacccgccaccagctacgtgttcagcatcacccccggcatcggcaacgagacctggggcgaccccagagtgatcaaggtgatcaccgagcccatccccgtgagcgacctgagagtggccctgaccggcgtgagaaaggccgccctgagctggagcaacggcaacggcaccgccagctgcagagtgctgctggagagcatcggcagccacgaggagctgacccaggacagcagactgcaggtgaacatcagcggcctgaagcccggcgtgcagtacaacatcaacccctacctgctgcagagcaacaagaccaagggcgaccccctgggcaccgagggcggcctggacgccagcaacaccgagagaagcagagccggcagccccaccgcccccgtgcacgacgagagcctggtgggccccgtggaccccagcagcggccagcagagcagagacaccgaggtgctgctggtgggcctggagcccggcaccagatacaacgccaccgtgtacagccaggccgccaacggcaccgagggccagccccaggccatcgagttcagaaccaacgccatccaggtgttcgacgtgaccgccgtgaacatcagcgccaccagcctgaccctgatctggaaggtgagcgacaacgagagcagcagcaactacacctacaagatccacgtggccggcgagaccgacagcagcaacctgaacgtgagcgagcccagagccgtgatccccggcctgagaagcagcaccttctacaacatcaccgtgtgccccgtgctgggcgacatcgagggcacccccggcttcctgcaggtgcacaccccccccgtgcccgtgagcgacttcagagtgaccgtggtgagcaccaccgagatcggcctggcctggagcagccacgacgccgagagcttccagatgcacatcacccaggagggcgccggcaacagcagagtggagatcaccaccaaccagagcatcatcatcggcggcctgttccccggcaccaagtactgcttcgagatcgtgcccaagggccccaacggcaccgagggcgccagcagaaccgtgtgcaacagaaccgtgcccagcgccgtgttcgacatccacgtggtgtacgtgaccaccaccgagatgtggctggactggaagagccccgacggcgccagcgagtacgtgtaccacctggtgatcgagagcaagcacggcagcaaccacaccagcacctacgacaaggccatcaccctgcagggcctgatccccggcaccctgtacaacatcaccatcagccccgaggtggaccacgtgtggggcgaccccaacagcaccgcccagtacaccagacccagcaacgtgagcaacatcgacgtgagcaccaacaccaccgccgccaccctgagctggcagaacttcgacgacgccagccccacctacagctactgcctgctgatcgagaaggccggcaacagcagcaacgccacccaggtggtgaccgacatcggcatcaccgacgccaccgtgaccgagctgatccccggcagcagctacaccgtggagatcttcgcccaggtgggcgacggcatcaagagcctggagcccggcagaaagagcttctgcaccgaccccgccagcatggccagcttcgactgcgaggtggtgcccaaggagcccgccctggtgctgaagtggacctgcccccccggcgccaacgccggcttcgagctggaggtgagcagcggcgcctggaacaacgccacccacctggagagctgcagcagcgagaacggcaccgagtacagaaccgaggtgacctacctgaacttcagcaccagctacaacatcagcatcaccaccgtgagctgcggcaagatggccgcccccaccagaaacacctgcaccaccggcatcaccgacccccccccccccgacggcagccccaacatcaccagcgtgagccacaacagcgtgaaggtgaagttcagcggcttcgaggccagccacggccccatcaaggcctacgccgtgatcctgaccaccggcgaggccggccaccccagcgccgacgtgctgaagtacacctacgaggacttcaagaagggcgccagcgacacctacgtgacctacctgatcagaaccgaggagaagggcagaagccagagcctgagcgaggtgctgaagtacgagatcgacgtgggcaacgagagcaccaccctgggctactacaacggcaagctggagcccctgggcagctacagagcctgcgtggccggcttcaccaacatcaccttccacccccagaacaagggcctgatcgacggcgccgagagctacgtgagcttcagcagatacagcgacgccgtgagcctgccccaggaccccggcgtgatctgcggcgccgtgttcggctgcatcttcggcgccctggtgatcgtgaccgtgggcggcttcatcttctggagaaagaagagaaaggacgccaagaacaacgaggtgagcttcagccagatcaagcccaagaagagcaagctgatcagagtggagaacttcgaggcctacttcaagaagcagcaggccgacagcaactgcggcttcgccgaggagtacgaggacctgaagctggtgggcatcagccagcccaagtacgccgccgagctggccgagaacagaggcaagaacagatacaacaacgtgctgccctacgacatcagcagagtgaagctgagcgtgcagacccacagcaccgacgactacatcaacgccaactacatgcccggctaccacagcaagaaggacttcatcgccacccagggccccctgcccaacaccctgaaggacttctggagaatggtgtgggagaagaacgtgtacgccatcatcatgctgaccaagtgcgtggagcagggcagaaccaagtgcgaggagtactggcccagcaagcaggcccaggactacggcgacatcaccgtggccatgaccagcgagatcgtgctgcccgagtggaccatcagagacttcaccgtgaagaacatccagaccagcgagagccaccccctgagacagttccacttcaccagctggcccgaccacggcgtgcccgacaccaccgacctgctgatcaacttcagatacctggtgagagactacatgaagcagagcccccccgagagccccatcctggtgcactgcagcgccggcgtgggcagaaccggcaccttcatcgccatcgacagactgatctaccagatcgagaacgagaacaccgtggacgtgtacggcatcgtgtacgacctgagaatgcacagacccctgatggtgcagaccgaggaccagtacgtgttcctgaaccagtgcgtgctggacatcgtgagaagccagaaggacagcaaggtggacctgatctaccagaacaccaccgccatgaccatctacgagaacctggcccccgtgaccaccttcggcaagaccaacggctacatcgcctag

SEQ ID NO: 95553 - DNA, 1620 bp, synthetic construct
  misc_feature 1..1620: note = Description of Artificial Sequence: Synthetic coding sequence
  source 1..1620: mol_type = other DNA
atgaagcccgccgccagagaggccagactgccccccagaagccccggcctgagatgggccctgcccctgctgctgctgctgctgagactgggccagatcctgtgcgccggcggcacccccagccccatccccgaccccagcgtggccaccgtggccaccggcgagaacggcatcacccagatcagcagcaccgccgagagcttccacaagcagaacggcaccggcaccccccaggtggagaccaacaccagcgaggacggcgagagcagcggcgccaacgacagcctgagaacccccgagcagggcagcaacggcaccgacggcgccagccagaagacccccagcagcaccggccccagccccgtgttcgacatcaaggccgtgagcatcagccccaccaacgtgatcctgacctggaagagcaacgacaccgccgccagcgagtacaagtacgtggtgaagcacaagatggagaacgagaagaccatcaccgtggtgcaccagccctggtgcaacatcaccggcctgagacccgccaccagctacgtgttcagcatcacccccggcatcggcaacgagacctggggcgaccccagagtgatcaaggtgatcaccgagcccatccccgtgagcgacctgagagtggccctgaccggcgtgagaaaggccgccctgagctggagcaacggcaacggcaccgccagctgcagagtgctgctggagagcatcggcagccacgaggagctgacccaggacagcagactgcaggtgaacatcagcggcctgaagcccggcgtgcagtacaacatcaacccctacctgctgcagagcaacaagaccaagggcgaccccctgggcaccgagggcggcctggacgccagcaacaccgagagaagcagagccggcagccccaccgcccccgtgcacgacgagagcctggtgggccccgtggaccccagcagcggccagcagagcagagacaccgaggtgctgctggtgggcctggagcccggcaccagatacaacgccaccgtgtacagccaggccgccaacggcaccgagggccagccccaggccatcgagttcagaaccaacgccatccaggtgttcgacgtgaccgccgtgaacatcagcgccaccagcctgaccctgatctggaaggtgagcgacaacgagagcagcagcaactacacctacaagatccacgtggccggcgagaccgacagcagcaacctgaacgtgagcgagcccagagccgtgatccccggcctgagaagcagcaccttctacaacatcaccgtgtgccccgtgctgggcgacatcgagggcacccccggcttcctgcaggtgcacaccccccccgtgcccgtgagcgacttcagagtgaccgtggtgagcaccaccgagatcggcctggcctggagcagccacgacgccgagagcttccagatgcacatcacccaggagggcgccggcaacagcagagtggagatcaccaccaaccagagcatcatcatcggcggcctgttccccggcaccaagtactgcttcgagatcgtgcccaagggccccaacggcaccgagggcgccagcagaaccgtgtgcaacagaaccggctag

SEQ ID NO: 95554 - DNA, 4419 bp, synthetic construct
  misc_feature 1..4419: note = Description of Artificial Sequence: Synthetic coding sequence
  source 1..4419: mol_type = other DNA
atggacaccaccgccgccgccgccctgcccgccttcgtggccctgctgctgctgagcccctggcccctgctgggcagcgcccagggccagttcagcgccggcggctgcaccttcgacgacggccccggcgcctgcgactaccaccaggacctgtacgacgacttcgagtgggtgcacgtgagcgcccaggagccccactacctgccccccgagatgccccagggcagctacatgatcgtggacagcagcgaccacgaccccggcgagaaggccagactgcagctgcccaccatgaaggagaacgacacccactgcatcgacttcagctacctgctgtacagccagaagggcctgaaccccggcaccctgaacatcctggtgagagtgaacaagggccccctggccaaccccatctggaacgtgaccggcttcaccggcagagactggctgagagccgagctggccgtgagcaccttctggcccaacgagtaccaggtgatcttcgaggccgaggtgagcggcggcagaagcggctacatcgccatcgacgacatccaggtgctgagctacccctgcgacaagagcccccacttcctgagactgggcgacgtggaggtgaacgccggccagaacgccaccttccagtgcatcgccaccggcagagacgccgtgcacaacaagctgtggctgcagagaagaaacggcgaggacatccccgtggcccagaccaagaacatcaaccacagaagattcgccgccagcttcagactgcaggaggtgaccaagaccgaccaggacctgtacagatgcgtgacccagagcgagagaggcagcggcgtgagcaacttcgcccagctgatcgtgagagagccccccagacccatcgcccccccccagctgctgggcgtgggccccacctacctgctgatccagctgaacgccaacagcatcatcggcgacggccccatcatcctgaaggaggtggagtacagaatgaccagcggcagctggaccgagacccacgccgtgaacgcccccacctacaagctgtggcacctggaccccgacaccgagtacgagatcagagtgctgctgaccagacccggcgagggcggcaccggcctgcccggcccccccctgatcaccagaaccaagtgcgccgagcccatgagaacccccaagaccctgaagatcgccgagatccaggccagaagaatcgccgtggactgggagagcctgggctacaacatcaccagatgccacaccttcaacgtgaccatctgctaccactacttcagaggccacaacgagagcaaggccgactgcctggacatggaccccaaggccccccagcacgtggtgaaccacctgcccccctacaccaacgtgagcctgaagatgatcctgaccaaccccgagggcagaaaggagagcgaggagaccatcatccagaccgacgaggacgtgcccggccccgtgcccgtgaagagcctgcagggcaccagcttcgagaacaagatcttcctgaactggaaggagcccctggaccccaacggcatcatcacccagtacgagatcagctacagcagcatcagaagcttcgaccccgccgtgcccgtggccggccccccccagaccgtgagcaacctgtggaacagcacccaccacgtgttcatgcacctgcaccccggcaccacctaccagttcttcatcagagccagcaccgtgaagggcttcggccccgccaccgccatcaacgtgaccaccaacatcagcgcccccaccctgcccgactacgagggcgtggacgccagcctgaacgagaccgccaccaccatcaccgtgctgctgagacccgcccaggccaagggcgcccccatcagcgcctaccagatcgtggtggaggagctgcacccccacagaaccaagagagaggccggcgccatggagtgctaccaggtgcccgtgacctaccagaacgccatgagcggcggcgccccctactacttcgccgccgagctgccccccggcaacctgcccgagcccgcccccttcaccgtgggcgacaacagaacctaccagggcttctggaacccccccctggcccccagaaagggctacaacatctacttccaggccatgagcagcgtggagaaggagaccaagacccagtgcgtgagaatcgccaccaaggccgccgccaccgaggagcccgaggtgatccccgaccccgccaagcagaccgacagagtggtgaagatcgccggcatcagcgccggcatcctggtgttcatcctgctgctgctggtggtgatcctgatcgtgaagaagagaagaagctactacagctacagctactacctgaagctggccaagaagagaaaggacgccatgggcaacaccagacaggagatgacccacatggtgaacgccatggacagaagctacgccgaccagagcaccctgcacgccgaggaccccctgagcatcaccttcatggaccagcacaacttcagccccagactgcccaacgaccccctggtgcccaccgccgtgctggtgcccatcaccgacgagaaccacagcgccaccgccgagagcagcagactgctggacgtgcccagatacctgtgcgagggcaccgagagcccctaccagaccggccagctgcaccccgccatcagagtggccgacctgctgcagcacatcaacctgatgaagaccagcgacagctacggcttcaaggaggagtacgagagcttcttcgagggccagagcgccagctgggacgtggccaagaaggaccagaacagagccaagaacagatacggcaacatcatcgcctacgaccacagcagagtgatcctgcagcccgtggaggacgaccccagcagcgactacatcaacgccaactacatcgacatctggctgtacagagacggctaccagagacccagccactacatcgccacccagggccccgtgcacgagaccgtgtacgacttctggagaatgatctggcaggagcagagcgcctgcatcgtgatggtgaccaacctggtggaggtgggcagagtgaagtgctacaagtactggcccgacgacaccgaggtgtacggcgacttcaaggtgacctgcgtggagatggagcccctggccgagtacgtggtgagaaccttcaccctggagagaagaggctacaacgagatcagagaggtgaagcagttccacttcaccggctggcccgaccacggcgtgccctaccacgccaccggcctgctgagcttcatcagaagagtgaagctgagcaacccccccagcgccggccccatcgtggtgcactgcagcgccggcgccggcagaaccggctgctacatcgtgatcgacatcatgctggacatggccgagagagagggcgtggtggacatctacaactgcgtgaaggccctgagaagcagaagaatcaacatggtgcagaccgaggagcagtacatcttcatccacgacgccatcctggaggcctgcctgtgcggcgagaccgccatccccgtgtgcgagttcaaggccgcctacttcgacatgatcagaatcgacagccagaccaacagcagccacctgaaggacgagttccagaccctgaacagcgtgacccccagactgcaggccgaggactgcagcatcgcctgcctgcccagaaaccacgacaagaacagattcatggacatgctgccccccgacagatgcctgcccttcctgatcaccatcgacggcgagagcagcaactacatcaacgccgccctgatggacagctacagacagcccgccgccttcatcgtgacccagtaccccctgcccaacaccgtgaaggacttctggagactggtgtacgactacggctgcaccagcatcgtgatgctgaacgaggtggacctgagccagggctgcccccagtactggcccgaggagggcatgctgagatacggccccatccaggtggagtgcatgagctgcagcatggactgcgacgtgatcaacagaatcttcagaatctgcaacctgaccagaccccaggagggctacctgatggtgcagcagttccagtacctgggctgggccagccacagagaggtgcccggcagcaagagaagcttcctgaagctgatcctgcaggtggagaagtggcaggaggagtgcgaggagggcgagggcagaaccatcatccactgcctgaacggcggcggcagaagcggcatgttctgcgccatcggcatcgtggtggagatggtgaagagacagaacgtggtggacgtgttccacgccgtgaagaccctgagaaacagcaagcccaacatggtggaggcccccgagcagtacagattctgctacgacgtggccctggagtacctggagagcagctag

SEQ ID NO: 95555 - DNA, 4377 bp, synthetic construct
  misc_feature 1..4377: note = Description of Artificial Sequence: Synthetic coding sequence
  source 1..4377: mol_type = other DNA
atggacaccaccgccgccgccgccctgcccgccttcgtggccctgctgctgctgagcccctggcccctgctgggcagcgcccagggccagttcagcgccggcggctgcaccttcgacgacggccccggcgcctgcgactaccaccaggacctgtacgacgacttcgagtgggtgcacgtgagcgcccaggagccccactacctgccccccgagatgccccagggcagctacatgatcgtggacagcagcgaccacgaccccggcgagaaggccagactgcagctgcccaccatgaaggagaacgacacccactgcatcgacttcagctacctgctgtacagccagaagggcctgaaccccggcaccctgaacatcctggtgagagtgaacaagggccccctggccaaccccatctggaacgtgaccggcttcaccggcagagactggctgagagccgagctggccgtgagcaccttctggcccaacgagtaccaggtgatcttcgaggccgaggtgagcggcggcagaagcggctacatcgccatcgacgacatccaggtgctgagctacccctgcgacaagagcccccacttcctgagactgggcgacgtggaggtgaacgccggccagaacgccaccttccagtgcatcgccaccggcagagacgccgtgcacaacaagctgtggctgcagagaagaaacggcgaggacatccccgtggcccagaccaagaacatcaaccacagaagattcgccgccagcttcagactgcaggaggtgaccaagaccgaccaggacctgtacagatgcgtgacccagagcgagagaggcagcggcgtgagcaacttcgcccagctgatcgtgagagagccccccagacccatcgcccccccccagctgctgggcgtgggccccacctacctgctgatccagctgaacgccaacagcatcatcggcgacggccccatcatcctgaaggaggtggagtacagaatgaccagcggcagctggaccgagacccacgccgtgaacgcccccacctacaagctgtggcacctggaccccgacaccgagtacgagatcagagtgctgctgaccagacccggcgagggcggcaccggcctgcccggcccccccctgatcaccagaaccaagtgcgccgagcccatgagaacccccaagaccctgaagatcgccgagatccaggccagaagaatcgccgtggactgggagagcctgggctacaacatcaccagatgccacaccttcaacgtgaccatctgctaccactacttcagaggccacaacgagagcaaggccgactgcctggacatggaccccaaggccccccagcacgtggtgaaccacctgcccccctacaccaacgtgagcctgaagatgatcctgaccaaccccgagggcagaaaggagagcgaggagaccatcatccagaccgacgaggacgtgcccggccccgtgcccgtgaagagcctgcagggcaccagcttcgagaacaagatcttcctgaactggaaggagcccctggaccccaacggcatcatcacccagtacgagatcagctacagcagcatcagaagcttcgaccccgccgtgcccgtggccggccccccccagaccgtgagcaacctgtggaacagcacccaccacgtgttcatgcacctgcaccccggcaccacctaccagttcttcatcagagccagcaccgtgaagggcttcggccccgccaccgccatcaacgtgaccaccaacatcagcgcccccaccctgcccgactacgagggcgtggacgccagcctgaacgagaccgccaccaccatcaccgtgctgctgagacccgcccaggccaagggcgcccccatcagcgcctaccagatcgtggtggaggagctgcacccccacagaaccaagagagaggccggcgccatggagtgctaccaggtgcccgtgacctaccagaacgccatgagcggcggcgccccctactacttcgccgccgagctgccccccggcaacctgcccgagcccgcccccttcaccgtgggcgacaacagaacctaccagggcttctggaacccccccctggcccccagaaagggctacaacatctacttccaggccatgagcagcgtggagaaggagaccaagacccagtgcgtgagaatcgccaccaaggccgccgccaccgaggagcccgaggtgatccccgaccccgccaagcagaccgacagagtggtgaagatcgccggcatcagcgccggcatcctggtgttcatcctgctgctgctggtggtgatcctgatcgtgaagaagagcaagctggccaagaagagaaaggacgccatgggcaacaccagacaggagatgacccacatggtgaacgccatggacagaagctacgccgaccagagcaccctgcacgccgaggaccccctgagcatcaccttcatggaccagcacaacttcagccccagactgcccaacgaccccctggtgcccaccgccgtgctggacgagaaccacagcgccaccgccgagagcagcagactgctggacgtgcccagatacctgtgcgagggcaccgagagcccctaccagaccggccagctgcaccccgccatcagagtggccgacctgctgcagcacatcaacctgatgaagaccagcgacagctacggcttcaaggaggagtacgagagcttcttcgagggccagagcgccagctgggacgtggccaagaaggaccagaacagagccaagaacagatacggcaacatcatcgcctacgaccacagcagagtgatcctgcagcccgtggaggacgaccccagcagcgactacatcaacgccaactacatcgacatctggctgtacagagacggctaccagagacccagccactacatcgccacccagggccccgtgcacgagaccgtgtacgacttctggagaatgatctggcaggagcagagcgcctgcatcgtgatggtgaccaacctggtggaggtgggcagagtgaagtgctacaagtactggcccgacgacaccgaggtgtacggcgacttcaaggtgacctgcgtggagatggagcccctggccgagtacgtggtgagaaccttcaccctggagagaagaggctacaacgagatcagagaggtgaagcagttccacttcaccggctggcccgaccacggcgtgccctaccacgccaccggcctgctgagcttcatcagaagagtgaagctgagcaacccccccagcgccggccccatcgtggtgcactgcagcgccggcgccggcagaaccggctgctacatcgtgatcgacatcatgctggacatggccgagagagagggcgtggtggacatctacaactgcgtgaaggccctgagaagcagaagaatcaacatggtgcagaccgaggagcagtacatcttcatccacgacgccatcctggaggcctgcctgtgcggcgagaccgccatccccgtgtgcgagttcaaggccgcctacttcgacatgatcagaatcgacagccagaccaacagcagccacctgaaggacgagttccagaccctgaacagcgtgacccccagactgcaggccgaggactgcagcatcgcctgcctgcccagaaaccacgacaagaacagattcatggacatgctgccccccgacagatgcctgcccttcctgatcaccatcgacggcgagagcagcaactacatcaacgccgccctgatggacagctacagacagcccgccgccttcatcgtgacccagtaccccctgcccaacaccgtgaaggacttctggagactggtgtacgactacggctgcaccagcatcgtgatgctgaacgaggtggacctgagccagggctgcccccagtactggcccgaggagggcatgctgagatacggccccatccaggtggagtgcatgagctgcagcatggactgcgacgtgatcaacagaatcttcagaatctgcaacctgaccagaccccaggagggctacctgatggtgcagcagttccagtacctgggctgggccagccacagagaggtgcccggcagcaagagaagcttcctgaagctgatcctgcaggtggagaagtggcaggaggagtgcgaggagggcgagggcagaaccatcatccactgcctgaacggcggcggcagaagcggcatgttctgcgccatcggcatcgtggtggagatggtgaagagacagaacgtggtggacgtgttccacgccgtgaagaccctgagaaacagcaagcccaacatggtggaggcccccgagcagtacagattctgctacgacgtggccctggagtacctggagagcagctag

SEQ ID NO: 95556 - DNA, 4341 bp, synthetic construct
  misc_feature 1..4341: note = Description of Artificial Sequence: Synthetic coding sequence
  source 1..4341: mol_type = other DNA
atggacaccaccgccgccgccgccctgcccgccttcgtggccctgctgctgctgagcccctggcccctgctgggcagcgcccagggccagttcagcgccggcggctgcaccttcgacgacggccccggcgcctgcgactaccaccaggacctgtacgacgacttcgagtgggtgcacgtgagcgcccaggagccccactacctgccccccgagatgccccagggcagctacatgatcgtggacagcagcgaccacgaccccggcgagaaggccagactgcagctgcccaccatgaaggagaacgacacccactgcatcgacttcagctacctgctgtacagccagaagggcctgaaccccggcaccctgaacatcctggtgagagtgaacaagggccccctggccaaccccatctggaacgtgaccggcttcaccggcagagactggctgagagccgagctggccgtgagcaccttctggcccaacgagtaccaggtgatcttcgaggccgaggtgagcggcggcagaagcggctacatcgccatcgacgacatccaggtgctgagctacccctgcgacaagagcccccacttcctgagactgggcgacgtggaggtgaacgccggccagaacgccaccttccagtgcatcgccaccggcagagacgccgtgcacaacaagctgtggctgcagagaagaaacggcgaggacatccccgtggcccagaccaagaacatcaaccacagaagattcgccgccagcttcagactgcaggaggtgaccaagaccgaccaggacctgtacagatgcgtgacccagagcgagagaggcagcggcgtgagcaacttcgcccagctgatcgtgagagagccccccagacccatcgcccccccccagctgctgggcgtgggccccacctacctgctgatccagctgaacgccaacagcatcatcggcgacggccccatcatcctgaaggaggtggagtacagaatgaccagcggcagctggaccgagacccacgccgtgaacgcccccacctacaagctgtggcacctggaccccgacaccgagtacgagatcagagtgctgctgaccagacccggcgagggcggcaccggcctgcccggcccccccctgatcaccagaaccaagtgcgccgagcccatgagaacccccaagaccctgaagatcgccgagatccaggccagaagaatcgccgtggactgggagagcctgggctacaacatcaccagatgccacaccttcaacgtgaccatctgctaccactacttcagaggccacaacgagagcaaggccgactgcctggacatggaccccaaggccccccagcacgtggtgaaccacctgcccccctacaccaacgtgagcctgaagatgatcctgaccaaccccgagggcagaaaggagagcgaggagaccatcatccagaccgacgaggacgtgcccggccccgtgcccgtgaagagcctgcagggcaccagcttcgagaacaagatcttcctgaactggaaggagcccctggaccccaacggcatcatcacccagtacgagatcagctacagcagcatcagaagcttcgaccccgccgtgcccgtggccggccccccccagaccgtgagcaacctgtggaacagcacccaccacgtgttcatgcacctgcaccccggcaccacctaccagttcttcatcagagccagcaccgtgaagggcttcggccccgccaccgccatcaacgtgaccaccaacatcagcgcccccaccctgcccgactacgagggcgtggacgccagcctgaacgagaccgccaccaccatcaccgtgctgctgagacccgcccaggccaagggcgcccccatcagcgcctaccagatcgtggtggaggagctgcacccccacagaaccaagagagaggccggcgccatggagtgctaccaggtgcccgtgacctaccagaacgccatgagcggcggcgccccctactacttcgccgccgagctgccccccggcaacctgcccgagcccgcccccttcaccgtgggcgacaacagaacctaccagggcttctggaacccccccctggcccccagaaagggctacaacatctacttccaggccatgagcagcgtggagaaggagaccaagacccagtgcgtgagaatcgccaccaaggccgccgccaccgaggagcccgaggtgatccccgaccccgccaagcagaccgacagagtggtgaagatcgccggcatcagcgccggcatcctggtgttcatcctgctgctgctggtggtgatcctgatcgtgaagaagagcaagctggccaagaagagaaaggacgccatgggcaacaccagacaggagatgacccacatggtgaacgccatggacagaagctacgccgaccagagcaccctgcacgccgaggaccccctgagcatcaccttcatggaccagcacaacttcagccccagatacgagaaccacagcgccaccgccgagagcagcagactgctggacgtgcccagatacctgtgcgagggcaccgagagcccctaccagaccggccagctgcaccccgccatcagagtggccgacctgctgcagcacatcaacctgatgaagaccagcgacagctacggcttcaaggaggagtacgagagcttcttcgagggccagagcgccagctgggacgtggccaagaaggaccagaacagagccaagaacagatacggcaacatcatcgcctacgaccacagcagagtgatcctgcagcccgtggaggacgaccccagcagcgactacatcaacgccaactacatcgacatctggctgtacagagacggctaccagagacccagccactacatcgccacccagggccccgtgcacgagaccgtgtacgacttctggagaatgatctggcaggagcagagcgcctgcatcgtgatggtgaccaacctggtggaggtgggcagagtgaagtgctacaagtactggcccgacgacaccgaggtgtacggcgacttcaaggtgacctgcgtggagatggagcccctggccgagtacgtggtgagaaccttcaccctggagagaagaggctacaacgagatcagagaggtgaagcagttccacttcaccggctggcccgaccacggcgtgccctaccacgccaccggcctgctgagcttcatcagaagagtgaagctgagcaacccccccagcgccggccccatcgtggtgcactgcagcgccggcgccggcagaaccggctgctacatcgtgatcgacatcatgctggacatggccgagagagagggcgtggtggacatctacaactgcgtgaaggccctgagaagcagaagaatcaacatggtgcagaccgaggagcagtacatcttcatccacgacgccatcctggaggcctgcctgtgcggcgagaccgccatccccgtgtgcgagttcaaggccgcctacttcgacatgatcagaatcgacagccagaccaacagcagccacctgaaggacgagttccagaccctgaacagcgtgacccccagactgcaggccgaggactgcagcatcgcctgcctgcccagaaaccacgacaagaacagattcatggacatgctgccccccgacagatgcctgcccttcctgatcaccatcgacggcgagagcagcaactacatcaacgccgccctgatggacagctacagacagcccgccgccttcatcgtgacccagtaccccctgcccaacaccgtgaaggacttctggagactggtgtacgactacggctgcaccagcatcgtgatgctgaacgaggtggacctgagccagggctgcccccagtactggcccgaggagggcatgctgagatacggccccatccaggtggagtgcatgagctgcagcatggactgcgacgtgatcaacagaatcttcagaatctgcaacctgaccagaccccaggagggctacctgatggtgcagcagttccagtacctgggctgggccagccacagagaggtgcccggcagcaagagaagcttcctgaagctgatcctgcaggtggagaagtggcaggaggagtgcgaggagggcgagggcagaaccatcatccactgcctgaacggcggcggcagaagcggcatgttctgcgccatcggcatcgtggtggagatggtgaagagacagaacgtggtggacgtgttccacgccgtgaagaccctgagaaacagcaagcccaacatggtggaggcccccgagcagtacagattctgctacgacgtggccctggagtacctggagagcagctag

SEQ ID NO: 95557 - DNA, 4320 bp, synthetic construct
  misc_feature 1..4320: note = Description of Artificial Sequence: Synthetic coding sequence
  source 1..4320: mol_type = other DNA
atggacaccaccgccgccgccgccctgcccgccttcgtggccctgctgctgctgagcccctggcccctgctgggcagcgcccagggccagttcagcgccggcggctgcaccttcgacgacggccccggcgcctgcgactaccaccaggacctgtacgacgacttcgagtgggtgcacgtgagcgcccaggagccccactacctgccccccgagatgccccagggcagctacatgatcgtggacagcagcgaccacgaccccggcgagaaggccagactgcagctgcccaccatgaaggagaacgacacccactgcatcgacttcagctacctgctgtacagccagaagggcctgaaccccggcaccctgaacatcctggtgagagtgaacaagggccccctggccaaccccatctggaacgtgaccggcttcaccggcagagactggctgagagccgagctggccgtgagcaccttctggcccaacgagtaccaggtgatcttcgaggccgaggtgagcggcggcagaagcggctacatcgccatcgacgacatccaggtgctgagctacccctgcgacaagagcccccacttcctgagactgggcgacgtggaggtgaacgccggccagaacgccaccttccagtgcatcgccaccggcagagacgccgtgcacaacaagctgtggctgcagagaagaaacggcgaggacatccccgtggcccagaccaagaacatcaaccacagaagattcgccgccagcttcagactgcaggaggtgaccaagaccgaccaggacctgtacagatgcgtgacccagagcgagagaggcagcggcgtgagcaacttcgcccagctgatcgtgagagagccccccagacccatcgcccccccccagctgctgggcgtgggccccacctacctgctgatccagctgaacgccaacagcatcatcggcgacggccccatcatcctgaaggaggtggagtacagaatgaccagcggcagctggaccgagacccacgccgtgaacgcccccacctacaagctgtggcacctggaccccgacaccgagtacgagatcagagtgctgctgaccagacccggcgagggcggcaccggcctgcccggcccccccctgatcaccagaaccaagtgcgccgagcccatgagaacccccaagaccctgaagatcgccgagatccaggccagaagaatcgccgtggactgggagagcctgggctacaacatcaccagatgccacaccttcaacgtgaccatctgctaccactacttcagaggccacaacgagagcaaggccgactgcctggacatggaccccaaggccccccagcacgtggtgaaccacctgcccccctacaccaacgtgagcctgaagatgatcctgaccaaccccgagggcagaaaggagagcgaggagaccatcatccagaccgacgaggacgtgcccggccccgtgcccgtgaagagcctgcagggcaccagcttcgagaacaagatcttcctgaactggaaggagcccctggaccccaacggcatcatcacccagtacgagatcagctacagcagcatcagaagcttcgaccccgccgtgcccgtggccggccccccccagaccgtgagcaacctgtggaacagcacccaccacgtgttcatgcacctgcaccccggcaccacctaccagttcttcatcagagccagcaccgtgaagggcttcggccccgccaccgccatcaacgtgaccaccaacatcagcgcccccaccctgcccgactacgagggcgtggacgccagcctgaacgagaccgccaccaccatcaccgtgctgctgagacccgcccaggccaagggcgcccccatcagcgcctaccagatcgtggtggaggagctgcacccccacagaaccaagagagaggccggcgccatggagtgctaccaggtgcccgtgacctaccagaacgccatgagcggcggcgccccctactacttcgccgccgagctgccccccggcaacctgcccgagcccgcccccttcaccgtgggcgacaacagaacctaccagggcttctggaacccccccctggcccccagaaagggctacaacatctacttccaggccatgagcagcgtggagaaggagaccaagacccagtgcgtgagaatcgccaccaaggccgccaccgaggagcccgaggtgatccccgaccccgccaagcagaccgacagagtggtgaagatcgccggcatcagcgccggcatcctggtgttcatcctgctgctgctggtggtgatcctgatcgtgaagaagagcaagctggccaagaagagaaaggacgccatgggcaacaccagacaggagatgacccacatggtgaacgccatggacagaagctacgccgaccagagcaccctgcacgccgaggaccccctgagcatcaccttcatggaccagcacaacttcagccccagatacgagaaccacagcgccaccgccgagagcagcagactgctggacgtgcccagatacctgtgcgagggcaccgagagcccctaccagaccggccagctgcaccccgccatcagagtggccgacctgctgcagcacatcaacctgatgaagaccagcgacagctacggcttcaaggaggagtacgagagcttcttcgagggccagagcgccagctgggacgtggccaagaaggaccagaacagagccaagaacagatacggcaacatcatcgcctacgaccacagcagagtgatcctgcagcccgtggaggacgaccccagcagcgactacatcaacgccaactacatcgacggctaccagagacccagccactacatcgccacccagggccccgtgcacgagaccgtgtacgacttctggagaatgatctggcaggagcagagcgcctgcatcgtgatggtgaccaacctggtggaggtgggcagagtgaagtgctacaagtactggcccgacgacaccgaggtgtacggcgacttcaaggtgacctgcgtggagatggagcccctggccgagtacgtggtgagaaccttcaccctggagagaagaggctacaacgagatcagagaggtgaagcagttccacttcaccggctggcccgaccacggcgtgccctaccacgccaccggcctgctgagcttcatcagaagagtgaagctgagcaacccccccagcgccggccccatcgtggtgcactgcagcgccggcgccggcagaaccggctgctacatcgtgatcgacatcatgctggacatggccgagagagagggcgtggtggacatctacaactgcgtgaaggccctgagaagcagaagaatcaacatggtgcagaccgaggagcagtacatcttcatccacgacgccatcctggaggcctgcctgtgcggcgagaccgccatccccgtgtgcgagttcaaggccgcctacttcgacatgatcagaatcgacagccagaccaacagcagccacctgaaggacgagttccagaccctgaacagcgtgacccccagactgcaggccgaggactgcagcatcgcctgcctgcccagaaaccacgacaagaacagattcatggacatgctgccccccgacagatgcctgcccttcctgatcaccatcgacggcgagagcagcaactacatcaacgccgccctgatggacagctacagacagcccgccgccttcatcgtgacccagtaccccctgcccaacaccgtgaaggacttctggagactggtgtacgactacggctgcaccagcatcgtgatgctgaacgaggtggacctgagccagggctgcccccagtactggcccgaggagggcatgctgagatacggccccatccaggtggagtgcatgagctgcagcatggactgcgacgtgatcaacagaatcttcagaatctgcaacctgaccagaccccaggagggctacctgatggtgcagcagttccagtacctgggctgggccagccacagagaggtgcccggcagcaagagaagcttcctgaagctgatcctgcaggtggagaagtggcaggaggagtgcgaggagggcgagggcagaaccatcatccactgcctgaacggcggcggcagaagcggcatgttctgcgccatcggcatcgtggtggagatggtgaagagacagaacgtggtggacgtgttccacgccgtgaagaccctgagaaacagcaagcccaacatggtggaggcccccgagcagtacagattctgctacgacgtggccctggagtacctggagagcagctag

SEQ ID NO: 95558 - DNA, 4323 bp, synthetic construct
  misc_feature 1..4323: note = Description of Artificial Sequence: Synthetic coding sequence
  source 1..4323: mol_type = other DNA
atggacaccaccgccgccgccgccctgcccgccttcgtggccctgctgctgctgagcccctggcccctgctgggcagcgcccagggccagttcagcgccggcggctgcaccttcgacgacggccccggcgcctgcgactaccaccaggacctgtacgacgacttcgagtgggtgcacgtgagcgcccaggagccccactacctgccccccgagatgccccagggcagctacatgatcgtggacagcagcgaccacgaccccggcgagaaggccagactgcagctgcccaccatgaaggagaacgacacccactgcatcgacttcagctacctgctgtacagccagaagggcctgaaccccggcaccctgaacatcctggtgagagtgaacaagggccccctggccaaccccatctggaacgtgaccggcttcaccggcagagactggctgagagccgagctggccgtgagcaccttctggcccaacgagtaccaggtgatcttcgaggccgaggtgagcggcggcagaagcggctacatcgccatcgacgacatccaggtgctgagctacccctgcgacaagagcccccacttcctgagactgggcgacgtggaggtgaacgccggccagaacgccaccttccagtgcatcgccaccggcagagacgccgtgcacaacaagctgtggctgcagagaagaaacggcgaggacatccccgtggcccagaccaagaacatcaaccacagaagattcgccgccagcttcagactgcaggaggtgaccaagaccgaccaggacctgtacagatgcgtgacccagagcgagagaggcagcggcgtgagcaacttcgcccagctgatcgtgagagagccccccagacccatcgcccccccccagctgctgggcgtgggccccacctacctgctgatccagctgaacgccaacagcatcatcggcgacggccccatcatcctgaaggaggtggagtacagaatgaccagcggcagctggaccgagacccacgccgtgaacgcccccacctacaagctgtggcacctggaccccgacaccgagtacgagatcagagtgctgctgaccagacccggcgagggcggcaccggcctgcccggcccccccctgatcaccagaaccaagtgcgccgagcccatgagaacccccaagaccctgaagatcgccgagatccaggccagaagaatcgccgtggactgggagagcctgggctacaacatcaccagatgccacaccttcaacgtgaccatctgctaccactacttcagaggccacaacgagagcaaggccgactgcctggacatggaccccaaggccccccagcacgtggtgaaccacctgcccccctacaccaacgtgagcctgaagatgatcctgaccaaccccgagggcagaaaggagagcgaggagaccatcatccagaccgacgaggacgtgcccggccccgtgcccgtgaagagcctgcagggcaccagcttcgagaacaagatcttcctgaactggaaggagcccctggaccccaacggcatcatcacccagtacgagatcagctacagcagcatcagaagcttcgaccccgccgtgcccgtggccggccccccccagaccgtgagcaacctgtggaacagcacccaccacgtgttcatgcacctgcaccccggcaccacctaccagttcttcatcagagccagcaccgtgaagggcttcggccccgccaccgccatcaacgtgaccaccaacatcagcgcccccaccctgcccgactacgagggcgtggacgccagcctgaacgagaccgccaccaccatcaccgtgctgctgagacccgcccaggccaagggcgcccccatcagcgcctaccagatcgtggtggaggagctgcacccccacagaaccaagagagaggccggcgccatggagtgctaccaggtgcccgtgacctaccagaacgccatgagcggcggcgccccctactacttcgccgccgagctgccccccggcaacctgcccgagcccgcccccttcaccgtgggcgacaacagaacctaccagggcttctggaacccccccctggcccccagaaagggctacaacatctacttccaggccatgagcagcgtggagaaggagaccaagacccagtgcgtgagaatcgccaccaaggccgccgccaccgaggagcccgaggtgatccccgaccccgccaagcagaccgacagagtggtgaagatcgccggcatcagcgccggcatcctggtgttcatcctgctgctgctggtggtgatcctgatcgtgaagaagagcaagctggccaagaagagaaaggacgccatgggcaacaccagacaggagatgacccacatggtgaacgccatggacagaagctacgccgaccagagcaccctgcacgccgaggaccccctgagcatcaccttcatggaccagcacaacttcagccccagatacgagaaccacagcgccaccgccgagagcagcagactgctggacgtgcccagatacctgtgcgagggcaccgagagcccctaccagaccggccagctgcaccccgccatcagagtggccgacctgctgcagcacatcaacctgatgaagaccagcgacagctacggcttcaaggaggagtacgagagcttcttcgagggccagagcgccagctgggacgtggccaagaaggaccagaacagagccaagaacagatacggcaacatcatcgcctacgaccacagcagagtgatcctgcagcccgtggaggacgaccccagcagcgactacatcaacgccaactacatcgacggctaccagagacccagccactacatcgccacccagggccccgtgcacgagaccgtgtacgacttctggagaatgatctggcaggagcagagcgcctgcatcgtgatggtgaccaacctggtggaggtgggcagagtgaagtgctacaagtactggcccgacgacaccgaggtgtacggcgacttcaaggtgacctgcgtggagatggagcccctggccgagtacgtggtgagaaccttcaccctggagagaagaggctacaacgagatcagagaggtgaagcagttccacttcaccggctggcccgaccacggcgtgccctaccacgccaccggcctgctgagcttcatcagaagagtgaagctgagcaacccccccagcgccggccccatcgtggtgcactgcagcgccggcgccggcagaaccggctgctacatcgtgatcgacatcatgctggacatggccgagagagagggcgtggtggacatctacaactgcgtgaaggccctgagaagcagaagaatcaacatggtgcagaccgaggagcagtacatcttcatccacgacgccatcctggaggcctgcctgtgcggcgagaccgccatccccgtgtgcgagttcaaggccgcctacttcgacatgatcagaatcgacagccagaccaacagcagccacctgaaggacgagttccagaccctgaacagcgtgacccccagactgcaggccgaggactgcagcatcgcctgcctgcccagaaaccacgacaagaacagattcatggacatgctgccccccgacagatgcctgcccttcctgatcaccatcgacggcgagagcagcaactacatcaacgccgccctgatggacagctacagacagcccgccgccttcatcgtgacccagtaccccctgcccaacaccgtgaaggacttctggagactggtgtacgactacggctgcaccagcatcgtgatgctgaacgaggtggacctgagccagggctgcccccagtactggcccgaggagggcatgctgagatacggccccatccaggtggagtgcatgagctgcagcatggactgcgacgtgatcaacagaatcttcagaatctgcaacctgaccagaccccaggagggctacctgatggtgcagcagttccagtacctgggctgggccagccacagagaggtgcccggcagcaagagaagcttcctgaagctgatcctgcaggtggagaagtggcaggaggagtgcgaggagggcgagggcagaaccatcatccactgcctgaacggcggcggcagaagcggcatgttctgcgccatcggcatcgtggtggagatggtgaagagacagaacgtggtggacgtgttccacgccgtgaagaccctgagaaacagcaagcccaacatggtggaggcccccgagcagtacagattctgctacgacgtggccctggagtacctggagagcagctag

SEQ ID NO: 95559 - DNA, 4374 bp, synthetic construct
  misc_feature 1..4374: note = Description of Artificial Sequence: Synthetic coding sequence
  source 1..4374: mol_type = other DNA
atggacaccaccgccgccgccgccctgcccgccttcgtggccctgctgctgctgagcccctggcccctgctgggcagcgcccagggccagttcagcgccggcggctgcaccttcgacgacggccccggcgcctgcgactaccaccaggacctgtacgacgacttcgagtgggtgcacgtgagcgcccaggagccccactacctgccccccgagatgccccagggcagctacatgatcgtggacagcagcgaccacgaccccggcgagaaggccagactgcagctgcccaccatgaaggagaacgacacccactgcatcgacttcagctacctgctgtacagccagaagggcctgaaccccggcaccctgaacatcctggtgagagtgaacaagggccccctggccaaccccatctggaacgtgaccggcttcaccggcagagactggctgagagccgagctggccgtgagcaccttctggcccaacgagtaccaggtgatcttcgaggccgaggtgagcggcggcagaagcggctacatcgccatcgacgacatccaggtgctgagctacccctgcgacaagagcccccacttcctgagactgggcgacgtggaggtgaacgccggccagaacgccaccttccagtgcatcgccaccggcagagacgccgtgcacaacaagctgtggctgcagagaagaaacggcgaggacatccccgtggcccagaccaagaacatcaaccacagaagattcgccgccagcttcagactgcaggaggtgaccaagaccgaccaggacctgtacagatgcgtgacccagagcgagagaggcagcggcgtgagcaacttcgcccagctgatcgtgagagagccccccagacccatcgcccccccccagctgctgggcgtgggccccacctacctgctgatccagctgaacgccaacagcatcatcggcgacggccccatcatcctgaaggaggtggagtacagaatgaccagcggcagctggaccgagacccacgccgtgaacgcccccacctacaagctgtggcacctggaccccgacaccgagtacgagatcagagtgctgctgaccagacccggcgagggcggcaccggcctgcccggcccccccctgatcaccagaaccaagtgcgccgagcccatgagaacccccaagaccctgaagatcgccgagatccaggccagaagaatcgccgtggactgggagagcctgggctacaacatcaccagatgccacaccttcaacgtgaccatctgctaccactacttcagaggccacaacgagagcaaggccgactgcctggacatggaccccaaggccccccagcacgtggtgaaccacctgcccccctacaccaacgtgagcctgaagatgatcctgaccaaccccgagggcagaaaggagagcgaggagaccatcatccagaccgacgaggacgtgcccggccccgtgcccgtgaagagcctgcagggcaccagcttcgagaacaagatcttcctgaactggaaggagcccctggaccccaacggcatcatcacccagtacgagatcagctacagcagcatcagaagcttcgaccccgccgtgcccgtggccggccccccccagaccgtgagcaacctgtggaacagcacccaccacgtgttcatgcacctgcaccccggcaccacctaccagttcttcatcagagccagcaccgtgaagggcttcggccccgccaccgccatcaacgtgaccaccaacatcagcgcccccaccctgcccgactacgagggcgtggacgccagcctgaacgagaccgccaccaccatcaccgtgctgctgagacccgcccaggccaagggcgcccccatcagcgcctaccagatcgtggtggaggagctgcacccccacagaaccaagagagaggccggcgccatggagtgctaccaggtgcccgtgacctaccagaacgccatgagcggcggcgccccctactacttcgccgccgagctgccccccggcaacctgcccgagcccgcccccttcaccgtgggcgacaacagaacctaccagggcttctggaacccccccctggcccccagaaagggctacaacatctacttccaggccatgagcagcgtggagaaggagaccaagacccagtgcgtgagaatcgccaccaaggccgccgccaccgaggagcccgaggtgatccccgaccccgccaagcagaccgacagagtggtgaagatcgccggcatcagcgccggcatcctggtgttcatcctgctgctgctggtggtgatcctgatcgtgaagaagagcaagctggccaagaagagaaaggacgccatgggcaacaccagacaggagatgacccacatggtgaacgccatggacagaagctacgccgaccagagcaccctgcacgccgaggaccccctgagcatcaccttcatggaccagcacaacttcagccccagactgcccaacgaccccctggtgcccaccgccgtgctggacgagaaccacagcgccaccgccgagagcagcagactgctggacgtgcccagatacctgtgcgagggcaccgagagcccctaccagaccggccagctgcaccccgccatcagagtggccgacctgctgcagcacatcaacctgatgaagaccagcgacagctacggcttcaaggaggagtacgagagcttcttcgagggccagagcgccagctgggacgtggccaagaaggaccagaacagagccaagaacagatacggcaacatcatcgcctacgaccacagcagagtgatcctgcagcccgtggaggacgaccccagcagcgactacatcaacgccaactacatcgacgtgagcatcttcatcggctaccagagacccagccactacatcgccacccagggccccgtgcacgagaccgtgtacgacttctggagaatgatctggcaggagcagagcgcctgcatcgtgatggtgaccaacctggtggaggtgggcagagtgaagtgctacaagtactggcccgacgacaccgaggtgtacggcgacttcaaggtgacctgcgtggagatggagcccctggccgagtacgtggtgagaaccttcaccctggagagaagaggctacaacgagatcagagaggtgaagcagttccacttcaccggctggcccgaccacggcgtgccctaccacgccaccggcctgctgagcttcatcagaagagtgaagctgagcaacccccccagcgccggccccatcgtggtgcactgcagcgccggcgccggcagaaccggctgctacatcgtgatcgacatcatgctggacatggccgagagagagggcgtggtggacatctacaactgcgtgaaggccctgagaagcagaagaatcaacatggtgcagaccgaggagcagtacatcttcatccacgacgccatcctggaggcctgcctgtgcggcgagaccgccatccccgtgtgcgagttcaaggccgcctacttcgacatgatcagaatcgacagccagaccaacagcagccacctgaaggacgagttccagaccctgaacagcgtgacccccagactgcaggccgaggactgcagcatcgcctgcctgcccagaaaccacgacaagaacagattcatggacatgctgccccccgacagatgcctgcccttcctgatcaccatcgacggcgagagcagcaactacatcaacgccgccctgatggacagctacagacagcccgccgccttcatcgtgacccagtaccccctgcccaacaccgtgaaggacttctggagactggtgtacgactacggctgcaccagcatcgtgatgctgaacgaggtggacctgagccagggctgcccccagtactggcccgaggagggcatgctgagatacggccccatccaggtggagtgcatgagctgcagcatggactgcgacgtgatcaacagaatcttcagaatctgcaacctgaccagaccccaggagggctacctgatggtgcagcagttccagtacctgggctgggccagccacagagaggtgcccggcagcaagagaagcttcctgaagctgatcctgcaggtggagaagtggcaggaggagtgcgaggagggcgagggcagaaccatcatccactgcctgaacggcggcggcagaagcggcatgttctgcgccatcggcatcgtggtggagatggtgaagagacagaacgtggtggacgtgttccacgccgtgaagaccctgagaaacagcaagcccaacatggtggaggcccccgagcagtacagattctgctacgacgtggccctggagtacctggagagcagctag

SEQ ID NO: 95560 - DNA, 2244 bp, synthetic construct
  misc_feature 1..2244: note = Description of Artificial Sequence: Synthetic coding sequence
  source 1..2244: mol_type = other DNA
atgaccctgaacggctgcatgctggtgctgaagagcctgatcatctaccaccccagatgccccaaggtgatcttcgaggccgaggtgagcggcggcagaagcggctacatcgccatcgacgacatccaggtgctgagctacccctgcgacaagagcccccacttcctgagactgggcgacgtggaggtgaacgccggccagaacgccaccttccagtgcatcgccaccggcagagacgccgtgcacaacaagctgtggctgcagagaagaaacggcgaggacatccccgtggcccagaccaagaacatcaaccacagaagattcgccgccagcttcagactgcaggaggtgaccaagaccgaccaggacctgtacagatgcgtgacccagagcgagagaggcagcggcgtgagcaacttcgcccagctgatcgtgagagagccccccagacccatcgcccccccccagctgctgggcgtgggccccacctacctgctgatccagctgaacgccaacagcatcatcggcgacggccccatcatcctgaaggaggtggagtacagaatgaccagcggcagctggaccgagacccacgccgtgaacgcccccacctacaagctgtggcacctggaccccgacaccgagtacgagatcagagtgctgctgaccagacccggcgagggcggcaccggcctgcccggcccccccctgatcaccagaaccaagtgcgccgagcccatgagaacccccaagaccctgaagatcgccgagatccaggccagaagaatcgccgtggactgggagagcctgggctacaacatcaccagatgccacaccttcaacgtgaccatctgctaccactacttcagaggccacaacgagagcaaggccgactgcctggacatggaccccaaggccccccagcacgtggtgaaccacctgcccccctacaccaacgtgagcctgaagatgatcctgaccaaccccgagggcagaaaggagagcgaggagaccatcatccagaccgacgaggacgtgcccggccccgtgcccgtgaagagcctgcagggcaccagcttcgagaacaagatcttcctgaactggaaggagcccctggaccccaacggcatcatcacccagtacgagatcagctacagcagcatcagaagcttcgaccccgccgtgcccgtggccggccccccccagaccgtgagcaacctgtggaacagcacccaccacgtgttcatgcacctgcaccccggcaccacctaccagttcttcatcagagccagcaccgtgaagggcttcggccccgccaccgccatcaacgtgaccaccaacatcagcgcccccaccctgcccgactacgagggcgtggacgccagcctgaacgagaccgccaccaccatcaccgtgctgctgagacccgcccaggccaagggcgcccccatcagcgcctaccagatcgtggtggaggagctgcacccccacagaaccaagagagaggccggcgccatggagtgctaccaggtgcccgtgacctaccagaacgccatgagcggcggcgccccctactacttcgccgccgagctgccccccggcaacctgcccgagcccgcccccttcaccgtgggcgacaacagaacctaccagggcttctggaacccccccctggcccccagaaagggctacaacatctacttccaggccatgagcagcgtggagaaggagaccaagacccagtgcgtgagaatcgccaccaaggccgccgccaccgaggagcccgaggtgatccccgaccccgccaagcagaccgacagagtggtgaagatcgccggcatcagcgccggcatcctggtgttcatcctgctgctgctggtggtgatcctgatcgtgaagaagagatacatctgctggagaagacacatctgcatcagaaacatcagaagaagctactacagctacagctactacctgaagctggccaagaagagaaaggacgccatgggcaacaccagacaggagatgacccacatggtgaacgccatggacagaagctacgccgaccagagcaccctgcacgccgaggaccccctgagcatcaccttcatggaccagcacaacttcagccccagactgcccaacgaccccctggtgcccaccgccgtgctggtgcccagccccggcagaaagaacgtgtaccacggcgacaacaacagcttcttcgccatcagctacctgtag

SEQ ID NO: 95561 - DNA, 4389 bp, synthetic construct
  misc_feature 1..4389: note = Description of Artificial Sequence: Synthetic coding sequence
  source 1..4389: mol_type = other DNA
atggacaccaccgccgccgccgccctgcccgccttcgtggccctgctgctgctgagcccctggcccctgctgggcagcgcccagggccagttcagcgccggcggctgcaccttcgacgacggccccggcgcctgcgactaccaccaggacctgtacgacgacttcgagtgggtgcacgtgagcgcccaggagccccactacctgccccccgagatgccccagggcagctacatgatcgtggacagcagcgaccacgaccccggcgagaaggccagactgcagctgcccaccatgaaggagaacgacacccactgcatcgacttcagctacctgctgtacagccagaagggcctgaaccccggcaccctgaacatcctggtgagagtgaacaagggccccctggccaaccccatctggaacgtgaccggcttcaccggcagagactggctgagagccgagctggccgtgagcaccttctggcccaacgagtaccaggtgatcttcgaggccgaggtgagcggcggcagaagcggctacatcgccatcgacgacatccaggtgctgagctacccctgcgacaagagcccccacttcctgagactgggcgacgtggaggtgaacgccggccagaacgccaccttccagtgcatcgccaccggcagagacgccgtgcacaacaagctgtggctgcagagaagaaacggcgaggacatccccgtggcccagaccaagaacatcaaccacagaagattcgccgccagcttcagactgcaggaggtgaccaagaccgaccaggacctgtacagatgcgtgacccagagcgagagaggcagcggcgtgagcaacttcgcccagctgatcgtgagagagccccccagacccatcgcccccccccagctgctgggcgtgggccccacctacctgctgatccagctgaacgccaacagcatcatcggcgacggccccatcatcctgaaggaggtggagtacagaatgaccagcggcagctggaccgagacccacgccgtgaacgcccccacctacaagctgtggcacctggaccccgacaccgagtacgagatcagagtgctgctgaccagacccggcgagggcggcaccggcctgcccggcccccccctgatcaccagaaccaagtgcgccgagcccatgagaacccccaagaccctgaagatcgccgagatccaggccagaagaatcgccgtggactgggagagcctgggctacaacatcaccagatgccacaccttcaacgtgaccatctgctaccactacttcagaggccacaacgagagcaaggccgactgcctggacatggaccccaaggccccccagcacgtggtgaaccacctgcccccctacaccaacgtgagcctgaagatgatcctgaccaaccccgagggcagaaaggagagcgaggagaccatcatccagaccgacgaggacgtgcccggccccgtgcccgtgaagagcctgcagggcaccagcttcgagaacaagatcttcctgaactggaaggagcccctggaccccaacggcatcatcacccagtacgagatcagctacagcagcatcagaagcttcgaccccgccgtgcccgtggccggccccccccagaccgtgagcaacctgtggaacagcacccaccacgtgttcatgcacctgcaccccggcaccacctaccagttcttcatcagagccagcaccgtgaagggcttcggccccgccaccgccatcaacgtgaccaccaacatcagcgcccccaccctgcccgactacgagggcgtggacgccagcctgaacgagaccgccaccaccatcaccgtgctgctgagacccgcccaggccaagggcgcccccatcagcgcctaccagatcgtggtggaggagctgcacccccacagaaccaagagagaggccggcgccatggagtgctaccaggtgcccgtgacctaccagaacgccatgagcggcggcgccccctactacttcgccgccgagctgccccccggcaacctgcccgagcccgcccccttcaccgtgggcgacaacagaacctaccagggcttctggaacccccccctggcccccagaaagggctacaacatctacttccaggccatgagcagcgtggagaaggagaccaagacccagtgcgtgagaatcgccaccaaggccgccgccaccgaggagcccgaggtgatccccgaccccgccaagcagaccgacagagtggtgaagatcgccggcatcagcgccggcatcctggtgttcatcctgctgctgctggtggtgatcctgatcgtgaagaagagcaagctggccaagaagagaaaggacgccatgggcaacaccagacaggagatgacccacatggtgaacgccatggacagaagctacgccgaccagagcaccctgcacgccgaggaccccctgagcatcaccttcatggaccagcacaacttcagccccagactgcccaacgaccccctggtgcccaccgccgtgctggtgcccatcaccgacgagaaccacagcgccaccgccgagagcagcagactgctggacgtgcccagatacctgtgcgagggcaccgagagcccctaccagaccggccagctgcaccccgccatcagagtggccgacctgctgcagcacatcaacctgatgaagaccagcgacagctacggcttcaaggaggagtacgagagcttcttcgagggccagagcgccagctgggacgtggccaagaaggaccagaacagagccaagaacagatacggcaacatcatcgcctacgaccacagcagagtgatcctgcagcccgtggaggacgaccccagcagcgactacatcaacgccaactacatcgacatctggctgtacagagacggctaccagagacccagccactacatcgccacccagggccccgtgcacgagaccgtgtacgacttctggagaatgatctggcaggagcagagcgcctgcatcgtgatggtgaccaacctggtggaggtgggcagagtgaagtgctacaagtactggcccgacgacaccgaggtgtacggcgacttcaaggtgacctgcgtggagatggagcccctggccgagtacgtggtgagaaccttcaccctggagagaagaggctacaacgagatcagagaggtgaagcagttccacttcaccggctggcccgaccacggcgtgccctaccacgccaccggcctgctgagcttcatcagaagagtgaagctgagcaacccccccagcgccggccccatcgtggtgcactgcagcgccggcgccggcagaaccggctgctacatcgtgatcgacatcatgctggacatggccgagagagagggcgtggtggacatctacaactgcgtgaaggccctgagaagcagaagaatcaacatggtgcagaccgaggagcagtacatcttcatccacgacgccatcctggaggcctgcctgtgcggcgagaccgccatccccgtgtgcgagttcaaggccgcctacttcgacatgatcagaatcgacagccagaccaacagcagccacctgaaggacgagttccagaccctgaacagcgtgacccccagactgcaggccgaggactgcagcatcgcctgcctgcccagaaaccacgacaagaacagattcatggacatgctgccccccgacagatgcctgcccttcctgatcaccatcgacggcgagagcagcaactacatcaacgccgccctgatggacagctacagacagcccgccgccttcatcgtgacccagtaccccctgcccaacaccgtgaaggacttctggagactggtgtacgactacggctgcaccagcatcgtgatgctgaacgaggtggacctgagccagggctgcccccagtactggcccgaggagggcatgctgagatacggccccatccaggtggagtgcatgagctgcagcatggactgcgacgtgatcaacagaatcttcagaatctgcaacctgaccagaccccaggagggctacctgatggtgcagcagttccagtacctgggctgggccagccacagagaggtgcccggcagcaagagaagcttcctgaagctgatcctgcaggtggagaagtggcaggaggagtgcgaggagggcgagggcagaaccatcatccactgcctgaacggcggcggcagaagcggcatgttctgcgccatcggcatcgtggtggagatggtgaagagacagaacgtggtggacgtgttccacgccgtgaagaccctgagaaacagcaagcccaacatggtggaggcccccgagcagtacagattctgctacgacgtggccctggagtacctggagagcagctag

SEQ ID NO: 95562 - DNA, 4359 bp, synthetic construct
  misc_feature 1..4359: note = Description of Artificial Sequence: Synthetic coding sequence
  source 1..4359: mol_type = other DNA
atgagaggcctgggcacctgcctggccaccctggccggcctgctgctgaccgccgccggcgagaccttcagcggcggctgcctgttcgacgagccctacagcacctgcggctacagccagagcgagggcgacgacttcaactgggagcaggtgaacaccctgaccaagcccaccagcgacccctggatgcccagcggcagcttcatgctggtgaacgccagcggcagacccgagggccagagagcccacctgctgctgccccagctgaaggagaacgacacccactgcatcgacttccactacttcgtgagcagcaagagcaacagcccccccggcctgctgaacgtgtacgtgaaggtgaacaacggccccctgggcaaccccatctggaacatcagcggcgaccccaccagaacctggaacagagccgagctggccatcagcaccttctggcccaacttctaccaggtgatcttcgaggtgatcaccagcggccaccagggctacctggccatcgacgaggtgaaggtgctgggccacccctgcaccagaaccccccacttcctgagaatccagaacgtggaggtgaacgccggccagttcgccaccttccagtgcagcgccatcggcagaaccgtggccggcgacagactgtggctgcagggcatcgacgtgagagacgcccccctgaaggagatcaaggtgaccagcagcagaagattcatcgccagcttcaacgtggtgaacaccaccaagagagacgccggcaagtacagatgcatgatcagaaccgagggcggcgtgggcatcagcaactacgccgagctggtggtgaaggagccccccgtgcccatcgcccccccccagctggccagcgtgggcgccacctacctgtggatccagctgaacgccaacagcatcaacggcgacggccccatcgtggccagagaggtggagtactgcaccgccagcggcagctggaacgacagacagcccgtggacagcaccagctacaagatcggccacctggaccccgacaccgagtacgagatcagcgtgctgctgaccagacccggcgagggcggcaccggcagccccggccccgccctgagaaccagaaccaagtgcgccgaccccatgagaggccccagaaagctggaggtggtggaggtgaagagcagacagatcaccatcagatgggagcccttcggctacaacgtgaccagatgccacagctacaacctgaccgtgcactactgctaccaggtgggcggccaggagcaggtgagagaggaggtgagctgggacaccgagaacagccacccccagcacaccatcaccaacctgagcccctacaccaacgtgagcgtgaagctgatcctgatgaaccccgagggcagaaaggagagccaggagctgatcgtgcagaccgacgaggacctgcccggcgccgtgcccaccgagagcatccagggcagcaccttcgaggagaagatcttcctgcagtggagagagcccacccagacctacggcgtgatcaccctgtacgagatcacctacaaggccgtgagcagcttcgaccccgagatcgacctgagcaaccagagcggcagagtgagcaagctgggcaacgagacccacttcctgttcttcggcctgtaccccggcaccacctacagcttcaccatcagagccagcaccgccaagggcttcggcccccccgccaccaaccagttcaccaccaagatcagcgcccccagcatgcccgcctacgagctggagacccccctgaaccagaccgacaacaccgtgaccgtgatgctgaagcccgcccacagcagaggcgcccccgtgagcgtgtaccagatcgtggtggaggaggagagacccagaagaaccaagaagaccaccgagatcctgaagtgctaccccgtgcccatccacttccagaacgccagcctgctgaacagccagtactacttcgccgccgagttccccgccgacagcctgcaggccgcccagcccttcaccatcggcgacaacaagacctacaacggctactggaacacccccctgctgccctacaagagctacagaatctacttccaggccgccagcagagccaacggcgagaccaagatcgactgcgtgcaggtggccaccaagggcgccgccacccccaagcccgtgcccgagcccgagaagcagaccgaccacaccgtgaagatcgccggcgtgatcgccggcatcctgctgttcgtgatcatcttcctgggcgtggtgctggtgatgaagaagagaaagctggccaagaagagaaaggagaccatgagcagcaccagacaggagatgaccgtgatggtgaacagcatggacaagagctacgccgagcagggcaccaactgcgacgaggccttcagcttcatggacacccacaacctgaacggcagaagcgtgagcagccccagcagcttcaccatgaagaccaacaccctgagcaccagcgtgcccaacagctactaccccgacgagacccacaccatggccagcgacaccagcagcctggtgcagagccacacctacaagaagagagagcccgccgacgtgccctaccagaccggccagctgcaccccgccatcagagtggccgacctgctgcagcacatcacccagatgaagtgcgccgagggctacggcttcaaggaggagtacgagagcttcttcgagggccagagcgccccctgggacagcgccaagaaggacgagaacagaatgaagaacagatacggcaacatcatcgcctacgaccacagcagagtgagactgcagaccatcgagggcgacaccaacagcgactacatcaacggcaactacatcgacggctaccacagacccaaccactacatcgccacccagggccccatgcaggagaccatctacgacttctggagaatggtgtggcacgagaacaccgccagcatcatcatggtgaccaacctggtggaggtgggcagagtgaagtgctgcaagtactggcccgacgacaccgagatctacaaggacatcaaggtgaccctgatcgagaccgagctgctggccgagtacgtgatcagaaccttcgccgtggagaagagaggcgtgcacgagatcagagagatcagacagttccacttcaccggctggcccgaccacggcgtgccctaccacgccaccggcctgctgggcttcgtgagacaggtgaagagcaagagcccccccagcgccggccccctggtggtgcactgcagcgccggcgccggcagaaccggctgcttcatcgtgatcgacatcatgctggacatggccgagagagagggcgtggtggacatctacaactgcgtgagagagctgagaagcagaagagtgaacatggtgcagaccgaggagcagtacgtgttcatccacgacgccatcctggaggcctgcctgtgcggcgacaccagcgtgcccgccagccaggtgagaagcctgtactacgacatgaacaagctggacccccagaccaacagcagccagatcaaggaggagttcagaaccctgaacatggtgacccccaccctgagagtggaggactgcagcatcgccctgctgcccagaaaccacgagaagaacagatgcatggacatcctgccccccgacagatgcctgcccttcctgatcaccatcgacggcgagagcagcaactacatcaacgccgccctgatggacagctacaagcagcccagcgccttcatcgtgacccagcaccccctgcccaacaccgtgaaggacttctggagactggtgctggactaccactgcaccagcgtggtgatgctgaacgacgtggaccccgcccagctgtgcccccagtactggcccgagaacggcgtgcacagacacggccccatccaggtggagttcgtgagcgccgacctggaggaggacatcatcagcagaatcttcagaatctacaacgccgccagaccccaggacggctacagaatggtgcagcagttccagttcctgggctggcccatgtacagagacacccccgtgagcaagagaagcttcctgaagctgatcagacaggtggacaagtggcaggaggagtacaacggcggcgagggcagaaccgtggtgcactgcctgaacggcggcggcagaagcggcaccttctgcgccatcagcatcgtgtgcgagatgctgagacaccagagaaccgtggacgtgttccacgccgtgaagaccctgagaaacaacaagcccaacatggtggacctgctggaccagtacaagttctgctacgaggtggccctggagtacctgaacagcggctag

SEQ ID NO: 95563 - DNA, 4173 bp, synthetic construct
  misc_feature 1..4173: note = Description of Artificial Sequence: Synthetic coding sequence
  source 1..4173: mol_type = other DNA
atgcccagcggcagcttcatgctggtgaacgccagcggcagacccgagggccagagagcccacctgctgctgccccagctgaaggagaacgacacccactgcatcgacttccactacttcgtgagcagcaagagcaacagcccccccggcctgctgaacgtgtacgtgaaggtgaacaacggccccctgggcaaccccatctggaacatcagcggcgaccccaccagaacctggaacagagccgagctggccatcagcaccttctggcccaacttctaccaggtgatcttcgaggtgatcaccagcggccaccagggctacctggccatcgacgaggtgaaggtgctgggccacccctgcaccagaaccccccacttcctgagaatccagaacgtggaggtgaacgccggccagttcgccaccttccagtgcagcgccatcggcagaaccgtggccggcgacagactgtggctgcagggcatcgacgtgagagacgcccccctgaaggagatcaaggtgaccagcagcagaagattcatcgccagcttcaacgtggtgaacaccaccaagagagacgccggcaagtacagatgcatgatcagaaccgagggcggcgtgggcatcagcaactacgccgagctggtggtgaaggagccccccgtgcccatcgcccccccccagctggccagcgtgggcgccacctacctgtggatccagctgaacgccaacagcatcaacggcgacggccccatcgtggccagagaggtggagtactgcaccgccagcggcagctggaacgacagacagcccgtggacagcaccagctacaagatcggccacctggaccccgacaccgagtacgagatcagcgtgctgctgaccagacccggcgagggcggcaccggcagccccggccccgccctgagaaccagaaccaagtgcgccgaccccatgagaggccccagaaagctggaggtggtggaggtgaagagcagacagatcaccatcagatgggagcccttcggctacaacgtgaccagatgccacagctacaacctgaccgtgcactactgctaccaggtgggcggccaggagcaggtgagagaggaggtgagctgggacaccgagaacagccacccccagcacaccatcaccaacctgagcccctacaccaacgtgagcgtgaagctgatcctgatgaaccccgagggcagaaaggagagccaggagctgatcgtgcagaccgacgaggacctgcccggcgccgtgcccaccgagagcatccagggcagcaccttcgaggagaagatcttcctgcagtggagagagcccacccagacctacggcgtgatcaccctgtacgagatcacctacaaggccgtgagcagcttcgaccccgagatcgacctgagcaaccagagcggcagagtgagcaagctgggcaacgagacccacttcctgttcttcggcctgtaccccggcaccacctacagcttcaccatcagagccagcaccgccaagggcttcggcccccccgccaccaaccagttcaccaccaagatcagcgcccccagcatgcccgcctacgagctggagacccccctgaaccagaccgacaacaccgtgaccgtgatgctgaagcccgcccacagcagaggcgcccccgtgagcgtgtaccagatcgtggtggaggaggagagacccagaagaaccaagaagaccaccgagatcctgaagtgctaccccgtgcccatccacttccagaacgccagcctgctgaacagccagtactacttcgccgccgagttccccgccgacagcctgcaggccgcccagcccttcaccatcggcgacaacaagacctacaacggctactggaacacccccctgctgccctacaagagctacagaatctacttccaggccgccagcagagccaacggcgagaccaagatcgactgcgtgcaggtggccaccaagggcgccgccacccccaagcccgtgcccgagcccgagaagcagaccgaccacaccgtgaagatcgccggcgtgatcgccggcatcctgctgttcgtgatcatcttcctgggcgtggtgctggtgatgaagaagagaaagctggccaagaagagaaaggagaccatgagcagcaccagacaggagatgaccgtgatggtgaacagcatggacaagagctacgccgagcagggcaccaactgcgacgaggccttcagcttcatggacacccacaacctgaacggcagaagcgtgagcagccccagcagcttcaccatgaagaccaacaccctgagcaccagcgtgcccaacagctactaccccgacgagacccacaccatggccagcgacaccagcagcctggtgcagagccacacctacaagaagagagagcccgccgacgtgccctaccagaccggccagctgcaccccgccatcagagtggccgacctgctgcagcacatcacccagatgaagtgcgccgagggctacggcttcaaggaggagtacgagagcttcttcgagggccagagcgccccctgggacagcgccaagaaggacgagaacagaatgaagaacagatacggcaacatcatcgcctacgaccacagcagagtgagactgcagaccatcgagggcgacaccaacagcgactacatcaacggcaactacatcgacggctaccacagacccaaccactacatcgccacccagggccccatgcaggagaccatctacgacttctggagaatggtgtggcacgagaacaccgccagcatcatcatggtgaccaacctggtggaggtgggcagagtgaagtgctgcaagtactggcccgacgacaccgagatctacaaggacatcaaggtgaccctgatcgagaccgagctgctggccgagtacgtgatcagaaccttcgccgtggagaagagaggcgtgcacgagatcagagagatcagacagttccacttcaccggctggcccgaccacggcgtgccctaccacgccaccggcctgctgggcttcgtgagacaggtgaagagcaagagcccccccagcgccggccccctggtggtgcactgcagcgccggcgccggcagaaccggctgcttcatcgtgatcgacatcatgctggacatggccgagagagagggcgtggtggacatctacaactgcgtgagagagctgagaagcagaagagtgaacatggtgcagaccgaggagcagtacgtgttcatccacgacgccatcctggaggcctgcctgtgcggcgacaccagcgtgcccgccagccaggtgagaagcctgtactacgacatgaacaagctggacccccagaccaacagcagccagatcaaggaggagttcagaaccctgaacatggtgacccccaccctgagagtggaggactgcagcatcgccctgctgcccagaaaccacgagaagaacagatgcatggacatcctgccccccgacagatgcctgcccttcctgatcaccatcgacggcgagagcagcaactacatcaacgccgccctgatggacagctacaagcagcccagcgccttcatcgtgacccagcaccccctgcccaacaccgtgaaggacttctggagactggtgctggactaccactgcaccagcgtggtgatgctgaacgacgtggaccccgcccagctgtgcccccagtactggcccgagaacggcgtgcacagacacggccccatccaggtggagttcgtgagcgccgacctggaggaggacatcatcagcagaatcttcagaatctacaacgccgccagaccccaggacggctacagaatggtgcagcagttccagttcctgggctggcccatgtacagagacacccccgtgagcaagagaagcttcctgaagctgatcagacaggtggacaagtggcaggaggagtacaacggcggcgagggcagaaccgtggtgcactgcctgaacggcggcggcagaagcggcaccttctgcgccatcagcatcgtgtgcgagatgctgagacaccagagaaccgtggacgtgttccacgccgtgaagaccctgagaaacaacaagcccaacatggtggacctgctggaccagtacaagttctgctacgaggtggccctggagtacctgaacagcggctag

SEQ ID NO: 95564 - DNA, 4401 bp, synthetic construct
  misc_feature 1..4401: note = Description of Artificial Sequence: Synthetic coding sequence
  source 1..4401: mol_type = other DNA
atgagaggcctgggcacctgcctggccaccctggccggcctgctgctgaccgccgccggcgagaccttcagcggcggctgcctgttcgacgagccctacagcacctgcggctacagccagagcgagggcgacgacttcaactgggagcaggtgaacaccctgaccaagcccaccagcgacccctggatgcccagcggcagcttcatgctggtgaacgccagcggcagacccgagggccagagagcccacctgctgctgccccagctgaaggagaacgacacccactgcatcgacttccactacttcgtgagcagcaagagcaacagcccccccggcctgctgaacgtgtacgtgaaggtgaacaacggccccctgggcaaccccatctggaacatcagcggcgaccccaccagaacctggaacagagccgagctggccatcagcaccttctggcccaacttctaccaggtgatcttcgaggtgatcaccagcggccaccagggctacctggccatcgacgaggtgaaggtgctgggccacccctgcaccagaaccccccacttcctgagaatccagaacgtggaggtgaacgccggccagttcgccaccttccagtgcagcgccatcggcagaaccgtggccggcgacagactgtggctgcagggcatcgacgtgagagacgcccccctgaaggagatcaaggtgaccagcagcagaagattcatcgccagcttcaacgtggtgaacaccaccaagagagacgccggcaagtacagatgcatgatcagaaccgagggcggcgtgggcatcagcaactacgccgagctggtggtgaaggagccccccgtgcccatcgcccccccccagctggccagcgtgggcgccacctacctgtggatccagctgaacgccaacagcatcaacggcgacggccccatcgtggccagagaggtggagtactgcaccgccagcggcagctggaacgacagacagcccgtggacagcaccagctacaagatcggccacctggaccccgacaccgagtacgagatcagcgtgctgctgaccagacccggcgagggcggcaccggcagccccggccccgccctgagaaccagaaccaagtgcgccgaccccatgagaggccccagaaagctggaggtggtggaggtgaagagcagacagatcaccatcagatgggagcccttcggctacaacgtgaccagatgccacagctacaacctgaccgtgcactactgctaccaggtgggcggccaggagcaggtgagagaggaggtgagctgggacaccgagaacagccacccccagcacaccatcaccaacctgagcccctacaccaacgtgagcgtgaagctgatcctgatgaaccccgagggcagaaaggagagccaggagctgatcgtgcagaccgacgaggacctgcccggcgccgtgcccaccgagagcatccagggcagcaccttcgaggagaagatcttcctgcagtggagagagcccacccagacctacggcgtgatcaccctgtacgagatcacctacaaggccgtgagcagcttcgaccccgagatcgacctgagcaaccagagcggcagagtgagcaagctgggcaacgagacccacttcctgttcttcggcctgtaccccggcaccacctacagcttcaccatcagagccagcaccgccaagggcttcggcccccccgccaccaaccagttcaccaccaagatcagcgcccccagcatgcccgcctacgagctggagacccccctgaaccagaccgacaacaccgtgaccgtgatgctgaagcccgcccacagcagaggcgcccccgtgagcgtgtaccagatcgtggtggaggaggagagacccagaagaaccaagaagaccaccgagatcctgaagtgctaccccgtgcccatccacttccagaacgccagcctgctgaacagccagtactacttcgccgccgagttccccgccgacagcctgcaggccgcccagcccttcaccatcggcgacaacaagacctacaacggctactggaacacccccctgctgccctacaagagctacagaatctacttccaggccgccagcagagccaacggcgagaccaagatcgactgcgtgcaggtggccaccaagggcgccgccacccccaagcccgtgcccgagcccgagaagcagaccgaccacaccgtgaagatcgccggcgtgatcgccggcatcctgctgttcgtgatcatcttcctgggcgtggtgctggtgatgaagaagagaaagctggccaagaagagaaaggagaccatgagcagcaccagacaggagatgaccgtgatggtgaacagcatggacaagagctacgccgagcagggcaccaactgcgacgaggccttcagcttcatggacacccacaacctgaacggcagaagcgtgagcagccccagcagcttcaccatgaagaccaacaccctgagcaccagcgtgcccaacagctactaccccgaccccttcgtgcccaccgccatcctggacttcagcctgaacaacgagacccacaccatggccagcgacaccagcagcctggtgcagagccacacctacaagaagagagagcccgccgacgtgccctaccagaccggccagctgcaccccgccatcagagtggccgacctgctgcagcacatcacccagatgaagtgcgccgagggctacggcttcaaggaggagtacgagagcttcttcgagggccagagcgccccctgggacagcgccaagaaggacgagaacagaatgaagaacagatacggcaacatcatcgcctacgaccacagcagagtgagactgcagaccatcgagggcgacaccaacagcgactacatcaacggcaactacatcgacggctaccacagacccaaccactacatcgccacccagggccccatgcaggagaccatctacgacttctggagaatggtgtggcacgagaacaccgccagcatcatcatggtgaccaacctggtggaggtgggcagagtgaagtgctgcaagtactggcccgacgacaccgagatctacaaggacatcaaggtgaccctgatcgagaccgagctgctggccgagtacgtgatcagaaccttcgccgtggagaagagaggcgtgcacgagatcagagagatcagacagttccacttcaccggctggcccgaccacggcgtgccctaccacgccaccggcctgctgggcttcgtgagacaggtgaagagcaagagcccccccagcgccggccccctggtggtgcactgcagcgccggcgccggcagaaccggctgcttcatcgtgatcgacatcatgctggacatggccgagagagagggcgtggtggacatctacaactgcgtgagagagctgagaagcagaagagtgaacatggtgcagaccgaggagcagtacgtgttcatccacgacgccatcctggaggcctgcctgtgcggcgacaccagcgtgcccgccagccaggtgagaagcctgtactacgacatgaacaagctggacccccagaccaacagcagccagatcaaggaggagttcagaaccctgaacatggtgacccccaccctgagagtggaggactgcagcatcgccctgctgcccagaaaccacgagaagaacagatgcatggacatcctgccccccgacagatgcctgcccttcctgatcaccatcgacggcgagagcagcaactacatcaacgccgccctgatggacagctacaagcagcccagcgccttcatcgtgacccagcaccccctgcccaacaccgtgaaggacttctggagactggtgctggactaccactgcaccagcgtggtgatgctgaacgacgtggaccccgcccagctgtgcccccagtactggcccgagaacggcgtgcacagacacggccccatccaggtggagttcgtgagcgccgacctggaggaggacatcatcagcagaatcttcagaatctacaacgccgccagaccccaggacggctacagaatggtgcagcagttccagttcctgggctggcccatgtacagagacacccccgtgagcaagagaagcttcctgaagctgatcagacaggtggacaagtggcaggaggagtacaacggcggcgagggcagaaccgtggtgcactgcctgaacggcggcggcagaagcggcaccttctgcgccatcagcatcgtgtgcgagatgctgagacaccagagaaccgtggacgtgttccacgccgtgaagaccctgagaaacaacaagcccaacatggtggacctgctggaccagtacaagttctgctacgaggtggccctggagtacctgaacagcggctag

SEQ ID NO: 95565 - DNA, 3720 bp, synthetic construct
  misc_feature 1..3720: note = Description of Artificial Sequence: Synthetic coding sequence
  source 1..3720: mol_type = other DNA
atgggcaccctgagcctgcaccccggcatcgacgtgagagacgcccccctgaaggagatcaaggtgaccagcagcagaagattcatcgccagcttcaacgtggtgaacaccaccaagagagacgccggcaagtacagatgcatgatcagaaccgagggcggcgtgggcatcagcaactacgccgagctggtggtgaaggagccccccgtgcccatcgcccccccccagctggccagcgtgggcgccacctacctgtggatccagctgaacgccaacagcatcaacggcgacggccccatcgtggccagagaggtggagtactgcaccgccagcggcagctggaacgacagacagcccgtggacagcaccagctacaagatcggccacctggaccccgacaccgagtacgagatcagcgtgctgctgaccagacccggcgagggcggcaccggcagccccggccccgccctgagaaccagaaccaagtgcgccgaccccatgagaggccccagaaagctggaggtggtggaggtgaagagcagacagatcaccatcagatgggagcccttcggctacaacgtgaccagatgccacagctacaacctgaccgtgcactactgctaccaggtgggcggccaggagcaggtgagagaggaggtgagctgggacaccgagaacagccacccccagcacaccatcaccaacctgagcccctacaccaacgtgagcgtgaagctgatcctgatgaaccccgagggcagaaaggagagccaggagctgatcgtgcagaccgacgaggacctgcccggcgccgtgcccaccgagagcatccagggcagcaccttcgaggagaagatcttcctgcagtggagagagcccacccagacctacggcgtgatcaccctgtacgagatcacctacaaggccgtgagcagcttcgaccccgagatcgacctgagcaaccagagcggcagagtgagcaagctgggcaacgagacccacttcctgttcttcggcctgtaccccggcaccacctacagcttcaccatcagagccagcaccgccaagggcttcggcccccccgccaccaaccagttcaccaccaagatcagcgcccccagcatgcccgcctacgagctggagacccccctgaaccagaccgacaacaccgtgaccgtgatgctgaagcccgcccacagcagaggcgcccccgtgagcgtgtaccagatcgtggtggaggaggagagacccagaagaaccaagaagaccaccgagatcctgaagtgctaccccgtgcccatccacttccagaacgccagcctgctgaacagccagtactacttcgccgccgagttccccgccgacagcctgcaggccgcccagcccttcaccatcggcgacaacaagacctacaacggctactggaacacccccctgctgccctacaagagctacagaatctacttccaggccgccagcagagccaacggcgagaccaagatcgactgcgtgcaggtggccaccaagggcgccgccacccccaagcccgtgcccgagcccgagaagcagaccgaccacaccgtgaagatcgccggcgtgatcgccggcatcctgctgttcgtgatcatcttcctgggcgtggtgctggtgatgaagaagagaaagctggccaagaagagaaaggagaccatgagcagcaccagacaggagatgaccgtgatggtgaacagcatggacaagagctacgccgagcagggcaccaactgcgacgaggccttcagcttcatggacacccacaacctgaacggcagaagcgtgagcagccccagcagcttcaccatgaagaccaacaccctgagcaccagcgtgcccaacagctactaccccgacgagacccacaccatggccagcgacaccagcagcctggtgcagagccacacctacaagaagagagagcccgccgacgtgccctaccagaccggccagctgcaccccgccatcagagtggccgacctgctgcagcacatcacccagatgaagtgcgccgagggctacggcttcaaggaggagtacgagagcttcttcgagggccagagcgccccctgggacagcgccaagaaggacgagaacagaatgaagaacagatacggcaacatcatcgcctacgaccacagcagagtgagactgcagaccatcgagggcgacaccaacagcgactacatcaacggcaactacatcgacggctaccacagacccaaccactacatcgccacccagggccccatgcaggagaccatctacgacttctggagaatggtgtggcacgagaacaccgccagcatcatcatggtgaccaacctggtggaggtgggcagagtgaagtgctgcaagtactggcccgacgacaccgagatctacaaggacatcaaggtgaccctgatcgagaccgagctgctggccgagtacgtgatcagaaccttcgccgtggagaagagaggcgtgcacgagatcagagagatcagacagttccacttcaccggctggcccgaccacggcgtgccctaccacgccaccggcctgctgggcttcgtgagacaggtgaagagcaagagcccccccagcgccggccccctggtggtgcactgcagcgccggcgccggcagaaccggctgcttcatcgtgatcgacatcatgctggacatggccgagagagagggcgtggtggacatctacaactgcgtgagagagctgagaagcagaagagtgaacatggtgcagaccgaggagcagtacgtgttcatccacgacgccatcctggaggcctgcctgtgcggcgacaccagcgtgcccgccagccaggtgagaagcctgtactacgacatgaacaagctggacccccagaccaacagcagccagatcaaggaggagttcagaaccctgaacatggtgacccccaccctgagagtggaggactgcagcatcgccctgctgcccagaaaccacgagaagaacagatgcatggacatcctgccccccgacagatgcctgcccttcctgatcaccatcgacggcgagagcagcaactacatcaacgccgccctgatggacagctacaagcagcccagcgccttcatcgtgacccagcaccccctgcccaacaccgtgaaggacttctggagactggtgctggactaccactgcaccagcgtggtgatgctgaacgacgtggaccccgcccagctgtgcccccagtactggcccgagaacggcgtgcacagacacggccccatccaggtggagttcgtgagcgccgacctggaggaggacatcatcagcagaatcttcagaatctacaacgccgccagaccccaggacggctacagaatggtgcagcagttccagttcctgggctggcccatgtacagagacacccccgtgagcaagagaagcttcctgaagctgatcagacaggtggacaagtggcaggaggagtacaacggcggcgagggcagaaccgtggtgcactgcctgaacggcggcggcagaagcggcaccttctgcgccatcagcatcgtgtgcgagatgctgagacaccagagaaccgtggacgtgttccacgccgtgaagaccctgagaaacaacaagcccaacatggtggacctgctggaccagtacaagttctgctacgaggtggccctggagtacctgaacagcggctag

SEQ ID NO: 95566 - DNA, 2940 bp, synthetic construct
  misc_feature 1..2940: note = Description of Artificial Sequence: Synthetic coding sequence
  source 1..2940: mol_type = other DNA
atgagaagacccagaagacccggcggcctgggcggcagcggcggcctgagactgctgctgtgcctgctgctgctgagcagcagacccggcggctgcagcgccgtgagcgcccacggctgcctgttcgacagaagactgtgcagccacctggaggtgtgcatccaggacggcctgttcggccagtgccaggtgggcgtgggccaggccagacccctgctgcaggtgaccagccccgtgctgcagagactgcagggcgtgctgagacagctgatgagccagggcctgagctggcacgacgacctgacccagtacgtgatcagccaggagatggagagaatccccagactgagaccccccgagcccagacccagagacagaagcggcctggcccccaagagacccggccccgccggcgagctgctgctgcaggacatccccaccggcagcgcccccgccgcccagcacagactgccccagccccccgtgggcaagggcggcgccggcgccagcagcagcctgagccccctgcaggccgagctgctgccccccctgctggagcacctgctgctgcccccccagcccccccaccccagcctgagctacgagcccgccctgctgcagccctacctgttccaccagttcggcagcagagacggcagcagagtgagcgagggcagccccggcatggtgagcgtgggccccctgcccaaggccgaggcccccgccctgttcagcagaaccgccagcaagggcatcttcggcgaccaccccggccacagctacggcgacctgcccggccccagccccgcccagctgttccaggacagcggcctgctgtacctggcccaggagctgcccgcccccagcagagccagagtgcccagactgcccgagcagggcagcagcagcagagccgaggacagccccgagggctacgagaaggagggcctgggcgacagaggcgagaagcccgccagccccgccgtgcagcccgacgccgccctgcagagactggccgccgtgctggccggctacggcgtggagctgagacagctgacccccgagcagctgagcaccctgctgaccctgctgcagctgctgcccaagggcgccggcagaaaccccggcggcgtggtgaacgtgggcgccgacatcaagaagaccatggagggccccgtggagggcagagacaccgccgagctgcccgccagaaccagccccatgcccggccaccccaccgccagccccaccagcagcgaggtgcagcaggtgcccagccccgtgagcagcgagccccccaaggccgccagaccccccgtgacccccgtgctgctggagaagaagagccccctgggccagagccagcccaccgtggccggccagcccagcgccagacccgccgccgaggagtacggctacatcgtgaccgaccagaagcccctgagcctggccgccggcgtgaagctgctggagatcctggccgagcacgtgcacatgagcagcggcagcttcatcaacatcagcgtggtgggccccgccctgaccttcagaatcagacacaacgagcagaacctgagcctggccgacgtgacccagcaggccggcctggtgaagagcgagctggaggcccagaccggcctgcagatcctgcagaccggcgtgggccagagagaggaggccgccgccgtgctgccccagaccgcccacagcaccagccccatgagaagcgtgctgctgaccctggtggccctggccggcgtggccggcctgctggtggccctggccgtggccctgtgcgtgagacagcacgccagacagcaggacaaggagagactggccgccctgggccccgagggcgcccacggcgacaccaccttcgagtaccaggacctgtgcagacagcacatggccaccaagagcctgttcaacagagccgagggcccccccgagcccagcagagtgagcagcgtgagcagccagttcagcgacgccgcccaggccagccccagcagccacagcagcacccccagctggtgcgaggagcccgcccaggccaacatggacatcagcaccggccacatgatcctggcctacatggaggaccacctgagaaacagagacagactggccaaggagtggcaggccctgtgcgcctaccaggccgagcccaacacctgcgccaccgcccagggcgagggcaacatcaagaagaacagacaccccgacttcctgccctacgaccacgccagaatcaagctgaaggtggagagcagccccagcagaagcgactacatcaacgccagccccatcatcgagcacgaccccagaatgcccgcctacatcgccacccagggccccctgagccacaccatcgccgacttctggcagatggtgtgggagagcggctgcaccgtgatcgtgatgctgacccccctggtggaggacggcgtgaagcagtgcgacagatactggcccgacgagggcgccagcctgtaccacgtgtacgaggtgaacctggtgagcgagcacatctggtgcgaggacttcctggtgagaagcttctacctgaagaacgtgcagacccaggagaccagaaccctgacccagttccacttcctgagctggcccgccgagggcacccccgccagcaccagacccctgctggacttcagaagaaaggtgaacaagtgctacagaggcagaagctgccccatcatcgtgcactgcagcgacggcgccggcagaaccggcacctacatcctgatcgacatggtgctgaacagaatggccaagggcgtgaaggagatcgacatcgccgccaccctggagcacgtgagagaccagagacccggcctggtgagaagcaaggaccagttcgagttcgccctgaccgccgtggccgaggaggtgaacgccatcctgaaggccctgccccagtag

SEQ ID NO: 95567 - DNA, 2853 bp, synthetic construct
  misc_feature 1..2853: note = Description of Artificial Sequence: Synthetic coding sequence
  source 1..2853: mol_type = other DNA
atgagaagacccagaagacccggcggcctgggcggcagcggcggcctgagactgctgctgtgcctgctgctgctgagcagcagacccggcggctgcagcgccgtgagcgcccacggctgcctgttcgacagaagactgtgcagccacctggaggtgtgcatccaggacggcctgttcggccagtgccaggtgggcgtgggccaggccagacccctgctgcaggtgaccagccccgtgctgcagagactgcagggcgtgctgagacagctgatgagccagggcctgagctggcacgacgacctgacccagtacgtgatcagccaggagatggagagaatccccagactgagaccccccgagcccagacccagagacagaagcggcctggcccccaagagacccggccccgccggcgagctgctgctgcaggacatccccaccggcagcgcccccgccgcccagcacagactgccccagccccccgtgggcaagggcggcgccggcgccagcagcagcctgagccccctgcaggccgagctgctgccccccctgctggagcacctgctgctgcccccccagcccccccaccccagcctgagctacgagcccgccctgctgcagccctacctgttccaccagttcggcagcagagacggcagcagagtgagcgagggcagccccggcatggtgagcgtgggccccctgcccaaggccgaggcccccgccctgttcagcagaaccgccagcaagggcatcttcggcgaccaccccggccacagctacggcgacctgcccggccccagccccgcccagctgttccaggacagcggcctgctgtacctggcccaggagctgcccgcccccagcagagccagagtgcccagactgcccgagcagggcagcagcagcagagccgaggacagccccgagggctacgagaaggagggcctgggcgacagaggcgagaagcccgccagccccgccgtgcagcccgacgccgccctgcagagactggccgccgtgctggccggctacggcgtggagctgagacagctgacccccgagcagctgagcaccctgctgaccctgctgcagctgctgcccaagggcgccggcagaaaccccggcggcgtggtgaacgtgggcgccgacatcaagaagaccatggagggccccgtggagggcagagacaccgccgagctgcccgccagaaccagccccatgcccggccaccccaccgccagccccaccagcagcgaggtgcagcaggtgcccagccccgtgagcagcgagccccccaaggccgccagaccccccgtgacccccgtgctgctggagaagaagagccccctgggccagagccagcccaccgtggccggccagcccagcgccagacccgccgccgaggagtacggctacatcgtgaccgaccagaacgtggtgggccccgccctgaccttcagaatcagacacaacgagcagaacctgagcctggccgacgtgacccagcaggccggcctggtgaagagcgagctggaggcccagaccggcctgcagatcctgcagaccggcgtgggccagagagaggaggccgccgccgtgctgccccagaccgcccacagcaccagccccatgagaagcgtgctgctgaccctggtggccctggccggcgtggccggcctgctggtggccctggccgtggccctgtgcgtgagacagcacgccagacagcaggacaaggagagactggccgccctgggccccgagggcgcccacggcgacaccaccttcgagtaccaggacctgtgcagacagcacatggccaccaagagcctgttcaacagagccgagggcccccccgagcccagcagagtgagcagcgtgagcagccagttcagcgacgccgcccaggccagccccagcagccacagcagcacccccagctggtgcgaggagcccgcccaggccaacatggacatcagcaccggccacatgatcctggcctacatggaggaccacctgagaaacagagacagactggccaaggagtggcaggccctgtgcgcctaccaggccgagcccaacacctgcgccaccgcccagggcgagggcaacatcaagaagaacagacaccccgacttcctgccctacgaccacgccagaatcaagctgaaggtggagagcagccccagcagaagcgactacatcaacgccagccccatcatcgagcacgaccccagaatgcccgcctacatcgccacccagggccccctgagccacaccatcgccgacttctggcagatggtgtgggagagcggctgcaccgtgatcgtgatgctgacccccctggtggaggacggcgtgaagcagtgcgacagatactggcccgacgagggcgccagcctgtaccacgtgtacgaggtgaacctggtgagcgagcacatctggtgcgaggacttcctggtgagaagcttctacctgaagaacgtgcagacccaggagaccagaaccctgacccagttccacttcctgagctggcccgccgagggcacccccgccagcaccagacccctgctggacttcagaagaaaggtgaacaagtgctacagaggcagaagctgccccatcatcgtgcactgcagcgacggcgccggcagaaccggcacctacatcctgatcgacatggtgctgaacagaatggccaagggcgtgaaggagatcgacatcgccgccaccctggagcacgtgagagaccagagacccggcctggtgagaagcaaggaccagttcgagttcgccctgaccgccgtggccgaggaggtgaacgccatcctgaaggccctgccccagtag

SEQ ID NO: 95568 - DNA, 489 bp, synthetic construct
  misc_feature 1..489: note = Description of Artificial Sequence: Synthetic coding sequence
  source 1..489: mol_type = other DNA
atgagaagacccagaagacccggcggcctgggcggcagcggcggcctgagactgctgctgtgcctgctgctgctgagcagcagacccggcggctgcagcgccgtgagcgcccacggctgcctgttcgacagaagactgtgcagccacctggaggtgtgcatccaggacggcctgttcggccagtgccaggtgggcgtgggccaggccagacccctgctgcaggtgaccagccccgtgctgcagagactgcagggcgtgctgagacagctgatgagccagggcctgagctggcacgacgacctgacccagtacgtgatcagccaggagatggagagaatccccagactgagaccccccgagcccagacccagagacagaagcggcctggcccccaagagacccggccccgccggcgagctgctgctgcaggacatccccaccggcagcgcccccgccgcccagctgctgagcgtgcccagcgccggctag

SEQ ID NO: 95569 - DNA, 2670 bp, synthetic construct
  misc_feature 1..2670: note = Description of Artificial Sequence: Synthetic coding sequence
  source 1..2670: mol_type = other DNA
atgagccagggcctgagctggcacgacgacctgacccagtacgtgatcagccaggagatggagagaatccccagactgagaccccccgagcccagacccagagacagaagcggcctggcccccaagagacccggccccgccggcgagctgctgctgcaggacatccccaccggcagcgcccccgccgcccagcacagactgccccagccccccgtgggcaagggcggcgccggcgccagcagcagcctgagccccctgcaggccgagctgctgccccccctgctggagcacctgctgctgcccccccagcccccccaccccagcctgagctacgagcccgccctgctgcagccctacctgttccaccagttcggcagcagagacggcagcagagtgagcgagggcagccccggcatggtgagcgtgggccccctgcccaaggccgaggcccccgccctgttcagcagaaccgccagcaagggcatcttcggcgaccaccccggccacagctacggcgacctgcccggccccagccccgcccagctgttccaggacagcggcctgctgtacctggcccaggagctgcccgcccccagcagagccagagtgcccagactgcccgagcagggcagcagcagcagagccgaggacagccccgagggctacgagaaggagggcctgggcgacagaggcgagaagcccgccagccccgccgtgcagcccgacgccgccctgcagagactggccgccgtgctggccggctacggcgtggagctgagacagctgacccccgagcagctgagcaccctgctgaccctgctgcagctgctgcccaagggcgccggcagaaaccccggcggcgtggtgaacgtgggcgccgacatcaagaagaccatggagggccccgtggagggcagagacaccgccgagctgcccgccagaaccagccccatgcccggccaccccaccgccagccccaccagcagcgaggtgcagcaggtgcccagccccgtgagcagcgagccccccaaggccgccagaccccccgtgacccccgtgctgctggagaagaagagccccctgggccagagccagcccaccgtggccggccagcccagcgccagacccgccgccgaggagtacggctacatcgtgaccgaccagaagcccctgagcctggccgccggcgtgaagctgctggagatcctggccgagcacgtgcacatgagcagcggcagcttcatcaacatcagcgtggtgggccccgccctgaccttcagaatcagacacaacgagcagaacctgagcctggccgacgtgacccagcaggccggcctggtgaagagcgagctggaggcccagaccggcctgcagatcctgcagaccggcgtgggccagagagaggaggccgccgccgtgctgccccagaccgcccacagcaccagccccatgagaagcgtgctgctgaccctggtggccctggccggcgtggccggcctgctggtggccctggccgtggccctgtgcgtgagacagcacgccagacagcaggacaaggagagactggccgccctgggccccgagggcgcccacggcgacaccaccttcgagtaccaggacctgtgcagacagcacatggccaccaagagcctgttcaacagagccgagggcccccccgagcccagcagagtgagcagcgtgagcagccagttcagcgacgccgcccaggccagccccagcagccacagcagcacccccagctggtgcgaggagcccgcccaggccaacatggacatcagcaccggccacatgatcctggcctacatggaggaccacctgagaaacagagacagactggccaaggagtggcaggccctgtgcgcctaccaggccgagcccaacacctgcgccaccgcccagggcgagggcaacatcaagaagaacagacaccccgacttcctgccctacgaccacgccagaatcaagctgaaggtggagagcagccccagcagaagcgactacatcaacgccagccccatcatcgagcacgaccccagaatgcccgcctacatcgccacccagggccccctgagccacaccatcgccgacttctggcagatggtgtgggagagcggctgcaccgtgatcgtgatgctgacccccctggtggaggacggcgtgaagcagtgcgacagatactggcccgacgagggcgccagcctgtaccacgtgtacgaggtgaacctggtgagcgagcacatctggtgcgaggacttcctggtgagaagcttctacctgaagaacgtgcagacccaggagaccagaaccctgacccagttccacttcctgagctggcccgccgagggcacccccgccagcaccagacccctgctggacttcagaagaaaggtgaacaagtgctacagaggcagaagctgccccatcatcgtgcactgcagcgacggcgccggcagaaccggcacctacatcctgatcgacatggtgctgaacagaatggccaagggcgtgaaggagatcgacatcgccgccaccctggagcacgtgagagaccagagacccggcctggtgagaagcaaggaccagttcgagttcgccctgaccgccgtggccgaggaggtgaacgccatcctgaaggccctgccccagtag

SEQ ID NO: 95570 - DNA, 2853 bp, synthetic construct; identical to SEQ ID NO: 95567
  misc_feature 1..2853: note = Description of Artificial Sequence: Synthetic coding sequence
  source 1..2853: mol_type = other DNA

SEQ ID NO: 95571 - DNA, 2961 bp, synthetic construct
  misc_feature 1..2961: note = Description of Artificial Sequence: Synthetic coding sequence
  source 1..2961: mol_type = other DNA
atgggcccccccctgcccctgctgctgctgctgctgctgctgctgccccccagagtgctgcccgccgcccccagcagcgtgcccagaggcagacagctgcccggcagactgggctgcctgctggaggagggcctgtgcggcgccagcgaggcctgcgtgaacgacggcgtgttcggcagatgccagaaggtgcccgccatggacttctacagatacgaggtgagccccgtggccctgcagagactgagagtggccctgcagaagctgagcggcaccggcttcacctggcaggacgactacacccagtacgtgatggaccaggagctggccgacctgcccaagacctacctgagaagacccgaggccagcagccccgccagacccagcaagcacagcgtgggcagcgagagaagatacagcagagagggcggcgccgccctggccaacgccctgagaagacacctgcccttcctggaggccctgagccaggcccccgccagcgacgtgctggccagaacccacaccgcccaggacagaccccccgccgagggcgacgacagattcagcgagagcatcctgacctacgtggcccacaccagcgccctgacctacccccccggcagcagaacccagctgagagaggacctgctgcccagaaccctgggccagctgcagcccgacgagctgagccccaaggtggacagcggcgtggacagacaccacctgatggccgccctgagcgcctacgccgcccagagaccccccgccccccccggcgagggcagcctggagccccagtacctgctgagagcccccagcagaatgcccagacccctgctggcccccgccgccccccagaagtggcccagccccctgggcgacagcgaggaccccagcagcaccggcgacggcgccagaatccacaccctgctgaaggacctgcagagacagcccgccgaggtgagaggcctgagcggcctggagctggacggcatggccgagctgatggccggcctgatgcagggcgtggaccacggcgtggccagaggcagccccggcagagccgccctgggcgagagcggcgagcaggccgacggccccaaggccaccctgagaggcgacagcttccccgacgacggcgtgcaggacgacgacgacagactgtaccaggaggtgcacagactgagcgccaccctgggcggcctgctgcaggaccacggcagcagactgctgcccggcgccctgcccttcgccagacccctggacatggagagaaagaagagcgagcaccccgagagcagcctgagcagcgaggaggagaccgccggcgtggagaacgtgaagagccagacctacagcaaggacctgctgggccagcagccccacagcgagcccggcgccgccgccttcggcgagctgcagaaccagatgcccggccccagcaaggaggagcagagcctgcccgccggcgcccaggaggccctgagcgacggcctgcagctggaggtgcagcccagcgaggaggaggccagaggctacatcgtgaccgacagagaggtgctgggccccgccgtgaccttcaaggtgagcgccaacgtgcagaacgtgaccaccgaggacgtggagaaggccaccgtggacaacaaggacaagctggaggagaccagcggcctgaagatcctgcagaccggcgtgggcagcaagagcaagctgaagttcctgcccccccaggccgagcaggaggacagcaccaagttcatcgccctgaccctggtgagcctggcctgcatcctgggcgtgctgctggccagcggcctgatctactgcctgagacacagcagccagcacagactgaaggagaagctgagcggcctgggcggcgaccccggcgccgacgccaccgccgcctaccaggagctgtgcagacagagaatggccaccagaccccccgacagacccgagggcccccacaccagcagaatcagcagcgtgagcagccagttcagcgacggccccatccccagccccagcgccagaagcagcgccagcagctggagcgaggagcccgtgcagagcaacatggacatcagcaccggccacatgatcctgagctacatggaggaccacctgaagaacaagaacagactggagaaggagtgggaggccctgtgcgcctaccaggccgagcccaacagcagcttcgtggcccagagagaggagaacgtgcccaagaacagaagcctggccgtgctgacctacgaccacagcagagtgctgctgaaggccgagaacagccacagccacagcgactacatcaacgccagccccatcatggaccacgaccccagaaaccccgcctacatcgccacccagggccccctgcccgccaccgtggccgacttctggcagatggtgtgggagagcggctgcgtggtgatcgtgatgctgacccccctggccgagaacggcgtgagacagtgctaccactactggcccgacgagggcagcaacctgtaccacatctacgaggtgaacctggtgagcgagcacatctggtgcgaggacttcctggtgagaagcttctacctgaagaacctgcagaccaacgagaccagaaccgtgacccagttccacttcctgagctggtacgacagaggcgtgcccagcagcagcagaagcctgctggacttcagaagaaaggtgaacaagtgctacagaggcagaagctgccccatcatcgtgcactgcagcgacggcgccggcagaagcggcacctacgtgctgatcgacatggtgctgaacaagatggccaagggcgccaaggagatcgacatcgccgccaccctggagcacctgagagaccagagacccggcatggtgcagaccaaggagcagttcgagttcgccctgaccgccgtggccgaggaggtgaacgccatcctgaaggccctgccccagtag

SEQ ID NO: 95572 - DNA, 2997 bp, synthetic construct
  misc_feature 1..2997: note = Description of Artificial Sequence: Synthetic coding sequence
  source 1..2997: mol_type = other DNA
atgggcccccccctgcccctgctgctgctgctgctgctgctgctgccccccagagtgctgcccgccgcccccagcagcgtgcccagaggcagacagctgcccggcagactggacggcgtgttcggcagatgccagaaggtgcccgccatggacttctacagatacgaggtgagccccgtggccctgcagagactgagagtggccctgcagaagctgagcggcaccggcttcacctggcaggacgactacacccagtacgtgatggaccaggagctggccgacctgcccaagacctacctgagaagacccgaggccagcagccccgccagacccagcaagcacagcgtgggcagcgagagaagatacagcagagagggcggcgccgccctggccaacgccctgagaagacacctgcccttcctggaggccctgagccaggcccccgccagcgacgtgctggccagaacccacaccgcccaggacagaccccccgccgagggcgacgacagattcagcgagagcatcctgacctacgtggcccacaccagcgccctgacctacccccccggcagcagaacccagctgagagaggacctgctgcccagaaccctgggccagctgcagcccgacgagctgagccccaaggtggacagcggcgtggacagacaccacctgatggccgccctgagcgcctacgccgcccagagaccccccgccccccccggcgagggcagcctggagccccagtacctgctgagagcccccagcagaatgcccagacccctgctggcccccgccgccccccagaagtggcccagccccctgggcgacagcgaggaccccagcagcaccggcgacggcgccagaatccacaccctgctgaaggacctgcagagacagcccgccgaggtgagaggcctgagcggcctggagctggacggcatggccgagctgatggccggcctgatgcagggcgtggaccacggcgtggccagaggcagccccggcagagccgccctgggcgagagcggcgagcaggccgacggccccaaggccaccctgagaggcgacagcttccccgacgacggcgtgcaggacgacgacgacagactgtaccaggaggtgcacagactgagcgccaccctgggcggcctgctgcaggaccacggcagcagactgctgcccggcgccctgcccttcgccagacccctggacatggagagaaagaagagcgagcaccccgagagcagcctgagcagcgaggaggagaccgccggcgtggagaacgtgaagagccagacctacagcaaggacctgctgggccagcagccccacagcgagcccggcgccgccgccttcggcgagctgcagaaccagatgcccggccccagcaaggaggagcagagcctgcccgccggcgcccaggaggccctgagcgacggcctgcagctggaggtgcagcccagcgaggaggaggccagaggctacatcgtgaccgacagagaccccctgagacccgaggagggcagaagactggtggaggacgtggccagactgctgcaggtgcccagcagcgccttcgccgacgtggaggtgctgggccccgccgtgaccttcaaggtgagcgccaacgtgcagaacgtgaccaccgaggacgtggagaaggccaccgtggacaacaaggacaagctggaggagaccagcggcctgaagatcctgcagaccggcgtgggcagcaagagcaagctgaagttcctgcccccccaggccgagcaggaggacagcaccaagttcatcgccctgaccctggtgagcctggcctgcatcctgggcgtgctgctggccagcggcctgatctactgcctgagacacagcagccagcacagactgaaggagaagctgagcggcctgggcggcgaccccggcgccgacgccaccgccgcctaccaggagctgtgcagacagagaatggccaccagaccccccgacagacccgagggcccccacaccagcagaatcagcagcgtgagcagccagttcagcgacggccccatccccagccccagcgccagaagcagcgccagcagctggagcgaggagcccgtgcagagcaacatggacatcagcaccggccacatgatcctgagctacatggaggaccacctgaagaacaagaacagactggagaaggagtgggaggccctgtgcgcctaccaggccgagcccaacagcagcttcgtggcccagagagaggagaacgtgcccaagaacagaagcctggccgtgctgacctacgaccacagcagagtgctgctgaaggccgagaacagccacagccacagcgactacatcaacgccagccccatcatggaccacgaccccagaaaccccgcctacatcgccacccagggccccctgcccgccaccgtggccgacttctggcagatggtgtgggagagcggctgcgtggtgatcgtgatgctgacccccctggccgagaacggcgtgagacagtgctaccactactggcccgacgagggcagcaacctgtaccacatctacgaggtgaacctggtgagcgagcacatctggtgcgaggacttcctggtgagaagcttctacctgaagaacctgcagaccaacgagaccagaaccgtgacccagttccacttcctgagctggtacgacagaggcgtgcccagcagcagcagaagcctgctggacttcagaagaaaggtgaacaagtgctacagaggcagaagctgccccatcatcgtgcactgcagcgacggcgccggcagaagcggcacctacgtgctgatcgacatggtgctgaacaagatggccaagggcgccaaggagatcgacatcgccgccaccctggagcacctgagagaccagagacccggcatggtgcagaccaaggagcagttcgagttcgccctgaccgccgtggccgaggaggtgaacgccatcctgaaggccctgccccagtag

SEQ ID NO: 95573 - DNA, 3048 bp, synthetic construct
  misc_feature 1..3048: note = Description of Artificial Sequence: Synthetic coding sequence
  source 1..3048: mol_type = other DNA
atgggcccccccctgcccctgctgctgctgctgctgctgctgctgccccccagagtgctgcccgccgcccccagcagcgtgcccagaggcagacagctgcccggcagactgggctgcctgctggaggagggcctgtgcggcgccagcgaggcctgcgtgaacgacggcgtgttcggcagatgccagaaggtgcccgccatggacttctacagatacgaggtgagccccgtggccctgcagagactgagagtggccctgcagaagctgagcggcaccggcttcacctggcaggacgactacacccagtacgtgatggaccaggagctggccgacctgcccaagacctacctgagaagacccgaggccagcagccccgccagacccagcaagcacagcgtgggcagcgagagaagatacagcagagagggcggcgccgccctggccaacgccctgagaagacacctgcccttcctggaggccctgagccaggcccccgccagcgacgtgctggccagaacccacaccgcccaggacagaccccccgccgagggcgacgacagattcagcgagagcatcctgacctacgtggcccacaccagcgccctgacctacccccccggcagcagaacccagctgagagaggacctgctgcccagaaccctgggccagctgcagcccgacgagctgagccccaaggtggacagcggcgtggacagacaccacctgatggccgccctgagcgcctacgccgcccagagaccccccgccccccccggcgagggcagcctggagccccagtacctgctgagagcccccagcagaatgcccagacccctgctggcccccgccgccccccagaagtggcccagccccctgggcgacagcgaggaccccagcagcaccggcgacggcgccagaatccacaccctgctgaaggacctgcagagacagcccgccgaggtgagaggcctgagcggcctggagctggacggcatggccgagctgatggccggcctgatgcagggcgtggaccacggcgtggccagaggcagccccggcagagccgccctgggcgagagcggcgagcaggccgacggccccaaggccaccctgagaggcgacagcttccccgacgacggcgtgcaggacgacgacgacagactgtaccaggaggtgcacagactgagcgccaccctgggcggcctgctgcaggaccacggcagcagactgctgcccggcgccctgcccttcgccagacccctggacatggagagaaagaagagcgagcaccccgagagcagcctgagcagcgaggaggagaccgccggcgtggagaacgtgaagagccagacctacagcaaggacctgctgggccagcagccccacagcgagcccggcgccgccgccttcggcgagctgcagaaccagatgcccggccccagcaaggaggagcagagcctgcccgccggcgcccaggaggccctgagcgacggcctgcagctggaggtgcagcccagcgaggaggaggccagaggctacatcgtgaccgacagagaccccctgagacccgaggagggcagaagactggtggaggacgtggccagactgctgcaggtgcccagcagcgccttcgccgacgtggaggtgctgggccccgccgtgaccttcaaggtgagcgccaacgtgcagaacgtgaccaccgaggacgtggagaaggccaccgtggacaacaaggacaagctggaggagaccagcggcctgaagatcctgcagaccggcgtgggcagcaagagcaagctgaagttcctgcccccccaggccgagcaggaggacagcaccaagttcatcgccctgaccctggtgagcctggcctgcatcctgggcgtgctgctggccagcggcctgatctactgcctgagacacagcagccagcacagactgaaggagaagctgagcggcctgggcggcgaccccggcgccgacgccaccgccgcctaccaggagctgtgcagacagagaatggccaccagaccccccgacagacccgagggcccccacaccagcagaatcagcagcgtgagcagccagttcagcgacggccccatccccagccccagcgccagaagcagcgccagcagctggagcgaggagcccgtgcagagcaacatggacatcagcaccggccacatgatcctgagctacatggaggaccacctgaagaacaagaacagactggagaaggagtgggaggccctgtgcgcctaccaggccgagcccaacagcagcttcgtggcccagagagaggagaacgtgcccaagaacagaagcctggccgtgctgacctacgaccacagcagagtgctgctgaaggccgagaacagccacagccacagcgactacatcaacgccagccccatcatggaccacgaccccagaaaccccgcctacatcgccacccagggccccctgcccgccaccgtggccgacttctggcagatggtgtgggagagcggctgcgtggtgatcgtgatgctgacccccctggccgagaacggcgtgagacagtgctaccactactggcccgacgagggcagcaacctgtaccacatctacgaggtgaacctggtgagcgagcacatctggtgcgaggacttcctggtgagaagcttctacctgaagaacctgcagaccaacgagaccagaaccgtgacccagttccacttcctgagctggtacgacagaggcgtgcccagcagcagcagaagcctgctggacttcagaagaaaggtgaacaagtgctacagaggcagaagctgccccatcatcgtgcactgcagcgacggcgccggcagaagcggcacctacgtgctgatcgacatggtgctgaacaagatggccaagggcgccaaggagatcgacatcgccgccaccctggagcacctgagagaccagagacccggcatggtgcagaccaaggagcagttcgagttcgccctgaccgccgtggccgaggaggtgaacgccatcctgaaggccctgccccagtag

SEQ ID NO: 95574 - DNA, 3117 bp, synthetic construct
  misc_feature 1..3117: note = Description of Artificial Sequence: Synthetic coding sequence
  source 1..3117: mol_type = other DNA
atggccgtggagagcgagtacagcctgctgagaaccgaggccagcttccccaccatgaagatgttctgcgtgagccacaccctgcccagagtggaggtgatgttcgtgagcggcccccagaccagagagagaaccgagcccgtggaccccagatggcagtgcctggtgcagatgtgggccggctgcctgctggaggagggcctgtgcggcgccagcgaggcctgcgtgaacgacggcgtgttcggcagatgccagaaggtgcccgccatggacttctacagatacgaggtgagccccgtggccctgcagagactgagagtggccctgcagaagctgagcggcaccggcttcacctggcaggacgactacacccagtacgtgatggaccaggagctggccgacctgcccaagacctacctgagaagacccgaggccagcagccccgccagacccagcaagcacagcgtgggcagcgagagaagatacagcagagagggcggcgccgccctggccaacgccctgagaagacacctgcccttcctggaggccctgagccaggcccccgccagcgacgtgctggccagaacccacaccgcccaggacagaccccccgccgagggcgacgacagattcagcgagagcatcctgacctacgtggcccacaccagcgccctgacctacccccccggcagcagaacccagctgagagaggacctgctgcccagaaccctgggccagctgcagcccgacgagctgagccccaaggtggacagcggcgtggacagacaccacctgatggccgccctgagcgcctacgccgcccagagaccccccgccccccccggcgagggcagcctggagccccagtacctgctgagagcccccagcagaatgcccagacccctgctggcccccgccgccccccagaagtggcccagccccctgggcgacagcgaggaccccagcagcaccggcgacggcgccagaatccacaccctgctgaaggacctgcagagacagcccgccgaggtgagaggcctgagcggcctggagctggacggcatggccgagctgatggccggcctgatgcagggcgtggaccacggcgtggccagaggcagccccggcagagccgccctgggcgagagcggcgagcaggccgacggccccaaggccaccctgagaggcgacagcttccccgacgacggcgtgcaggacgacgacgacagactgtaccaggaggtgcacagactgagcgccaccctgggcggcctgctgcaggaccacggcagcagactgctgcccggcgccctgcccttcgccagacccctggacatggagagaaagaagagcgagcaccccgagagcagcctgagcagcgaggaggagaccgccggcgtggagaacgtgaagagccagacctacagcaaggacctgctgggccagcagccccacagcgagcccggcgccgccgccttcggcgagctgcagaaccagatgcccggccccagcaaggaggagcagagcctgcccgccggcgcccaggaggccctgagcgacggcctgcagctggaggtgcagcccagcgaggaggaggccagaggctacatcgtgaccgacagagaccccctgagacccgaggagggcagaagactggtggaggacgtggccagactgctgcaggtgcccagcagcgccttcgccgacgtggaggtgctgggccccgccgtgaccttcaaggtgagcgccaacgtgcagaacgtgaccaccgaggacgtggagaaggccaccgtggacaacaaggacaagctggaggagaccagcggcctgaagatcctgcagaccggcgtgggcagcaagagcaagctgaagttcctgcccccccaggccgagcaggaggacagcaccaagttcatcgccctgaccctggtgagcctggcctgcatcctgggcgtgctgctggccagcggcctgatctactgcctgagacacagcagccagcacagactgaaggagaagctgagcggcctgggcggcgaccccggcgccgacgccaccgccgcctaccaggagctgtgcagacagagaatggccaccagaccccccgacagacccgagggcccccacaccagcagaatcagcagcgtgagcagccagttcagcgacggccccatccccagccccagcgccagaagcagcgccagcagctggagcgaggagcccgtgcagagcaacatggacatcagcaccggccacatgatcctgagctacatggaggaccacctgaagaacaagaacagactggagaaggagtgggaggccctgtgcgcctaccaggccgagcccaacagcagcttcgtggcccagagagaggagaacgtgcccaagaacagaagcctggccgtgctgacctacgaccacagcagagtgctgctgaaggccgagaacagccacagccacagcgactacatcaacgccagccccatcatggaccacgaccccagaaaccccgcctacatcgccacccagggccccctgcccgccaccgtggccgacttctggcagatggtgtgggagagcggctgcgtggtgatcgtgatgctgacccccctggccgagaacggcgtgagacagtgctaccactactggcccgacgagggcagcaacctgtaccacatctacgaggtgaacctggtgagcgagcacatctggtgcgaggacttcctggtgagaagcttctacctgaagaacctgcagaccaacgagaccagaaccgtgacccagttccacttcctgagctggtacgacagaggcgtgcccagcagcagcagaagcctgctggacttcagaagaaaggtgaacaagtgctacagaggcagaagctgccccatcatcgtgcactgcagcgacggcgccggcagaagcggcacctacgtgctgatcgacatggtgctgaacaagatggccaagggcgccaaggagatcgacatcgccgccaccctggagcacctgagagaccagagacccggcatggtgcagaccaaggagcagttcgagttcgccctgaccgccgtggccgaggaggtgaacgccatcctgaaggccctgccccagtag

SEQ ID NO: 95575 - DNA, 2934 bp, synthetic construct
  misc_feature 1..2934: note = Description of Artificial Sequence: Synthetic coding sequence
  source 1..2934: mol_type = other DNA
atgggcccccccctgcccctgctgctgctgctgctgctgctgctgccccccagagtgctgcccgccgcccccagcagcgtgcccagaggcagacagctgcccggcagactgggctgcctgctggaggagggcctgtgcggcgccagcgaggcctgcgtgaacggcttcacctggcaggacgactacacccagtacgtgatggaccaggagctggccgacctgcccaagacctacctgagaagacccgaggccagcagccccgccagacccagcaagcacagcgtgggcagcgagagaagatacagcagagagggcggcgccgccctggccaacgccctgagaagacacctgcccttcctggaggccctgagccaggcccccgccagcgacgtgctggccagaacccacaccgcccaggacagaccccccgccgagggcgacgacagattcagcgagagcatcctgacctacgtggcccacaccagcgccctgacctacccccccggcagcagaacccagctgagagaggacctgctgcccagaaccctgggccagctgcagcccgacgagctgagccccaaggtggacagcggcgtggacagacaccacctgatggccgccctgagcgcctacgccgcccagagaccccccgccccccccggcgagggcagcctggagccccagtacctgctgagagcccccagcagaatgcccagacccctgctggcccccgccgccccccagaagtggcccagccccctgggcgacagcgaggaccccagcagcaccggcgacggcgccagaatccacaccctgctgaaggacctgcagagacagcccgccgaggtgagaggcctgagcggcctggagctggacggcatggccgagctgatggccggcctgatgcagggcgtggaccacggcgtggccagaggcagccccggcagagccgccctgggcgagagcggcgagcaggccgacggccccaaggccaccctgagaggcgacagcttccccgacgacggcgtgcaggacgacgacgacagactgtaccaggaggtgcacagactgagcgccaccctgggcggcctgctgcaggaccacggcagcagactgctgcccggcgccctgcccttcgccagacccctggacatggagagaaagaagagcgagcaccccgagagcagcctgagcagcgaggaggagaccgccggcgtggagaacgtgaagagccagacctacagcaaggacctgctgggccagcagccccacagcgagcccggcgccgccgccttcggcgagctgcagaaccagatgcccggccccagcaaggaggagcagagcctgcccgccggcgcccaggaggccctgagcgacggcctgcagctggaggtgcagcccagcgaggaggaggccagaggctacatcgtgaccgacagagaccccctgagacccgaggagggcagaagactggtggaggacgtggccagactgctgcaggtgcccagcagcgccttcgccgacgtggaggtgctgggccccgccgtgaccttcaaggtgagcgccaacgtgcagaacgtgaccaccgaggacgtggagaaggccaccgtggacaacaaggacaagctggaggagaccagcggcctgaagatcctgcagaccggcgtgggcagcaagagcaagctgaagttcctgcccccccaggccgagcaggaggacagcaccaagttcatcgccctgaccctggtgagcctggcctgcatcctgggcgtgctgctggccagcggcctgatctactgcctgagacacagcagccagcacagactgaaggagaagctgagcggcctgggcggcgaccccggcgccgacgccaccgccgcctaccaggagctgtgcagacagagaatggccaccagaccccccgacagacccgagggcccccacaccagcagaatcagcagcgtgagcagccagttcagcgacggccccatccccagccccagcgccagaagcagcgccagcagctggagcgaggagcccgtgcagagcaacatggacatcagcaccggccacatgatcctgagctacatggaggaccacctgaagaacaagaacagactggagaaggagtgggaggccctgtgcgcctaccaggccgagcccaacagcagcttcgtggcccagagagaggagaacgtgcccaagaacagaagcctggccgtgctgacctacgaccacagcagagtgctgctgaaggccgagaacagccacagccacagcgactacatcaacgccagccccatcatggaccacgaccccagaaaccccgcctacatcgccacccagggccccctgcccgccaccgtggccgacttctggcagatggtgtgggagagcggctgcgtggtgatcgtgatgctgacccccctggccgagaacggcgtgagacagtgctaccactactggcccgacgagggcagcaacctgtaccacatctacgaggtgaacctggtgagcgagcacatctggtgcgaggacttcctggtgagaagcttctacctgaagaacctgcagaccaacgagaccagaaccgtgacccagttccacttcctgagctggtacgacagaggcgtgcccagcagcagcagaagcctgctggacttcagaagaaaggtgaacaagtgctacagaggcagaagctgccccatcatcgtgcactgcagcgacggcgccggcagaagcggcacctacgtgctgatcgacatggtgctgaacaagatggccaagggcgccaaggagatcgacatcgccgccaccctggagcacctgagagaccagagacccggcatggtgcagaccaaggagcagttcgagttcgccctgaccgccgtggccgaggaggtgaacgccatcctgaaggccctgccccagtag

SEQ ID NO: 95576 - DNA, 3651 bp, synthetic construct
  misc_feature 1..3651: note = Description of Artificial Sequence: Synthetic coding sequence
  source 1..3651: mol_type = other DNA
atgggccacctgcccaccggcatccacggcgccagaagactgctgcccctgctgtggctgttcgtgctgttcaagaacgccaccgccttccacgtgaccgtgcaggacgacaacaacatcgtggtgagcctggaggccagcgacgtgatcagccccgccagcgtgtacgtggtgaagatcaccggcgagagcaagaactacttcttcgagttcgaggagttcaacagcaccctgcccccccccgtgatcttcaaggccagctaccacggcctgtactacatcatcaccctggtggtggtgaacggcaacgtggtgaccaagcccagcagaagcatcaccgtgctgaccaagcccctgcccgtgaccagcgtgagcatctacgactacaagcccagccccgagaccggcgtgctgttcgagatccactaccccgagaagtacaacgtgttcaccagagtgaacatcagctactgggagggcaaggacttcagaaccatgctgtacaaggacttcttcaagggcaagaccgtgttcaaccactggctgcccggcatgtgctacagcaacatcaccttccagctggtgagcgaggccaccttcaacaagagcaccctggtggagtacagcggcgtgagccacgagcccaagcagcacagaaccgccccctaccccccccagaacatcagcgtgagaatcgtgaacctgaacaagaacaactgggaggagcagagcggcaacttccccgaggagagcttcatgagaagccaggacaccatcggcaaggagaagctgttccacttcaccgaggagacccccgagatccccagcggcaacatcagcagcggctggcccgacttcaacagcagcgactacgagaccaccagccagccctactggtgggacagcgccagcgccgcccccgagagcgaggacgagttcgtgagcgtgctgcccatggagtacgagaacaacagcaccctgagcgagaccgagaagagcaccagcggcagcttcagcttcttccccgtgcagatgatcctgacctggctgccccccaagccccccaccgccttcgacggcttccacatccacatcgagagagaggagaacttcaccgagtacctgatggtggacgaggaggcccacgagttcgtggccgagctgaaggagcccggcaagtacaagctgagcgtgaccaccttcagcagcagcggcagctgcgagaccagaaagagccagagcgccaagagcctgagcttctacatcagccccagcggcgagtggatcgaggagctgaccgagaagccccagcacgtgagcgtgcacgtgctgagcagcaccaccgccctgatgagctggaccagcagccaggagaactacaacagcaccatcgtgagcgtggtgagcctgacctgccagaagcagaaggagagccagagactggagaagcagtactgcacccaggtgaacagcagcaagcccatcatcgagaacctggtgcccggcgcccagtaccaggtggtgatctacctgagaaagggccccctgatcggcccccccagcgaccccgtgaccttcgccatcgtgcccaccggcatcaaggacctgatgctgtaccccctgggccccaccgccgtggtgctgagctggaccagaccctacctgggcgtgttcagaaagtacgtggtggagatgttctacttcaaccccgccaccatgaccagcgagtggaccacctactacgagatcgccgccaccgtgagcctgaccgccagcgtgagaatcgccaacctgctgcccgcctggtactacaacttcagagtgaccatggtgacctggggcgaccccgagctgagctgctgcgacagcagcaccatcagcttcatcaccgcccccgtggcccccgagatcaccagcgtggagtacttcaacagcctgctgtacatcagctggacctacggcgacgacaccaccgacctgagccacagcagaatgctgcactggatggtggtggccgagggcaagaagaagatcaagaagagcgtgaccagaaacgtgatgaccgccatcctgagcctgccccccggcgacatctacaacctgagcgtgaccgcctgcaccgagagaggcagcaacaccagcatgctgagactggtgaagctggagcccgccccccccaagagcctgttcgccgtgaacaagacccagaccagcgtgaccctgctgtgggtggaggagggcgtggccgacttcttcgaggtgttctgccagcaggtgggcagcagccagaagaccaagctgcaggagcccgtggccgtgagcagccacgtggtgaccatcagcagcctgctgcccgccaccgcctacaactgcagcgtgaccagcttcagccacgacagccccagcgtgcccaccttcatcgccgtgagcaccatggtgaccgagatgaaccccaacgtggtggtgatcagcgtgctggccatcctgagcaccctgctgatcggcctgctgctggtgaccctgatcatcctgagaaagaagcacctgcagatggccagagagtgcggcgccggcaccttcgtgaacttcgccagcctggagagagacggcaagctgccctacaactggagaagaagcatcttcgccttcctgaccctgctgcccagctgcctgtggaccgactacctgctggccttctacatcaacccctggagcaagaacggcctgaagaagagaaagctgaccaaccccgtgcagctggacgacttcgacgcctacatcaaggacatggccaaggacagcgactacaagttcagcctgcagttcgaggagctgaagctgatcggcctggacatcccccacttcgccgccgacctgcccctgaacagatgcaagaacagatacaccaacatcctgccctacgacttcagcagagtgagactggtgagcatgaacgaggaggagggcgccgactacatcaacgccaactacatccccggctacaacagcccccaggagtacatcgccacccagggccccctgcccgagaccagaaacgacttctggaagatggtgctgcagcagaagagccagatcatcgtgatgctgacccagtgcaacgagaagagaagagtgaagtgcgaccactactggcccttcaccgaggagcccatcgcctacggcgacatcaccgtggagatgatcagcgaggaggagcaggacgactgggcctgcagacacttcagaatcaactacgccgacgagatgcaggacgtgatgcacttcaactacaccgcctggcccgaccacggcgtgcccaccgccaacgccgccgagagcatcctgcagttcgtgcacatggtgagacagcaggccaccaagagcaagggccccatgatcatccactgcagcgccggcgtgggcagaaccggcaccttcatcgccctggacagactgctgcagcacatcagagaccacgagttcgtggacatcctgggcctggtgagcgagatgagaagctacagaatgagcatggtgcagaccgaggagcagtacatcttcatccaccagtgcgtgcagctgatgtggatgaagaagaagcagcagttctgcatcagcgacgtgatctacgagaacgtgagcaagagctag

SEQ ID NO: 95577 - DNA, 3567 bp, synthetic construct
  misc_feature 1..3567: note = Description of Artificial Sequence: Synthetic coding sequence
  source 1..3567: mol_type = other DNA
atgggccacctgcccaccggcatccacggcgccagaagactgctgcccctgctgtggctgttcgtgctgttcaagaacgccaccgccttccacgtgaccgtgcaggacgacaacaacatcgtggtgagcctggaggccagcgacgtgatcagccccgccagcgtgtacgtggtgaagatcaccggcgagagcaagaactacttcttcgagttcgaggagttcaacagcaccctgcccccccccgtgatcttcaaggccagctaccacggcctgtactacatcatcaccctggtggtggtgaacggcaacgtggtgaccaagcccagcagaagcatcaccgtgctgaccaagcccctgcccgtgaccagcgtgagcatctacgactacaagcccagccccgagaccggcgtgctgttcgagatccactaccccgagaagtacaacgtgttcaccagagtgaacatcagctactgggagggcaaggacttcagaaccatgctgtacaaggacttcttcaagggcaagaccgtgttcaaccactggctgcccggcatgtgctacagcaacatcaccttccagctggtgagcgaggccaccttcaacaagagcaccctggtggagtacagcggcgtgagccacgagcccaagcagcacagaaccgccccctaccccccccagaacatcagcgtgagaatcgtgaacctgaacaagaacaactgggaggagcagagcggcaacttccccgaggagagcttcatgagaagccaggacaccatcggcaaggagaagctgttccacttcaccgaggagacccccgagatccccagcggcaacatcagcagcggctggcccgacttcaacagcagcgactacgagaccaccagccagccctactggtgggacagcgccagcgccgcccccgagagcgaggacgagttcgtgagcgtgctgcccatggagtacgagaacaacagcaccctgagcgagaccgagaagagcaccagcggcagcttcagcttcttccccgtgcagatgatcctgacctggctgccccccaagccccccaccgccttcgacggcttccacatccacatcgagagagaggagaacttcaccgagtacctgatggtggacgaggaggcccacgagttcgtggccgagctgaaggagcccggcaagtacaagctgagcgtgaccaccttcagcagcagcggcagctgcgagaccagaaagagccagagcgccaagagcctgagcttctacatcagccccagcggcgagtggatcgaggagctgaccgagaagccccagcacgtgagcgtgcacgtgctgagcagcaccaccgccctgatgagctggaccagcagccaggagaactacaacagcaccatcgtgagcgtggtgagcctgacctgccagaagcagaaggagagccagagactggagaagcagtactgcacccaggtgaacagcagcaagcccatcatcgagaacctggtgcccggcgcccagtaccaggtggtgatctacctgagaaagggccccctgatcggcccccccagcgaccccgtgaccttcgccatcgtgcccaccggcatcaaggacctgatgctgtaccccctgggccccaccgccgtggtgctgagctggaccagaccctacctgggcgtgttcagaaagtacgtggtggagatgttctacttcaaccccgccaccatgaccagcgagtggaccacctactacgagatcgccgccaccgtgagcctgaccgccagcgtgagaatcgccaacctgctgcccgcctggtactacaacttcagagtgaccatggtgacctggggcgaccccgagctgagctgctgcgacagcagcaccatcagcttcatcaccgcccccgtggcccccgagatcaccagcgtggagtacttcaacagcctgctgtacatcagctggacctacggcgacgacaccaccgacctgagccacagcagaatgctgcactggatggtggtggccgagggcaagaagaagatcaagaagagcgtgaccagaaacgtgatgaccgccatcctgagcctgccccccggcgacatctacaacctgagcgtgaccgcctgcaccgagagaggcagcaacaccagcatgctgagactggtgaagctggagcccgccccccccaagagcctgttcgccgtgaacaagacccagaccagcgtgaccctgctgtgggtggaggagggcgtggccgacttcttcgaggtgttctgccagcaggtgggcagcagccagaagaccaagctgcaggagcccgtggccgtgagcagccacgtggtgaccatcagcagcctgctgcccgccaccgcctacaactgcagcgtgaccagcttcagccacgacagccccagcgtgcccaccttcatcgccgtgagcaccatggtgaccgagatgaaccccaacgtggtggtgatcagcgtgctggccatcctgagcaccctgctgatcggcctgctgctggtgaccctgatcatcctgagaaagaagcacctgcagatggccagagagtgcggcgccggcaccttcgtgaacttcgccagcctggagagagacggcaagctgccctacaactggagcaagaacggcctgaagaagagaaagctgaccaaccccgtgcagctggacgacttcgacgcctacatcaaggacatggccaaggacagcgactacaagttcagcctgcagttcgaggagctgaagctgatcggcctggacatcccccacttcgccgccgacctgcccctgaacagatgcaagaacagatacaccaacatcctgccctacgacttcagcagagtgagactggtgagcatgaacgaggaggagggcgccgactacatcaacgccaactacatccccggctacaacagcccccaggagtacatcgccacccagggccccctgcccgagaccagaaacgacttctggaagatggtgctgcagcagaagagccagatcatcgtgatgctgacccagtgcaacgagaagagaagagtgaagtgcgaccactactggcccttcaccgaggagcccatcgcctacggcgacatcaccgtggagatgatcagcgaggaggagcaggacgactgggcctgcagacacttcagaatcaactacgccgacgagatgcaggacgtgatgcacttcaactacaccgcctggcccgaccacggcgtgcccaccgccaacgccgccgagagcatcctgcagttcgtgcacatggtgagacagcaggccaccaagagcaagggccccatgatcatccactgcagcgccggcgtgggcagaaccggcaccttcatcgccctggacagactgctgcagcacatcagagaccacgagttcgtggacatcctgggcctggtgagcgagatgagaagctacagaatgagcatggtgcagaccgaggagcagtacatcttcatccaccagtgcgtgcagctgatgtggatgaagaagaagcagcagttctgcatcagcgacgtgatctacgagaacgtgagcaagagctag

SEQ ID NO: 95578 - DNA, 1218 bp, synthetic construct
  misc_feature 1..1218: note = Description of Artificial Sequence: Synthetic coding sequence
  source 1..1218: mol_type = other DNA
atggtgaccgagatgaaccccaacgtggtggtgatcagcgtgctggccatcctgagcaccctgctgatcggcctgctgctggtgaccctgatcatcctgagaaagaagcacctgcagatggccagagagtgcggcgccggcaccttcgtgaacttcgccagcctggagagagacggcaagctgccctacaactggagaagaagcatcttcgccttcctgaccctgctgcccagctgcctgtggaccgactacctgctggccttctacatcaacccctggagcaagaacggcctgaagaagagaaagctgaccaaccccgtgcagctggacgacttcgacgcctacatcaaggacatggccaaggacagcgactacaagttcagcctgcagttcgaggagctgaagctgatcggcctggacatcccccacttcgccgccgacctgcccctgaacagatgcaagaacagatacaccaacatcctgccctacgacttcagcagagtgagactggtgagcatgaacgaggaggagggcgccgactacatcaacgccaactacatccccggctacaacagcccccaggagtacatcgccacccagggccccctgcccgagaccagaaacgacttctggaagatggtgctgcagcagaagagccagatcatcgtgatgctgacccagtgcaacgagaagagaagagtgaagtgcgaccactactggcccttcaccgaggagcccatcgcctacggcgacatcaccgtggagatgatcagcgaggaggagcaggacgactgggcctgcagacacttcagaatcaactacgccgacgagatgcaggacgtgatgcacttcaactacaccgcctggcccgaccacggcgtgcccaccgccaacgccgccgagagcatcctgcagttcgtgcacatggtgagacagcaggccaccaagagcaagggccccatgatcatccactgcagcgccggcgtgggcagaaccggcaccttcatcgccctggacagactgctgcagcacatcagagaccacgagttcgtggacatcctgggcctggtgagcgagatgagaagctacagaatgagcatggtgcagaccgaggagcagtacatcttcatccaccagtgcgtgcagctgatgtggatgaagaagaagcagcagttctgcatcagcgacgtgatctacgagaacgtgagcaagagctag

SEQ ID NO: 95579 - DNA, 1218 bp, synthetic construct; identical to SEQ ID NO: 95578
  misc_feature 1..1218: note = Description of Artificial Sequence: Synthetic coding sequence
  source 1..1218: mol_type = other DNA

SEQ ID NO: 95580 - DNA, 1134 bp, synthetic construct
  misc_feature 1..1134: note = Description of Artificial Sequence: Synthetic coding sequence
  source 1..1134: mol_type = other DNA
atggtgaccgagatgaaccccaacgtggtggtgatcagcgtgctggccatcctgagcaccctgctgatcggcctgctgctggtgaccctgatcatcctgagaaagaagcacctgcagatggccagagagtgcggcgccggcaccttcgtgaacttcgccagcctggagagagacggcaagctgccctacaactggagcaagaacggcctgaagaagagaaagctgaccaaccccgtgcagctggacgacttcgacgcctacatcaaggacatggccaaggacagcgactacaagttcagcctgcagttcgaggagctgaagctgatcggcctggacatcccccacttcgccgccgacctgcccctgaacagatgcaagaacagatacaccaacatcctgccctacgacttcagcagagtgagactggtgagcatgaacgaggaggagggcgccgactacatcaacgccaactacatccccggctacaacagcccccaggagtacatcgccacccagggccccctgcccgagaccagaaacgacttctggaagatggtgctgcagcagaagagccagatcatcgtgatgctgacccagtgcaacgagaagagaagagtgaagtgcgaccactactggcccttcaccgaggagcccatcgcctacggcgacatcaccgtggagatgatcagcgaggaggagcaggacgactgggcctgcagacacttcagaatcaactacgccgacgagatgcaggacgtgatgcacttcaactacaccgcctggcccgaccacggcgtgcccaccgccaacgccgccgagagcatcctgcagttcgtgcacatggtgagacagcaggccaccaagagcaagggccccatgatcatccactgcagcgccggcgtgggcagaaccggcaccttcatcgccctggacagactgctgcagcacatcagagaccacgagttcgtggacatcctgggcctggtgagcgagatgagaagctacagaatgagcatggtgcagaccgaggagcagtacatcttcatccaccagtgcgtgcagctgatgtggatgaagaagaagcagcagttctgcatcagcgacgtgatctacgagaacgtgagcaagagctag

SEQ ID NO: 95581 - DNA, 1134 bp, synthetic construct; identical to SEQ ID NO: 95580
  misc_feature 1..1134: note = Description of Artificial Sequence: Synthetic coding sequence
  source 1..1134: mol_type = other DNA

SEQ ID NO: 95582 - DNA, 6888 bp, synthetic construct
  misc_feature 1..6888: note = Description of Artificial Sequence: Synthetic coding sequence
  source 1..6888: mol_type = other DNA
atggacttcctgatcatcttcctgctgctgttcatcggcaccagcgagacccaggtggacgtgagcaacgtggtgcccggcaccagatacgacatcaccatcagcagcatcagcaccacctacaccagccccgtgaccagaatcgtgaccaccaacgtgaccaagcccggcccccccgtgttcctggccggcgagagagtgggcagcgccggcatcctgctgagctggaacaccccccccaaccccaacggcagaatcatcagctacatcgtgaagtacaaggaggtgtgcccctggatgcagaccgtgtacacccaggtgagaagcaagcccgacagcctggaggtgctgctgaccaacctgaaccccggcaccacctacgagatcaaggtgatcatcctgaacgccaccaaggtgggctgcctgctgagccccatcctgctgaacaccgtgctggagggcctggccagagccatcaacctgaccagagagtgccagaccgtggacgccggccagtgcgtgcagtgcgccgtgagagagcccaagcagggcagcaccagcggcggcagagcccagaccaacaagaagaccgccgtgaccagcgccgacctgaaccacaccgccggcgacctgagaaccggcagactgcccccccagcccctgaccgccgagcagcccaactgggaggccccccccagcagaggcagactgaccccccacaaggccggctacagcagcgccaccgccgccggcacccaggccaacagagtgtggagcagacccctggccaagatccagaccaccatcagagagtactacaagcacctgtacgccaagaaggagggcatcctgcccaacagcttctacgaggccagcatcatcctgatccccaagcccgtgcccgagggccccccccagaactgcgtgaccggcaacatcaccggcaagagcttcagcatcctgtgggacccccccaccatcgtgaccggcaagttcagctacagagtggagctgtacggccccagcggcagaatcctggacaacagcaccaaggacctgaagttcgccttcaccaacctgacccccttcaccatgtacgacgtgtacatcgccgccgagaccagcgccggcaccggccccaagagcaacatcagcgtgttcaccccccccgacgtgcccggcgccgtgttcgacctgcagctggccgaggtggagagcacccaggtgagaatcacctggaagaagcccagacagcccaacggcatcatcaaccagtacagagtgaaggtgctggtgcccgagaccggcatcatcctggagaacaccctgctgaccggcaacaacgagtacatcaacgaccccatggcccccgagatcgtgaacatcgtggagcccatggtgggcctgtacgagggcagcgccgagatgagcagcgacctgcacagcctggccaccttcatctacaacagccaccccgacaagaacttccccgccagaaacagagccgaggaccagaccagccccgtggtgaccaccagaaaccagtacatcaccgacatcgccgccgagcagctgagctacgtgatcagaagactggtgcccttcaccgagcacatgatcagcgtgagcgccttcaccatcatgggcgagggcccccccaccgtgctgagcgtgagaaccagacagcaggtgcccagcagcatcaagatcatcaactacaagaacatcagcagcagcagcatcctgctgtactgggacccccccgagtaccccaacggcaagatcacccactacaccatctacgccatggagctggacaccaacagagccttccagatcaccaccatcgacaacagcttcctgatcaccggcctgaagaagtacaccaagtacaagatgagagtggccgccagcacccacgtgggcgagagcagcctgagcgaggagaacgacatcttcgtgagaaccagcgaggacgagcccgagagcagcccccaggacgtggaggtgatcgacgtgaccgccgacgagatcagactgaagtggagcccccccgagaagcccaacggcatcatcatcgcctacgaggtgctgtacaagaacatcgacaccctgtacatgaagaacaccagcaccaccgacatcatcctgagaaacctgagaccccacaccctgtacaacatcagcgtgagaagctacaccagattcggccacggcaaccaggtgagcagcctgctgagcgtgagaaccagcgagaccgtgcccgacagcgcccccgagaacatcacctacaagaacatcagcagcggcgagatcgagctgagcttcctgccccccagcagccccaacggcatcatccagaagtacaccatctacctgaagagaagcaacggcaacgaggagagaaccatcaacaccaccagcctgacccagaacatcaaggtgctgaagaagtacacccagtacatcatcgaggtgagcgccagcaccctgaagggcgagggcgtgagaagcgcccccatcagcatcctgaccgaggaggacgcccccgacagccccccccaggacttcagcgtgaagcagctgagcggcgtgaccgtgaagctgagctggcagccccccctggagcccaacggcatcatcctgtactacaccgtgtacgtgtggaacagaagcagcctgaagaccatcaacgtgaccgagaccagcctggagctgagcgacctggactacaacgtggagtacagcgcctacgtgaccgccagcaccagattcggcgacggcaagaccagaagcaacatcatcagcttccagacccccgagggcgcccccagcgacccccccaaggacgtgtactacgccaacctgagcagcagcagcatcatcctgttctggaccccccccagcaagcccaacggcatcatccagtactacagcgtgtactacagaaacaccagcggcaccttcatgcagaacttcaccctgcacgaggtgaccaacgacttcgacaacatgaccgtgagcaccatcatcgacaagctgaccatcttcagctactacaccttctggctgaccgccagcaccagcgtgggcaacggcaacaagagcagcgacatcatcgaggtgtacaccgaccaggacatccccgagggcttcgtgggcaacctgacctacgagagcatcagcagcaccgccatcaacgtgagctgggtgccccccgcccagcccaacggcctggtgttctactacgtgagcctgatcctgcagcagacccccagacacgtgagaccccccctggtgacctacgagagaagcatctacttcgacaacctggagaagtacaccgactacatcctgaagatcacccccagcaccgagaagggcttcagcgacacctacaccgcccagctgtacatcaagaccgaggaggacgtgcccgagaccagccccatcatcaacaccttcaagaacctgagcagcaccagcgtgctgctgagctgggacccccccgtgaagcccaacggcgccatcatcagctacgacctgaccctgcagggccccaacgagaactacagcttcatcaccagcgacaactacatcatcctggaggagctgagccccttcaccctgtacagcttcttcgccgccgccagaaccagaaagggcctgggccccagcagcatcctgttcttctacaccgacgagagcgtgcccctggcccccccccagaacctgaccctgatcaactgcaccagcgacttcgtgtggctgaagtggagccccagccccctgcccggcggcatcgtgaaggtgtacagcttcaagatccacgagcacgagaccgacaccatctactacaagaacatcagcggcttcaagaccgaggccaagctggtgggcctggagcccgtgagcacctacagcatcagagtgagcgccttcaccaaggtgggcaacggcaaccagttcagcaacgtggtgaagttcaccacccaggagagcgtgcccgacgtggtgcagaacatgcagtgcatggccaccagctggcagagcgtgctggtgaagtgggacccccccaagaaggccaacggcatcatcacccagtacatggtgaccgtggagagaaacagcaccaaggtgagcccccaggaccacatgtacaccttcatcaagctgctggccaacaccagctacgtgttcaaggtgagagccagcaccagcgccggcgagggcgacgagagcacctgccacgtgagcaccctgcccgagaccgtgcccagcgtgcccaccaacatcgccttcagcgacgtgcagagcaccagcgccaccctgacctggatcagacccgacaccatcctgggctacttccagaactacaagatcaccacccagctgagagcccagaagtgcaaggagtgggagagcgaggagtgcgtggagtaccagaagatccagtacctgtacgaggcccacctgaccgaggagaccgtgtacggcctgaagaagttcagatggtacagattccaggtggccgccagcaccaacgccggctacggcaacgccagcaactggatcagcaccaagaccctgcccggcccccccgacggcccccccgagaacgtgcacgtggtggccaccagccccttcagcatcagcatcagctggagcgagcccgccgtgatcaccggccccacctgctacctgatcgacgtgaagagcgtggacaacgacgagttcaacatcagcttcatcaagagcaacgaggagaacaagaccatcgagatcaaggacctggagatcttcaccagatacagcgtggtgatcaccgccttcaccggcaacatcagcgccgcctacgtggagggcaagagcagcgccgagatgatcgtgaccaccctggagagcgcccccaaggacccccccaacaacatgaccttccagaagatccccgacgaggtgaccaagttccagctgaccttcctgccccccagccagcccaacggcaacatccaggtgtaccaggccctggtgtacagagaggacgaccccaccgccgtgcagatccacaacctgagcatcatccagaagaccaacaccttcgtgatcgccatgctggagggcctgaagggcggccacacctacaacatcagcgtgtacgccgtgaacagcgccggcgccggccccaaggtgcccatgagaatcaccatggacatcaaggcccccgccagacccaagaccaagcccacccccatctacgacgccaccggcaagctgctggtgaccagcaccaccatcaccatcagaatgcccatctgctactacagcgacgaccacggccccatcaagaacgtgcaggtgctggtgaccgagaccggcgcccagcacgacggcaacgtgaccaagtggtacgacgcctacttcaacaaggccagaccctacttcaccaacgagggcttccccaaccccccctgcaccgagggcaagaccaagttcagcggcaacgaggagatctacatcatcggcgccgacaacgcctgcatgatccccggcaacgaggacaagatctgcaacggccccctgaagcccaagaagcagtacctgttcaagttcagagccaccaacatcatgggccagttcaccgacagcgactacagcgaccccgtgaagaccctgggcgagggcctgagcgagagaaccgtggagatcatcctgagcgtgaccctgtgcatcctgagcatcatcctgctgggcaccgccatcttcgccttcgccagaatcagacagaagcagaaggagggcggcacctacagcccccaggacgccgagatcatcgacaccaagctgaagctggaccagctgatcaccgtggccgacctggagctgaaggacgagagactgaccagactgctgagctacagaaagagcatcaagcccatcagcaagaagagcttcctgcagcacgtggaggagctgtgcaccaacaacaacctgaagttccaggaggagttcagcgagctgcccaagttcctgcaggacctgagcagcaccgacgccgacctgccctggaacagagccaagaacagattccccaacatcaagccctacaacaacaacagagtgaagctgatcgccgacgccagcgtgcccggcagcgactacatcaacgccagctacatcagcggctacctgtgccccaacgagttcatcgccacccagggccccctgcccggcaccgtgggcgacttctggagaatggtgtgggagaccagagccaagaccctggtgatgctgacccagtgcttcgagaagggcagaatcagatgccaccagtactggcccgaggacaacaagcccgtgaccgtgttcggcgacatcgtgatcaccaagctgatggaggacgtgcagatcgactggaccatcagagacctgaagatcgagagacacggcgactgcatgaccgtgagacagtgcaacttcaccgcctggcccgagcacggcgtgcccgagaacagcgcccccctgatccacttcgtgaagctggtgagagccagcagagcccacgacaccacccccatgatcgtgcactgcagcgccggcgtgggcagaaccggcgtgttcatcgccctggaccacctgacccagcacatcaacgaccacgacttcgtggacatctacggcctggtggccgagctgagaagcgagagaatgtgcatggtgcagaacctggcccagtacatcttcctgcaccagtgcatcctggacctgctgagcaacaagggcagcaaccagcccatctgcttcgtgaactacagcgccctgcagaagatggacagcctggacgccatggagggcgacgtggagctggagtgggaggagaccaccatgtag

SEQ ID NO: 95583 - DNA, 5787 bp, synthetic construct
  misc_feature 1..5787: note = Description of Artificial Sequence: Synthetic coding sequence
  source 1..5787: mol_type = other DNA
atggcccccacctggggccccggcatggtgagcgtggtgggccccatgggcctgctggtggtgctgctggtgggcggctgcgccgccgaggagccccccagattcatcaaggagcccaaggaccagatcggcgtgagcggcggcgtggccagcttcgtgtgccaggccaccggcgaccccaagcccagagtgacctggaacaagaagggcaagaaggtgaacagccagagattcgagaccatcgagttcgacgagagcgccggcgccgtgctgagaatccagcccctgagaacccccagagacgagaacgtgtacgagtgcgtggcccagaacagcgtgggcgagatcaccgtgcacgccaagctgaccgtgctgagagaggaccagctgcccagcggcttccccaacatcgacatgggcccccagctgaaggtggtggagagaaccagaaccgccaccatgctgtgcgccgccagcggcaaccccgaccccgagatcacctggttcaaggacttcctgcccgtggaccccagcgccagcaacggcagaatcaagcagctgagaagcgaccaggccttcagccacctgcccaccggcgccctgcagatcgagagcagcgaggagaccgaccagggcaagtacgagtgcgtggccaccaacagcgccggcgtgagatacagcagccccgccaacctgtacgtgagagtgagaagagtggcccccagattcagcatcctgcccatgagccacgagatcatgcccggcggcaacgtgaacatcacctgcgtggccgtgggcagccccatgccctacgtgaagtggatgcagggcgccgaggacctgacccccgaggacgacatgcccgtgggcagaaacgtgctggagctgaccgacgtgaaggacagcgccaactacacctgcgtggccatgagcagcctgggcgtgatcgaggccgtggcccagatcaccgtgaagagcctgcccaaggcccccggcacccccatggtgaccgagaacaccgccaccagcatcaccatcacctgggacagcggcaaccccgaccccgtgagctactacgtgatcgagtacaagagcaagagccaggacggcccctaccagatcaaggaggacatcaccaccaccagatacagcatcggcggcctgagccccaacagcgagtacgagatctgggtgagcgccgtgaacagcatcggccagggcccccccagcgagagcgtggtgaccagaaccggcgagcaggcccccgccagcgcccccagaaacgtgcaggccagaatgctgagcgccaccaccatgatcgtgcagtgggaggagcccgtggagcccaacggcctgatcagaggctacagagtgtactacaccatggagcccgagcaccccgtgggcaactggcagaagcacaacgtggacgacagcctgctgaccaccgtgggcagcctgctggaggacgagacctacaccgtgagagtgctggccttcaccagcgtgggcgacggccccctgagcgaccccatccaggtgaagacccagcagggcgtgcccggccagcccatgaacctgagagccgaggccagaagcgagaccagcatcaccctgagctggagcccccccagacaggagagcatcatcaagtacgagctgctgttcagagagggcgaccacggcagagaggtgggcagaaccttcgaccccaccaccagctacgtggtggaggacctgaagcccaacaccgagtacgccttcagactggccgccagaagcccccagggcctgggcgccttcacccccgtggtgagacagagaaccctgcagagcaagcccagcgcccccccccaggacgtgaagtgcgtgagcgtgagaagcaccgccatcctggtgagctggagaccccccccccccgagacccacaacggcgccctggtgggctacagcgtgagatacagacccctgggcagcgaggaccccgagcccaaggaggtgaacggcatcccccccaccaccacccagatcctgctggaggccctggagaagtggacccagtacagaatcaccaccgtggcccacaccgaggtgggccccggccccgagagcagccccgtggtggtgagaaccgacgaggacgtgcccagcgccccccccagaaaggtggaggccgaggccctgaacgccaccgccatcagagtgctgtggagaagccccgcccccggcagacagcacggccagatcagaggctaccaggtgcactacgtgagaatggagggcgccgaggccagaggcccccccagaatcaaggacgtgatgctggccgacgcccagtgggagaccgacgacaccgccgagtacgagatggtgatcaccaacctgcagcccgagaccgcctacagcatcaccgtggccgcctacaccatgaagggcgacggcgccagaagcaagcccaaggtggtggtgaccaagggcgccgtgctgggcagacccaccctgagcgtgcagcagacccccgagggcagcctgctggccagatgggagccccccgccggcaccgccgaggaccaggtgctgggctacagactgcagttcggcagagaggacagcacccccctggccaccctggagttcccccccagcgaggacagatacaccgccagcggcgtgcacaagggcgccacctacgtgttcagactggccgccagaagcagaggcggcctgggcgaggaggccgccgaggtgctgagcatccccgaggacacccccagaggccacccccagatcctggaggccgccggcaacgccagcgccggcaccgtgctgctgagatggctgccccccgtgcccgccgagagaaacggcgccatcgtgaagtacaccgtggccgtgagagaggccggcgccctgggccccgccagagagaccgagctgcccgccgccgccgagcccggcgccgagaacgccctgaccctgcagggcctgaagcccgacaccgcctacgacctgcaggtgagagcccacaccagaagaggccccggccccttcagcccccccgtgagatacagaaccttcctgagagaccaggtgagccccaagaacttcaaggtgaagatgatcatgaagaccagcgtgctgctgagctgggagttccccgacaactacaacagccccaccccctacaagatccagtacaacggcctgaccctggacgtggacggcagaaccaccaagaagctgatcacccacctgaagccccacaccttctacaacttcgtgctgaccaacagaggcagcagcctgggcggcctgcagcagaccgtgaccgcctggaccgccttcaacctgctgaacggcaagcccagcgtggcccccaagcccgacgccgacggcttcatcatggtgtacctgcccgacggccagagccccgtgcccgtgcagagctacttcatcgtgatggtgcccctgagaaagagcagaggcggccagttcctgacccccctgggcagccccgaggacatggacctggaggagctgatccaggacatcagcagactgcagagaagaagcctgagacacagcagacagctggaggtgcccagaccctacatcgccgccagattcagcgtgctgccccccaccttccaccccggcgaccagaagcagtacggcggcttcgacaacagaggcctggagcccggccacagatacgtgctgttcgtgctggccgtgctgcagaagagcgagcccaccttcgccgccagccccttcagcgaccccttccagctggacaaccccgacccccagcccatcgtggacggcgaggagggcctgatctgggtgatcggccccgtgctggccgtggtgttcatcatctgcatcgtgatcgccatcctgctgtacaagaacaagcccgacagcaagagaaaggacagcgagcccagaaccaagtgcctgctgaacaacgccgacctggccccccaccaccccaaggaccccgtggagatgagaagaatcaacttccagacccccggcatgctgagccacccccccatccccatcgccgacatggccgagcacaccgagagactgaaggccaacgacagcctgaagctgagccaggagtacgagagcatcgaccccggccagcagttcacctgggagcacagcaacctggaggtgaacaagcccaagaacagatacgccaacgtgatcgcctacgaccacagcagagtgatcctgcagcccatcgagggcatcatgggcagcgactacatcaacgccaactacgtggacggctacagatgccagaacgcctacatcgccacccagggccccctgcccgagaccttcggcgacttctggagaatggtgtgggagcagagaagcgccaccatcgtgatgatgaccagactggaggagaagagcagaatcaagtgcgaccagtactggcccaacagaggcaccgagacctacggcttcatccaggtgaccctgctggacaccatcgagctggccaccttctgcgtgagaaccttcagcctgcacaagaacggcagcagcgagaagagagaggtgagacagttccagttcaccgcctggcccgaccacggcgtgcccgagtaccccacccccttcctggccttcctgagaagagtgaagacctgcaacccccccgacgccggccccatcgtggtgcactgcagcgccggcgtgggcagaaccggctgcttcatcgtgatcgacgccatgctggagagaatcaagcccgagaagaccgtggacgtgtacggccacgtgaccctgatgagaagccagagaaactacatggtgcagaccgaggaccagtacagcttcatccacgaggccctgctggaggccgtgggctgcggcaacaccgaggtgcccgccagaagcctgtacgcctacatccagaagctggcccaggtggagcccggcgagcacgtgaccggcatggagctggagttcaagagactggccaacagcaaggcccacaccagcagattcatcagcgccaacctgccctgcaacaagttcaagaacagactggtgaacatcatgccctacgagagcaccagagtgtgcctgcagcccatcagaggcgtggagggcagcgactacatcaacgccagcttcatcgacggctacagacagcagaaggcctacatcgccacccagggccccctggccgagaccaccgaggacttctggagaatgctgtgggagaacaacagcaccatcgtggtgatgctgaccaagctgagagagatgggcagagagaagtgccaccagtactggcccgccgagagaagcgccagataccagtacttcgtggtggaccccatggccgagtacaacatgccccagtacatcctgagagagttcaaggtgaccgacgccagagacggccagagcagaaccgtgagacagttccagttcaccgactggcccgagcagggcgtgcccaagagcggcgagggcttcatcgacttcatcggccaggtgcacaagaccaaggagcagttcggccaggacggccccatcagcgtgcactgcagcgccggcgtgggcagaaccggcgtgttcatcaccctgagcatcgtgctggagagaatgagatacgagggcgtggtggacatcttccagaccgtgaagatgctgagaacccagagacccgccatggtgcagaccgaggacgagtaccagttctgctaccaggccgccctggagtacctgggcagcttcgaccactacgccacctag

SEQ ID NO: 95584 - DNA, 5733 bp, synthetic construct
  misc_feature 1..5733: note = Description of Artificial Sequence: Synthetic coding sequence
  source 1..5733: mol_type = other DNA
atggcccccacctggggccccggcatggtgagcgtggtgggccccatgggcctgctggtggtgctgctggtgggcggctgcgccgccgaggagccccccagattcatcaaggagcccaaggaccagatcggcgtgagcggcggcgtggccagcttcgtgtgccaggccaccggcgaccccaagcccagagtgacctggaacaagaagggcaagaaggtgaacagccagagattcgagaccatcgagttcgacgagagcgccggcgccgtgctgagaatccagcccctgagaacccccagagacgagaacgtgtacgagtgcgtggcccagaacagcgtgggcgagatcaccgtgcacgccaagctgaccgtgctgagagaggaccagctgcccagcggcttccccaacatcgacatgggcccccagctgaaggtggtggagagaaccagaaccgccaccatgctgtgcgccgccagcggcaaccccgaccccgagatcacctggttcaaggacttcctgcccgtggaccccagcgccagcaacggcagaatcaagcagctgagaagcggcgccctgcagatcgagagcagcgaggagaccgaccagggcaagtacgagtgcgtggccaccaacagcgccggcgtgagatacagcagccccgccaacctgtacgtgagagtgagaagagtggcccccagattcagcatcctgcccatgagccacgagatcatgcccggcggcaacgtgaacatcacctgcgtggccgtgggcagccccatgccctacgtgaagtggatgcagggcgccgaggacctgacccccgaggacgacatgcccgtgggcagaaacgtgctggagctgaccgacgtgaaggacagcgccaactacacctgcgtggccatgagcagcctgggcgtgatcgaggccgtggcccagatcaccgtgaagagcctgcccaaggcccccggcacccccatggtgaccgagaacaccgccaccagcatcaccatcacctgggacagcggcaaccccgaccccgtgagctactacgtgatcgagtacaagagcaagagccaggacggcccctaccagatcaaggaggacatcaccaccaccagatacagcatcggcggcctgagccccaacagcgagtacgagatctgggtgagcgccgtgaacagcatcggccagggcccccccagcgagagcgtggtgaccagaaccggcgagcaggcccccgccagcgcccccagaaacgtgcaggccagaatgctgagcgccaccaccatgatcgtgcagtgggaggagcccgtggagcccaacggcctgatcagaggctacagagtgtactacaccatggagcccgagcaccccgtgggcaactggcagaagcacaacgtggacgacagcctgctgaccaccgtgggcagcctgctggaggacgagacctacaccgtgagagtgctggccttcaccagcgtgggcgacggccccctgagcgaccccatccaggtgaagacccagcagggcgtgcccggccagcccatgaacctgagagccgaggccagaagcgagaccagcatcaccctgagctggagcccccccagacaggagagcatcatcaagtacgagctgctgttcagagagggcgaccacggcagagaggtgggcagaaccttcgaccccaccaccagctacgtggtggaggacctgaagcccaacaccgagtacgccttcagactggccgccagaagcccccagggcctgggcgccttcacccccgtggtgagacagagaaccctgcagagcaagcccagcgcccccccccaggacgtgaagtgcgtgagcgtgagaagcaccgccatcctggtgagctggagaccccccccccccgagacccacaacggcgccctggtgggctacagcgtgagatacagacccctgggcagcgaggaccccgagcccaaggaggtgaacggcatcccccccaccaccacccagatcctgctggaggccctggagaagtggacccagtacagaatcaccaccgtggcccacaccgaggtgggccccggccccgagagcagccccgtggtggtgagaaccgacgaggacgtgcccagcgccccccccagaaaggtggaggccgaggccctgaacgccaccgccatcagagtgctgtggagaagccccgcccccggcagacagcacggccagatcagaggctaccaggtgcactacgtgagaatggagggcgccgaggccagaggcccccccagaatcaaggacgtgatgctggccgacgcccaggagatggtgatcaccaacctgcagcccgagaccgcctacagcatcaccgtggccgcctacaccatgaagggcgacggcgccagaagcaagcccaaggtggtggtgaccaagggcgccgtgctgggcagacccaccctgagcgtgcagcagacccccgagggcagcctgctggccagatgggagccccccgccggcaccgccgaggaccaggtgctgggctacagactgcagttcggcagagaggacagcacccccctggccaccctggagttcccccccagcgaggacagatacaccgccagcggcgtgcacaagggcgccacctacgtgttcagactggccgccagaagcagaggcggcctgggcgaggaggccgccgaggtgctgagcatccccgaggacacccccagaggccacccccagatcctggaggccgccggcaacgccagcgccggcaccgtgctgctgagatggctgccccccgtgcccgccgagagaaacggcgccatcgtgaagtacaccgtggccgtgagagaggccggcgccctgggccccgccagagagaccgagctgcccgccgccgccgagcccggcgccgagaacgccctgaccctgcagggcctgaagcccgacaccgcctacgacctgcaggtgagagcccacaccagaagaggccccggccccttcagcccccccgtgagatacagaaccttcctgagagaccaggtgagccccaagaacttcaaggtgaagatgatcatgaagaccagcgtgctgctgagctgggagttccccgacaactacaacagccccaccccctacaagatccagtacaacggcctgaccctggacgtggacggcagaaccaccaagaagctgatcacccacctgaagccccacaccttctacaacttcgtgctgaccaacagaggcagcagcctgggcggcctgcagcagaccgtgaccgcctggaccgccttcaacctgctgaacggcaagcccagcgtggcccccaagcccgacgccgacggcttcatcatggtgtacctgcccgacggccagagccccgtgcccgtgcagagctacttcatcgtgatggtgcccctgagaaagagcagaggcggccagttcctgacccccctgggcagccccgaggacatggacctggaggagctgatccaggacatcagcagactgcagagaagaagcctgagacacagcagacagctggaggtgcccagaccctacatcgccgccagattcagcgtgctgccccccaccttccaccccggcgaccagaagcagtacggcggcttcgacaacagaggcctggagcccggccacagatacgtgctgttcgtgctggccgtgctgcagaagagcgagcccaccttcgccgccagccccttcagcgaccccttccagctggacaaccccgacccccagcccatcgtggacggcgaggagggcctgatctgggtgatcggccccgtgctggccgtggtgttcatcatctgcatcgtgatcgccatcctgctgtacaagaacaagcccgacagcaagagaaaggacagcgagcccagaaccaagtgcctgctgaacaacgccgacctggccccccaccaccccaaggaccccgtggagatgagaagaatcaacttccagacccccggcatgctgagccacccccccatccccatcgccgacatggccgagcacaccgagagactgaaggccaacgacagcctgaagctgagccaggagtacgagagcatcgaccccggccagcagttcacctgggagcacagcaacctggaggtgaacaagcccaagaacagatacgccaacgtgatcgcctacgaccacagcagagtgatcctgcagcccatcgagggcatcatgggcagcgactacatcaacgccaactacgtggacggctacagatgccagaacgcctacatcgccacccagggccccctgcccgagaccttcggcgacttctggagaatggtgtgggagcagagaagcgccaccatcgtgatgatgaccagactggaggagaagagcagaatcaagtgcgaccagtactggcccaacagaggcaccgagacctacggcttcatccaggtgaccctgctggacaccatcgagctggccaccttctgcgtgagaaccttcagcctgcacaagaacggcagcagcgagaagagagaggtgagacagttccagttcaccgcctggcccgaccacggcgtgcccgagtaccccacccccttcctggccttcctgagaagagtgaagacctgcaacccccccgacgccggccccatcgtggtgcactgcagcgccggcgtgggcagaaccggctgcttcatcgtgatcgacgccatgctggagagaatcaagcccgagaagaccgtggacgtgtacggccacgtgaccctgatgagaagccagagaaactacatggtgcagaccgaggaccagtacagcttcatccacgaggccctgctggaggccgtgggctgcggcaacaccgaggtgcccgccagaagcctgtacgcctacatccagaagctggcccaggtggagcccggcgagcacgtgaccggcatggagctggagttcaagagactggccaacagcaaggcccacaccagcagattcatcagcgccaacctgccctgcaacaagttcaagaacagactggtgaacatcatgccctacgagagcaccagagtgtgcctgcagcccatcagaggcgtggagggcagcgactacatcaacgccagcttcatcgacggctacagacagcagaaggcctacatcgccacccagggccccctggccgagaccaccgaggacttctggagaatgctgtgggagaacaacagcaccatcgtggtgatgctgaccaagctgagagagatgggcagagagaagtgccaccagtactggcccgccgagagaagcgccagataccagtacttcgtggtggaccccatggccgagtacaacatgccccagtacatcctgagagagttcaaggtgaccgacgccagagacggccagagcagaaccgtgagacagttccagttcaccgactggcccgagcagggcgtgcccaagagcggcgagggcttcatcgacttcatcggccaggtgcacaagaccaaggagcagttcggccaggacggccccatcagcgtgcactgcagcgccggcgtgggcagaaccggcgtgttcatcaccctgagcatcgtgctggagagaatgagatacgagggcgtggtggacatcttccagaccgtgaagatgctgagaacccagagacccgccatggtgcagaccgaggacgagtaccagttctgctaccaggccgccctggagtacctgggcagcttcgaccactacgccacctag

SEQ ID NO: 95585 - DNA, 4506 bp, synthetic construct
  misc_feature 1..4506: note = Description of Artificial Sequence: Synthetic coding sequence
  source 1..4506: mol_type = other DNA
atggcccccacctggggccccggcatggtgagcgtggtgggccccatgggcctgctggtggtgctgctggtgggcggctgcgccgccgaggagccccccagattcatcaaggagcccaaggaccagatcggcgtgagcggcggcgtggccagcttcgtgtgccaggccaccggcgaccccaagcccagagtgacctggaacaagaagggcaagaaggtgaacagccagagattcgagaccatcgagttcgacgagagcgccggcgccgtgctgagaatccagcccctgagaacccccagagacgagaacgtgtacgagtgcgtggcccagaacagcgtgggcgagatcaccgtgcacgccaagctgaccgtgctgagagaggaccagctgcccagcggcttccccaacatcgacatgggcccccagctgaaggtggtggagagaaccagaaccgccaccatgctgtgcgccgccagcggcaaccccgaccccgagatcacctggttcaaggacttcctgcccgtggaccccagcgccagcaacggcagaatcaagcagctgagaagcggcgccctgcagatcgagagcagcgaggagaccgaccagggcaagtacgagtgcgtggccaccaacagcgccggcgtgagatacagcagccccgccaacctgtacgtgagagtgagaagagtggcccccagattcagcatcctgcccatgagccacgagatcatgcccggcggcaacgtgaacatcacctgcgtggccgtgggcagccccatgccctacgtgaagtggatgcagggcgccgaggacctgacccccgaggacgacatgcccgtgggcagaaacgtgctggagctgaccgacgtgaaggacagcgccaactacacctgcgtggccatgagcagcctgggcgtgatcgaggccgtggcccagatcaccgtgaagagcctgcccaaggcccccggcacccccatggtgaccgagaacaccgccaccagcatcaccatcacctgggacagcggcaaccccgaccccgtgagctactacgtgatcgagtacaagagcaagagccaggacggcccctaccagatcaaggaggacatcaccaccaccagatacagcatcggcggcctgagccccaacagcgagtacgagatctgggtgagcgccgtgaacagcatcggccagggcccccccagcgagagcgtggtgaccagaaccggcgagcaggcccccgccagcgcccccagaaacgtgcaggccagaatgctgagcgccaccaccatgatcgtgcagtgggaggagcccgtggagcccaacggcctgatcagaggctacagagtgtactacaccatggagcccgagcaccccgtgggcaactggcagaagcacaacgtggacgacagcctgctgaccaccgtgggcagcctgctggaggacgagacctacaccgtgagagtgctggccttcaccagcgtgggcgacggccccctgagcgaccccatccaggtgaagacccagcagggcgtgcccggccagcccatgaacctgagagccgaggccagaagcgagaccagcatcaccctgagctggagcccccccagacaggagagcatcatcaagtacgagctgctgttcagagagggcgaccacggcagagaggtgggcagaaccttcgaccccaccaccagctacgtggtggaggacctgaagcccaacaccgagtacgccttcagactggccgccagaagcccccagggcctgggcgccttcacccccgtggtgagacagagaaccctgcagagcatcagccccaagaacttcaaggtgaagatgatcatgaagaccagcgtgctgctgagctgggagttccccgacaactacaacagccccaccccctacaagatccagtacaacggcctgaccctggacgtggacggcagaaccaccaagaagctgatcacccacctgaagccccacaccttctacaacttcgtgctgaccaacagaggcagcagcctgggcggcctgcagcagaccgtgaccgcctggaccgccttcaacctgctgaacggcaagcccagcgtggcccccaagcccgacgccgacggcttcatcatggtgtacctgcccgacggccagagccccgtgcccgtgcagagctacttcatcgtgatggtgcccctgagaaagagcagaggcggccagttcctgacccccctgggcagccccgaggacatggacctggaggagctgatccaggacatcagcagactgcagagaagaagcctgagacacagcagacagctggaggtgcccagaccctacatcgccgccagattcagcgtgctgccccccaccttccaccccggcgaccagaagcagtacggcggcttcgacaacagaggcctggagcccggccacagatacgtgctgttcgtgctggccgtgctgcagaagagcgagcccaccttcgccgccagccccttcagcgaccccttccagctggacaaccccgacccccagcccatcgtggacggcgaggagggcctgatctgggtgatcggccccgtgctggccgtggtgttcatcatctgcatcgtgatcgccatcctgctgtacaagaacaagcccgacagcaagagaaaggacagcgagcccagaaccaagtgcctgctgaacaacgccgacctggccccccaccaccccaaggaccccgtggagatgagaagaatcaacttccagacccccggcatgctgagccacccccccatccccatcgccgacatggccgagcacaccgagagactgaaggccaacgacagcctgaagctgagccaggagtacgagagcatcgaccccggccagcagttcacctgggagcacagcaacctggaggtgaacaagcccaagaacagatacgccaacgtgatcgcctacgaccacagcagagtgatcctgcagcccatcgagggcatcatgggcagcgactacatcaacgccaactacgtggacggctacagatgccagaacgcctacatcgccacccagggccccctgcccgagaccttcggcgacttctggagaatggtgtgggagcagagaagcgccaccatcgtgatgatgaccagactggaggagaagagcagaatcaagtgcgaccagtactggcccaacagaggcaccgagacctacggcttcatccaggtgaccctgctggacaccatcgagctggccaccttctgcgtgagaaccttcagcctgcacaagaacggcagcagcgagaagagagaggtgagacagttccagttcaccgcctggcccgaccacggcgtgcccgagtaccccacccccttcctggccttcctgagaagagtgaagacctgcaacccccccgacgccggccccatcgtggtgcactgcagcgccggcgtgggcagaaccggctgcttcatcgtgatcgacgccatgctggagagaatcaagcccgagaagaccgtggacgtgtacggccacgtgaccctgatgagaagccagagaaactacatggtgcagaccgaggaccagtacagcttcatccacgaggccctgctggaggccgtgggctgcggcaacaccgaggtgcccgccagaagcctgtacgcctacatccagaagctggcccaggtggagcccggcgagcacgtgaccggcatggagctggagttcaagagactggccaacagcaaggcccacaccagcagattcatcagcgccaacctgccctgcaacaagttcaagaacagactggtgaacatcatgccctacgagagcaccagagtgtgcctgcagcccatcagaggcgtggagggcagcgactacatcaacgccagcttcatcgacggctacagacagcagaaggcctacatcgccacccagggccccctggccgagaccaccgaggacttctggagaatgctgtgggagaacaacagcaccatcgtggtgatgctgaccaagctgagagagatgggcagagagaagtgccaccagtactggcccgccgagagaagcgccagataccagtacttcgtggtggaccccatggccgagtacaacatgccccagtacatcctgagagagttcaaggtgaccgacgccagagacggccagagcagaaccgtgagacagttccagttcaccgactggcccgagcagggcgtgcccaagagcggcgagggcttcatcgacttcatcggccaggtgcacaagaccaaggagcagttcggccaggacggccccatcagcgtgcactgcagcgccggcgtgggcagaaccggcgtgttcatcaccctgagcatcgtgctggagagaatgagatacgagggcgtggtggacatcttccagaccgtgaagatgctgagaacccagagacccgccatggtgcagaccgaggacgagtaccagttctgctaccaggccgccctggagtacctgggcagcttcgaccactacgccacctag

SEQ ID NO: 95586 - DNA, 5847 bp, synthetic construct
  misc_feature 1..5847: note = Description of Artificial Sequence: Synthetic coding sequence
  source 1..5847: mol_type = other DNA
atggcccccacctggggccccggcatggtgagcgtggtgggccccatgggcctgctggtggtgctgctggtgggcggctgcgccgccgaggagccccccagattcatcaaggagcccaaggaccagatcggcgtgagcggcggcgtggccagcttcgtgtgccaggccaccggcgaccccaagcccagagtgacctggaacaagaagggcaagaaggtgaacagccagagattcgagaccatcgagttcgacgagagcgccggcgccgtgctgagaatccagcccctgagaacccccagagacgagaacgtgtacgagtgcgtggcccagaacagcgtgggcgagatcaccgtgcacgccaagctgaccgtgctgagagaggaccagctgcccagcggcttccccaacatcgacatgggcccccagctgaaggtggtggagagaaccagaaccgccaccatgctgtgcgccgccagcggcaaccccgaccccgagatcacctggttcaaggacttcctgcccgtggaccccagcgccagcaacggcagaatcaagcagctgagaagcgaccaggccttcagccacctgcccaccggcgccctgcagatcgagagcagcgaggagaccgaccagggcaagtacgagtgcgtggccaccaacagcgccggcgtgagatacagcagccccgccaacctgtacgtgagagtgtggagaaccgtgagaagagtggcccccagattcagcatcctgcccatgagccacgagatcatgcccggcggcaacgtgaacatcacctgcgtggccgtgggcagccccatgccctacgtgaagtggatgcagggcgccgaggacctgacccccgaggacgacatgcccgtgggcagaaacgtgctggagctgaccgacgtgaaggacagcgccaactacacctgcgtggccatgagcagcctgggcgtgatcgaggccgtggcccagatcaccgtgaagagcctgcccaaggcccccggcacccccatggtgaccgagaacaccgccaccagcatcaccatcacctgggacagcggcaaccccgaccccgtgagctactacgtgatcgagtacaagagcaagagccaggacggcccctaccagatcaaggaggacatcaccaccaccagatacagcatcggcggcctgagccccaacagcgagtacgagatctgggtgagcgccgtgaacagcatcggccagggcccccccagcgagagcgtggtgaccagaaccggcgagcaggcccccgccagcgcccccagaaacgtgcaggccagaatgctgagcgccaccaccatgatcgtgcagtgggaggagcccgtggagcccaacggcctgatcagaggctacagagtgtactacaccatggagcccgagcaccccgtgggcaactggcagaagcacaacgtggacgacagcctgctgaccaccgtgggcagcctgctggaggacgagacctacaccgtgagagtgctggccttcaccagcgtgggcgacggccccctgagcgaccccatccaggtgaagacccagcagggcgtgcccggccagcccatgaacctgagagccgaggccagaagcgagaccagcatcaccctgagctggagcccccccagacaggagagcatcatcaagtacgagctgctgttcagagagggcgaccacggcagagaggtgggcagaaccttcgaccccaccaccagctacgtggtggaggacctgaagcccaacaccgagtacgccttcagactggccgccagaagcccccagggcctgggcgccttcacccccgtggtgagacagagaaccctgcagagcaagcccagcgcccccccccaggacgtgaagtgcgtgagcgtgagaagcaccgccatcctggtgagctggagaccccccccccccgagacccacaacggcgccctggtgggctacagcgtgagatacagacccctgggcagcgaggaccccgagcccaaggaggtgaacggcatcccccccaccaccacccagatcctgctggaggccctggagaagtggacccagtacagaatcaccaccgtggcccacaccgaggtgggccccggccccgagagcagccccgtggtggtgagaaccgacgaggacgtgcccagcgccccccccagaaaggtggaggccgaggccctgaacgccaccgccatcagagtgctgtggagaagccccgcccccggcagacagcacggccagatcagaggctaccaggtgcactacgtgagaatggagggcgccgaggccagaggcccccccagaatcaaggacgtgatgctggccgacgcccagtgggagaccgacgacaccgccgagtacgagatggtgatcaccaacctgcagcccgagaccgcctacagcatcaccgtggccgcctacaccatgaagggcgacggcgccagaagcaagcccaaggtggtggtgaccaagggcgccgtgctgggcagacccaccctgagcgtgcagcagacccccgagggcagcctgctggccagatgggagccccccgccggcaccgccgaggaccaggtgctgggctacagactgcagttcggcagagaggacagcacccccctggccaccctggagttcccccccagcgaggacagatacaccgccagcggcgtgcacaagggcgccacctacgtgttcagactggccgccagaagcagaggcggcctgggcgaggaggccgccgaggtgctgagcatccccgaggacacccccagaggccacccccagatcctggaggccgccggcaacgccagcgccggcaccgtgctgctgagatggctgccccccgtgcccgccgagagaaacggcgccatcgtgaagtacaccgtggccgtgagagaggccggcgccctgggccccgccagagagaccgagctgcccgccgccgccgagcccggcgccgagaacgccctgaccctgcagggcctgaagcccgacaccgcctacgacctgcaggtgagagcccacaccagaagaggccccggccccttcagcccccccgtgagatacagaaccttcctgagagaccaggtgagccccaagaacttcaaggtgaagatgatcatgaagaccagcgtgctgctgagctgggagttccccgacaactacaacagccccaccccctacaagatccagtacaacggcctgaccctggacgtggacggcagaaccaccaagaagctgatcacccacctgaagccccacaccttctacaacttcgtgctgaccaacagaggcagcagcctgggcggcctgcagcagaccgtgaccgcctggaccgccttcaacctgctgaacggcaagcccagcgtggcccccaagcccgacgccgacggcttcatcatggtgtacctgcccgacggccagagccccgtgcccgtgcagagctacttcatcgtgatggtgcccctgagaaagagcagaggcggccagttcctgacccccctgggcagccccgaggacatggacctggaggagctgatccaggacatcagcagactgcagagaagaagcctgagacacagcagacagctggaggtgcccagaccctacatcgccgccagattcagcgtgctgccccccaccttccaccccggcgaccagaagcagtacggcggcttcgacaacagaggcctggagcccggccacagatacgtgctgttcgtgctggccgtgctgcagaagagcgagcccaccttcgccgccagccccttcagcgaccccttccagctggacaaccccgacccccagcccatcgtggacggcgaggagggcctgatctgggtgatcggccccgtgctggccgtggtgttcatcatctgcatcgtgatcgccatcctgctgtacaagaacaagcccgacagcaagagaaaggacagcgagcccagaaccaagtgcctgctgaacaacgccgacctggccccccaccaccccaaggaccccgtggagatgagaagaatcaacttccagacccccgacagcggcctgagaagccccctgagagagcccggcttccacttcgagagcatgctgagccacccccccatccccatcgccgacatggccgagcacaccgagagactgaaggccaacgacagcctgaagctgagccaggagtacgagagcatcgaccccggccagcagttcacctgggagcacagcaacctggaggtgaacaagcccaagaacagatacgccaacgtgatcgcctacgaccacagcagagtgatcctgcagcccatcgagggcatcatgggcagcgactacatcaacgccaactacgtggacggctacagatgccagaacgcctacatcgccacccagggccccctgcccgagaccttcggcgacttctggagaatggtgtgggagcagagaagcgccaccatcgtgatgatgaccagactggaggagaagagcagaatcaagtgcgaccagtactggcccaacagaggcaccgagacctacggcttcatccaggtgaccctgctggacaccatcgagctggccaccttctgcgtgagaaccttcagcctgcacaagaacggcagcagcgagaagagagaggtgagacagttccagttcaccgcctggcccgaccacggcgtgcccgagtaccccacccccttcctggccttcctgagaagagtgaagacctgcaacccccccgacgccggccccatcgtggtgcactgcagcgccggcgtgggcagaaccggctgcttcatcgtgatcgacgccatgctggagagaatcaagcccgagaagaccgtggacgtgtacggccacgtgaccctgatgagaagccagagaaactacatggtgcagaccgaggaccagtacagcttcatccacgaggccctgctggaggccgtgggctgcggcaacaccgaggtgcccgccagaagcctgtacgcctacatccagaagctggcccaggtggagcccggcgagcacgtgaccggcatggagctggagttcaagagactggccaacagcaaggcccacaccagcagattcatcagcgccaacctgccctgcaacaagttcaagaacagactggtgaacatcatgccctacgagagcaccagagtgtgcctgcagcccatcagaggcgtggagggcagcgactacatcaacgccagcttcatcgacggctacagacagcagaaggcctacatcgccacccagggccccctggccgagaccaccgaggacttctggagaatgctgtgggagaacaacagcaccatcgtggtgatgctgaccaagctgagagagatgggcagagagaagtgccaccagtactggcccgccgagagaagcgccagataccagtacttcgtggtggaccccatggccgagtacaacatgccccagtacatcctgagagagttcaaggtgaccgacgccagagacggccagagcagaaccgtgagacagttccagttcaccgactggcccgagcagggcgtgcccaagagcggcgagggcttcatcgacttcatcggccaggtgcacaagaccaaggagcagttcggccaggacggccccatcagcgtgcactgcagcgccggcgtgggcagaaccggcgtgttcatcaccctgagcatcgtgctggagagaatgagatacgagggcgtggtggacatcttccagaccgtgaagatgctgagaacccagagacccgccatggtgcagaccgaggacgagtaccagttctgctaccaggccgccctggagtacctgggcagcttcgaccactacgccacctag

SEQ ID NO: 95587 - DNA, 4593 bp, synthetic construct
  misc_feature 1..4593: note = Description of Artificial Sequence: Synthetic coding sequence
  source 1..4593: mol_type = other DNA
atggcccccacctggggccccggcatggtgagcgtggtgggccccatgggcctgctggtggtgctgctggtgggcggctgcgccgccgaggagccccccagattcatcaaggagcccaaggaccagatcggcgtgagcggcggcgtggccagcttcgtgtgccaggccaccggcgaccccaagcccagagtgacctggaacaagaagggcaagaaggtgaacagccagagattcgagaccatcgagttcgacgagagcgccggcgccgtgctgagaatccagcccctgagaacccccagagacgagaacgtgtacgagtgcgtggcccagaacagcgtgggcgagatcaccgtgcacgccaagctgaccgtgctgagagaggaccagctgcccagcggcttccccaacatcgacatgggcccccagctgaaggtggtggagagaaccagaaccgccaccatgctgtgcgccgccagcggcaaccccgaccccgagatcacctggttcaaggacttcctgcccgtggaccccagcgccagcaacggcagaatcaagcagctgagaagcgaccaggccttcagccacctgcccaccggcgccctgcagatcgagagcagcgaggagaccgaccagggcaagtacgagtgcgtggccaccaacagcgccggcgtgagatacagcagccccgccaacctgtacgtgagagtgtggagaaccgtgagaagagtggcccccagattcagcatcctgcccatgagccacgagatcatgcccggcggcaacgtgaacatcacctgcgtggccgtgggcagccccatgccctacgtgaagtggatgcagggcgccgaggacctgacccccgaggacgacatgcccgtgggcagaaacgtgctggagctgaccgacgtgaaggacagcgccaactacacctgcgtggccatgagcagcctgggcgtgatcgaggccgtggcccagatcaccgtgaagagcctgcccaaggcccccggcacccccatggtgaccgagaacaccgccaccagcatcaccatcacctgggacagcggcaaccccgaccccgtgagctactacgtgatcgagtacaagagcaagagccaggacggcccctaccagatcaaggaggacatcaccaccaccagatacagcatcggcggcctgagccccaacagcgagtacgagatctgggtgagcgccgtgaacagcatcggccagggcccccccagcgagagcgtggtgaccagaaccggcgagcaggcccccgccagcgcccccagaaacgtgcaggccagaatgctgagcgccaccaccatgatcgtgcagtgggaggagcccgtggagcccaacggcctgatcagaggctacagagtgtactacaccatggagcccgagcaccccgtgggcaactggcagaagcacaacgtggacgacagcctgctgaccaccgtgggcagcctgctggaggacgagacctacaccgtgagagtgctggccttcaccagcgtgggcgacggccccctgagcgaccccatccaggtgaagacccagcagggcgtgcccggccagcccatgaacctgagagccgaggccagaagcgagaccagcatcaccctgagctggagcccccccagacaggagagcatcatcaagtacgagctgctgttcagagagggcgaccacggcagagaggtgggcagaaccttcgaccccaccaccagctacgtggtggaggacctgaagcccaacaccgagtacgccttcagactggccgccagaagcccccagggcctgggcgccttcacccccgtggtgagacagagaaccctgcagagcatcagccccaagaacttcaaggtgaagatgatcatgaagaccagcgtgctgctgagctgggagttccccgacaactacaacagccccaccccctacaagatccagtacaacggcctgaccctggacgtggacggcagaaccaccaagaagctgatcacccacctgaagccccacaccttctacaacttcgtgctgaccaacagaggcagcagcctgggcggcctgcagcagaccgtgaccgcctggaccgccttcaacctgctgaacggcaagcccagcgtggcccccaagcccgacgccgacggcttcatcatggtgtacctgcccgacggccagagccccgtgcccgtgcagagctacttcatcgtgatggtgcccctgagaaagagcagaggcggccagttcctgacccccctgggcagccccgaggacatggacctggaggagctgatccaggacatcagcagactgcagagaagaagcctgagacacagcagacagctggaggtgcccagaccctacatcgccgccagattcagcgtgctgccccccaccttccaccccggcgaccagaagcagtacggcggcttcgacaacagaggcctggagcccggccacagatacgtgctgttcgtgctggccgtgctgcagaagagcgagcccaccttcgccgccagccccttcagcgaccccttccagctggacaaccccgacccccagcccatcgtggacggcgaggagggcctgatctgggtgatcggccccgtgctggccgtggtgttcatcatctgcatcgtgatcgccatcctgctgtacaagaacaagcccgacagcaagagaaaggacagcgagcccagaaccaagtgcctgctgaacaacgccgacctggccccccaccaccccaaggaccccgtggagatgagaagaatcaacttccagacccccgacagcggcctgagaagccccctgagagagcccggcttccacttcgagagcatgctgagccacccccccatccccatcgccgacatggccgagcacaccgagagactgaaggccaacgacagcctgaagctgagccaggagtacgagagcatcgaccccggccagcagttcacctgggagcacagcaacctggaggtgaacaagcccaagaacagatacgccaacgtgatcgcctacgaccacagcagagtgatcctgcagcccatcgagggcatcatgggcagcgactacatcaacgccaactacgtggacggctacagatgccagaacgcctacatcgccacccagggccccctgcccgagaccttcggcgacttctggagaatggtgtgggagcagagaagcgccaccatcgtgatgatgaccagactggaggagaagagcagaatcaagtgcgaccagtactggcccaacagaggcaccgagacctacggcttcatccaggtgaccctgctggacaccatcgagctggccaccttctgcgtgagaaccttcagcctgcacaagaacggcagcagcgagaagagagaggtgagacagttccagttcaccgcctggcccgaccacggcgtgcccgagtaccccacccccttcctggccttcctgagaagagtgaagacctgcaacccccccgacgccggccccatcgtggtgcactgcagcgccggcgtgggcagaaccggctgcttcatcgtgatcgacgccatgctggagagaatcaagcccgagaagaccgtggacgtgtacggccacgtgaccctgatgagaagccagagaaactacatggtgcagaccgaggaccagtacagcttcatccacgaggccctgctggaggccgtgggctgcggcaacaccgaggtgcccgccagaagcctgtacgcctacatccagaagctggcccaggtggagcccggcgagcacgtgaccggcatggagctggagttcaagagactggccaacagcaaggcccacaccagcagattcatcagcgccaacctgccctgcaacaagttcaagaacagactggtgaacatcatgccctacgagagcaccagagtgtgcctgcagcccatcagaggcgtggagggcagcgactacatcaacgccagcttcatcgacggctacagacagcagaaggcctacatcgccacccagggccccctggccgagaccaccgaggacttctggagaatgctgtgggagaacaacagcaccatcgtggtgatgctgaccaagctgagagagatgggcagagagaagtgccaccagtactggcccgccgagagaagcgccagataccagtacttcgtggtggaccccatggccgagtacaacatgccccagtacatcctgagagagttcaaggtgaccgacgccagagacggccagagcagaaccgtgagacagttccagttcaccgactggcccgagcagggcgtgcccaagagcggcgagggcttcatcgacttcatcggccaggtgcacaagaccaaggagcagttcggccaggacggccccatcagcgtgcactgcagcgccggcgtgggcagaaccggcgtgttcatcaccctgagcatcgtgctggagagaatgagatacgagggcgtggtggacatcttccagaccgtgaagatgctgagaacccagagacccgccatggtgcagaccgaggacgagtaccagttctgctaccaggccgccctggagtacctgggcagcttcgaccactacgccacctag

SEQ ID NO: 95588 - DNA, 5820 bp, synthetic construct
  misc_feature 1..5820: note = Description of Artificial Sequence: Synthetic coding sequence
  source 1..5820: mol_type = other DNA
atggcccccacctggggccccggcatggtgagcgtggtgggccccatgggcctgctggtggtgctgctggtgggcggctgcgccgccgaggagccccccagattcatcaaggagcccaaggaccagatcggcgtgagcggcggcgtggccagcttcgtgtgccaggccaccggcgaccccaagcccagagtgacctggaacaagaagggcaagaaggtgaacagccagagattcgagaccatcgagttcgacgagagcgccggcgccgtgctgagaatccagcccctgagaacccccagagacgagaacgtgtacgagtgcgtggcccagaacagcgtgggcgagatcaccgtgcacgccaagctgaccgtgctgagagaggaccagctgcccagcggcttccccaacatcgacatgggcccccagctgaaggtggtggagagaaccagaaccgccaccatgctgtgcgccgccagcggcaaccccgaccccgagatcacctggttcaaggacttcctgcccgtggaccccagcgccagcaacggcagaatcaagcagctgagaagcgaccaggccttcagccacctgcccaccggcgccctgcagatcgagagcagcgaggagaccgaccagggcaagtacgagtgcgtggccaccaacagcgccggcgtgagatacagcagccccgccaacctgtacgtgagagtgtggagaaccgtgagaagagtggcccccagattcagcatcctgcccatgagccacgagatcatgcccggcggcaacgtgaacatcacctgcgtggccgtgggcagccccatgccctacgtgaagtggatgcagggcgccgaggacctgacccccgaggacgacatgcccgtgggcagaaacgtgctggagctgaccgacgtgaaggacagcgccaactacacctgcgtggccatgagcagcctgggcgtgatcgaggccgtggcccagatcaccgtgaagagcctgcccaaggcccccggcacccccatggtgaccgagaacaccgccaccagcatcaccatcacctgggacagcggcaaccccgaccccgtgagctactacgtgatcgagtacaagagcaagagccaggacggcccctaccagatcaaggaggacatcaccaccaccagatacagcatcggcggcctgagccccaacagcgagtacgagatctgggtgagcgccgtgaacagcatcggccagggcccccccagcgagagcgtggtgaccagaaccggcgagcaggcccccgccagcgcccccagaaacgtgcaggccagaatgctgagcgccaccaccatgatcgtgcagtgggaggagcccgtggagcccaacggcctgatcagaggctacagagtgtactacaccatggagcccgagcaccccgtgggcaactggcagaagcacaacgtggacgacagcctgctgaccaccgtgggcagcctgctggaggacgagacctacaccgtgagagtgctggccttcaccagcgtgggcgacggccccctgagcgaccccatccaggtgaagacccagcagggcgtgcccggccagcccatgaacctgagagccgaggccagaagcgagaccagcatcaccctgagctggagcccccccagacaggagagcatcatcaagtacgagctgctgttcagagagggcgaccacggcagagaggtgggcagaaccttcgaccccaccaccagctacgtggtggaggacctgaagcccaacaccgagtacgccttcagactggccgccagaagcccccagggcctgggcgccttcacccccgtggtgagacagagaaccctgcagagcaagcccagcgcccccccccaggacgtgaagtgcgtgagcgtgagaagcaccgccatcctggtgagctggagaccccccccccccgagacccacaacggcgccctggtgggctacagcgtgagatacagacccctgggcagcgaggaccccgagcccaaggaggtgaacggcatcccccccaccaccacccagatcctgctggaggccctggagaagtggacccagtacagaatcaccaccgtggcccacaccgaggtgggccccggccccgagagcagccccgtggtggtgagaaccgacgaggacgtgcccagcgccccccccagaaaggtggaggccgaggccctgaacgccaccgccatcagagtgctgtggagaagccccgcccccggcagacagcacggccagatcagaggctaccaggtgcactacgtgagaatggagggcgccgaggccagaggcccccccagaatcaaggacgtgatgctggccgacgcccaggagatggtgatcaccaacctgcagcccgagaccgcctacagcatcaccgtggccgcctacaccatgaagggcgacggcgccagaagcaagcccaaggtggtggtgaccaagggcgccgtgctgggcagacccaccctgagcgtgcagcagacccccgagggcagcctgctggccagatgggagccccccgccggcaccgccgaggaccaggtgctgggctacagactgcagttcggcagagaggacagcacccccctggccaccctggagttcccccccagcgaggacagatacaccgccagcggcgtgcacaagggcgccacctacgtgttcagactggccgccagaagcagaggcggcctgggcgaggaggccgccgaggtgctgagcatccccgaggacacccccagaggccacccccagatcctggaggccgccggcaacgccagcgccggcaccgtgctgctgagatggctgccccccgtgcccgccgagagaaacggcgccatcgtgaagtacaccgtggccgtgagagaggccggcgccctgggccccgccagagagaccgagctgcccgccgccgccgagcccggcgccgagaacgccctgaccctgcagggcctgaagcccgacaccgcctacgacctgcaggtgagagcccacaccagaagaggccccggccccttcagcccccccgtgagatacagaaccttcctgagagaccaggtgagccccaagaacttcaaggtgaagatgatcatgaagaccagcgtgctgctgagctgggagttccccgacaactacaacagccccaccccctacaagatccagtacaacggcctgaccctggacgtggacggcagaaccaccaagaagctgatcacccacctgaagccccacaccttctacaacttcgtgctgaccaacagaggcagcagcctgggcggcctgcagcagaccgtgaccgcctggaccgccttcaacctgctgaacggcaagcccagcgtggcccccaagcccgacgccgacggcttcatcatggtgtacctgcccgacggccagagccccgtgcccgtgcagagctacttcatcgtgatggtgcccctgagaaagagcagaggcggccagttcctgacccccctgggcagccccgaggacatggacctggaggagctgatccaggacatcagcagactgcagagaagaagcctgagacacagcagacagctggaggtgcccagaccctacatcgccgccagattcagcgtgctgccccccaccttccaccccggcgaccagaagcagtacggcggcttcgacaacagaggcctggagcccggccacagatacgtgctgttcgtgctggccgtgctgcagaagagcgagcccaccttcgccgccagccccttcagcgaccccttccagctggacaaccccgacccccagcccatcgtggacggcgaggagggcctgatctgggtgatcggccccgtgctggccgtggtgttcatcatctgcatcgtgatcgccatcctgctgtacaagaacaagcccgacagcaagagaaaggacagcgagcccagaaccaagtgcctgctgaacaacgccgacctggccccccaccaccccaaggaccccgtggagatgagaagaatcaacttccagacccccgacagcggcctgagaagccccctgagagagcccggcttccacttcgagagcatgctgagccacccccccatccccatcgccgacatggccgagcacaccgagagactgaaggccaacgacagcctgaagctgagccaggagtacgagagcatcgaccccggccagcagttcacctgggagcacagcaacctggaggtgaacaagcccaagaacagatacgccaacgtgatcgcctacgaccacagcagagtgatcctgcagcccatcgagggcatcatgggcagcgactacatcaacgccaactacgtggacggctacagatgccagaacgcctacatcgccacccagggccccctgcccgagaccttcggcgacttctggagaatggtgtgggagcagagaagcgccaccatcgtgatgatgaccagactggaggagaagagcagaatcaagtgcgaccagtactggcccaacagaggcaccgagacctacggcttcatccaggtgaccctgctggacaccatcgagctggccaccttctgcgtgagaaccttcagcctgcacaagaacggcagcagcgagaagagagaggtgagacagttccagttcaccgcctggcccgaccacggcgtgcccgagtaccccacccccttcctggccttcctgagaagagtgaagacctgcaacccccccgacgccggccccatcgtggtgcactgcagcgccggcgtgggcagaaccggctgcttcatcgtgatcgacgccatgctggagagaatcaagcccgagaagaccgtggacgtgtacggccacgtgaccctgatgagaagccagagaaactacatggtgcagaccgaggaccagtacagcttcatccacgaggccctgctggaggccgtgggctgcggcaacaccgaggtgcccgccagaagcctgtacgcctacatccagaagctggcccaggtggagcccggcgagcacgtgaccggcatggagctggagttcaagagactggccaacagcaaggcccacaccagcagattcatcagcgccaacctgccctgcaacaagttcaagaacagactggtgaacatcatgccctacgagagcaccagagtgtgcctgcagcccatcagaggcgtggagggcagcgactacatcaacgccagcttcatcgacggctacagacagcagaaggcctacatcgccacccagggccccctggccgagaccaccgaggacttctggagaatgctgtgggagaacaacagcaccatcgtggtgatgctgaccaagctgagagagatgggcagagagaagtgccaccagtactggcccgccgagagaagcgccagataccagtacttcgtggtggaccccatggccgagtacaacatgccccagtacatcctgagagagttcaaggtgaccgacgccagagacggccagagcagaaccgtgagacagttccagttcaccgactggcccgagcagggcgtgcccaagagcggcgagggcttcatcgacttcatcggccaggtgcacaagaccaaggagcagttcggccaggacggccccatcagcgtgcactgcagcgccggcgtgggcagaaccggcgtgttcatcaccctgagcatcgtgctggagagaatgagatacgagggcgtggtggacatcttccagaccgtgaagatgctgagaacccagagacccgccatggtgcagaccgaggacgagtaccagttctgctaccaggccgccctggagtacctgggcagcttcgaccactacgccacctag

SEQ ID NO: 95589 - DNA, 5847 bp, synthetic construct
  misc_feature 1..5847: note = Description of Artificial Sequence: Synthetic coding sequence
  source 1..5847: mol_type = other DNA
atggcccccacctggggccccggcatggtgagcgtggtgggccccatgggcctgctggtggtgctgctggtgggcggctgcgccgccgaggagccccccagattcatcaaggagcccaaggaccagatcggcgtgagcggcggcgtggccagcttcgtgtgccaggccaccggcgaccccaagcccagagtgacctggaacaagaagggcaagaaggtgaacagccagagattcgagaccatcgagttcgacgagagcgccggcgccgtgctgagaatccagcccctgagaacccccagagacgagaacgtgtacgagtgcgtggcccagaacagcgtgggcgagatcaccgtgcacgccaagctgaccgtgctgagagaggaccagctgcccagcggcttccccaacatcgacatgggcccccagctgaaggtggtggagagaaccagaaccgccaccatgctgtgcgccgccagcggcaaccccgaccccgagatcacctggttcaaggacttcctgcccgtggaccccagcgccagcaacggcagaatcaagcagctgagaagcgagaccttcgagagcacccccatcagaggcgccctgcagatcgagagcagcgaggagaccgaccagggcaagtacgagtgcgtggccaccaacagcgccggcgtgagatacagcagccccgccaacctgtacgtgagagagctgagagaggtgagaagagtggcccccagattcagcatcctgcccatgagccacgagatcatgcccggcggcaacgtgaacatcacctgcgtggccgtgggcagccccatgccctacgtgaagtggatgcagggcgccgaggacctgacccccgaggacgacatgcccgtgggcagaaacgtgctggagctgaccgacgtgaaggacagcgccaactacacctgcgtggccatgagcagcctgggcgtgatcgaggccgtggcccagatcaccgtgaagagcctgcccaaggcccccggcacccccatggtgaccgagaacaccgccaccagcatcaccatcacctgggacagcggcaaccccgaccccgtgagctactacgtgatcgagtacaagagcaagagccaggacggcccctaccagatcaaggaggacatcaccaccaccagatacagcatcggcggcctgagccccaacagcgagtacgagatctgggtgagcgccgtgaacagcatcggccagggcccccccagcgagagcgtggtgaccagaaccggcgagcaggcccccgccagcgcccccagaaacgtgcaggccagaatgctgagcgccaccaccatgatcgtgcagtgggaggagcccgtggagcccaacggcctgatcagaggctacagagtgtactacaccatggagcccgagcaccccgtgggcaactggcagaagcacaacgtggacgacagcctgctgaccaccgtgggcagcctgctggaggacgagacctacaccgtgagagtgctggccttcaccagcgtgggcgacggccccctgagcgaccccatccaggtgaagacccagcagggcgtgcccggccagcccatgaacctgagagccgaggccagaagcgagaccagcatcaccctgagctggagcccccccagacaggagagcatcatcaagtacgagctgctgttcagagagggcgaccacggcagagaggtgggcagaaccttcgaccccaccaccagctacgtggtggaggacctgaagcccaacaccgagtacgccttcagactggccgccagaagcccccagggcctgggcgccttcacccccgtggtgagacagagaaccctgcagagcaagcccagcgcccccccccaggacgtgaagtgcgtgagcgtgagaagcaccgccatcctggtgagctggagaccccccccccccgagacccacaacggcgccctggtgggctacagcgtgagatacagacccctgggcagcgaggaccccgagcccaaggaggtgaacggcatcccccccaccaccacccagatcctgctggaggccctggagaagtggacccagtacagaatcaccaccgtggcccacaccgaggtgggccccggccccgagagcagccccgtggtggtgagaaccgacgaggacgtgcccagcgccccccccagaaaggtggaggccgaggccctgaacgccaccgccatcagagtgctgtggagaagccccgcccccggcagacagcacggccagatcagaggctaccaggtgcactacgtgagaatggagggcgccgaggccagaggcccccccagaatcaaggacgtgatgctggccgacgcccagtgggagaccgacgacaccgccgagtacgagatggtgatcaccaacctgcagcccgagaccgcctacagcatcaccgtggccgcctacaccatgaagggcgacggcgccagaagcaagcccaaggtggtggtgaccaagggcgccgtgctgggcagacccaccctgagcgtgcagcagacccccgagggcagcctgctggccagatgggagccccccgccggcaccgccgaggaccaggtgctgggctacagactgcagttcggcagagaggacagcacccccctggccaccctggagttcccccccagcgaggacagatacaccgccagcggcgtgcacaagggcgccacctacgtgttcagactggccgccagaagcagaggcggcctgggcgaggaggccgccgaggtgctgagcatccccgaggacacccccagaggccacccccagatcctggaggccgccggcaacgccagcgccggcaccgtgctgctgagatggctgccccccgtgcccgccgagagaaacggcgccatcgtgaagtacaccgtggccgtgagagaggccggcgccctgggccccgccagagagaccgagctgcccgccgccgccgagcccggcgccgagaacgccctgaccctgcagggcctgaagcccgacaccgcctacgacctgcaggtgagagcccacaccagaagaggccccggccccttcagcccccccgtgagatacagaaccttcctgagagaccaggtgagccccaagaacttcaaggtgaagatgatcatgaagaccagcgtgctgctgagctgggagttccccgacaactacaacagccccaccccctacaagatccagtacaacggcctgaccctggacgtggacggcagaaccaccaagaagctgatcacccacctgaagccccacaccttctacaacttcgtgctgaccaacagaggcagcagcctgggcggcctgcagcagaccgtgaccgcctggaccgccttcaacctgctgaacggcaagcccagcgtggcccccaagcccgacgccgacggcttcatcatggtgtacctgcccgacggccagagccccgtgcccgtgcagagctacttcatcgtgatggtgcccctgagaaagagcagaggcggccagttcctgacccccctgggcagccccgaggacatggacctggaggagctgatccaggacatcagcagactgcagagaagaagcctgagacacagcagacagctggaggtgcccagaccctacatcgccgccagattcagcgtgctgccccccaccttccaccccggcgaccagaagcagtacggcggcttcgacaacagaggcctggagcccggccacagatacgtgctgttcgtgctggccgtgctgcagaagagcgagcccaccttcgccgccagccccttcagcgaccccttccagctggacaaccccgacccccagcccatcgtggacggcgaggagggcctgatctgggtgatcggccccgtgctggccgtggtgttcatcatctgcatcgtgatcgccatcctgctgtacaagaacaagcccgacagcaagagaaaggacagcgagcccagaaccaagtgcctgctgaacaacgccgacctggccccccaccaccccaaggaccccgtggagatgagaagaatcaacttccagacccccgacagcggcctgagaagccccctgagagagcccggcttccacttcgagagcatgctgagccacccccccatccccatcgccgacatggccgagcacaccgagagactgaaggccaacgacagcctgaagctgagccaggagtacgagagcatcgaccccggccagcagttcacctgggagcacagcaacctggaggtgaacaagcccaagaacagatacgccaacgtgatcgcctacgaccacagcagagtgatcctgcagcccatcgagggcatcatgggcagcgactacatcaacgccaactacgtggacggctacagatgccagaacgcctacatcgccacccagggccccctgcccgagaccttcggcgacttctggagaatggtgtgggagcagagaagcgccaccatcgtgatgatgaccagactggaggagaagagcagaatcaagtgcgaccagtactggcccaacagaggcaccgagacctacggcttcatccaggtgaccctgctggacaccatcgagctggccaccttctgcgtgagaaccttcagcctgcacaagaacggcagcagcgagaagagagaggtgagacagttccagttcaccgcctggcccgaccacggcgtgcccgagtaccccacccccttcctggccttcctgagaagagtgaagacctgcaacccccccgacgccggccccatcgtggtgcactgcagcgccggcgtgggcagaaccggctgcttcatcgtgatcgacgccatgctggagagaatcaagcccgagaagaccgtggacgtgtacggccacgtgaccctgatgagaagccagagaaactacatggtgcagaccgaggaccagtacagcttcatccacgaggccctgctggaggccgtgggctgcggcaacaccgaggtgcccgccagaagcctgtacgcctacatccagaagctggcccaggtggagcccggcgagcacgtgaccggcatggagctggagttcaagagactggccaacagcaaggcccacaccagcagattcatcagcgccaacctgccctgcaacaagttcaagaacagactggtgaacatcatgccctacgagagcaccagagtgtgcctgcagcccatcagaggcgtggagggcagcgactacatcaacgccagcttcatcgacggctacagacagcagaaggcctacatcgccacccagggccccctggccgagaccaccgaggacttctggagaatgctgtgggagaacaacagcaccatcgtggtgatgctgaccaagctgagagagatgggcagagagaagtgccaccagtactggcccgccgagagaagcgccagataccagtacttcgtggtggaccccatggccgagtacaacatgccccagtacatcctgagagagttcaaggtgaccgacgccagagacggccagagcagaaccgtgagacagttccagttcaccgactggcccgagcagggcgtgcccaagagcggcgagggcttcatcgacttcatcggccaggtgcacaagaccaaggagcagttcggccaggacggccccatcagcgtgcactgcagcgccggcgtgggcagaaccggcgtgttcatcaccctgagcatcgtgctggagagaatgagatacgagggcgtggtggacatcttccagaccgtgaagatgctgagaacccagagacccgccatggtgcagaccgaggacgagtaccagttctgctaccaggccgccctggagtacctgggcagcttcgaccactacgccacctag

SEQ ID NO: 95590 - DNA, 5850 bp, synthetic construct
  misc_feature 1..5850: note = Description of Artificial Sequence: Synthetic coding sequence
  source 1..5850: mol_type = other DNA
atggcccccacctggggccccggcatggtgagcgtggtgggccccatgggcctgctggtggtgctgctggtgggcggctgcgccgccgaggagccccccagattcatcaaggagcccaaggaccagatcggcgtgagcggcggcgtggccagcttcgtgtgccaggccaccggcgaccccaagcccagagtgacctggaacaagaagggcaagaaggtgaacagccagagattcgagaccatcgagttcgacgagagcgccggcgccgtgctgagaatccagcccctgagaacccccagagacgagaacgtgtacgagtgcgtggcccagaacagcgtgggcgagatcaccgtgcacgccaagctgaccgtgctgagagaggaccagctgcccagcggcttccccaacatcgacatgggcccccagctgaaggtggtggagagaaccagaaccgccaccatgctgtgcgccgccagcggcaaccccgaccccgagatcacctggttcaaggacttcctgcccgtggaccccagcgccagcaacggcagaatcaagcagctgagaagaagcgagaccttcgagagcacccccatcagaggcgccctgcagatcgagagcagcgaggagaccgaccagggcaagtacgagtgcgtggccaccaacagcgccggcgtgagatacagcagccccgccaacctgtacgtgagagagctgagagaggtgagaagagtggcccccagattcagcatcctgcccatgagccacgagatcatgcccggcggcaacgtgaacatcacctgcgtggccgtgggcagccccatgccctacgtgaagtggatgcagggcgccgaggacctgacccccgaggacgacatgcccgtgggcagaaacgtgctggagctgaccgacgtgaaggacagcgccaactacacctgcgtggccatgagcagcctgggcgtgatcgaggccgtggcccagatcaccgtgaagagcctgcccaaggcccccggcacccccatggtgaccgagaacaccgccaccagcatcaccatcacctgggacagcggcaaccccgaccccgtgagctactacgtgatcgagtacaagagcaagagccaggacggcccctaccagatcaaggaggacatcaccaccaccagatacagcatcggcggcctgagccccaacagcgagtacgagatctgggtgagcgccgtgaacagcatcggccagggcccccccagcgagagcgtggtgaccagaaccggcgagcaggcccccgccagcgcccccagaaacgtgcaggccagaatgctgagcgccaccaccatgatcgtgcagtgggaggagcccgtggagcccaacggcctgatcagaggctacagagtgtactacaccatggagcccgagcaccccgtgggcaactggcagaagcacaacgtggacgacagcctgctgaccaccgtgggcagcctgctggaggacgagacctacaccgtgagagtgctggccttcaccagcgtgggcgacggccccctgagcgaccccatccaggtgaagacccagcagggcgtgcccggccagcccatgaacctgagagccgaggccagaagcgagaccagcatcaccctgagctggagcccccccagacaggagagcatcatcaagtacgagctgctgttcagagagggcgaccacggcagagaggtgggcagaaccttcgaccccaccaccagctacgtggtggaggacctgaagcccaacaccgagtacgccttcagactggccgccagaagcccccagggcctgggcgccttcacccccgtggtgagacagagaaccctgcagagcaagcccagcgcccccccccaggacgtgaagtgcgtgagcgtgagaagcaccgccatcctggtgagctggagaccccccccccccgagacccacaacggcgccctggtgggctacagcgtgagatacagacccctgggcagcgaggaccccgagcccaaggaggtgaacggcatcccccccaccaccacccagatcctgctggaggccctggagaagtggacccagtacagaatcaccaccgtggcccacaccgaggtgggccccggccccgagagcagccccgtggtggtgagaaccgacgaggacgtgcccagcgccccccccagaaaggtggaggccgaggccctgaacgccaccgccatcagagtgctgtggagaagccccgcccccggcagacagcacggccagatcagaggctaccaggtgcactacgtgagaatggagggcgccgaggccagaggcccccccagaatcaaggacgtgatgctggccgacgcccagtgggagaccgacgacaccgccgagtacgagatggtgatcaccaacctgcagcccgagaccgcctacagcatcaccgtggccgcctacaccatgaagggcgacggcgccagaagcaagcccaaggtggtggtgaccaagggcgccgtgctgggcagacccaccctgagcgtgcagcagacccccgagggcagcctgctggccagatgggagccccccgccggcaccgccgaggaccaggtgctgggctacagactgcagttcggcagagaggacagcacccccctggccaccctggagttcccccccagcgaggacagatacaccgccagcggcgtgcacaagggcgccacctacgtgttcagactggccgccagaagcagaggcggcctgggcgaggaggccgccgaggtgctgagcatccccgaggacacccccagaggccacccccagatcctggaggccgccggcaacgccagcgccggcaccgtgctgctgagatggctgccccccgtgcccgccgagagaaacggcgccatcgtgaagtacaccgtggccgtgagagaggccggcgccctgggccccgccagagagaccgagctgcccgccgccgccgagcccggcgccgagaacgccctgaccctgcagggcctgaagcccgacaccgcctacgacctgcaggtgagagcccacaccagaagaggccccggccccttcagcccccccgtgagatacagaaccttcctgagagaccaggtgagccccaagaacttcaaggtgaagatgatcatgaagaccagcgtgctgctgagctgggagttccccgacaactacaacagccccaccccctacaagatccagtacaacggcctgaccctggacgtggacggcagaaccaccaagaagctgatcacccacctgaagccccacaccttctacaacttcgtgctgaccaacagaggcagcagcctgggcggcctgcagcagaccgtgaccgcctggaccgccttcaacctgctgaacggcaagcccagcgtggcccccaagcccgacgccgacggcttcatcatggtgtacctgcccgacggccagagccccgtgcccgtgcagagctacttcatcgtgatggtgcccctgagaaagagcagaggcggccagttcctgacccccctgggcagccccgaggacatggacctggaggagctgatccaggacatcagcagactgcagagaagaagcctgagacacagcagacagctggaggtgcccagaccctacatcgccgccagattcagcgtgctgccccccaccttccaccccggcgaccagaagcagtacggcggcttcgacaacagaggcctggagcccggccacagatacgtgctgttcgtgctggccgtgctgcagaagagcgagcccaccttcgccgccagccccttcagcgaccccttccagctggacaaccccgacccccagcccatcgtggacggcgaggagggcctgatctgggtgatcggccccgtgctggccgtggtgttcatcatctgcatcgtgatcgccatcctgctgtacaagaagaagccccacagcaagagaaaggacagcgagcccagaaccaagtgcctgctgaacaacgccgacctggccccccaccaccccaaggaccccgtggagatgagaagaatcaacttccagacccccgacagcggcctgagaagccccctgagagagcccggcttccacttcgagagcatgctgagccacccccccatccccatcgccgacatggccgagcacaccgagagactgaaggccaacgacagcctgaagctgagccaggagtacgagagcatcgaccccggccagcagttcacctgggagcacagcaacctggaggtgaacaagcccaagaacagatacgccaacgtgatcgcctacgaccacagcagagtgatcctgcagcccatcgagggcatcatgggcagcgactacatcaacgccaactacgtggacggctacagatgccagaacgcctacatcgccacccagggccccctgcccgagaccttcggcgacttctggagaatggtgtgggagcagagaagcgccaccatcgtgatgatgaccagactggaggagaagagcagaatcaagtgcgaccagtactggcccaacagaggcaccgagacctacggcttcatccaggtgaccctgctggacaccatcgagctggccaccttctgcgtgagaaccttcagcctgcacaagaacggcagcagcgagaagagagaggtgagacagttccagttcaccgcctggcccgaccacggcgtgcccgagtaccccacccccttcctggccttcctgagaagagtgaagacctgcaacccccccgacgccggccccatcgtggtgcactgcagcgccggcgtgggcagaaccggctgcttcatcgtgatcgacgccatgctggagagaatcaagcccgagaagaccgtggacgtgtacggccacgtgaccctgatgagaagccagagaaactacatggtgcagaccgaggaccagtacagcttcatccacgaggccctgctggaggccgtgggctgcggcaacaccgaggtgcccgccagaagcctgtacgcctacatccagaagctggcccaggtggagcccggcgagcacgtgaccggcatggagctggagttcaagagactggccaacagcaaggcccacaccagcagattcatcagcgccaacctgccctgcaacaagttcaagaacagactggtgaacatcatgccctacgagagcaccagagtgtgcctgcagcccatcagaggcgtggagggcagcgactacatcaacgccagcttcatcgacggctacagacagcagaaggcctacatcgccacccagggccccctggccgagaccaccgaggacttctggagaatgctgtgggagaacaacagcaccatcgtggtgatgctgaccaagctgagagagatgggcagagagaagtgccaccagtactggcccgccgagagaagcgccagataccagtacttcgtggtggaccccatggccgagtacaacatgccccagtacatcctgagagagttcaaggtgaccgacgccagagacggccagagcagaaccgtgagacagttccagttcaccgactggcccgagcagggcgtgcccaagagcggcgagggcttcatcgacttcatcggccaggtgcacaagaccaaggagcagttcggccaggacggccccatcagcgtgcactgcagcgccggcgtgggcagaaccggcgtgttcatcaccctgagcatcgtgctggagagaatgagatacgagggcgtggtggacatcttccagaccgtgaagatgctgagaacccagagacccgccatggtgcagaccgaggacgagtaccagttctgctaccaggccgccctggagtacctgggcagcttcgaccactacgccacctag

SEQ ID NO: 95591 - DNA, 4683 bp, synthetic construct
  misc_feature 1..4683: note = Description of Artificial Sequence: Synthetic coding sequence
  source 1..4683: mol_type = other DNA
agaagcgccagaggcctgagcgtgagagacagaggcgccatccccctgcagggcggcgacagaagaagcctgcccagcatggcccccacctggggccccggcatggtgagcgtggtgggccccatgggcctgctggtggtgctgctggtgggcggctgcgccgccgaggagccccccagattcatcaaggagcccaaggaccagatcggcgtgagcggcggcgtggccagcttcgtgtgccaggccaccggcgaccccaagcccagagtgacctggaacaagaagggcaagaaggtgaacagccagagattcgagaccatcgagttcgacgagagcgccggcgccgtgctgagaatccagcccctgagaacccccagagacgagaacgtgtacgagtgcgtggcccagaacagcgtgggcgagatcaccgtgcacgccaagctgaccgtgctgagagaggaccagctgcccagcggcttccccaacatcgacatgggcccccagctgaaggtggtggagagaaccagaaccgccaccatgctgtgcgccgccagcggcaaccccgaccccgagatcacctggttcaaggacttcctgcccgtggaccccagcgccagcaacggcagaatcaagcagctgagaagcggcgccctgcagatcgagagcagcgaggagaccgaccagggcaagtacgagtgcgtggccaccaacagcgccggcgtgagatacagcagccccgccaacctgtacgtgagagtgagaagagtggcccccagattcagcatcctgcccatgagccacgagatcatgcccggcggcaacgtgaacatcacctgcgtggccgtgggcagccccatgccctacgtgaagtggatgcagggcgccgaggacctgacccccgaggacgacatgcccgtgggcagaaacgtgctggagctgaccgacgtgaaggacagcgccaactacacctgcgtggccatgagcagcctgggcgtgatcgaggccgtggcccagatcaccgtgaagagcctgcccaaggcccccggcacccccatggtgaccgagaacaccgccaccagcatcaccatcacctgggacagcggcaaccccgaccccgtgagctactacgtgatcgagtacaagagcaagagccaggacggcccctaccagatcaaggaggacatcaccaccaccagatacagcatcggcggcctgagccccaacagcgagtacgagatctgggtgagcgccgtgaacagcatcggccagggcccccccagcgagagcgtggtgaccagaaccggcgagcaggcccccgccagcgcccccagaaacgtgcaggccagaatgctgagcgccaccaccatgatcgtgcagtgggaggagcccgtggagcccaacggcctgatcagaggctacagagtgtactacaccatggagcccgagcaccccgtgggcaactggcagaagcacaacgtggacgacagcctgctgaccaccgtgggcagcctgctggaggacgagacctacaccgtgagagtgctggccttcaccagcgtgggcgacggccccctgagcgaccccatccaggtgaagacccagcagggcgtgcccggccagcccatgaacctgagagccgaggccagaagcgagaccagcatcaccctgagctggagcccccccagacaggagagcatcatcaagtacgagctgctgttcagagagggcgaccacggcagagaggtgggcagaaccttcgaccccaccaccagctacgtggtggaggacctgaagcccaacaccgagtacgccttcagactggccgccagaagcccccagggcctgggcgccttcacccccgtggtgagacagagaaccctgcagagcatcagccccaagaacttcaaggtgaagatgatcatgaagaccagcgtgctgctgagctgggagttccccgacaactacaacagccccaccccctacaagatccagtacaacggcctgaccctggacgtggacggcagaaccaccaagaagctgatcacccacctgaagccccacaccttctacaacttcgtgctgaccaacagaggcagcagcctgggcggcctgcagcagaccgtgaccgcctggaccgccttcaacctgctgaacggcaagcccagcgtggcccccaagcccgacgccgacggcttcatcatggtgtacctgcccgacggccagagccccgtgcccgtgcagagctacttcatcgtgatggtgcccctgagaaagagcagaggcggccagttcctgacccccctgggcagccccgaggacatggacctggaggagctgatccaggacatcagcagactgcagagaagaagcctgagacacagcagacagctggaggtgcccagaccctacatcgccgccagattcagcgtgctgccccccaccttccaccccggcgaccagaagcagtacggcggcttcgacaacagaggcctggagcccggccacagatacgtgctgttcgtgctggccgtgctgcagaagagcgagcccaccttcgccgccagccccttcagcgaccccttccagctggacaaccccgacccccagcccatcgtggacggcgaggagggcctgatctgggtgatcggccccgtgctggccgtggtgttcatcatctgcatcgtgatcgccatcctgctgtacaagaacaagcccgacagcaagagaaaggacagcgagcccagaaccaagtgcctgctgaacaacgccgacctggccccccaccaccccaaggaccccgtggagatgagaagaatcaacttccagacccccgacagcggcctgagaagccccctgagagagcccggcttccacttcgagagcatgctgagccacccccccatccccatcgccgacatggccgagcacaccgagagactgaaggccaacgacagcctgaagctgagccaggagtacgagagcatcgaccccggccagcagttcacctgggagcacagcaacctggaggtgaacaagcccaagaacagatacgccaacgtgatcgcctacgaccacagcagagtgatcctgcagcccatcgagggcatcatgggcagcgactacatcaacgccaactacgtggacggctacagatgccagaacgcctacatcgccacccagggccccctgcccgagaccttcggcgacttctggagaatggtgtgggagcagagaagcgccaccatcgtgatgatgaccagactggaggagaagagcagaatcaagtgcgaccagtactggcccaacagaggcaccgagacctacggcttcatccaggtgaccctgctggacaccatcgagctggccaccttctgcgtgagaaccttcagcctgcacaagaacggcagcagcgagaagagagaggtgagacagttccagttcaccgcctggcccgaccacggcgtgcccgagtaccccacccccttcctggccttcctgagaagagtgaagacctgcaacccccccgacgccggccccatcgtggtgcactgcagcgccggcgtgggcagaaccggctgcttcatcgtgatcgacgccatgctggagagaatcaagcccgagaagaccgtggacgtgtacggccacgtgaccctgatgagaagccagagaaactacatggtgcagaccgaggaccagtacagcttcatccacgaggccctgctggaggccgtgggctgcggcaacaccgaggtgcccgccagaagcctgtacgcctacatccagaagctggcccaggtggagcccggcgagcacgtgaccggcatggagctggagttcaagagactggccaacagcaaggcccacaccagcagattcatcagcgccaacctgccctgcaacaagttcaagaacagactggtgaacatcatgccctacgagagcaccagagtgtgcctgcagcccatcagaggcgtggagggcagcgactacatcaacgccagcttcatcgacggctacagacagcagaaggcctacatcgccacccagggccccctggccgagaccaccgaggacttctggagaatgctgtgggagaacaacagcaccatcgtggtgatgctgaccaagctgagagagatgggcagagagaagtgccaccagtactggcccgccgagagaagcgccagataccagtacttcgtggtggaccccatggccgagtacaacatgccccagtacatcctgagagagttcaaggtgaccgacgccagagacggccagagcagaaccgtgagacagttccagttcaccgactggcccgagcagggcgtgcccaagagcggcgagggcttcatcgacttcatcggccaggtgcacaagaccaaggagcagttcggccaggacggccccatcagcgtgcactgcagcgccggcgtgggcagaaccggcgtgttcatcaccctgagcatcgtgctggagagaatgagatacgagggcgtggtggacatcttccagaccgtgaagatgctgagaacccagagacccgccatggtgcagaccgagaccgagagcagacccggctggagcgccgtggcccagagcagactgaccgccagcagcgccagctggatccacgccatcctgctgccccagccccccgagtggctgggcctgcaggtgtag

SEQ ID NO: 95592 - DNA, 4518 bp, synthetic construct
  misc_feature 1..4518: note = Description of Artificial Sequence: Synthetic coding sequence
  source 1..4518: mol_type = other DNA
atggcccccacctggggccccggcatggtgagcgtggtgggccccatgggcctgctggtggtgctgctggtgggcggctgcgccgccgaggagccccccagattcatcaaggagcccaaggaccagatcggcgtgagcggcggcgtggccagcttcgtgtgccaggccaccggcgaccccaagcccagagtgacctggaacaagaagggcaagaaggtgaacagccagagattcgagaccatcgagttcgacgagagcgccggcgccgtgctgagaatccagcccctgagaacccccagagacgagaacgtgtacgagtgcgtggcccagaacagcgtgggcgagatcaccgtgcacgccaagctgaccgtgctgagagaggaccagctgcccagcggcttccccaacatcgacatgggcccccagctgaaggtggtggagagaaccagaaccgccaccatgctgtgcgccgccagcggcaaccccgaccccgagatcacctggttcaaggacttcctgcccgtggaccccagcgccagcaacggcagaatcaagcagctgagaagcggcgccctgcagatcgagagcagcgaggagaccgaccagggcaagtacgagtgcgtggccaccaacagcgccggcgtgagatacagcagccccgccaacctgtacgtgagagccctgagagaggtgagaagagtggcccccagattcagcatcctgcccatgagccacgagatcatgcccggcggcaacgtgaacatcacctgcgtggccgtgggcagccccatgccctacgtgaagtggatgcagggcgccgaggacctgacccccgaggacgacatgcccgtgggcagaaacgtgctggagctgaccgacgtgaaggacagcgccaactacacctgcgtggccatgagcagcctgggcgtgatcgaggccgtggcccagatcaccgtgaagagcctgcccaaggcccccggcacccccatggtgaccgagaacaccgccaccagcatcaccatcacctgggacagcggcaaccccgaccccgtgagctactacgtgatcgagtacaagagcaagagccaggacggcccctaccagatcaaggaggacatcaccaccaccagatacagcatcggcggcctgagccccaacagcgagtacgagatctgggtgagcgccgtgaacagcatcggccagggcccccccagcgagagcgtggtgaccagaaccggcgagcaggcccccgccagcgcccccagaaacgtgcaggccagaatgctgagcgccaccaccatgatcgtgcagtgggaggagcccgtggagcccaacggcctgatcagaggctacagagtgtactacaccatggagcccgagcaccccgtgggcaactggcagaagcacaacgtggacgacagcctgctgaccaccgtgggcagcctgctggaggacgagacctacaccgtgagagtgctggccttcaccagcgtgggcgacggccccctgagcgaccccatccaggtgaagacccagcagggcgtgcccggccagcccatgaacctgagagccgaggccagaagcgagaccagcatcaccctgagctggagcccccccagacaggagagcatcatcaagtacgagctgctgttcagagagggcgaccacggcagagaggtgggcagaaccttcgaccccaccaccagctacgtggtggaggacctgaagcccaacaccgagtacgccttcagactggccgccagaagcccccagggcctgggcgccttcacccccgtggtgagacagagaaccctgcagagcatcagccccaagaacttcaaggtgaagatgatcatgaagaccagcgtgctgctgagctgggagttccccgacaactacaacagccccaccccctacaagatccagtacaacggcctgaccctggacgtggacggcagaaccaccaagaagctgatcacccacctgaagccccacaccttctacaacttcgtgctgaccaacagaggcagcagcctgggcggcctgcagcagaccgtgaccgcctggaccgccttcaacctgctgaacggcaagcccagcgtggcccccaagcccgacgccgacggcttcatcatggtgtacctgcccgacggccagagccccgtgcccgtgcagagctacttcatcgtgatggtgcccctgagaaagagcagaggcggccagttcctgacccccctgggcagccccgaggacatggacctggaggagctgatccaggacatcagcagactgcagagaagaagcctgagacacagcagacagctggaggtgcccagaccctacatcgccgccagattcagcgtgctgccccccaccttccaccccggcgaccagaagcagtacggcggcttcgacaacagaggcctggagcccggccacagatacgtgctgttcgtgctggccgtgctgcagaagagcgagcccaccttcgccgccagccccttcagcgaccccttccagctggacaaccccgacccccagcccatcgtggacggcgaggagggcctgatctgggtgatcggccccgtgctggccgtggtgttcatcatctgcatcgtgatcgccatcctgctgtacaagaacaagcccgacagcaagagaaaggacagcgagcccagaaccaagtgcctgctgaacaacgccgacctggccccccaccaccccaaggaccccgtggagatgagaagaatcaacttccagacccccggcatgctgagccacccccccatccccatcgccgacatggccgagcacaccgagagactgaaggccaacgacagcctgaagctgagccaggagtacgagagcatcgaccccggccagcagttcacctgggagcacagcaacctggaggtgaacaagcccaagaacagatacgccaacgtgatcgcctacgaccacagcagagtgatcctgcagcccatcgagggcatcatgggcagcgactacatcaacgccaactacgtggacggctacagatgccagaacgcctacatcgccacccagggccccctgcccgagaccttcggcgacttctggagaatggtgtgggagcagagaagcgccaccatcgtgatgatgaccagactggaggagaagagcagaatcaagtgcgaccagtactggcccaacagaggcaccgagacctacggcttcatccaggtgaccctgctggacaccatcgagctggccaccttctgcgtgagaaccttcagcctgcacaagaacggcagcagcgagaagagagaggtgagacagttccagttcaccgcctggcccgaccacggcgtgcccgagtaccccacccccttcctggccttcctgagaagagtgaagacctgcaacccccccgacgccggccccatcgtggtgcactgcagcgccggcgtgggcagaaccggctgcttcatcgtgatcgacgccatgctggagagaatcaagcccgagaagaccgtggacgtgtacggccacgtgaccctgatgagaagccagagaaactacatggtgcagaccgaggaccagtacagcttcatccacgaggccctgctggaggccgtgggctgcggcaacaccgaggtgcccgccagaagcctgtacgcctacatccagaagctggcccaggtggagcccggcgagcacgtgaccggcatggagctggagttcaagagactggccaacagcaaggcccacaccagcagattcatcagcgccaacctgccctgcaacaagttcaagaacagactggtgaacatcatgccctacgagagcaccagagtgtgcctgcagcccatcagaggcgtggagggcagcgactacatcaacgccagcttcatcgacggctacagacagcagaaggcctacatcgccacccagggccccctggccgagaccaccgaggacttctggagaatgctgtgggagaacaacagcaccatcgtggtgatgctgaccaagctgagagagatgggcagagagaagtgccaccagtactggcccgccgagagaagcgccagataccagtacttcgtggtggaccccatggccgagtacaacatgccccagtacatcctgagagagttcaaggtgaccgacgccagagacggccagagcagaaccgtgagacagttccagttcaccgactggcccgagcagggcgtgcccaagagcggcgagggcttcatcgacttcatcggccaggtgcacaagaccaaggagcagttcggccaggacggccccatcagcgtgcactgcagcgccggcgtgggcagaaccggcgtgttcatcaccctgagcatcgtgctggagagaatgagatacgagggcgtggtggacatcttccagaccgtgaagatgctgagaacccagagacccgccatggtgcagaccgaggacgagtaccagttctgctaccaggccgccctggagtacctgggcagcttcgaccactacgccacctag

SEQ ID NO: 95593 - DNA, 4329 bp, synthetic construct
  misc_feature 1..4329: note = Description of Artificial Sequence: Synthetic coding sequence
  source 1..4329: mol_type = other DNA
atggccagagcccaggccctggtgctggccctgaccttccagctgtgcgcccccgagaccgagacccccgccgccggctgcaccttcgaggaggccagcgaccccgccgtgccctgcgagtacagccaggcccagtacgacgacttccagtgggagcaggtgagaatccaccccggcaccagagcccccgccgacctgccccacggcagctacctgatggtgaacaccagccagcacgcccccggccagagagcccacgtgatcttccagagcctgagcgagaacgacacccactgcgtgcagttcagctacttcctgtacagcagagacggccacagccccggcaccctgggcgtgtacgtgagagtgaacggcggccccctgggcagcgccgtgtggaacatgaccggcagccacggcagacagtggcaccaggccgagctggccgtgagcaccttctggcccaacgagtaccaggtgctgttcgaggccctgatcagccccgacagaagaggctacatgggcctggacgacatcctgctgctgagctacccctgcgccaaggccccccacttcagcagactgggcgacgtggaggtgaacgccggccagaacgccagcttccagtgcatggccgccggcagagccgccgaggccgagagattcctgctgcagagacagagcggcgccctggtgcccgccgccggcgtgagacacatcagccacagaagattcctggccaccttccccctggccgccgtgagcagagccgagcaggacctgtacagatgcgtgagccaggcccccagaggcgccggcgtgagcaacttcgccgagctgatcgtgaaggagccccccacccccatcgcccccccccagctgctgagagccggccccacctacctgatcatccagctgaacaccaacagcatcatcggcgacggccccatcgtgagaaaggagatcgagtacagaatggccagaggcccctgggccgaggtgcacgccgtgagcctgcagacctacaagctgtggcacctggaccccgacaccgagtacgagatcagcgtgctgctgaccagacccggcgacggcggcaccggcagacccggcccccccctgatcagcagaaccaagtgcgccgagcccatgagagcccccaagggcctggccttcgccgagatccaggccagacagctgaccctgcagtgggagcccctgggctacaacgtgaccagatgccacacctacaccgtgagcctgtgctaccactacaccctgggcagcagccacaaccagaccatcagagagtgcgtgaagaccgagcagggcgtgagcagatacaccatcaagaacctgctgccctacagaaacgtgcacgtgagactggtgctgaccaaccccgagggcagaaaggagggcaaggaggtgaccttccagaccgacgaggacgtgcccagcggcatcgccgccgagagcctgaccttcacccccctggaggacatgatcttcctgaagtgggaggagccccaggagcccaacggcctgatcacccagtacgagatcagctaccagagcatcgagagcagcgaccccgccgtgaacgtgcccggccccagaagaaccatcagcaagctgagaaacgagacctaccacgtgttcagcaacctgcaccccggcaccacctacctgttcagcgtgagagccagaaccggcaagggcttcggccaggccgccctgaccgagatcaccaccaacatcagcgcccccagcttcgactacgccgacatgcccagccccctgggcgagagcgagaacaccatcaccgtgctgctgagacccgcccagggcagaggcgcccccatcagcgtgtaccaggtgatcgtggaggaggagagagccagaagactgagaagagagcccggcggccaggactgcttccccgtgcccctgaccttcgaggccgccctggccagaggcctggtgcactacttcggcgccgagctggccgccagcagcctgcccgaggccatgcccttcaccgtgggcgacaaccagacctacagaggcttctggaacccccccctggagcccagaaaggcctacctgatctacttccaggccgccagccacctgaagggcgagaccagactgaactgcatcagaatcgccagaaaggccgcctgcaaggagagcaagagacccctggaggtgagccagagaagcgaggagatgggcctgatcctgggcatctgcgccggcggcctggccgtgctgatcctgctgctgggcgccatcatcgtgatcatcagaaagggcaagcccgtgaacatgaccaaggccaccgtgaactacagacaggagaagacccacatgatgagcgccgtggacagaagcttcaccgaccagagcaccctgcaggaggacgagagactgggcctgagcttcatggacacccacggctacagcaccagaggcgaccagagaagcggcggcgtgaccgaggccagcagcctgctgggcggcagccccagaagaccctgcggcagaaagggcagcccctaccacaccggccagctgcaccccgccgtgagagtggccgacctgctgcagcacatcaaccagatgaagaccgccgagggctacggcttcaagcaggagtacgagagcttcttcgagggctgggacgccaccaagaagaaggacaaggtgaagggcagcagacaggagcccatgcccgcctacgacagacacagagtgaagctgcaccccatgctgggcgaccccaacgccgactacatcaacgccaactacatcgacctgagaggcggcagaaccggctaccacagaagcaaccacttcatcgccacccagggccccaagcccgagatggtgtacgacttctggagaatggtgtggcaggagcactgcagcagcatcgtgatgatcaccaagctggtggaggtgggcagagtgaagtgcagcagatactggcccgaggacagcgacacctacggcgacatcaagatcatgctggtgaagaccgagaccctggccgagtacgtggtgagaaccttcgccctggagagaagaggctacagcgccagacacgaggtgagacagttccacttcaccgcctggcccgagcacggcgtgccctaccacgccaccggcctgctggccttcatcagaagagtgaaggccagcaccccccccgacgccggccccatcgtgatccactgcagcgccggcaccggcagaaccggctgctacatcgtgctggacgtgatgctggacatggccgagtgcgagggcgtggtggacatctacaactgcgtgaagaccctgtgcagcagaagagtgaacatgatccagaccgaggagcagtacatcttcatccacgacgccatcctggaggcctgcctgtgcggcgagaccaccatccccgtgagcgagttcaaggccacctacaaggagatgatcagaatcgacccccagagcaacagcagccagctgagagaggagttccagaccctgaacagcgtgaccccccccctggacgtggaggagtgcagcatcgccctgctgcccagaaacagagacaagaacagaagcatggacgtgctgccccccgacagatgcctgcccttcctgatcagcaccgacggcgacagcaacaactacatcaacgccgccctgaccgacagctacaccagaagcgccgccttcatcgtgaccctgcaccccctgcagagcaccacccccgacttctggagactggtgtacgactacggctgcaccagcatcgtgatgctgaaccagctgaaccagagcaacagcgcctggccctgcctgcagtactggcccgagcccggcagacagcagtacggcctgatggaggtggagttcatgagcggcaccgccgacgaggacctggtggccagagtgttcagagtgcagaacatcagcagactgcaggagggccacctgctggtgagacacttccagttcctgagatggagcgcctacagagacacccccgacagcaagaaggccttcctgcacctgctggccgaggtggacaagtggcaggccgagagcggcgacggcagaaccatcgtgcactgcctgaacggcggcggcagaagcggcaccttctgcgcctgcgccaccgtgctggagatgatcagatgccacaacctggtggacgtgttcttcgccgccaagaccctgagaaactacaagcccaacatggtggagaccatggaccagtaccacttctgctacgacgtggccctggagtacctggagggcctggagagcagatag

SEQ ID NO: 95594 - DNA, 4341 bp, synthetic construct
  misc_feature 1..4341: note = Description of Artificial Sequence: Synthetic coding sequence
  source 1..4341: mol_type = other DNA
atggccagagcccaggccctggtgctggccctgaccttccagctgtgcgcccccgagaccgagacccccgccgccggctgcaccttcgaggaggccagcgaccccgccgtgccctgcgagtacagccaggcccagtacgacgacttccagtgggagcaggtgagaatccaccccggcaccagagcccccgccgacctgccccacggcagctacctgatggtgaacaccagccagcacgcccccggccagagagcccacgtgatcttccagagcctgagcgagaacgacacccactgcgtgcagttcagctacttcctgtacagcagagacggccacagccccggcaccctgggcgtgtacgtgagagtgaacggcggccccctgggcagcgccgtgtggaacatgaccggcagccacggcagacagtggcaccaggccgagctggccgtgagcaccttctggcccaacgagtaccaggtgctgttcgaggccctgatcagccccgacagaagaggctacatgggcctggacgacatcctgctgctgagctacccctgcgccaaggccccccacttcagcagactgggcgacgtggaggtgaacgccggccagaacgccagcttccagtgcatggccgccggcagagccgccgaggccgagagattcctgctgcagagacagagcggcgccctggtgcccgccgccggcgtgagacacatcagccacagaagattcctggccaccttccccctggccgccgtgagcagagccgagcaggacctgtacagatgcgtgagccaggcccccagaggcgccggcgtgagcaacttcgccgagctgatcgtgaaggagccccccacccccatcgcccccccccagctgctgagagccggccccacctacctgatcatccagctgaacaccaacagcatcatcggcgacggccccatcgtgagaaaggagatcgagtacagaatggccagaggcccctgggccgaggtgcacgccgtgagcctgcagacctacaagctgtggcacctggaccccgacaccgagtacgagatcagcgtgctgctgaccagacccggcgacggcggcaccggcagacccggcccccccctgatcagcagaaccaagtgcgccgagcccatgagagcccccaagggcctggccttcgccgagatccaggccagacagctgaccctgcagtgggagcccctgggctacaacgtgaccagatgccacacctacaccgtgagcctgtgctaccactacaccctgggcagcagccacaaccagaccatcagagagtgcgtgaagaccgagcagggcgtgagcagatacaccatcaagaacctgctgccctacagaaacgtgcacgtgagactggtgctgaccaaccccgagggcagaaaggagggcaaggaggtgaccttccagaccgacgaggacgtgcccagcggcatcgccgccgagagcctgaccttcacccccctggaggacatgatcttcctgaagtgggaggagccccaggagcccaacggcctgatcacccagtacgagatcagctaccagagcatcgagagcagcgaccccgccgtgaacgtgcccggccccagaagaaccatcagcaagctgagaaacgagacctaccacgtgttcagcaacctgcaccccggcaccacctacctgttcagcgtgagagccagaaccggcaagggcttcggccaggccgccctgaccgagatcaccaccaacatcagcgcccccagcttcgactacgccgacatgcccagccccctgggcgagagcgagaacaccatcaccgtgctgctgagacccgcccagggcagaggcgcccccatcagcgtgtaccaggtgatcgtggaggaggagagagccagaagactgagaagagagcccggcggccaggactgcttccccgtgcccctgaccttcgaggccgccctggccagaggcctggtgcactacttcggcgccgagctggccgccagcagcctgcccgaggccatgcccttcaccgtgggcgacaaccagacctacagaggcttctggaacccccccctggagcccagaaaggcctacctgatctacttccaggccgccagccacctgaagggcgagaccagactgaactgcatcagaatcgccagaaaggccgcctgcaaggagagcaagagacccctggaggtgagccagagaagcgaggagatgggcctgatcctgggcatctgcgccggcggcctggccgtgctgatcctgctgctgggcgccatcatcgtgatcatcagaaagggcagagaccactacgcctacagctactaccccaagcccgtgaacatgaccaaggccaccgtgaactacagacaggagaagacccacatgatgagcgccgtggacagaagcttcaccgaccagagcaccctgcaggaggacgagagactgggcctgagcttcatggacacccacggctacagcaccagaggcgaccagagaagcggcggcgtgaccgaggccagcagcctgctgggcggcagccccagaagaccctgcggcagaaagggcagcccctaccacaccggccagctgcaccccgccgtgagagtggccgacctgctgcagcacatcaaccagatgaagaccgccgagggctacggcttcaagcaggagtacgagagcttcttcgagggctgggacgccaccaagaagaaggacaaggtgaagggcagcagacaggagcccatgcccgcctacgacagacacagagtgaagctgcaccccatgctgggcgaccccaacgccgactacatcaacgccaactacatcgacggctaccacagaagcaaccacttcatcgccacccagggccccaagcccgagatggtgtacgacttctggagaatggtgtggcaggagcactgcagcagcatcgtgatgatcaccaagctggtggaggtgggcagagtgaagtgcagcagatactggcccgaggacagcgacacctacggcgacatcaagatcatgctggtgaagaccgagaccctggccgagtacgtggtgagaaccttcgccctggagagaagaggctacagcgccagacacgaggtgagacagttccacttcaccgcctggcccgagcacggcgtgccctaccacgccaccggcctgctggccttcatcagaagagtgaaggccagcaccccccccgacgccggccccatcgtgatccactgcagcgccggcaccggcagaaccggctgctacatcgtgctggacgtgatgctggacatggccgagtgcgagggcgtggtggacatctacaactgcgtgaagaccctgtgcagcagaagagtgaacatgatccagaccgaggagcagtacatcttcatccacgacgccatcctggaggcctgcctgtgcggcgagaccaccatccccgtgagcgagttcaaggccacctacaaggagatgatcagaatcgacccccagagcaacagcagccagctgagagaggagttccagaccctgaacagcgtgaccccccccctggacgtggaggagtgcagcatcgccctgctgcccagaaacagagacaagaacagaagcatggacgtgctgccccccgacagatgcctgcccttcctgatcagcaccgacggcgacagcaacaactacatcaacgccgccctgaccgacagctacaccagaagcgccgccttcatcgtgaccctgcaccccctgcagagcaccacccccgacttctggagactggtgtacgactacggctgcaccagcatcgtgatgctgaaccagctgaaccagagcaacagcgcctggccctgcctgcagtactggcccgagcccggcagacagcagtacggcctgatggaggtggagttcatgagcggcaccgccgacgaggacctggtggccagagtgttcagagtgcagaacatcagcagactgcaggagggccacctgctggtgagacacttccagttcctgagatggagcgcctacagagacacccccgacagcaagaaggccttcctgcacctgctggccgaggtggacaagtggcaggccgagagcggcgacggcagaaccatcgtgcactgcctgaacggcggcggcagaagcggcaccttctgcgcctgcgccaccgtgctggagatgatcagatgccacaacctggtggacgtgttcttcgccgccaagaccctgagaaactacaagcccaacatggtggagaccatggaccagtaccacttctgctacgacgtggccctggagtacctggagggcctggagagcagatag

SEQ ID NO: 95595 - DNA, 4329 bp, synthetic construct
  misc_feature 1..4329: note = Description of Artificial Sequence: Synthetic coding sequence
  source 1..4329: mol_type = other DNA
atggccagagcccaggccctggtgctggccctgaccttccagctgtgcgcccccgagaccgagacccccgccgccggctgcaccttcgaggaggccagcgaccccgccgtgccctgcgagtacagccaggcccagtacgacgacttccagtgggagcaggtgagaatccaccccggcaccagagcccccgccgacctgccccacggcagctacctgatggtgaacaccagccagcacgcccccggccagagagcccacgtgatcttccagagcctgagcgagaacgacacccactgcgtgcagttcagctacttcctgtacagcagagacggccacagccccggcaccctgggcgtgtacgtgagagtgaacggcggccccctgggcagcgccgtgtggaacatgaccggcagccacggcagacagtggcaccaggccgagctggccgtgagcaccttctggcccaacgagtaccaggtgctgttcgaggccctgatcagccccgacagaagaggctacatgggcctggacgacatcctgctgctgagctacccctgcgccaaggccccccacttcagcagactgggcgacgtggaggtgaacgccggccagaacgccagcttccagtgcatggccgccggcagagccgccgaggccgagagattcctgctgcagagacagagcggcgccctggtgcccgccgccggcgtgagacacatcagccacagaagattcctggccaccttccccctggccgccgtgagcagagccgagcaggacctgtacagatgcgtgagccaggcccccagaggcgccggcgtgagcaacttcgccgagctgatcgtgaaggagccccccacccccatcgcccccccccagctgctgagagccggccccacctacctgatcatccagctgaacaccaacagcatcatcggcgacggccccatcgtgagaaaggagatcgagtacagaatggccagaggcccctgggccgaggtgcacgccgtgagcctgcagacctacaagctgtggcacctggaccccgacaccgagtacgagatcagcgtgctgctgaccagacccggcgacggcggcaccggcagacccggcccccccctgatcagcagaaccaagtgcgccgagcccatgagagcccccaagggcctggccttcgccgagatccaggccagacagctgaccctgcagtgggagcccctgggctacaacgtgaccagatgccacacctacaccgtgagcctgtgctaccactacaccctgggcagcagccacaaccagaccatcagagagtgcgtgaagaccgagcagggcgtgagcagatacaccatcaagaacctgctgccctacagaaacgtgcacgtgagactggtgctgaccaaccccgagggcagaaaggagggcaaggaggtgaccttccagaccgacgaggacgtgcccagcggcatcgccgccgagagcctgaccttcacccccctggaggacatgatcttcctgaagtgggaggagccccaggagcccaacggcctgatcacccagtacgagatcagctaccagagcatcgagagcagcgaccccgccgtgaacgtgcccggccccagaagaaccatcagcaagctgagaaacgagacctaccacgtgttcagcaacctgcaccccggcaccacctacctgttcagcgtgagagccagaaccggcaagggcttcggccaggccgccctgaccgagatcaccaccaacatcagcgcccccagcttcgactacgccgacatgcccagccccctgggcgagagcgagaacaccatcaccgtgctgctgagacccgcccagggcagaggcgcccccatcagcgtgtaccaggtgatcgtggaggaggagagagccagaagactgagaagagagcccggcggccaggactgcttccccgtgcccctgaccttcgaggccgccctggccagaggcctggtgcactacttcggcgccgagctggccgccagcagcctgcccgaggccatgcccttcaccgtgggcgacaaccagacctacagaggcttctggaacccccccctggagcccagaaaggcctacctgatctacttccaggccgccagccacctgaagggcgagaccagactgaactgcatcagaatcgccagaaaggccgcctgcaaggagagcaagagacccctggaggtgagccagagaagcgaggagatgggcctgatcctgggcatctgcgccggcggcctggccgtgctgatcctgctgctgggcgccatcatcgtgatcatcagaaagggcaagcccgtgaacatgaccaaggccaccgtgaactacagacaggagaagacccacatgatgagcgccgtggacagaagcttcaccgaccagagcaccctgcaggaggacgagagactgggcctgagcttcatggacacccacggctacagcaccagaggcgaccagagaagcggcggcgtgaccgaggccagcagcctgctgggcggcagccccagaagaccctgcggcagaaagggcagcccctaccacaccggccagctgcaccccgccgtgagagtggccgacctgctgcagcacatcaaccagatgaagaccgccgagggctacggcttcaagcaggagtacgagagcttcttcgagggctgggacgccaccaagaagaaggacaaggtgaagggcagcagacaggagcccatgcccgcctacgacagacacagagtgaagctgcaccccatgctgggcgaccccaacgccgactacatcaacgccaactacatcgacatcagaatcaacagagagggctaccacagaagcaaccacttcatcgccacccagggccccaagcccgagatggtgtacgacttctggagaatggtgtggcaggagcactgcagcagcatcgtgatgatcaccaagctggtggaggtgggcagagtgaagtgcagcagatactggcccgaggacagcgacacctacggcgacatcaagatcatgctggtgaagaccgagaccctggccgagtacgtggtgagaaccttcgccctggagagaagaggctacagcgccagacacgaggtgagacagttccacttcaccgcctggcccgagcacggcgtgccctaccacgccaccggcctgctggccttcatcagaagagtgaaggccagcaccccccccgacgccggccccatcgtgatccactgcagcgccggcaccggcagaaccggctgctacatcgtgctggacgtgatgctggacatggccgagtgcgagggcgtggtggacatctacaactgcgtgaagaccctgtgcagcagaagagtgaacatgatccagaccgaggagcagtacatcttcatccacgacgccatcctggaggcctgcctgtgcggcgagaccaccatccccgtgagcgagttcaaggccacctacaaggagatgatcagaatcgacccccagagcaacagcagccagctgagagaggagttccagaccctgaacagcgtgaccccccccctggacgtggaggagtgcagcatcgccctgctgcccagaaacagagacaagaacagaagcatggacgtgctgccccccgacagatgcctgcccttcctgatcagcaccgacggcgacagcaacaactacatcaacgccgccctgaccgacagctacaccagaagcgccgccttcatcgtgaccctgcaccccctgcagagcaccacccccgacttctggagactggtgtacgactacggctgcaccagcatcgtgatgctgaaccagctgaaccagagcaacagcgcctggccctgcctgcagtactggcccgagcccggcagacagcagtacggcctgatggaggtggagttcatgagcggcaccgccgacgaggacctggtggccagagtgttcagagtgcagaacatcagcagactgcaggagggccacctgctggtgagacacttccagttcctgagatggagcgcctacagagacacccccgacagcaagaaggccttcctgcacctgctggccgaggtggacaagtggcaggccgagagcggcgacggcagaaccatcgtgcactgcctgaacggcggcggcagaagcggcaccttctgcgcctgcgccaccgtgctggagatgatcagatgccacaacctggtggacgtgttcttcgccgccaagaccctgagaaactacaagcccaacatggtggagaccatggaccagtaccacttctgctacgacgtggccctggagtacctggagggcctggagagcagatag

SEQ ID NO: 95596 - DNA, 4311 bp, synthetic construct
  misc_feature 1..4311: note = Description of Artificial Sequence: Synthetic coding sequence
  source 1..4311: mol_type = other DNA
atggccagagcccaggccctggtgctggccctgaccttccagctgtgcgcccccgagaccgagacccccgccgccggctgcaccttcgaggaggccagcgaccccgccgtgccctgcgagtacagccaggcccagtacgacgacttccagtgggagcaggtgagaatccaccccggcaccagagcccccgccgacctgccccacggcagctacctgatggtgaacaccagccagcacgcccccggccagagagcccacgtgatcttccagagcctgagcgagaacgacacccactgcgtgcagttcagctacttcctgtacagcagagacggccacagccccggcaccctgggcgtgtacgtgagagtgaacggcggccccctgggcagcgccgtgtggaacatgaccggcagccacggcagacagtggcaccaggccgagctggccgtgagcaccttctggcccaacgagtaccaggtgctgttcgaggccctgatcagccccgacagaagaggctacatgggcctggacgacatcctgctgctgagctacccctgcgccaaggccccccacttcagcagactgggcgacgtggaggtgaacgccggccagaacgccagcttccagtgcatggccgccggcagagccgccgaggccgagagattcctgctgcagagacagagcggcgccctggtgcccgccgccggcgtgagacacatcagccacagaagattcctggccaccttccccctggccgccgtgagcagagccgagcaggacctgtacagatgcgtgagccaggcccccagaggcgccggcgtgagcaacttcgccgagctgatcgtgaaggagccccccacccccatcgcccccccccagctgctgagagccggccccacctacctgatcatccagctgaacaccaacagcatcatcggcgacggccccatcgtgagaaaggagatcgagtacagaatggccagaggcccctgggccgaggtgcacgccgtgagcctgcagacctacaagctgtggcacctggaccccgacaccgagtacgagatcagcgtgctgctgaccagacccggcgacggcggcaccggcagacccggcccccccctgatcagcagaaccaagtgcgccgagcccatgagagcccccaagggcctggccttcgccgagatccaggccagacagctgaccctgcagtgggagcccctgggctacaacgtgaccagatgccacacctacaccgtgagcctgtgctaccactacaccctgggcagcagccacaaccagaccatcagagagtgcgtgaagaccgagcagggcgtgagcagatacaccatcaagaacctgctgccctacagaaacgtgcacgtgagactggtgctgaccaaccccgagggcagaaaggagggcaaggaggtgaccttccagaccgacgaggacgtgcccagcggcatcgccgccgagagcctgaccttcacccccctggaggacatgatcttcctgaagtgggaggagccccaggagcccaacggcctgatcacccagtacgagatcagctaccagagcatcgagagcagcgaccccgccgtgaacgtgcccggccccagaagaaccatcagcaagctgagaaacgagacctaccacgtgttcagcaacctgcaccccggcaccacctacctgttcagcgtgagagccagaaccggcaagggcttcggccaggccgccctgaccgagatcaccaccaacatcagcgcccccagcttcgactacgccgacatgcccagccccctgggcgagagcgagaacaccatcaccgtgctgctgagacccgcccagggcagaggcgcccccatcagcgtgtaccaggtgatcgtggaggaggagagagccagaagactgagaagagagcccggcggccaggactgcttccccgtgcccctgaccttcgaggccgccctggccagaggcctggtgcactacttcggcgccgagctggccgccagcagcctgcccgaggccatgcccttcaccgtgggcgacaaccagacctacagaggcttctggaacccccccctggagcccagaaaggcctacctgatctacttccaggccgccagccacctgaagggcgagaccagactgaactgcatcagaatcgccagaaaggccgcctgcaaggagagcaagagacccctggaggtgagccagagaagcgaggagatgggcctgatcctgggcatctgcgccggcggcctggccgtgctgatcctgctgctgggcgccatcatcgtgatcatcagaaagggcaagcccgtgaacatgaccaaggccaccgtgaactacagacaggagaagacccacatgatgagcgccgtggacagaagcttcaccgaccagagcaccctgcaggaggacgagagactgggcctgagcttcatggacacccacggctacagcaccagaggcgaccagagaagcggcggcgtgaccgaggccagcagcctgctgggcggcagccccagaagaccctgcggcagaaagggcagcccctaccacaccggccagctgcaccccgccgtgagagtggccgacctgctgcagcacatcaaccagatgaagaccgccgagggctacggcttcaagcaggagtacgagagcttcttcgagggctgggacgccaccaagaagaaggacaaggtgaagggcagcagacaggagcccatgcccgcctacgacagacacagagtgaagctgcaccccatgctgggcgaccccaacgccgactacatcaacgccaactacatcgacggctaccacagaagcaaccacttcatcgccacccagggccccaagcccgagatggtgtacgacttctggagaatggtgtggcaggagcactgcagcagcatcgtgatgatcaccaagctggtggaggtgggcagagtgaagtgcagcagatactggcccgaggacagcgacacctacggcgacatcaagatcatgctggtgaagaccgagaccctggccgagtacgtggtgagaaccttcgccctggagagaagaggctacagcgccagacacgaggtgagacagttccacttcaccgcctggcccgagcacggcgtgccctaccacgccaccggcctgctggccttcatcagaagagtgaaggccagcaccccccccgacgccggccccatcgtgatccactgcagcgccggcaccggcagaaccggctgctacatcgtgctggacgtgatgctggacatggccgagtgcgagggcgtggtggacatctacaactgcgtgaagaccctgtgcagcagaagagtgaacatgatccagaccgaggagcagtacatcttcatccacgacgccatcctggaggcctgcctgtgcggcgagaccaccatccccgtgagcgagttcaaggccacctacaaggagatgatcagaatcgacccccagagcaacagcagccagctgagagaggagttccagaccctgaacagcgtgaccccccccctggacgtggaggagtgcagcatcgccctgctgcccagaaacagagacaagaacagaagcatggacgtgctgccccccgacagatgcctgcccttcctgatcagcaccgacggcgacagcaacaactacatcaacgccgccctgaccgacagctacaccagaagcgccgccttcatcgtgaccctgcaccccctgcagagcaccacccccgacttctggagactggtgtacgactacggctgcaccagcatcgtgatgctgaaccagctgaaccagagcaacagcgcctggccctgcctgcagtactggcccgagcccggcagacagcagtacggcctgatggaggtggagttcatgagcggcaccgccgacgaggacctggtggccagagtgttcagagtgcagaacatcagcagactgcaggagggccacctgctggtgagacacttccagttcctgagatggagcgcctacagagacacccccgacagcaagaaggccttcctgcacctgctggccgaggtggacaagtggcaggccgagagcggcgacggcagaaccatcgtgcactgcctgaacggcggcggcagaagcggcaccttctgcgcctgcgccaccgtgctggagatgatcagatgccacaacctggtggacgtgttcttcgccgccaagaccctgagaaactacaagcccaacatggtggagaccatggaccagtaccacttctgctacgacgtggccctggagtacctggagggcctggagagcagatag

SEQ ID NO: 95597 - DNA, 4302 bp, synthetic construct
  misc_feature 1..4302: note = Description of Artificial Sequence: Synthetic coding sequence
  source 1..4302: mol_type = other DNA
atggccagagcccaggccctggtgctggccctgaccttccagctgtgcgcccccgagaccgagacccccgccgccggctgcaccttcgaggaggccagcgaccccgccgtgccctgcgagtacagccaggcccagtacgacgacttccagtgggagcaggtgagaatccaccccggcaccagagcccccgccgacctgccccacggcagctacctgatggtgaacaccagccagcacgcccccggccagagagcccacgtgatcttccagagcctgagcgagaacgacacccactgcgtgcagttcagctacttcctgtacagcagagacggccacagccccggcaccctgggcgtgtacgtgagagtgaacggcggccccctgggcagcgccgtgtggaacatgaccggcagccacggcagacagtggcaccaggccgagctggccgtgagcaccttctggcccaacgagtaccaggtgctgttcgaggccctgatcagccccgacagaagaggctacatgggcctggacgacatcctgctgctgagctacccctgcgccaaggccccccacttcagcagactgggcgacgtggaggtgaacgccggccagaacgccagcttccagtgcatggccgccggcagagccgccgaggccgagagattcctgctgcagagacagagcggcgccctggtgcccgccgccggcgtgagacacatcagccacagaagattcctggccaccttccccctggccgccgtgagcagagccgagcaggacctgtacagatgcgtgagccaggcccccagaggcgccggcgtgagcaacttcgccgagctgatcgtgaaggagccccccacccccatcgcccccccccagctgctgagagccggccccacctacctgatcatccagctgaacaccaacagcatcatcggcgacggccccatcgtgagaaaggagatcgagtacagaatggccagaggcccctgggccgaggtgcacgccgtgagcctgcagacctacaagctgtggcacctggaccccgacaccgagtacgagatcagcgtgctgctgaccagacccggcgacggcggcaccggcagacccggcccccccctgatcagcagaaccaagtgcgccgagcccatgagagcccccaagggcctggccttcgccgagatccaggccagacagctgaccctgcagtgggagcccctgggctacaacgtgaccagatgccacacctacaccgtgagcctgtgctaccactacaccctgggcagcagccacaaccagaccatcagagagtgcgtgaagaccgagcagggcgtgagcagatacaccatcaagaacctgctgccctacagaaacgtgcacgtgagactggtgctgaccaaccccgagggcagaaaggagggcaaggaggtgaccttccagaccgacgaggacgtgcccagcggcatcgccgccgagagcctgaccttcacccccctggaggacatgatcttcctgaagtgggaggagccccaggagcccaacggcctgatcacccagtacgagatcagctaccagagcatcgagagcagcgaccccgccgtgaacgtgcccggccccagaagaaccatcagcaagctgagaaacgagacctaccacgtgttcagcaacctgcaccccggcaccacctacctgttcagcgtgagagccagaaccggcaagggcttcggccaggccgccctgaccgagatcaccaccaacatcagcgcccccagcttcgactacgccgacatgcccagccccctgggcgagagcgagaacaccatcaccgtgctgctgagacccgcccagggcagaggcgcccccatcagcgtgtaccaggtgatcgtggaggaggagagagccagaagactgagaagagagcccggcggccaggactgcttccccgtgcccctgaccttcgaggccgccctggccagaggcctggtgcactacttcggcgccgagctggccgccagcagcctgcccgaggccatgcccttcaccgtgggcgacaaccagacctacagaggcttctggaacccccccctggagcccagaaaggcctacctgatctacttccaggccgccagccacctgaagggcgagaccagactgaactgcatcagaatcgccagaaaggccgcctgcaaggagagcaagagacccctggaggtgagccagagaagcgaggagatgggcctgatcctgggcatctgcgccggcggcctggccgtgctgatcctgctgctgggcgccatcatcgtgatcatcagaaagggcaagcccgtgaacatgaccaaggccaccgtgaactacagacaggagaagacccacatgatgagcgccgtggacagaagcttcaccgaccagagcaccctgcaggaggacgagagactgggcctgagcttcatggacacccacggctacagcaccagaggcgaccagagaagcggcggcgtgaccgaggccagcagcctgctgggcggcagccccagaagaccctgcggcagaaagggcagcccctaccacaccggccagctgcaccccgccgtgagagtggccgacctgctgcagcacatcaaccagatgaagaccgccgagggctacggcttcaagcaggagtacgagagcttcttcgagggctgggacgccaccaagaagaaggacaaggtgaagggcagcagacaggagcccatgcccgcctacgacagacacagagtgaagctgcaccccatgctgggcgaccccaacgccgactacatcaacgccaactacatcgacggctaccacagaagcaaccacttcatcgccacccagggccccaagcccgagatggtgtacgacttctggagaatggtgtggcaggagcactgcagcagcatcgtgatgatcaccaagctggtggaggtgaagtgcagcagatactggcccgaggacagcgacacctacggcgacatcaagatcatgctggtgaagaccgagaccctggccgagtacgtggtgagaaccttcgccctggagagaagaggctacagcgccagacacgaggtgagacagttccacttcaccgcctggcccgagcacggcgtgccctaccacgccaccggcctgctggccttcatcagaagagtgaaggccagcaccccccccgacgccggccccatcgtgatccactgcagcgccggcaccggcagaaccggctgctacatcgtgctggacgtgatgctggacatggccgagtgcgagggcgtggtggacatctacaactgcgtgaagaccctgtgcagcagaagagtgaacatgatccagaccgaggagcagtacatcttcatccacgacgccatcctggaggcctgcctgtgcggcgagaccaccatccccgtgagcgagttcaaggccacctacaaggagatgatcagaatcgacccccagagcaacagcagccagctgagagaggagttccagaccctgaacagcgtgaccccccccctggacgtggaggagtgcagcatcgccctgctgcccagaaacagagacaagaacagaagcatggacgtgctgccccccgacagatgcctgcccttcctgatcagcaccgacggcgacagcaacaactacatcaacgccgccctgaccgacagctacaccagaagcgccgccttcatcgtgaccctgcaccccctgcagagcaccacccccgacttctggagactggtgtacgactacggctgcaccagcatcgtgatgctgaaccagctgaaccagagcaacagcgcctggccctgcctgcagtactggcccgagcccggcagacagcagtacggcctgatggaggtggagttcatgagcggcaccgccgacgaggacctggtggccagagtgttcagagtgcagaacatcagcagactgcaggagggccacctgctggtgagacacttccagttcctgagatggagcgcctacagagacacccccgacagcaagaaggccttcctgcacctgctggccgaggtggacaagtggcaggccgagagcggcgacggcagaaccatcgtgcactgcctgaacggcggcggcagaagcggcaccttctgcgcctgcgccaccgtgctggagatgatcagatgccacaacctggtggacgtgttcttcgccgccaagaccctgagaaactacaagcccaacatggtggagaccatggaccagtaccacttctgctacgacgtggccctggagtacctggagggcctggagagcagatag

SEQ ID NO: 95598 - DNA, 6948 bp, synthetic construct
  misc_feature 1..6948: note = Description of Artificial Sequence: Synthetic coding sequence
  source 1..6948: mol_type = other DNA
atgagaatcctgaagagattcctggcctgcatccagctgctgtgcgtgtgcagactggactgggccaacggctactacagacagcagagaaagctggtggaggagatcggctggagctacaccggcgccctgaaccagaagaactggggcaagaagtaccccacctgcaacagccccaagcagagccccatcaacatcgacgaggacctgacccaggtgaacgtgaacctgaagaagctgaagttccagggctgggacaagaccagcctggagaacaccttcatccacaacaccggcaagaccgtggagatcaacctgaccaacgactacagagtgagcggcggcgtgagcgagatggtgttcaaggccagcaagatcaccttccactggggcaagtgcaacatgagcagcgacggcagcgagcacagcctggagggccagaagttccccctggagatgcagatctactgcttcgacgccgacagattcagcagcttcgaggaggccgtgaagggcaagggcaagctgagagccctgagcatcctgttcgaggtgggcaccgaggagaacctggacttcaaggccatcatcgacggcgtggagagcgtgagcagattcggcaagcaggccgccctggaccccttcatcctgctgaacctgctgcccaacagcaccgacaagtactacatctacaacggcagcctgaccagccccccctgcaccgacaccgtggactggatcgtgttcaaggacaccgtgagcatcagcgagagccagctggccgtgttctgcgaggtgctgaccatgcagcagagcggctacgtgatgctgatggactacctgcagaacaacttcagagagcagcagtacaagttcagcagacaggtgttcagcagctacaccggcaaggaggagatccacgaggccgtgtgcagcagcgagcccgagaacgtgcaggccgaccccgagaactacaccagcctgctggtgacctgggagagacccagagtggtgtacgacaccatgatcgagaagttcgccgtgctgtaccagcagctggacggcgaggaccagaccaagcacgagttcctgaccgacggctaccaggacctgggcgccatcctgaacaacctgctgcccaacatgagctacgtgctgcagatcgtggccatctgcaccaacggcctgtacggcaagtacagcgaccagctgatcgtggacatgcccaccgacaaccccgagctggacctgttccccgagctgatcggcaccgaggagatcatcaaggaggaggaggagggcaaggacatcgaggagggcgccatcgtgaaccccggcagagacagcgccaccaaccagatcagaaagaaggagccccagatcagcaccaccacccactacaacagaatcggcaccaagtacaacgaggccaagaccaacagaagccccaccagaggcagcgagttcagcggcaagggcgacgtgcccaacaccagcctgaacagcaccagccagcccgtgaccaagctggccaccgagaaggacatcagcctgaccagccagaccgtgaccgagctgcccccccacaccgtggagggcaccagcgccagcctgaacgacggcagcaagaccgtgctgagaagcccccacatgaacctgagcggcaccgccgagagcctgaacaccgtgagcatcaccgagtacgaggaggagagcctgctgaccagcttcaagctggacaccggcgccgaggacagcagcggcagcagccccgccaccagcgccatccccttcatcagcgagaacatcagccagggctacatcttcagcagcgagaaccccgagaccatcacctacgacgtgctgatccccgagagcgccagaaacgccagcgaggacagcaccagcagcggcagcgaggagagcctgaaggaccccagcatggagggcaacgtgtggttccccagcagcaccgacatcaccgcccagcccgacgtgggcagcggcagagagagcttcctgcagaccaactacaccgagatcagagtggacgagagcgagaagaccaccaagagcttcagcgccggccccgtgatgagccagggccccagcgtgaccgacctggagatgccccactacagcaccttcgcctacttccccaccgaggtgaccccccacgccttcacccccagcagcagacagcaggacctggtgagcaccgtgaacgtggtgtacagccagaccacccagcccgtgtacaacggcgagacccccctgcagcccagctacagcagcgaggtgttccccctggtgacccccctgctgctggacaaccagatcctgaacaccacccccgccgccagcagcagcgacagcgccctgcacgccacccccgtgttccccagcgtggacgtgagcttcgagagcatcctgagcagctacgacggcgcccccctgctgcccttcagcagcgccagcttcagcagcgagctgttcagacacctgcacaccgtgagccagatcctgccccaggtgaccagcgccaccgagagcgacaaggtgcccctgcacgccagcctgcccgtggccggcggcgacctgctgctggagcccagcctggcccagtacagcgacgtgctgagcaccacccacgccgccagcgagaccctggagttcggcagcgagagcggcgtgctgtacaagaccctgatgttcagccaggtggagccccccagcagcgacgccatgatgcacgccagaagcagcggccccgagcccagctacgccctgagcgacaacgagggcagccagcacatcttcaccgtgagctacagcagcgccatccccgtgcacgacagcgtgggcgtgacctaccagggcagcctgttcagcggccccagccacatccccatccccaagagcagcctgatcacccccaccgccagcctgctgcagcccacccacgccctgagcggcgacggcgagtggagcggcgccagcagcgacagcgagttcctgctgcccgacaccgacggcctgaccgccctgaacatcagcagccccgtgagcgtggccgagttcacctacaccaccagcgtgttcggcgacgacaacaaggccctgagcaagagcgagatcatctacggcaacgagaccgagctgcagatccccagcttcaacgagatggtgtaccccagcgagagcaccgtgatgcccaacatgtacgacaacgtgaacaagctgaacgccagcctgcaggagaccagcgtgagcatcagcagcaccaagggcatgttccccggcagcctggcccacaccaccaccaaggtgttcgaccacgagatcagccaggtgcccgagaacaacttcagcgtgcagcccacccacaccgtgagccaggccagcggcgacaccagcctgaagcccgtgctgagcgccaacagcgagcccgccagcagcgaccccgccagcagcgagatgctgagccccagcacccagctgctgttctacgagaccagcgccagcttcagcaccgaggtgctgctgcagcccagcttccaggccagcgacgtggacaccctgctgaagaccgtgctgcccgccgtgcccagcgaccccatcctggtggagacccccaaggtggacaagatcagcagcaccatgctgcacctgatcgtgagcaacagcgccagcagcgagaacatgctgcacagcaccagcgtgcccgtgttcgacgtgagccccaccagccacatgcacagcgccagcctgcagggcctgaccatcagctacgccagcgagaagtacgagcccgtgctgctgaagagcgagagcagccaccaggtggtgcccagcctgtacagcaacgacgagctgttccagaccgccaacctggagatcaaccaggcccacccccccaagggcagacacgtgttcgccacccccgtgctgagcatcgacgagcccctgaacaccctgatcaacaagctgatccacagcgacgagatcctgaccagcaccaagagcagcgtgaccggcaaggtgttcgccggcatccccaccgtggccagcgacaccttcgtgagcaccgaccacagcgtgcccatcggcaacggccacgtggccatcaccgccgtgagcccccacagagacggcagcgtgaccagcaccaagctgctgttccccagcaaggccaccagcgagctgagccacagcgccaagagcgacgccggcctggtgggcggcggcgaggacggcgacaccgacgacgacggcgacgacgacgacgacgacagaggcagcgacggcctgagcatccacaagtgcatgagctgcagcagctacagagagagccaggagaaggtgatgaacgacagcgacacccacgagaacagcctgatggaccagaacaaccccatcagctacagcctgagcgagaacagcgaggaggacaacagagtgaccagcgtgagcagcgacagccagaccggcatggacagaagccccggcaagagccccagcgccaacggcctgagccagaagcacaacgacggcaaggaggagaacgacatccagaccggcagcgccctgctgcccctgagccccgagagcaaggcctgggccgtgctgaccagcgacgaggagagcggcagcggccagggcaccagcgacagcctgaacgagaacgagaccagcaccgacttcagcttcgccgacaccaacgagaaggacgccgacggcatcctggccgccggcgacagcgagatcacccccggcttcccccagagccccaccagcagcgtgaccagcgagaacagcgaggtgttccacgtgagcgaggccgaggccagcaacagcagccacgagagcagaatcggcctggccgagggcctggagagcgagaagaaggccgtgatccccctggtgatcgtgagcgccctgaccttcatctgcctggtggtgctggtgggcatcctgatctactggagaaagtgcttccagaccgcccacttctacctggaggacagcaccagccccagagtgatcagcaccccccccacccccatcttccccatcagcgacgacgtgggcgccatccccatcaagcacttccccaagcacgtggccgacctgcacgccagcagcggcttcaccgaggagttcgagaccctgaaggagttctaccaggaggtgcagagctgcaccgtggacctgggcatcaccgccgacagcagcaaccaccccgacaacaagcacaagaacagatacatcaacatcgtggcctacgaccacagcagagtgaagctggcccagctggccgagaaggacggcaagctgaccgactacatcaacgccaactacgtggacggctacaacagacccaaggcctacatcgccgcccagggccccctgaagagcaccgccgaggacttctggagaatgatctgggagcacaacgtggaggtgatcgtgatgatcaccaacctggtggagaagggcagaagaaagtgcgaccagtactggcccgccgacggcagcgaggagtacggcaacttcctggtgacccagaagagcgtgcaggtgctggcctactacaccgtgagaaacttcaccctgagaaacaccaagatcaagaagggcagccagaagggcagacccagcggcagagtggtgacccagtaccactacacccagtggcccgacatgggcgtgcccgagtacagcctgcccgtgctgaccttcgtgagaaaggccgcctacgccaagagacacgccgtgggccccgtggtggtgcactgcagcgccggcgtgggcagaaccggcacctacatcgtgctggacagcatgctgcagcagatccagcacgagggcaccgtgaacatcttcggcttcctgaagcacatcagaagccagagaaactacctggtgcagaccgaggagcagtacgtgttcatccacgacaccctggtggaggccatcctgagcaaggagaccgaggtgctggacagccacatccacgcctacgtgaacgccctgctgatccccggccccgccggcaagaccaagctggagaagcagttccagctgctgagccagagcaacatccagcagagcgactacagcgccgccctgaagcagtgcaacagagagaagaacagaaccagcagcatcatccccgtggagagaagcagagtgggcatcagcagcctgagcggcgagggcaccgactacatcaacgccagctacatcatgggctactaccagagcaacgagttcatcatcacccagcaccccctgctgcacaccatcaaggacttctggagaatgatctgggaccacaacgcccagctggtggtgatgatccccgacggccagaacatggccgaggacgagttcgtgtactggcccaacaaggacgagcccatcaactgcgagagcttcaaggtgaccctgatggccgaggagcacaagtgcctgagcaacgaggagaagctgatcatccaggacttcatcctggaggccacccaggacgactacgtgctggaggtgagacacttccagtgccccaagtggcccaaccccgacagccccatcagcaagaccttcgagctgatcagcgtgatcaaggaggaggccgccaacagagacggccccatgatcgtgcacgacgagcacggcggcgtgaccgccggcaccttctgcgccctgaccaccctgatgcaccagctggagaaggagaacagcgtggacgtgtaccaggtggccaagatgatcaacctgatgagacccggcgtgttcgccgacatcgagcagtaccagttcctgtacaaggtgatcctgagcctggtgagcaccagacaggaggagaaccccagcaccagcctggacagcaacggcgccgccctgcccgacggcaacatcgccgagagcctggagagcctggtgtag

SEQ ID NO: 95599 - DNA, 474 bp, synthetic construct
  misc_feature 1..474: note = Description of Artificial Sequence: Synthetic coding sequence
  source 1..474: mol_type = other DNA
atgggcagactgaccgaggccgccgccgccggcagcggcagcagagccgccggctgggccggcagcccccccaccctgctgcccctgagccccaccagccccagatgcgccgccaccatggccagcagcgacgaggacggcaccaacggcggcgccagcgaggccggcgaggacagagaggcccccggcgagagaagaagactgggcgtgctggccaccgcctggctgaccttctacgacatcgccatgaccgccggcagactgatcctgagccccagactggagtgcatcggcgccatcagcgcccactgccagccccagccccccgagttcaagagattcagctgcctgggcctgagaagcagctgggactacaagagaggcccccccagacccatcaacttctgcatcttcggcagagacagagtgagcccctgctggcccggctggagcagaacccccgacctgaagtag

SEQ ID NO: 95600 - DNA, 867 bp, synthetic construct
  misc_feature 1..867: note = Description of Artificial Sequence: Synthetic coding sequence
  source 1..867: mol_type = other DNA
atgggcagactgaccgaggccgccgccgccggcagcggcagcagagccgccggctgggccggcagcccccccaccctgctgcccctgagccccaccagccccagatgcgccgccaccatggccagcagcgacgaggacggcaccaacggcggcgccagcgaggccggcgaggacagagaggcccccggcgagagaagaagactgggcgtgctggccaccgcctggctgaccttctacgacatcgccatgaccgccggctggctggtgctggccatcgccatggtgagattctacatggagaagggcacccacagaggcctgtacaagagcatccagaagaccctgaagttcttccagaccttcgccctgctggagatcgtgcactgcctgatcggcatcgtgcccaccagcgtgatcgtgaccggcgtgcaggtgagcagcagaatcttcatggtgtggctgatcacccacagcatcaagcccatccagaacgaggagagcgtggtgctgttcctggtggcctggaccgtgaccgagatcaccagatacagcttctacaccttcagcctgctggaccacctgccctacttcatcaagtgggccagatacaacttcttcatcatcctgtaccccgtgggcgtggccggcgagctgctgaccatctacgccgccctgccccacgtgaagaagaccggcatgttcagcatcagactgcccaacaagtacaacgtgagcttcgactactactacttcctgctgatcaccatggccagctacatccccctgttcccccagctgtacttccacatgctgagacagagaagaaaggtgctgcacggcgaggtgatcgtggagaaggacgactag

SEQ ID NO: 95601 - DNA, 1269 bp, synthetic construct
  misc_feature 1..1269: note = Description of Artificial Sequence: Synthetic coding sequence
  source 1..1269: mol_type = other DNA
atggccggctgcgtgcccctgctgcagggcctggtgctggtgctggccctgcacagagtggagcccagcgccaccagcctgaaggagagacacggcctgcacagcgacagcgcctgcaccggcgtgcaggagagcctgttcctgcccgccagcaaggccaacgacgtgctggtgagatggaagagagccggcagctacctgctggaggagctgttcgagggcaacctggagaaggagtgctacgaggagatctgcgtgtacgaggaggccagagaggtgttcgagaacgaggtggtgaccgacgagttctggagaagatacaagggcggcagcccctgcatcagccagccctgcctgcacaacggcagctgccaggacagcatctggggctacacctgcacctgcagccccggctacgagggcagcaactgcgagctggccaagaacgagtgccaccccgagagaaccgacggctgccagcacttctgcctgcccggccaggagagctacacctgcagctgcgcccagggctacagactgggcgaggaccacaagcagtgcgtgccccacgaccagtgcgcctgcggcgtgctgaccagcgagaagagagcccccgacctgcaggacctgccctggcaggtgaagctgaccaacagcgagggcaaggacttctgcggcggcgtgatcatcagagagaacttcgtgctgaccaccgccaagtgcagcctgctgcacagaaacatcaccgtgaagacctacttcaacagaaccagccaggaccccctgatgatcaagatcacccacgtgcacgtgcacatgagatacgacgccgacgccggcgagaacgacctgagcctgctggagctggagtggcccatccagtgccccggcgccggcctgcccgtgtgcacccccgagaaggacttcgccgagcacctgctgatccccagaaccagaggcctgctgagcggctgggccagaaacggcaccgacctgggcaacagcctgaccaccagacccgtgaccctggtggagggcgaggagtgcggccaggtgctgaacgtgaccgtgaccaccagaacctactgcgagagaagcagcgtggccgccatgcactggatggacggcagcgtggtgaccagagagcacagaggcagctggttcctgaccggcgtgctgggcagccagcccgtgggcggccaggcccacatggtgctggtgaccaaggtgagcagatacagcctgtggttcaagcagatcatgaactag

SEQ ID NO: 95602 - DNA, 1203 bp, synthetic construct
  misc_feature 1..1203: note = Description of Artificial Sequence: Synthetic coding sequence
  source 1..1203: mol_type = other DNA
atggccggctgcgtgcccctgctgcagggcctggtgctggtgctggccctgcacagagtggagcccagcgtgttcctgcccgccagcaaggccaacgacgtgctggtgagatggaagagagccggcagctacctgctggaggagctgttcgagggcaacctggagaaggagtgctacgaggagatctgcgtgtacgaggaggccagagaggtgttcgagaacgaggtggtgaccgacgagttctggagaagatacaagggcggcagcccctgcatcagccagccctgcctgcacaacggcagctgccaggacagcatctggggctacacctgcacctgcagccccggctacgagggcagcaactgcgagctggccaagaacgagtgccaccccgagagaaccgacggctgccagcacttctgcctgcccggccaggagagctacacctgcagctgcgcccagggctacagactgggcgaggaccacaagcagtgcgtgccccacgaccagtgcgcctgcggcgtgctgaccagcgagaagagagcccccgacctgcaggacctgccctggcaggtgaagctgaccaacagcgagggcaaggacttctgcggcggcgtgatcatcagagagaacttcgtgctgaccaccgccaagtgcagcctgctgcacagaaacatcaccgtgaagacctacttcaacagaaccagccaggaccccctgatgatcaagatcacccacgtgcacgtgcacatgagatacgacgccgacgccggcgagaacgacctgagcctgctggagctggagtggcccatccagtgccccggcgccggcctgcccgtgtgcacccccgagaaggacttcgccgagcacctgctgatccccagaaccagaggcctgctgagcggctgggccagaaacggcaccgacctgggcaacagcctgaccaccagacccgtgaccctggtggagggcgaggagtgcggccaggtgctgaacgtgaccgtgaccaccagaacctactgcgagagaagcagcgtggccgccatgcactggatggacggcagcgtggtgaccagagagcacagaggcagctggttcctgaccggcgtgctgggcagccagcccgtgggcggccaggcccacatggtgctggtgaccaaggtgagcagatacagcctgtggttcaagcagatcatgaactag

SEQ ID NO: 95603 - DNA, 1053 bp, synthetic construct
  misc_feature 1..1053: note = Description of Artificial Sequence: Synthetic coding sequence
  source 1..1053: mol_type = other DNA
atggagcccaagagaatcagagagggctacctggtgaagaagggcagcgtgttcaacacctggaagcccatgtgggtggtgctgctggaggacggcatcgagttctacaagaagaagagcgacaacagccccaagggcatgatccccctgaagggcagcaccctgaccagcccctgccaggacttcggcaagagaatgttcgtgttcaagatcaccaccaccaagcagcaggaccacttcttccaggccgccttcctggaggagagagacgcctgggtgagagacatcaagaaggccatcaagtgcatcgagggcggccagaagttcgccagaaagagcaccagaagaagcatcagactgcccgagaccatcgacctgggcgccctgtacctgagcatgaaggacaccgagaagggcatcaaggagctgaacctggagaaggacaagaagatcttcaaccactgcttcaccggcaactgcgtgatcgactggctggtgagcaaccagagcgtgagaaacagacaggagggcctgatgatcgccagcagcctgctgaacgagggctacctgcagcccgccggcgacatgagcaagagcgccgtggacggcaccgccgagaaccccttcctggacaaccccgacgccttctactacttccccgacagcggcttcttctgcgaggagaacagcagcgacgacgacgtgatcctgaaggaggagttcagaggcgtgatcatcaagcagggctgcctgctgaagcagggccacagaagaaagaactggaaggtgagaaagttcatcctgagagaggaccccgcctacctgcactactacgaccccgccggcgccgaggaccccctgggcgccatccacctgagaggctgcgtggtgaccagcgtggagagcaacagcaacggcagaaagagcgaggaggagaacctgttcgagatcatcaccgccgacgaggtgcactacttcctgcaggccgccacccccaaggagagaaccgagtggatcagagccatccagatggccagcagaaccggcaagtag

SEQ ID NO: 95604 - DNA, 648 bp, synthetic construct
  misc_feature 1..648: note = Description of Artificial Sequence: Synthetic coding sequence
  source 1..648: mol_type = other DNA
atggccagcctgcagatgagaggcaaccccggcagccacttctgcggcggcaccctgatccaccccagcttcgtgctgaccgccgcccactgcctgagagacatcccccagagactggtgaacgtggtgctgggcgcccacaacgtgagaacccaggagcccacccagcagcacttcagcgtggcccaggtgttcctgaacaactacgacgccgagaacaagctgaacgacgtgctgctgatccagctgagcagccccgccaacctgagcgccagcgtggccaccgtgcagctgccccagcaggaccagcccgtgccccacggcacccagtgcctggccatgggctggggcagagtgggcgcccacgacccccccgcccaggtgctgcaggagctgaacgtgaccgtggtgaccttcttctgcagaccccacaacatctgcaccttcgtgcccagaagaaaggccggcatctgcttcggcgacagcggcggccccctgatctgcgacggcatcatccagggcatcgacagcttcgtgatctggggctgcgccaccagactgttccccgacttcttcaccagagtggccctgtacgtggactggatcagaagcaccctgagaagagtggaggccaagggcagaccctag

SEQ ID NO: 95605 - DNA, 858 bp, synthetic construct
  misc_feature 1..858: note = Description of Artificial Sequence: Synthetic coding sequence
  source 1..858: mol_type = other DNA
atgcccggcgccagaagcggcggcagcggcggcgacggcagcaacagcggcagctacagcggcgacgccagcggcgccgtgaccgtgtgggaggtggtgagcctgctgggcaagctgctgggcaccgtggtggccctgaaggtggtgctgtacctgctgagagtgtgcctggccatggcctggaagagcggcggcgccagccacagcgagctgatccacaacctgagaaagaacggcatcatcaagaccgacaaggtgttcgaggtgatgctggccaccgacagaagccactacgccaagtgcaacccctacatggacagcccccagagcatcggcttccaggccaccatcagcgccccccacatgcacgcctacgccctggagctgctgttcgaccagctgcacgagggcgccaaggccctggacgtgggcagcggcagcggcatcctgaccgcctgcttcgccagaatggtgggctgcaccggcaaggtgatcggcatcgaccacatcaaggagctggtggacgacagcgtgaacaacgtgagaaaggacgaccccaccctgctgagcagcggcagagtgcagctggtggtgggcgacggcagaatgggctacgccgaggaggccccctacgacgccatccacgtgggcgccgccgcccccgtggtgccccaggccctgatcgaccagctgaagcccggcggcagactgatcctgcccgtgggccccgccggcggcaaccagatgctggagcagtacgacaagctgcaggacggcagcatcaagatgaagcccctgatgggcgtgatctacgtgcccctgaccgacaaggagaagcagtggagcagatggaagtag

SEQ ID NO: 95606 - DNA, 684 bp, synthetic construct
  misc_feature 1..684: note = Description of Artificial Sequence: Synthetic coding sequence
  source 1..684: mol_type = other DNA
atggcctggaagagcggcggcgccagccacagcgagctgatccacaacctgagaaagaacggcatcatcaagaccgacaaggtgttcgaggtgatgctggccaccgacagaagccactacgccaagtgcaacccctacatggacagcccccagagcatcggcttccaggccaccatcagcgccccccacatgcacgcctacgccctggagctgctgttcgaccagctgcacgagggcgccaaggccctggacgtgggcagcggcagcggcatcctgaccgcctgcttcgccagaatggtgggctgcaccggcaaggtgatcggcatcgaccacatcaaggagctggtggacgacagcgtgaacaacgtgagaaaggacgaccccaccctgctgagcagcggcagagtgcagctggtggtgggcgacggcagaatgggctacgccgaggaggccccctacgacgccatccacgtgggcgccgccgcccccgtggtgccccaggccctgatcgaccagctgaagcccggcggcagactgatcctgcccgtgggccccgccggcggcaaccagatgctggagcagtacgacaagctgcaggacggcagcatcaagatgaagcccctgatgggcgtgatctacgtgcccctgaccgacaaggagaagcagtggagcagatggaagtag

SEQ ID NO: 95607 - DNA, 861 bp, synthetic construct
  misc_feature 1..861: note = Description of Artificial Sequence: Synthetic coding sequence
  source 1..861: mol_type = other DNA
atgcccggcgccagaagcggcggcagcggcggcgacggcagcaacagcggcagctacagcggcgacgccagcggcgccgtgaccgtgtgggaggtggtgagcctgctgggcaagctgctgggcaccgtggtggccctgaaggtggtgctgtacctgctgagagtgtgcctggccatggcctggaagagcggcggcgccagccacagcgagctgatccacaacctgagaaagaacggcatcatcaagaccgacaaggtgttcgaggtgatgctggccaccgacagaagccactacgccaagtgcaacccctacatggacagcccccagagcatcggcttccaggccaccatcagcgccccccacatgcacgcctacgccctggagctgctgttcgaccagctgcacgagggcgccaaggccctggacgtgggcagcggcagcggcatcctgaccgcctgcttcgccagaatggtgggctgcaccggcaaggtgatcggcatcgaccacatcaaggagctggtggacgacagcgtgaacaacgtgagaaaggacgaccccaccctgctgagcagcggcagagtgcagctggtggtgggcgacggcagaatgggctacgccgaggaggccccctacgacgccatccacgtgggcgccgccgcccccgtggtgccccaggccctgatcgaccagctgaagcccggcggcagactgatcctgcccgtgggccccgccggcggcaaccagatgctggagcagtacgacaagctgcaggacggcagcatcaagatgaagcccctgatgggcgtgatctacgtgcccctgaccgacaaggagaagcagtggagcagagacgagctgtag

SEQ ID NO: 95608 - DNA, 858 bp, synthetic construct; identical to SEQ ID NO: 95605
  misc_feature 1..858: note = Description of Artificial Sequence: Synthetic coding sequence
  source 1..858: mol_type = other DNA

SEQ ID NO: 95609 - DNA, 579 bp, synthetic construct
  misc_feature 1..579: note = Description of Artificial Sequence: Synthetic coding sequence
  source 1..579: mol_type = other DNA
atggcctggaagagcggcggcgccagccacagcgagctgatccacaacctgagaagcttccaggccaccatcagcgccccccacatgcacgcctacgccctggagctgctgttcgaccagctgcacgagggcgccaaggccctggacgtgggcagcggcagcggcatcctgaccgcctgcttcgccagaatggtgggctgcaccggcaaggtgatcggcatcgaccacatcaaggagctggtggacgacagcgtgaacaacgtgagaaaggacgaccccaccctgctgagcagcggcagagtgcagctggtggtgggcgacggcagaatgggctacgccgaggaggccccctacgacgccatccacgtgggcgccgccgcccccgtggtgccccaggccctgatcgaccagctgaagcccggcggcagactgatcctgcccgtgggccccgccggcggcaaccagatgctggagcagtacgacaagctgcaggacggcagcatcaagatgaagcccctgatgggcgtgatctacgtgcccctgaccgacaaggagaagcagtggagcagatggaagtag

SEQ ID NO: 95610 - DNA, 2016 bp, synthetic construct
  misc_feature 1..2016: note = Description of Artificial Sequence: Synthetic coding sequence
  source 1..2016: mol_type = other DNA
atgaagcagatcttcttcctggacgacagcggcccccccttcggccacatggtgctggccctgggcggctacctgggcggcttcgacggcaacttcctgtggaacagaatcggcgccgagtacagcagcaacgtgcccgtgtggagcctgagactgctgcccgccctggccggcgccctgagcgtgcccatggcctaccagatcgtgctggagctgcacttcagccactgcgccgccatgggcgccgccctgctgatgctgatcgagaacgccctgatcacccagagcagactgatgctgctggagagcgtgctgatcttcttcaacctgctggccgtgctgagctacctgaagttcttcaactgccagaagcacagccccttcagcctgagctggtggttctggctgaccctgaccggcgtggcctgcagctgcgccgtgggcatcaagtacatgggcgtgttcacctacgtgctggtgctgggcgtggccgccgtgcacgcctggcacctgctgggcgaccagaccctgagcaacgtgtgcgtgttctgccacctgctggccagagccgtggccctgctggtgatccccgtggtgctgtacctgctgttcttctacgtgcacctgatcctggtgttcagaagcggcccccacgaccagatcatgagcagcgccttccaggccagcctggagggcggcctggccagaatcacccagggccagcccctggaggtggccttcggcagccaggtgaccctgagaaacgtgttcggcaagcccgtgccctgctggctgcacagccaccaggacacctaccccatgatctacgagaacggcagaggcagcagccaccagcagcaggtgacctgctaccccttcaaggacgtgaacaactggtggatcgtgaaggaccccagaagacaccagctggtggtgagcagcccccccagacccgtgagacacggcgacatggtgcagctggtgcacggcatgaccaccagaagcctgaacacccacgacgtggccgcccccctgagcccccacagccaggaggtgagctgctacatcgactacaacatcagcatgcccgcccagaacctgtggagactggagatcgtgaacagaggcagcgacaccgacgtgtggaagaccatcctgagcgaggtgagattcgtgcacgtgaacaccagcgccgtgctgaagctgagcggcgcccacctgcccgactggggctacagacagctggagatcgtgggcgagaagctgagcagaggctaccacggcagcaccgtgtggaacgtggaggagcacagatacggcgccagccaggagcagagagagagagagagagagctgcacagccccgcccaggtggacgtgagcagaaacctgagcttcatggccagattcagcgagctgcagtggagaatgctggccctgagaagcgacgacagcgagcacaagtacagcagcagccccctggagtgggtgaccctggacaccaacatcgcctactggctgcaccccagaaccagcgcccagatccacctgctgggcaacatcgtgatctgggtgagcggcagcctggccctggccatctacgccctgctgagcctgtggtacctgctgagaagaagaagaaacgtgcacgacctgccccaggacgcctggctgagatgggtgctggccggcgccctgtgcgccggcggctgggccgtgaactacctgcccttcttcctgatggagaagaccctgttcctgtaccactacctgcccgccctgaccttccagatcctgctgctgcccgtggtgctgcagcacatcagcgaccacctgtgcagaagccagctgcagagaagcatcttcagcgccctggtggtggcctggtacagcagcgcctgccacgtgagcaacaccctgagacccctgacctacggcgacaagagcctgagcccccacgagctgaaggccctgagatggaaggacagctgggacatcctgatcagaaagcactag

SEQ ID NO: 95611 - DNA, 2088 bp, synthetic construct
  misc_feature 1..2088: note = Description of Artificial Sequence: Synthetic coding sequence
  source 1..2088: mol_type = other DNA
atgtggggcttcctgaagagacccgtggtggtgaccgccgacatcaacctgagcctggtggccctgaccggcatgggcctgctgagcagactgtggagactgacctaccccagagccgtggtgctgttcagaagaatcagatggcagttcttcgtggagcagaactggagcagcgtggtggccttccccgagtacagcagcaacgtgcccgtgtggagcctgagactgctgcccgccctggccggcgccctgagcgtgcccatggcctaccagatcgtgctggagctgcacttcagccactgcgccgccatgggcgccgccctgctgatgctgatcgagaacgccctgatcacccagagcagactgatgctgctggagagcgtgctgatcttcttcaacctgctggccgtgctgagctacctgaagttcttcaactgccagaagcacagccccttcagcctgagctggtggttctggctgaccctgaccggcgtggcctgcagctgcgccgtgggcatcaagtacatgggcgtgttcacctacgtgctggtgctgggcgtggccgccgtgcacgcctggcacctgctgggcgaccagaccctgagcaacgtgtgcgtgttctgccacctgctggccagagccgtggccctgctggtgatccccgtggtgctgtacctgctgttcttctacgtgcacctgatcctggtgttcagaagcggcccccacgaccagatcatgagcagcgccttccaggccagcctggagggcggcctggccagaatcacccagggccagcccctggaggtggccttcggcagccaggtgaccctgagaaacgtgttcggcaagcccgtgccctgctggctgcacagccaccaggacacctaccccatgatctacgagaacggcagaggcagcagccaccagcagcaggtgacctgctaccccttcaaggacgtgaacaactggtggatcgtgaaggaccccagaagacaccagctggtggtgagcagcccccccagacccgtgagacacggcgacatggtgcagctggtgcacggcatgaccaccagaagcctgaacacccacgacgtggccgcccccctgagcccccacagccaggaggtgagctgctacatcgactacaacatcagcatgcccgcccagaacctgtggagactggagatcgtgaacagaggcagcgacaccgacgtgtggaagaccatcctgagcgaggtgagattcgtgcacgtgaacaccagcgccgtgctgaagctgagcggcgcccacctgcccgactggggctacagacagctggagatcgtgggcgagaagctgagcagaggctaccacggcagcaccgtgtggaacgtggaggagcacagatacggcgccagccaggagcagagagagagagagagagagctgcacagccccgcccaggtggacgtgagcagaaacctgagcttcatggccagattcagcgagctgcagtggagaatgctggccctgagaagcgacgacagcgagcacaagtacagcagcagccccctggagtgggtgaccctggacaccaacatcgcctactggctgcaccccagaaccagcgcccagatccacctgctgggcaacatcgtgatctgggtgagcggcagcctggccctggccatctacgccctgctgagcctgtggtacctgctgagaagaagaagaaacgtgcacgacctgccccaggacgcctggctgagatgggtgctggccggcgccctgtgcgccggcggctgggccgtgaactacctgcccttcttcctgatggagaagaccctgttcctgtaccactacctgcccgccctgaccttccagatcctgctgctgcccgtggtgctgcagcacatcagcgaccacctgtgcagaagccagctgcagagaagcatcttcagcgccctggtggtggcctggtacagcagcgcctgccacgtgagcaacaccctgagacccctgacctacggcgacaagagcctgagcccccacgagctgaaggccctgagatggaaggacagctgggacatcctgatcagaaagcactag

SEQ ID NO: 95612 - DNA, 1041 bp, synthetic construct
  misc_feature 1..1041: note = Description of Artificial Sequence: Synthetic coding sequence
  source 1..1041: mol_type = other DNA
tggagaggcggcggctgcaccagccccgccaccctgggcgccgccagaggcgccgtgggcatcggcaaggagggccagtaccagcccctgatcgccagcctgacctggggcctggtgcccctgagccaggcccaggagatcgtgaacagaggcagcgacaccgacgtgtggaagaccatcctgagcgaggtgagattcgtgcacgtgaacaccagcgccgtgctgaagctgagcggcgcccacctgcccgactggggctacagacagctggagatcgtgggcgagaagctgagcagaggctaccacggcagcaccgtgtggaacgtggaggagcacagatacggcgccagccaggagcagagagagagagagagagagctgcacagccccgcccaggtggacgtgagcagaaacctgagcttcatggccagattcagcgagctgcagtggagaatgctggccctgagaagcgacgacagcgagcacaagtacagcagcagccccctggagtgggtgaccctggacaccaacatcgcctactggctgcaccccagaaccagcgcccagatccacctgctgggcaacatcgtgatctgggtgagcggcagcctggccctggccatctacgccctgctgagcctgtggtacctgctgagaagaagaagaaacgtgcacgacctgccccaggacgcctggctgagatgggtgctggccggcgccctgtgcgccggcggctgggccgtgaactacctgcccttcttcctgatggagaagaccctgttcctgtaccactacctgcccgccctgaccttccagatcctgctgctgcccgtggtgctgcagcacatcagcgaccacctgtgcagaagccagctgcagagaagcatcttcagcgccctggtggtggcctggtacagcagcgcctgccacgtgagcaacaccctgagacccctgacctacggcgacaagagcctgagcccccacgagctgaaggccctgagatggaaggacagctgggacatcctgatcagaaagcactag

SEQ ID NO: 95613 - DNA, 471 bp, synthetic construct
  misc_feature 1..471: note = Description of Artificial Sequence: Synthetic coding sequence
  source 1..471: mol_type = other DNA
atggcctaccagatcgtgctggagctgcacttcagccactgcgccgccatgggcgccgccctgctgatgctgatcgagaacgccctgatcacccagagcagactgatgctgctggagagcgtgctgatcttcttcaacctgctggccgtgctgagctacctgaagttcttcaactgccagaagcacagcctgcccctgtgggcccccagacccaaccacgtgcagtgcctgcccggccagctgagaggcagaaccagcagcgaccacagcggcagcgccaccggcggcggcctgtgggtgcccggccacagcgaggagagactgtgggagacctgcgccctgctggccagcttcccccccggccacctgccccacgacgtgagatacgagaacggcagaggcagcagccaccagcagcaggtgacctgctaccccttcaaggacgtgaacaactggtggatcgtgaagtag

SEQ ID NO: 95614 - DNA, 2244 bp, synthetic construct
  misc_feature 1..2244: note = Description of Artificial Sequence: Synthetic coding sequence
  source 1..2244: mol_type = other DNA
atgtggggcttcctgaagagacccgtggtggtgaccgccgacatcaacctgagcctggtggccctgaccggcatgggcctgctgagcagactgtggagactgacctaccccagagccgtggtgttcgacgaggtgtactacggccagtacatcagcttctacatgaagcagatcttcttcctggacgacagcggcccccccttcggccacatggtgctggccctgggcggctacctgggcggcttcgacggcaacttcctgtggaacagaatcggcgccgagtacagcagcaacgtgcccgtgtggagcctgagactgctgcccgccctggccggcgccctgagcgtgcccatggcctaccagatcgtgctggagctgcacttcagccactgcgccgccatgggcgccgccctgctgatgctgatcgagaacgccctgatcacccagagcagactgatgctgctggagagcgtgctgatcttcttcaacctgctggccgtgctgagctacctgaagttcttcaactgccagaagcacagccccttcagcctgagctggtggttctggctgaccctgaccggcgtggcctgcagctgcgccgtgggcatcaagtacatgggcgtgttcacctacgtgctggtgctgggcgtggccgccgtgcacgcctggcacctgctgggcgaccagaccctgagcaacgtgggcgccgacgtgcagtgctgcatgagacccgcctgcatgggccagatgcagatgagccagggcgtgtgcgtgttctgccacctgctggccagagccgtggccctgctggtgatccccgtggtgctgtacctgctgttcttctacgtgcacctgatcctggtgttcagaagcggcccccacgaccagatcatgagcagcgccttccaggccagcctggagggcggcctggccagaatcacccagggccagcccctggaggtggccttcggcagccaggtgaccctgagaaacgtgttcggcaagcccgtgccctgctggctgcacagccaccaggacacctaccccatgatctacgagaacggcagaggcagcagccaccagcagcaggtgacctgctaccccttcaaggacgtgaacaactggtggatcgtgaaggaccccagaagacaccagctggtggtgagcagcccccccagacccgtgagacacggcgacatggtgcagctggtgcacggcatgaccaccagaagcctgaacacccacgacgtggccgcccccctgagcccccacagccaggaggtgagctgctacatcgactacaacatcagcatgcccgcccagaacctgtggagactggagatcgtgaacagaggcagcgacaccgacgtgtggaagaccatcctgagcgaggtgagattcgtgcacgtgaacaccagcgccgtgctgaagctgagcggcgcccacctgcccgactggggctacagacagctggagatcgtgggcgagaagctgagcagaggctaccacggcagcaccgtgtggaacgtggaggagcacagatacggcgccagccaggagcagagagagagagagagagagctgcacagccccgcccaggtggacgtgagcagaaacctgagcttcatggccagattcagcgagctgcagtggagaatgctggccctgagaagcgacgacagcgagcacaagtacagcagcagccccctggagtgggtgaccctggacaccaacatcgcctactggctgcaccccagaaccagcgcccagatccacctgctgggcaacatcgtgatctgggtgagcggcagcctggccctggccatctacgccctgctgagcctgtggtacctgctgagaagaagaagaaacgtgcacgacctgccccaggacgcctggctgagatgggtgctggccggcgccctgtgcgccggcggctgggccgtgaactacctgcccttcttcctgatggagaagaccctgttcctgtaccactacctgcccgccctgaccttccagatcctgctgctgcccgtggtgctgcagcacatcagcgaccacctgtgcagaagccagctgcagagaagcatcttcagcgccctggtggtggcctggtacagcagcgcctgccacgtgagcaacaccctgagacccctgacctacggcgacaagagcctgagcccccacgagctgaaggccctgagatggaaggacagctgggacatcctgatcagaaagcactag

SEQ ID NO: 95615 - DNA, 2178 bp, synthetic construct
  misc_feature 1..2178: note = Description of Artificial Sequence: Synthetic coding sequence
  source 1..2178: mol_type = other DNA
atgtggggcttcctgaagagacccgtggtggtgaccgccgacatcaacctgagcctggtggccctgaccggcatgggcctgctgagcagactgtggagactgacctaccccagagccgtggtgttcgacgaggtgtactacggccagtacatcagcttctacatgaagcagatcttcttcctggacgacagcggcccccccttcggccacatggtgctggccctgggcggctacctgggcggcttcgacggcaacttcctgtggaacagaatcggcgccgagtacagcagcaacgtgcccgtgtggagcctgagactgctgcccgccctggccggcgccctgagcgtgcccatggcctaccagatcgtgctggagctgcacttcagccactgcgccgccatgggcgccgccctgctgatgctgatcgagaacgccctgatcacccagagcagactgatgctgctggagagcgtgctgatcttcttcaacctgctggccgtgctgagctacctgaagttcttcaactgccagaagcacagccccttcagcctgagctggtggttctggctgaccctgaccggcgtggcctgcagctgcgccgtgggcatcaagtacatgggcgtgttcacctacgtgctggtgctgggcgtggccgccgtgcacgcctggcacctgctgggcgaccagaccctgagcaacgtgtgcgtgttctgccacctgctggccagagccgtggccctgctggtgatccccgtggtgctgtacctgctgttcttctacgtgcacctgatcctggtgttcagaagcggcccccacgaccagatcatgagcagcgccttccaggccagcctggagggcggcctggccagaatcacccagggccagcccctggaggtggccttcggcagccaggtgaccctgagaaacgtgttcggcaagcccgtgccctgctggctgcacagccaccaggacacctaccccatgatctacgagaacggcagaggcagcagccaccagcagcaggtgacctgctaccccttcaaggacgtgaacaactggtggatcgtgaaggaccccagaagacaccagctggtggtgagcagcccccccagacccgtgagacacggcgacatggtgcagctggtgcacggcatgaccaccagaagcctgaacacccacgacgtggccgcccccctgagcccccacagccaggaggtgagctgctacatcgactacaacatcagcatgcccgcccagaacctgtggagactggagatcgtgaacagaggcagcgacaccgacgtgtggaagaccatcctgagcgaggtgagattcgtgcacgtgaacaccagcgccgtgctgaagctgagcggcgcccacctgcccgactggggctacagacagctggagatcgtgggcgagaagctgagcagaggctaccacggcagcaccgtgtggaacgtggaggagcacagatacggcgccagccaggagcagagagagagagagagagagctgcacagccccgcccaggtggacgtgagcagaaacctgagcttcatggccagattcagcgagctgcagtggagaatgctggccctgagaagcgacgacagcgagcacaagtacagcagcagccccctggagtgggtgaccctggacaccaacatcgcctactggctgcaccccagaaccagcgcccagatccacctgctgggcaacatcgtgatctgggtgagcggcagcctggccctggccatctacgccctgctgagcctgtggtacctgctgagaagaagaagaaacgtgcacgacctgccccaggacgcctggctgagatgggtgctggccggcgccctgtgcgccggcggctgggccgtgaactacctgcccttcttcctgatggagaagaccctgttcctgtaccactacctgcccgccctgaccttccagatcctgctgctgcccgtggtgctgcagcacatcagcgaccacctgtgcagaagccagctgcagagaagcatcttcagcgccctggtggtggcctggtacagcagcgcctgccacgtgagcaacaccctgagacccctgacctacggcgacaagagcctgagcccccacgagctgaaggccctgagatggaaggacagctgggacatcctgatcagaaagcactag

SEQ ID NO: 95616 - DNA, 1827 bp, synthetic construct
  misc_feature 1..1827: note = Description of Artificial Sequence: Synthetic coding sequence
  source 1..1827: mol_type = other DNA
atggcctaccagatcgtgctggagctgcacttcagccactgcgccgccatgggcgccgccctgctgatgctgatcgagaacgccctgatcacccagagcagactgatgctgctggagagcgtgctgatcttcttcaacctgctggccgtgctgagctacctgaagttcttcaactgccagaagcacagccccttcagcctgagctggtggttctggctgaccctgaccggcgtggcctgcagctgcgccgtgggcatcaagtacatgggcgtgttcacctacgtgctggtgctgggcgtggccgccgtgcacgcctggcacctgctgggcgaccagaccctgagcaacgtgtgcgtgttctgccacctgctggccagagccgtggccctgctggtgatccccgtggtgctgtacctgctgttcttctacgtgcacctgatcctggtgttcagaagcggcccccacgaccagatcatgagcagcgccttccaggccagcctggagggcggcctggccagaatcacccagggccagcccctggaggtggccttcggcagccaggtgaccctgagaaacgtgttcggcaagcccgtgccctgctggctgcacagccaccaggacacctaccccatgatctacgagaacggcagaggcagcagccaccagcagcaggtgacctgctaccccttcaaggacgtgaacaactggtggatcgtgaaggaccccagaagacaccagctggtggtgagcagcccccccagacccgtgagacacggcgacatggtgcagctggtgcacggcatgaccaccagaagcctgaacacccacgacgtggccgcccccctgagcccccacagccaggaggtgagctgctacatcgactacaacatcagcatgcccgcccagaacctgtggagactggagatcgtgaacagaggcagcgacaccgacgtgtggaagaccatcctgagcgaggtgagattcgtgcacgtgaacaccagcgccgtgctgaagctgagcggcgcccacctgcccgactggggctacagacagctggagatcgtgggcgagaagctgagcagaggctaccacggcagcaccgtgtggaacgtggaggagcacagatacggcgccagccaggagcagagagagagagagagagagctgcacagccccgcccaggtggacgtgagcagaaacctgagcttcatggccagattcagcgagctgcagtggagaatgctggccctgagaagcgacgacagcgagcacaagtacagcagcagccccctggagtgggtgaccctggacaccaacatcgcctactggctgcaccccagaaccagcgcccagatccacctgctgggcaacatcgtgatctgggtgagcggcagcctggccctggccatctacgccctgctgagcctgtggtacctgctgagaagaagaagaaacgtgcacgacctgccccaggacgcctggctgagatgggtgctggccggcgccctgtgcgccggcggctgggccgtgaactacctgcccttcttcctgatggagaagaccctgttcctgtaccactacctgcccgccctgaccttccagatcctgctgctgcccgtggtgctgcagcacatcagcgaccacctgtgcagaagccagctgcagagaagcatcttcagcgccctggtggtggcctggtacagcagcgcctgccacgtgagcaacaccctgagacccctgacctacggcgacaagagcctgagcccccacgagctgaaggccctgagatggaaggacagctgggacatcctgatcagaaagcactag

SEQ ID NO: 95617 - DNA, 471 bp, synthetic construct; identical to SEQ ID NO: 95613
  misc_feature 1..471: note = Description of Artificial Sequence: Synthetic coding sequence
  source 1..471: mol_type = other DNA

SEQ ID NO: 95618 - DNA, 429 bp, synthetic construct
  misc_feature 1..429: note = Description of Artificial Sequence: Synthetic coding sequence
  source 1..429: mol_type = other DNA
atgtggggcttcctgaagagacccgtggtggtgaccgccgacatcaacctgagcctggtggccctgaccggcatgggcctgctgagcagactgtggagactgacctaccccagagccgtggtgttcgacgaggtgtactacggccagtacatcagcttctacatgaagcagatcttcttcctggacgacagcggcccccccttcggccacatggtgctggccctgggcggctacctgggcggcttcgacggcaacttcctgtggaacagaatcggcgccgagtacagcagcaacgtgcccgtgtggagcctgagactgctgcccgccctggccggcgccctgagcgtgcccatggcctaccagatcgtgctggagctgcacttcagccactgcgccgccatgggcgccgccctgctgatgctgatctag

SEQ ID NO: 95619 - DNA, 1722 bp, synthetic construct
  misc_feature 1..1722: note = Description of Artificial Sequence: Synthetic coding sequence
  source 1..1722: mol_type = other DNA
atgctgctggagagcgtgctgatcttcttcaacctgctggccgtgctgagctacctgaagttcttcaactgccagaagcacagccccttcagcctgagctggtggttctggctgaccctgaccggcgtggcctgcagctgcgccgtgggcatcaagtacatgggcgtgttcacctacgtgctggtgctgggcgtggccgccgtgcacgcctggcacctgctgggcgaccagaccctgagcaacgtgtgcgtgttctgccacctgctggccagagccgtggccctgctggtgatccccgtggtgctgtacctgctgttcttctacgtgcacctgatcctggtgttcagaagcggcccccacgaccagatcatgagcagcgccttccaggccagcctggagggcggcctggccagaatcacccagggccagcccctggaggtggccttcggcagccaggtgaccctgagaaacgtgttcggcaagcccgtgccctgctggctgcacagccaccaggacacctaccccatgatctacgagaacggcagaggcagcagccaccagcagcaggtgacctgctaccccttcaaggacgtgaacaactggtggatcgtgaaggaccccagaagacaccagctggtggtgagcagcccccccagacccgtgagacacggcgacatggtgcagctggtgcacggcatgaccaccagaagcctgaacacccacgacgtggccgcccccctgagcccccacagccaggaggtgagctgctacatcgactacaacatcagcatgcccgcccagaacctgtggagactggagatcgtgaacagaggcagcgacaccgacgtgtggaagaccatcctgagcgaggtgagattcgtgcacgtgaacaccagcgccgtgctgaagctgagcggcgcccacctgcccgactggggctacagacagctggagatcgtgggcgagaagctgagcagaggctaccacggcagcaccgtgtggaacgtggaggagcacagatacggcgccagccaggagcagagagagagagagagagagctgcacagccccgcccaggtggacgtgagcagaaacctgagcttcatggccagattcagcgagctgcagtggagaatgctggccctgagaagcgacgacagcgagcacaagtacagcagcagccccctggagtgggtgaccctggacaccaacatcgcctactggctgcaccccagaaccagcgcccagatccacctgctgggcaacatcgtgatctgggtgagcggcagcctggccctggccatctacgccctgctgagcctgtggtacctgctgagaagaagaagaaacgtgcacgacctgccccaggacgcctggctgagatgggtgctggccggcgccctgtgcgccggcggctgggccgtgaactacctgcccttcttcctgatggagaagaccctgttcctgtaccactacctgcccgccctgaccttccagatcctgctgctgcccgtggtgctgcagcacatcagcgaccacctgtgcagaagccagctgcagagaagcatcttcagcgccctggtggtggcctggtacagcagcgcctgccacgtgagcaacaccctgagacccctgacctacggcgacaagagcctgagcccccacgagctgaaggccctgagatggaaggacagctgggacatcctgatcagaaagcactag

SEQ ID NO: 95620 - DNA, 2178 bp, synthetic construct; identical to SEQ ID NO: 95615
  misc_feature 1..2178: note = Description of Artificial Sequence: Synthetic coding sequence
  source 1..2178: mol_type = other DNA

SEQ ID NO: 95621 - DNA, 507 bp, synthetic construct
  misc_feature 1..507: note = Description of Artificial Sequence: Synthetic coding sequence
  source 1..507: mol_type = other DNA
atggcctaccagatcgtgctggagctgcacttcagccactgcgccgccatgggcgccgccctgctgatgctgatcgagaacgccctgatcacccagagcagactgatgctgctggagagcgtgctgatcttcttcaacctgctggccgtgctgagctacctgaagttcttcaactgccagaagcacagccccttcagcctgagctggtggttctggctgaccctgaccggcgtggcctgcagctgcgccgtgggcatcaagtacatgggcgtgttcacctacgtgctggtgctgggcgtggccgccgtgcacgcctggcacctgctgggcgaccagaccctgagcaacgtgtgcgtgttctgccacctgctggccagagccgtggccctgctggtgatccccgtggtgctgtacctgctgttcttctacgtgcacctgatcctggtgttcagaagcggcccccacgaccagatcatgagcagcgccttccaggccagcctggagtag

SEQ ID NO: 95622 - DNA, 894 bp, synthetic construct
  misc_feature 1..894: note = Description of Artificial Sequence: Synthetic coding sequence
  source 1..894: mol_type = other DNA
atggcctaccagatcgtgctggagctgcacttcagccactgcgccgccatgggcgccgccctgctgatgctgatcgagaacgccctgatcacccagagcagactgatgctgctggagagcgtgctgatcttcttcaacctgctggccgtgctgagctacctgaagttcttcaactgccagaagcacagccccttcagcctgagctggtggttctggctgaccctgaccggcgtggcctgcagctgcgccgtgggcatcaagtacatgggcgtgttcacctacgtgctggtgctgggcgtggccgccgtgcacgcctggcacctgctgggcgaccagaccctgagcaacgtgggcgccgacgtgcagtgctgcatgagacccgcctgcatgggccagatgcagatgagccagggcgtgtgcgtgttctgccacctgctggccagagccgtggccctgctggtgatccccgtggtgctgtacctgctgttcttctacgtgcacctgatcctggtgttcagaagcggcccccacgaccagatcatgagcagcgccttccaggccagcctggagggcggcctggccagaatcacccagggccagcccctggaggtggccttcggcagccaggtgaccctgagaaacgtgttcggcaagcccgtgccctgctggctgcacagccaccaggacacctaccccatgatctacgagaacggcagaggcagcagccaccagcagcaggtgacctgctaccccttcaaggacgtgaacaactggtggatcgtgaaggaccccagaagacaccagctggtggtgagcagcccccccagacccgtgagacacggcgacatggtgcagctggtgcacggcatgaccaccagaagcctgaacacctag

SEQ ID NO: 95623 - DNA, 657 bp, synthetic construct
  misc_feature 1..657: note = Description of Artificial Sequence: Synthetic coding sequence
  source 1..657: mol_type = other DNA
atgaagcagatcttcttcctggacgacagcggcccccccttcggccacatggtgctggccctgggcggctacctgggcggcttcgacggcaacttcctgtggaacagaatcggcgccgagtacagcagcaacgtgcccgtgtggagcctgagactgctgcccgccctggccggcgccctgagcgtgcccatggcctaccagatcgtgctggagctgcacttcagccactgcgccgccatgggcgccgccctgctgatgctgatcgagaacgccctgatcacccagagcagactgatgctgctggagagcgtgctgatcttcttcaacctgctggccgtgctgagctacctgaagttcttcaactgccagaagcacagccccttcagcctgagctggtggttctggctgaccctgaccggcgtggcctgcagctgcgccgtgggcatcaagtacatgggcgtgttcacctacgtgctggtgctgggcgtggccgccgtgcacgcctggcacctgctgggcgaccagaccctgagcaacgtgggcgccgacgtgcagtgctgcatgagacccgcctgcatgggccagatgcagatgagccagggcgtgtgcgtgttctgccacctgctggccagagccgtggccctgctggtgatctag

SEQ ID NO: 95624 - DNA, 1398 bp, synthetic construct
  misc_feature 1..1398: note = Description of Artificial Sequence: Synthetic coding sequence
  source 1..1398: mol_type = other DNA
atggccatcttctgcggcaccgagctggagcaggtgtgcgtgttctgccacctgctggccagagccgtggccctgctggtgatccccgtggtgctgtacctgctgttcttctacgtgcacctgatcctggtgttcagaagcggcccccacgaccagatcatgagcagcgccttccaggccagcctggagggcggcctggccagaatcacccagggccagcccctggaggtggccttcggcagccaggtgaccctgagaaacgtgttcggcaagcccgtgccctgctggctgcacagccaccaggacacctaccccatgatctacgagaacggcagaggcagcagccaccagcagcaggtgacctgctaccccttcaaggacgtgaacaactggtggatcgtgaaggaccccagaagacaccagctggtggtgagcagcccccccagacccgtgagacacggcgacatggtgcagctggtgcacggcatgaccaccagaagcctgaacacccacgacgtggccgcccccctgagcccccacagccaggaggtgagctgctacatcgactacaacatcagcatgcccgcccagaacctgtggagactggagatcgtgaacagaggcagcgacaccgacgtgtggaagaccatcctgagcgaggtgagattcgtgcacgtgaacaccagcgccgtgctgaagctgagcggcgcccacctgcccgactggggctacagacagctggagatcgtgggcgagaagctgagcagaggctaccacggcagcaccgtgtggaacgtggaggagcacagatacggcgccagccaggagcagagagagagagagagagagctgcacagccccgcccaggtggacgtgagcagaaacctgagcttcatggccagattcagcgagctgcaggcccagatccacctgctgggcaacatcgtgatctgggtgagcggcagcctggccctggccatctacgccctgctgagcctgtggtacctgctgagaagaagaagaaacgtgcacgacctgccccaggacgcctggctgagatgggtgctggccggcgccctgtgcgccggcggctgggccgtgaactacctgcccttcttcctgatggagaagaccctgttcctgtaccactacctgcccgccctgaccttccagatcctgctgctgcccgtggtgctgcagcacatcagcgaccacctgtgcagaagccagctgcagagaagcatcttcagcgccctggtggtggcctggtacagcagcgcctgccacgtgagcaacaccctgagacccctgacctacggcgacaagagcctgagcccccacgagctgaaggccctgagatggaaggacagctgggacatcctgatcagaaagcactag

SEQ ID NO: 95625 - DNA, 2253 bp, synthetic construct
  misc_feature 1..2253: note = Description of Artificial Sequence: Synthetic coding sequence
  source 1..2253: mol_type = other DNA
atgccccccgccaccggcggcggcctggccgagagcgagctgagacccagaagaggcagatgcggcccccaggccgccagagccgccggcagagacgtggccgccgaggccgtggccagaagccccaagagacccgcctggggcagcagaagattcgaggccgtgggctggtgggccctgctggccctggtgaccctgctgagcttcgccaccagattccacagactggacgagcccccccacatctgctgggacgagacccacttcggcaagatgggcagctactacatcaacagaaccttcttcttcgacgtgcacccccccctgggcaagatgctgatcggcctggccggctacctgagcggctacgacggcaccttcctgttccagaagcccggcgacaagtacgagcaccacagctacatgggcatgagaggcttctgcgccttcctgggcagctggctggtgcccttcgcctacctgaccgtgctggacctgagcaagagcctgagcgccgccctgctgaccgccgccctgctgaccttcgacaccggctgcctgaccctgagccagtacatcctgctggaccccatcctgatgttcttcatcatggccgccatgctgagcatggtgaagtacaacagctgcgccgacagacccttcagcgccccctggtggttctggctgagcctgaccggcgtgagcctggccggcgccctgggcgtgaagttcgtgggcctgttcatcatcctgcaggtgggcctgaacaccatcgccgacctgtggtacctgttcggcgacctgagcctgagcctggtgaccgtgggcaagcacctgaccgccagagtgctgtgcctgatcgtgctgcccctggccctgtacaccgccaccttcgccgtgcacttcatggtgctgagcaagagcggccccggcgacggcttcttcagcagcgccttccaggccagactgagcggcaacaacctgcacaacgccagcatccccgagcacctggcctacggcagcgtgatcaccgtgaagaacctgagaatggccatcggctacctgcacagccacagacacctgtaccccgagggcatcggcgccagacagcagcaggtgaccacctacctgcacaaggactacaacaacctgtggatcatcaagaagcacaacaccaacagcgaccccctggaccccagcttccccgtggagttcgtgagacacggcgacatcatcagactggagcacaaggagaccagcagaaacctgcacagccactaccacgaggcccccatgaccagaaagcactaccaggtgaccggctacggcatcaacggcaccggcgacagcaacgacttctggagaatcgaggtggtgaacagaaagttcggcaacagaatcaaggtgctgagaagcagaatcagattcatccacctggtgaccggctgcgtgctgggcagcagcggcaaggtgctgcccaagtggggctgggagcagctggaggtgacctgcaccccctacctgaaggagaccctgaacagcatctggaacgtggaggaccacatcaaccccaagctgcccaacatcagcctggacgtgctgcagcccagcttccccgagatcctgctggagagccacatggtgatgatcagaggcaacagcggcctgaagcccaaggacaacgagttcaccagcaagccctggcactggcccatcaactaccagggcctgagattcagcggcgtgaacgacaccgacttcagagtgtacctgctgggcaaccccgtggtgtggtggctgaacctgctgagcatcgccctgtacctgctgagcggcagcatcatcgccgtggccatgcagagaggcgccagactgcccgccgaggtggccggcctgagccaggtgctgctgagaggcggcggccaggtgctgctgggctggaccctgcactacttccccttcttcctgatgggcagagtgctgtacttccaccactacttccccgccatgctgttcagcagcatgctgaccggcatcctgtgggacaccctgctgagactgtgcgcctggggcctggccagctggcccctggccagaggcatccacgtggccggcatcctgagcctgctgctgggcaccgcctacagcttctacctgttccaccccctggcctacggcatggtgggccccctggcccaggacccccagagccccatggccggcctgagatggctggacagctgggacttctag

SEQ ID NO: 95626 - DNA, 669 bp, synthetic construct
  misc_feature 1..669: note = Description of Artificial Sequence: Synthetic coding sequence
  source 1..669: mol_type = other DNA
atgaagctgcccctgctgctggccctgctgttcggcgccgtgagcgccctgcacctgagaagcgagaccagcaccttcgagacccccctgggcgccaagaccctgcccgaggacgaggagacccccgagcaggagatggaggagaccccctgcagagagctggaggaggaggaggagtggggcagcggcagcgaggacgccagcaagaaggacggcgccgtggagagcatcagcgtgcccgacatggtggacaagaacctgacctgccccgaggaggaggacaccgtgaaggtggtgggcatccccggctgccagacctgcagatacctgctggtgagaagcctgcagaccttcagccaggcctggttcacctgcagaagatgctacagaggcaacctggtgagcatccacaacttcaacatcaactacagaatccagtgcagcgtgagcgccctgaaccagggccaggtgtggatcggcggcagaatcaccggcagcggcagatgcagaagattccagtgggtggacggcagcagatggaacttcgcctactgggccgcccaccagccctggagcagaggcggccactgcgtggccctgtgcaccagaggcggccactggagaagagcccactgcctgagaagactgcccttcatctgcagctactag

SEQ ID NO: 95627 - DNA, 669 bp, synthetic construct; identical to SEQ ID NO: 95626
  misc_feature 1..669: note = Description of Artificial Sequence: Synthetic coding sequence
  source 1..669: mol_type = other DNA

SEQ ID NO: 95628 - DNA, 636 bp, synthetic construct
  misc_feature 1..636: note = Description of Artificial Sequence: Synthetic coding sequence
  source 1..636: mol_type = other DNA
atgaagctgcccctgctgctggccctgctgttcggcgccgtgagcgccctgcacctgagaagcgagaccagcaccttcgagacccccctgggcgccaagaccctgcccgaggacgaggagacccccgagcaggagatggaggagaccccctgcagagagctggaggaggaggaggagtggggcagcggcagcgaggacgccagcaagaaggacggcgccgtggagagcatcagcgtgcccgacatggtggacaagaacctgacctgccccgaggaggaggacaccgtgaaggtggtgggcatccccggctgccagacctgcagatacctgctgttcacctgcagaagatgctacagaggcaacctggtgagcatccacaacttcaacatcaactacagaatccagtgcagcgtgagcgccctgaaccagggccaggtgtggatcggcggcagaatcaccggcagcggcagatgcagaagattccagtgggtggacggcagcagatggaacttcgcctactgggccgcccaccagccctggagcagaggcggccactgcgtggccctgtgcaccagaggcggccactggagaagagcccactgcctgagaagactgcccttcatctgcagctactag

SEQ ID NO: 95629 - DNA, 678 bp, synthetic construct
  misc_feature 1..678: note = Description of Artificial Sequence: Synthetic coding sequence
  source 1..678: mol_type = other DNA
atgcagtgcctgctgctgctgcccttcctgctgctgggcaccgtgagcgccctgcacctggagaacgacgccccccacctggagagcctggagacccaggccgacctgggccaggacctggacagcagcaaggagcaggagagagacctggccctgaccgaggaggtgatccaggccgagggcgaggaggtgaaggccagcgcctgccaggacaacttcgaggacgaggaggccatggagagcgaccccgccgccctggacaaggacttccagtgccccagagaggaggacatcgtggaggtgcagggcagccccagatgcaagatctgcagatacctgctggtgagaacccccaagaccttcgccgaggcccagaacgtgtgcagcagatgctacggcggcaacctggtgagcatccacgacttcaacttcaactacagaatccagtgctgcaccagcaccgtgaaccaggcccaggtgtggatcggcggcaacctgagaggctggttcctgtggaagagattctgctggaccgacggcagccactggaacttcgcctactggagccccggccagcccggcaacggccagggcagctgcgtggccctgtgcaccaagggcggctactggagaagagcccagtgcgacaagcagctgcccttcgtgtgcagcttctag

SEQ ID NO: 95630 - DNA, 4092 bp, synthetic construct
  misc_feature 1..4092: note = Description of Artificial Sequence: Synthetic coding sequence
  source 1..4092: mol_type = other DNA
atggcctggaagaccctgcccatctacctgctgctgctgctgagcgtgttcgtgatccagcaggtgagcagccaggagctgagctgcaagggcagatgcttcgagagcttcgagagaggcagagagtgcgactgcgacgcccagtgcaagaagtacgacaagtgctgccccgactacgagagcttctgcgccgaggtgcacaaccccaccagcccccccagcagcaagaaggcccccccccccagcggcgccagccagaccatcaagagcaccaccaagagaagccccaagccccccaacaagaagaagaccaagaaggtgatcgagagcgaggagatcaccgaggagcacagcgtgagcgagaaccaggagagcagcagcagcagcagcagcagcagcagcagcagcaccatcagaaagatcaagagcagcaagaacagcgccgccaacagagagctgcagaagaagctgaaggtgaaggacaacaagaagaacagaaccaagaagaagcccacccccaagccccccgtggtggacgaggccggcagcggcctggacaacggcgacttcaaggtgaccacccccgacaccagcaccacccagcacaacaaggtgagcaccagccccaagatcaccaccgccaagcccatcaaccccagacccagcctgccccccaacagcgacaccagcaaggagaccagcctgaccgtgaacaaggagaccaccgtggagaccaaggagaccaccaccaccaacaagcagaccagcaccgacggcaaggagaagaccaccagcgccaaggagacccagagcatcgagaagaccagcgccaaggacctggcccccaccagcaaggtgctggccaagcccacccccaaggccgagaccaccaccaagggccccgccctgaccacccccaaggagcccacccccaccacccccaaggagcccgccagcaccacccccaaggagcccacccccaccaccatcaagagcgcccccaccacccccaaggagcccgcccccaccaccaccaagagcgcccccaccacccccaaggagcccgcccccaccaccaccaaggagcccgcccccaccacccccaaggagcccgcccccaccaccaccaaggagcccgcccccaccaccaccaagagcgcccccaccacccccaaggagcccgcccccaccacccccaagaagcccgcccccaccacccccaaggagcccgcccccaccacccccaaggagcccacccccaccacccccaaggagcccgcccccaccaccaaggagcccgcccccaccacccccaaggagcccgcccccaccgcccccaagaagcccgcccccaccacccccaaggagcccgcccccaccacccccaaggagcccgcccccaccaccaccaaggagcccagccccaccacccccaaggagcccgcccccaccaccaccaagagcgcccccaccaccaccaaggagcccgcccccaccaccaccaagagcgcccccaccacccccaaggagcccagccccaccaccaccaaggagcccgcccccaccacccccaaggagcccgcccccaccacccccaagaagcccgcccccaccacccccaaggagcccgcccccaccacccccaaggagcccgcccccaccaccaccaagaagcccgcccccaccacccccaaggagcccgcccccaccacccccaaggagaccgcccccaccacccccaagaagctgacccccaccacccccgagaagctggcccccaccacccccgagaagcccgcccccaccacccccgaggagctggcccccaccacccccgaggagcccacccccaccacccccgaggagcccgcccccaccacccccaaggccgccgcccccaacacccccaaggagcccgcccccaccacccccaaggagcccgcccccaccacccccaaggagcccgcccccaccacccccaaggagaccgcccccaccacccccaagggcaccgcccccaccaccctgaaggagcccgcccccaccacccccaagaagcccgcccccaaggagctggcccccaccaccaccaaggagcccaccagcaccacctgcgacaagcccgcccccaccacccccaagggcaccgcccccaccacccccaaggagcccgcccccaccacccccaaggagcccgcccccaccacccccaagggcaccgcccccaccaccctgaaggagcccgcccccaccacccccaagaagcccgcccccaaggagctggcccccaccaccaccaagggccccaccagcaccaccagcgacaagcccgcccccaccacccccaaggagaccgcccccaccacccccaaggagcccgcccccaccacccccaagaagcccgcccccaccacccccgagacccccccccccaccaccagcgaggtgagcacccccaccaccaccaaggagcccaccaccatccacaagagccccgacgagagcacccccgagctgagcgccgagcccacccccaaggccctggagaacagccccaaggagcccggcgtgcccaccaccaagacccccgccgccaccaagcccgagatgaccaccaccgccaaggacaagaccaccgagagagacctgagaaccacccccgagaccaccaccgccgcccccaagatgaccaaggagaccgccaccaccaccgagaagaccaccgagagcaagatcaccgccaccaccacccaggtgaccagcaccaccacccaggacaccacccccttcaagatcaccaccctgaagaccaccaccctggcccccaaggtgaccaccaccaagaagaccatcaccaccaccgagatcatgaacaagcccgaggagaccgccaagcccaaggacagagccaccaacagcaaggccaccacccccaagccccagaagcccaccaaggcccccaagaagcccaccagcaccaagaagcccaagaccatgcccagagtgagaaagcccaagaccacccccacccccagaaagatgaccagcaccatgcccgagctgaaccccaccagcagaatcgccgaggccatgctgcagaccaccaccagacccaaccagacccccaacagcaagctggtggaggtgaaccccaagagcgaggacgccggcggcgccgagggcgagaccccccacatgctgctgagaccccacgtgttcatgcccgaggtgacccccgacatggactacctgcccagagtgcccaaccagggcatcatcatcaaccccatgctgagcgacgagaccaacatctgcaacggcaagcccgtggacggcctgaccaccctgagaaacggcaccctggtggccttcagaggccactacttctggatgctgagccccttcagcccccccagccccgccagaagaatcaccgaggtgtggggcatccccagccccatcgacaccgtgttcaccagatgcaactgcgagggcaagaccttcttcttcaaggacagccagtactggagattcaccaacgacatcaaggacgccggctaccccaagcccatcttcaagggcttcggcggcctgaccggccagatcgtggccgccctgagcaccgccaagtacaagaactggcccgagagcgtgtacttcttcaagagaggcggcagcatccagcagtacatctacaagcaggagcccgtgcagaagtgccccggcagaagacccgccctgaactaccccgtgtacggcgagaccacccaggtgagaagaagaagattcgagagagccatcggccccagccagacccacaccatcagaatccagtacagccccgccagactggcctaccaggacaagggcgtgctgcacaacgaggtgaaggtgagcatcctgtggagaggcctgcccaacgtggtgaccagcgccatcagcctgcccaacatcagaaagcccgacggctacgactactacgccttcagcaaggaccagtactacaacatcgacgtgcccagcagaaccgccagagccatcaccaccagaagcggccagaccctgagcaaggtgtggtacaactgcccctag

SEQ ID NO: 95631 - DNA, 2802 bp, synthetic construct
  misc_feature 1..2802: note = Description of Artificial Sequence: Synthetic coding sequence
  source 1..2802: mol_type = other DNA
atggcctggaagaccctgcccatctacctgctgctgctgctgagcgtgttcgtgatccagcaggtgagcagccaggagctgagctgcaagggcagatgcttcgagagcttcgagagaggcagagagtgcgactgcgacgcccagtgcaagaagtacgacaagtgctgccccgactacgagagcttctgcgccgaggtgcacaaccccaccagcccccccagcagcaagaaggcccccccccccagcggcgccagccagaccatcaagagcaccaccaagagaagccccaagccccccaacaagaagaagaccaagaaggtgatcgagagcgaggagatcaccgaggagcacagcgtgagcgagaaccaggagagcagcagcagcagcagcagcagcagcagcagcagcaccatcagaaagatcaagagcagcaagaacagcgccgccaacagagagctgcagaagaagctgaaggtgaaggacaacaagaagaacagaaccaagaagaagcccacccccaagccccccgtggtggacgaggccggcagcggcctggacaacggcgacttcaaggtgaccacccccgacaccagcaccacccagcacaacaaggtgagcaccagccccaagatcaccaccgccaagcccatcaaccccagacccagcctgccccccaacagcgacaccagcaaggagaccagcctgaccgtgaacaaggagaccaccgtggagaccaaggagaccaccaccaccaacaagcagaccagcaccgacggcaaggagaagaccaccagcgccaaggagacccagagcatcgagaagaccagcgccaaggacctggcccccaccagcaaggtgctggccaagcccacccccaaggccgagaccaccaccaagggccccgccctgaccacccccaaggagcccacccccaccacccccaaggagcccgccagcaccacccccaaggagcccacccccaccaccatcaagagcgcccccaccacccccaaggagcccgcccccaccaccaccaagagcgcccccaccacccccaaggagcccgcccccaccaccaccaaggagcccgcccccaccacccccaagaagcccgcccccaccacccccgagacccccccccccaccaccagcgaggtgagcacccccaccaccaccaaggagcccaccaccatccacaagagccccgacgagagcacccccgagctgagcgccgagcccacccccaaggccctggagaacagccccaaggagcccggcgtgcccaccaccaagacccccgccgccaccaagcccgagatgaccaccaccgccaaggacaagaccaccgagagagacctgagaaccacccccgagaccaccaccgccgcccccaagatgaccaaggagaccgccaccaccaccgagaagaccaccgagagcaagatcaccgccaccaccacccaggtgaccagcaccaccacccaggacaccacccccttcaagatcaccaccctgaagaccaccaccctggcccccaaggtgaccaccaccaagaagaccatcaccaccaccgagatcatgaacaagcccgaggagaccgccaagcccaaggacagagccaccaacagcaaggccaccacccccaagccccagaagcccaccaaggcccccaagaagcccaccagcaccaagaagcccaagaccatgcccagagtgagaaagcccaagaccacccccacccccagaaagatgaccagcaccatgcccgagctgaaccccaccagcagaatcgccgaggccatgctgcagaccaccaccagacccaaccagacccccaacagcaagctggtggaggtgaaccccaagagcgaggacgccggcggcgccgagggcgagaccccccacatgctgctgagaccccacgtgttcatgcccgaggtgacccccgacatggactacctgcccagagtgcccaaccagggcatcatcatcaaccccatgctgagcgacgagaccaacatctgcaacggcaagcccgtggacggcctgaccaccctgagaaacggcaccctggtggccttcagaggccactacttctggatgctgagccccttcagcccccccagccccgccagaagaatcaccgaggtgtggggcatccccagccccatcgacaccgtgttcaccagatgcaactgcgagggcaagaccttcttcttcaaggacagccagtactggagattcaccaacgacatcaaggacgccggctaccccaagcccatcttcaagggcttcggcggcctgaccggccagatcgtggccgccctgagcaccgccaagtacaagaactggcccgagagcgtgtacttcttcaagagaggcggcagcatccagcagtacatctacaagcaggagcccgtgcagaagtgccccggcagaagacccgccctgaactaccccgtgtacggcgagaccacccaggtgagaagaagaagattcgagagagccatcggccccagccagacccacaccatcagaatccagtacagccccgccagactggcctaccaggacaagggcgtgctgcacaacgaggtgaaggtgagcatcctgtggagaggcctgcccaacgtggtgaccagcgccatcagcctgcccaacatcagaaagcccgacggctacgactactacgccttcagcaaggaccagtactacaacatcgacgtgcccagcagaaccgccagagccatcaccaccagaagcggccagaccctgagcaaggtgtggtacaactgcccctag

SEQ ID NO: 95632 - DNA, 3936 bp, synthetic construct
  misc_feature 1..3936: note = Description of Artificial Sequence: Synthetic coding sequence
  source 1..3936: mol_type = other DNA
atggcctggaagaccctgcccatctacctgctgctgctgctgagcgtgttcgtgatccagcaggtgagcagccaggacctgagcagctgcgccggcagatgcggcgagggctacagcagagacgccacctgcaactgcgactacaactgccagcactacatggagtgctgccccgacttcaagagagtgtgcaccgccgagctgagctgcaagggcagatgcttcgagagcttcgagagaggcagagagtgcgactgcgacgcccagtgcaagaagtacgacaagtgctgccccgactacgagagcttctgcgccgaggtgaaggacaacaagaagaacagaaccaagaagaagcccacccccaagccccccgtggtggacgaggccggcagcggcctggacaacggcgacttcaaggtgaccacccccgacaccagcaccacccagcacaacaaggtgagcaccagccccaagatcaccaccgccaagcccatcaaccccagacccagcctgccccccaacagcgacaccagcaaggagaccagcctgaccgtgaacaaggagaccaccgtggagaccaaggagaccaccaccaccaacaagcagaccagcaccgacggcaaggagaagaccaccagcgccaaggagacccagagcatcgagaagaccagcgccaaggacctggcccccaccagcaaggtgctggccaagcccacccccaaggccgagaccaccaccaagggccccgccctgaccacccccaaggagcccacccccaccacccccaaggagcccgccagcaccacccccaaggagcccacccccaccaccatcaagagcgcccccaccacccccaaggagcccgcccccaccaccaccaagagcgcccccaccacccccaaggagcccgcccccaccaccaccaaggagcccgcccccaccacccccaaggagcccgcccccaccaccaccaaggagcccgcccccaccaccaccaagagcgcccccaccacccccaaggagcccgcccccaccacccccaagaagcccgcccccaccacccccaaggagcccgcccccaccacccccaaggagcccacccccaccacccccaaggagcccgcccccaccaccaaggagcccgcccccaccacccccaaggagcccgcccccaccgcccccaagaagcccgcccccaccacccccaaggagcccgcccccaccacccccaaggagcccgcccccaccaccaccaaggagcccagccccaccacccccaaggagcccgcccccaccaccaccaagagcgcccccaccaccaccaaggagcccgcccccaccaccaccaagagcgcccccaccacccccaaggagcccagccccaccaccaccaaggagcccgcccccaccacccccaaggagcccgcccccaccacccccaagaagcccgcccccaccacccccaaggagcccgcccccaccacccccaaggagcccgcccccaccaccaccaagaagcccgcccccaccacccccaaggagcccgcccccaccacccccaaggagaccgcccccaccacccccaagaagctgacccccaccacccccgagaagctggcccccaccacccccgagaagcccgcccccaccacccccgaggagctggcccccaccacccccgaggagcccacccccaccacccccgaggagcccgcccccaccacccccaaggccgccgcccccaacacccccaaggagcccgcccccaccacccccaaggagcccgcccccaccacccccaaggagcccgcccccaccacccccaaggagaccgcccccaccacccccaagggcaccgcccccaccaccctgaaggagcccgcccccaccacccccaagaagcccgcccccaaggagctggcccccaccaccaccaaggagcccaccagcaccacctgcgacaagcccgcccccaccacccccaagggcaccgcccccaccacccccaaggagcccgcccccaccacccccaaggagcccgcccccaccacccccaagggcaccgcccccaccaccctgaaggagcccgcccccaccacccccaagaagcccgcccccaaggagctggcccccaccaccaccaagggccccaccagcaccaccagcgacaagcccgcccccaccacccccaaggagaccgcccccaccacccccaaggagcccgcccccaccacccccaagaagcccgcccccaccacccccgagacccccccccccaccaccagcgaggtgagcacccccaccaccaccaaggagcccaccaccatccacaagagccccgacgagagcacccccgagctgagcgccgagcccacccccaaggccctggagaacagccccaaggagcccggcgtgcccaccaccaagacccccgccgccaccaagcccgagatgaccaccaccgccaaggacaagaccaccgagagagacctgagaaccacccccgagaccaccaccgccgcccccaagatgaccaaggagaccgccaccaccaccgagaagaccaccgagagcaagatcaccgccaccaccacccaggtgaccagcaccaccacccaggacaccacccccttcaagatcaccaccctgaagaccaccaccctggcccccaaggtgaccaccaccaagaagaccatcaccaccaccgagatcatgaacaagcccgaggagaccgccaagcccaaggacagagccaccaacagcaaggccaccacccccaagccccagaagcccaccaaggcccccaagaagcccaccagcaccaagaagcccaagaccatgcccagagtgagaaagcccaagaccacccccacccccagaaagatgaccagcaccatgcccgagctgaaccccaccagcagaatcgccgaggccatgctgcagaccaccaccagacccaaccagacccccaacagcaagctggtggaggtgaaccccaagagcgaggacgccggcggcgccgagggcgagaccccccacatgctgctgagaccccacgtgttcatgcccgaggtgacccccgacatggactacctgcccagagtgcccaaccagggcatcatcatcaaccccatgctgagcgacgagaccaacatctgcaacggcaagcccgtggacggcctgaccaccctgagaaacggcaccctggtggccttcagaggccactacttctggatgctgagccccttcagcccccccagccccgccagaagaatcaccgaggtgtggggcatccccagccccatcgacaccgtgttcaccagatgcaactgcgagggcaagaccttcttcttcaaggacagccagtactggagattcaccaacgacatcaaggacgccggctaccccaagcccatcttcaagggcttcggcggcctgaccggccagatcgtggccgccctgagcaccgccaagtacaagaactggcccgagagcgtgtacttcttcaagagaggcggcagcatccagcagtacatctacaagcaggagcccgtgcagaagtgccccggcagaagacccgccctgaactaccccgtgtacggcgagaccacccaggtgagaagaagaagattcgagagagccatcggccccagccagacccacaccatcagaatccagtacagccccgccagactggcctaccaggacaagggcgtgctgcacaacgaggtgaaggtgagcatcctgtggagaggcctgcccaacgtggtgaccagcgccatcagcctgcccaacatcagaaagcccgacggctacgactactacgccttcagcaaggaccagtactacaacatcgacgtgcccagcagaaccgccagagccatcaccaccagaagcggccagaccctgagcaaggtgtggtacaactgcccctag

SEQ ID NO: 95633 - DNA, 4086 bp, synthetic construct
  misc_feature 1..4086: note = Description of Artificial Sequence: Synthetic coding sequence
  source 1..4086: mol_type = other DNA
atggcctggaagaccctgcccatctacctgctgctgctgctgagcgtgttcgtgatccagcaggtgagcagccaggacctgagcagctgcgccggcagatgcggcgagggctacagcagagacgccacctgcaactgcgactacaactgccagcactacatggagtgctgccccgacttcaagagagtgtgcaccgccgagctgagctgcaagggcagatgcttcgagagcttcgagagaggcagagagtgcgactgcgacgcccagtgcaagaagtacgacaagtgctgccccgactacgagagcttctgcgccgaggtgcacaaccccaccagcccccccagcagcaagaaggcccccccccccagcggcgccagccagaccatcaagagcaccaccaagagaagccccaagccccccaacaagaagaagaccaagaaggtgatcgagagcgaggagatcaccgaggtgaaggacaacaagaagaacagaaccaagaagaagcccacccccaagccccccgtggtggacgaggccggcagcggcctggacaacggcgacttcaaggtgaccacccccgacaccagcaccacccagcacaacaaggtgagcaccagccccaagatcaccaccgccaagcccatcaaccccagacccagcctgccccccaacagcgacaccagcaaggagaccagcctgaccgtgaacaaggagaccaccgtggagaccaaggagaccaccaccaccaacaagcagaccagcaccgacggcaaggagaagaccaccagcgccaaggagacccagagcatcgagaagaccagcgccaaggacctggcccccaccagcaaggtgctggccaagcccacccccaaggccgagaccaccaccaagggccccgccctgaccacccccaaggagcccacccccaccacccccaaggagcccgccagcaccacccccaaggagcccacccccaccaccatcaagagcgcccccaccacccccaaggagcccgcccccaccaccaccaagagcgcccccaccacccccaaggagcccgcccccaccaccaccaaggagcccgcccccaccacccccaaggagcccgcccccaccaccaccaaggagcccgcccccaccaccaccaagagcgcccccaccacccccaaggagcccgcccccaccacccccaagaagcccgcccccaccacccccaaggagcccgcccccaccacccccaaggagcccacccccaccacccccaaggagcccgcccccaccaccaaggagcccgcccccaccacccccaaggagcccgcccccaccgcccccaagaagcccgcccccaccacccccaaggagcccgcccccaccacccccaaggagcccgcccccaccaccaccaaggagcccagccccaccacccccaaggagcccgcccccaccaccaccaagagcgcccccaccaccaccaaggagcccgcccccaccaccaccaagagcgcccccaccacccccaaggagcccagccccaccaccaccaaggagcccgcccccaccacccccaaggagcccgcccccaccacccccaagaagcccgcccccaccacccccaaggagcccgcccccaccacccccaaggagcccgcccccaccaccaccaagaagcccgcccccaccacccccaaggagcccgcccccaccacccccaaggagaccgcccccaccacccccaagaagctgacccccaccacccccgagaagctggcccccaccacccccgagaagcccgcccccaccacccccgaggagctggcccccaccacccccgaggagcccacccccaccacccccgaggagcccgcccccaccacccccaaggccgccgcccccaacacccccaaggagcccgcccccaccacccccaaggagcccgcccccaccacccccaaggagcccgcccccaccacccccaaggagaccgcccccaccacccccaagggcaccgcccccaccaccctgaaggagcccgcccccaccacccccaagaagcccgcccccaaggagctggcccccaccaccaccaaggagcccaccagcaccacctgcgacaagcccgcccccaccacccccaagggcaccgcccccaccacccccaaggagcccgcccccaccacccccaaggagcccgcccccaccacccccaagggcaccgcccccaccaccctgaaggagcccgcccccaccacccccaagaagcccgcccccaaggagctggcccccaccaccaccaagggccccaccagcaccaccagcgacaagcccgcccccaccacccccaaggagaccgcccccaccacccccaaggagcccgcccccaccacccccaagaagcccgcccccaccacccccgagacccccccccccaccaccagcgaggtgagcacccccaccaccaccaaggagcccaccaccatccacaagagccccgacgagagcacccccgagctgagcgccgagcccacccccaaggccctggagaacagccccaaggagcccggcgtgcccaccaccaagacccccgccgccaccaagcccgagatgaccaccaccgccaaggacaagaccaccgagagagacctgagaaccacccccgagaccaccaccgccgcccccaagatgaccaaggagaccgccaccaccaccgagaagaccaccgagagcaagatcaccgccaccaccacccaggtgaccagcaccaccacccaggacaccacccccttcaagatcaccaccctgaagaccaccaccctggcccccaaggtgaccaccaccaagaagaccatcaccaccaccgagatcatgaacaagcccgaggagaccgccaagcccaaggacagagccaccaacagcaaggccaccacccccaagccccagaagcccaccaaggcccccaagaagcccaccagcaccaagaagcccaagaccatgcccagagtgagaaagcccaagaccacccccacccccagaaagatgaccagcaccatgcccgagctgaaccccaccagcagaatcgccgaggccatgctgcagaccaccaccagacccaaccagacccccaacagcaagctggtggaggtgaaccccaagagcgaggacgccggcggcgccgagggcgagaccccccacatgctgctgagaccccacgtgttcatgcccgaggtgacccccgacatggactacctgcccagagtgcccaaccagggcatcatcatcaaccccatgctgagcgacgagaccaacatctgcaacggcaagcccgtggacggcctgaccaccctgagaaacggcaccctggtggccttcagaggccactacttctggatgctgagccccttcagcccccccagccccgccagaagaatcaccgaggtgtggggcatccccagccccatcgacaccgtgttcaccagatgcaactgcgagggcaagaccttcttcttcaaggacagccagtactggagattcaccaacgacatcaaggacgccggctaccccaagcccatcttcaagggcttcggcggcctgaccggccagatcgtggccgccctgagcaccgccaagtacaagaactggcccgagagcgtgtacttcttcaagagaggcggcagcatccagcagtacatctacaagcaggagcccgtgcagaagtgccccggcagaagacccgccctgaactaccccgtgtacggcgagaccacccaggtgagaagaagaagattcgagagagccatcggccccagccagacccacaccatcagaatccagtacagccccgccagactggcctaccaggacaagggcgtgctgcacaacgaggtgaaggtgagcatcctgtggagaggcctgcccaacgtggtgaccagcgccatcagcctgcccaacatcagaaagcccgacggctacgactactacgccttcagcaaggaccagtactacaacatcgacgtgcccagcagaaccgccagagccatcaccaccagaagcggccagaccctgagcaaggtgtggtacaactgcccctag

SEQ ID NO: 95634 - DNA, 4215 bp, synthetic construct
  misc_feature 1..4215: note = Description of Artificial Sequence: Synthetic coding sequence
  source 1..4215: mol_type = other DNA
atggcctggaagaccctgcccatctacctgctgctgctgctgagcgtgttcgtgatccagcaggtgagcagccaggacctgagcagctgcgccggcagatgcggcgagggctacagcagagacgccacctgcaactgcgactacaactgccagcactacatggagtgctgccccgacttcaagagagtgtgcaccgccgagctgagctgcaagggcagatgcttcgagagcttcgagagaggcagagagtgcgactgcgacgcccagtgcaagaagtacgacaagtgctgccccgactacgagagcttctgcgccgaggtgcacaaccccaccagcccccccagcagcaagaaggcccccccccccagcggcgccagccagaccatcaagagcaccaccaagagaagccccaagccccccaacaagaagaagaccaagaaggtgatcgagagcgaggagatcaccgaggagcacagcgtgagcgagaaccaggagagcagcagcagcagcagcagcagcagcagcagcagcaccatcagaaagatcaagagcagcaagaacagcgccgccaacagagagctgcagaagaagctgaaggtgaaggacaacaagaagaacagaaccaagaagaagcccacccccaagccccccgtggtggacgaggccggcagcggcctggacaacggcgacttcaaggtgaccacccccgacaccagcaccacccagcacaacaaggtgagcaccagccccaagatcaccaccgccaagcccatcaaccccagacccagcctgccccccaacagcgacaccagcaaggagaccagcctgaccgtgaacaaggagaccaccgtggagaccaaggagaccaccaccaccaacaagcagaccagcaccgacggcaaggagaagaccaccagcgccaaggagacccagagcatcgagaagaccagcgccaaggacctggcccccaccagcaaggtgctggccaagcccacccccaaggccgagaccaccaccaagggccccgccctgaccacccccaaggagcccacccccaccacccccaaggagcccgccagcaccacccccaaggagcccacccccaccaccatcaagagcgcccccaccacccccaaggagcccgcccccaccaccaccaagagcgcccccaccacccccaaggagcccgcccccaccaccaccaaggagcccgcccccaccacccccaaggagcccgcccccaccaccaccaaggagcccgcccccaccaccaccaagagcgcccccaccacccccaaggagcccgcccccaccacccccaagaagcccgcccccaccacccccaaggagcccgcccccaccacccccaaggagcccacccccaccacccccaaggagcccgcccccaccaccaaggagcccgcccccaccacccccaaggagcccgcccccaccgcccccaagaagcccgcccccaccacccccaaggagcccgcccccaccacccccaaggagcccgcccccaccaccaccaaggagcccagccccaccacccccaaggagcccgcccccaccaccaccaagagcgcccccaccaccaccaaggagcccgcccccaccaccaccaagagcgcccccaccacccccaaggagcccagccccaccaccaccaaggagcccgcccccaccacccccaaggagcccgcccccaccacccccaagaagcccgcccccaccacccccaaggagcccgcccccaccacccccaaggagcccgcccccaccaccaccaagaagcccgcccccaccacccccaaggagcccgcccccaccacccccaaggagaccgcccccaccacccccaagaagctgacccccaccacccccgagaagctggcccccaccacccccgagaagcccgcccccaccacccccgaggagctggcccccaccacccccgaggagcccacccccaccacccccgaggagcccgcccccaccacccccaaggccgccgcccccaacacccccaaggagcccgcccccaccacccccaaggagcccgcccccaccacccccaaggagcccgcccccaccacccccaaggagaccgcccccaccacccccaagggcaccgcccccaccaccctgaaggagcccgcccccaccacccccaagaagcccgcccccaaggagctggcccccaccaccaccaaggagcccaccagcaccacctgcgacaagcccgcccccaccacccccaagggcaccgcccccaccacccccaaggagcccgcccccaccacccccaaggagcccgcccccaccacccccaagggcaccgcccccaccaccctgaaggagcccgcccccaccacccccaagaagcccgcccccaaggagctggcccccaccaccaccaagggccccaccagcaccaccagcgacaagcccgcccccaccacccccaaggagaccgcccccaccacccccaaggagcccgcccccaccacccccaagaagcccgcccccaccacccccgagacccccccccccaccaccagcgaggtgagcacccccaccaccaccaaggagcccaccaccatccacaagagccccgacgagagcacccccgagctgagcgccgagcccacccccaaggccctggagaacagccccaaggagcccggcgtgcccaccaccaagacccccgccgccaccaagcccgagatgaccaccaccgccaaggacaagaccaccgagagagacctgagaaccacccccgagaccaccaccgccgcccccaagatgaccaaggagaccgccaccaccaccgagaagaccaccgagagcaagatcaccgccaccaccacccaggtgaccagcaccaccacccaggacaccacccccttcaagatcaccaccctgaagaccaccaccctggcccccaaggtgaccaccaccaagaagaccatcaccaccaccgagatcatgaacaagcccgaggagaccgccaagcccaaggacagagccaccaacagcaaggccaccacccccaagccccagaagcccaccaaggcccccaagaagcccaccagcaccaagaagcccaagaccatgcccagagtgagaaagcccaagaccacccccacccccagaaagatgaccagcaccatgcccgagctgaaccccaccagcagaatcgccgaggccatgctgcagaccaccaccagacccaaccagacccccaacagcaagctggtggaggtgaaccccaagagcgaggacgccggcggcgccgagggcgagaccccccacatgctgctgagaccccacgtgttcatgcccgaggtgacccccgacatggactacctgcccagagtgcccaaccagggcatcatcatcaaccccatgctgagcgacgagaccaacatctgcaacggcaagcccgtggacggcctgaccaccctgagaaacggcaccctggtggccttcagaggccactacttctggatgctgagccccttcagcccccccagccccgccagaagaatcaccgaggtgtggggcatccccagccccatcgacaccgtgttcaccagatgcaactgcgagggcaagaccttcttcttcaaggacagccagtactggagattcaccaacgacatcaaggacgccggctaccccaagcccatcttcaagggcttcggcggcctgaccggccagatcgtggccgccctgagcaccgccaagtacaagaactggcccgagagcgtgtacttcttcaagagaggcggcagcatccagcagtacatctacaagcaggagcccgtgcagaagtgccccggcagaagacccgccctgaactaccccgtgtacggcgagaccacccaggtgagaagaagaagattcgagagagccatcggccccagccagacccacaccatcagaatccagtacagccccgccagactggcctaccaggacaagggcgtgctgcacaacgaggtgaaggtgagcatcctgtggagaggcctgcccaacgtggtgaccagcgccatcagcctgcccaacatcagaaagcccgacggctacgactactacgccttcagcaaggaccagtactacaacatcgacgtgcccagcagaaccgccagagccatcaccaccagaagcggccagaccctgagcaaggtgtggtacaactgcccctag

SEQ ID NO: 95635 - DNA, 834 bp, synthetic construct
  misc_feature 1..834: note = Description of Artificial Sequence: Synthetic coding sequence
  source 1..834: mol_type = other DNA
atgggcctgctggagtgctgcgccagatgcctggtgggcgcccccttcgccagcctggtggccaccggcctgtgcttcttcggcgtggccctgttctgcggctgcggccacgaggccctgaccggcaccgagaagctgatcgagacctacttcagcaagaactaccaggactacgagtacctgatcaacgtgatccacgccttccagtacgtgatctacggcaccgccagcttcttcttcctgtacggcgccctgctgctggccgagggcttctacaccaccggcgccgtgagacagatcttcggcgactacaagaccaccatctgcggcaagggcctgagcgccaccgtgaccggcggccagaagggcagaggcagcagaggccagcaccaggcccacagcctggagagagtgtgccactgcctgggcaagtggctgggccaccccgacaagttcgtgggcatcacctacgccctgaccgtggtgtggctgctggtgttcgcctgcagcgccgtgcccgtgtacatctacttcaacacctggaccacctgccagagcatcgccttccccagcaagaccagcgccagcatcggcagcctgtgcgccgacgccagaatgtacggcgtgctgccctggaacgccttccccggcaaggtgtgcggcagcaacctgctgagcatctgcaagaccgccgagttccagatgaccttccacctgttcatcgccgccttcgtgggcgccgccgccaccctggtgagcctgctgaccttcatgatcgccgccacctacaacttcgccgtgctgaagctgatgggcagaggcaccaagttctag

SEQ ID NO: 95636 - DNA, 729 bp, synthetic construct
  misc_feature 1..729: note = Description of Artificial Sequence: Synthetic coding sequence
  source 1..729: mol_type = other DNA
atgggcctgctggagtgctgcgccagatgcctggtgggcgcccccttcgccagcctggtggccaccggcctgtgcttcttcggcgtggccctgttctgcggctgcggccacgaggccctgaccggcaccgagaagctgatcgagacctacttcagcaagaactaccaggactacgagtacctgatcaacgtgatccacgccttccagtacgtgatctacggcaccgccagcttcttcttcctgtacggcgccctgctgctggccgagggcttctacaccaccggcgccgtgagacagatcttcggcgactacaagaccaccatctgcggcaagggcctgagcgccaccttcgtgggcatcacctacgccctgaccgtggtgtggctgctggtgttcgcctgcagcgccgtgcccgtgtacatctacttcaacacctggaccacctgccagagcatcgccttccccagcaagaccagcgccagcatcggcagcctgtgcgccgacgccagaatgtacggcgtgctgccctggaacgccttccccggcaaggtgtgcggcagcaacctgctgagcatctgcaagaccgccgagttccagatgaccttccacctgttcatcgccgccttcgtgggcgccgccgccaccctggtgagcctgctgaccttcatgatcgccgccacctacaacttcgccgtgctgaagctgatgggcagaggcaccaagttctag

SEQ ID NO: 95637 - DNA, 834 bp, synthetic construct; identical to SEQ ID NO: 95635
  misc_feature 1..834: note = Description of Artificial Sequence: Synthetic coding sequence
  source 1..834: mol_type = other DNA

SEQ ID NO: 95638 - DNA, 384 bp, synthetic construct
  misc_feature 1..384: note = Description of Artificial Sequence: Synthetic coding sequence
  source 1..384: mol_type = other DNA
atgggcctgctggagtgctgcgccagatgcctggtgggcgcccccttcgccagcctggtggccaccggcctgtgcttcttcggcgtggccctgttctgcggctgcggccacgaggccctgaccggcaccgagaagctgatcgagacctacttcagcaagaactaccaggactacgagtacctgatcaacgtgatccacgccttccagtacgtgatctacggcaccgccagcttcttcttcctgtacggcgccctgctgctggccgagggcttctacaccaccggcgccgtgagacagatcttcggcgactacaagaccaccatctgcggcaagggcctgagcgccaccgtgaccggcggccagaagggcagaggcagcagatag

SEQ ID NO: 95639 - DNA, 768 bp, synthetic construct
  misc_feature 1..768: note = Description of Artificial Sequence: Synthetic coding sequence
  source 1..768: mol_type = other DNA
atgggcctgctggagtgctgcgccagatgcctggtgggcgcccccttcgccagcctggtggccaccggcctgtgcttcttcggcgtggccctgttctgcggctgcggccacgaggccctgaccggcaccgagaagctgatcgagacctacttcagcaagaactaccaggactacgagtacctgatcaacgtgatccacgccttccagtacgtgatctacggcaccgccagcttcttcttcctgtacggcgccctgctgctggccgagggcttctacaccaccggcgccgtgagacagaagggcagaggcagcagaggccagcaccaggcccacagcctggagagagtgtgccactgcctgggcaagtggctgggccaccccgacaagttcgtgggcatcacctacgccctgaccgtggtgtggctgctggtgttcgcctgcagcgccgtgcccgtgtacatctacttcaacacctggaccacctgccagagcatcgccttccccagcaagaccagcgccagcatcggcagcctgtgcgccgacgccagaatgtacggcgtgctgccctggaacgccttccccggcaaggtgtgcggcagcaacctgctgagcatctgcaagaccgccgagttccagatgaccttccacctgttcatcgccgccttcgtgggcgccgccgccaccctggtgagcctgctgaccttcatgatcgccgccacctacaacttcgccgtgctgaagctgatgggcagaggcaccaagttctag

SEQ ID NO: 95640 - DNA, 414 bp, synthetic construct
  misc_feature 1..414: note = Description of Artificial Sequence: Synthetic coding sequence
  source 1..414: mol_type = other DNA
atgggcctgctggagtgctgcgccagatgcctggtgggcgcccccttcgccagcctggtggccaccggcctgtgcttcttcggcgtggccctgttctgcggctgcggccacgaggccctgaccggcaccgagaagctgatcgagacctacttcagcaagaactaccaggactacgagtacctgatcaacgtgatccacgccttccagtacgtgatctacggcaccgccagcttcttcttcctgtacggcgccctgctgctggccgagggcttctacaccaccggcgccgtgagacagatcttcggcgactacaagaccaccatctgcggcaagggcctgagcgccaccgtgaccggcggccagaagggcagaggcagcagaggccagcaccaggcccacagcctggagagatag

SEQ ID NO: 95641 - DNA, 303 bp, synthetic construct
  misc_feature 1..303: note = Description of Artificial Sequence: Synthetic coding sequence
  source 1..303: mol_type = other DNA
atgggcctgctggagtgctgcgccagatgcctggtgggcgcccccttcgccagcctggtggccaccggcctgtgcttcttcggcgtggccctgttctgcggctgcggccacgaggccctgaccggcaccgagaagctgatcgagacctacttcagcaagaactaccaggactacgagtacctgatcaacgtgatccacgccttccagtacgtgatctacggcaccgccagcttcttcttcctgtacggcgccctgctgctggccgagggcttctacaccaccggcgccgtgagacagatctag

SEQ ID NO: 95642 - DNA, 372 bp, synthetic construct
  misc_feature 1..372: note = Description of Artificial Sequence: Synthetic coding sequence
  source 1..372: mol_type = other DNA
atgggcctgctggagtgctgcgccagatgcctggtgggcgcccccttcgccagcctggtggccaccggcctgtgcttcttcggcgtggccctgttctgcggctgcggccacgaggccctgaccggcaccgagaagctgatcgagacctacttcagcaagaactaccaggactacgagtacctgatcaacgtgatccacgccttccagtacgtgatctacggcaccgccagcttcttcttcctgtacggcgccctgctgctggccgagggcttctacaccaccggcgccgtgagacagatcttcggcgactacaagaccaccatctgcggcaagggcctgagcgccaccgtgaccggcggccagaagggctag

SEQ ID NO: 95643 - DNA, 339 bp, synthetic construct
  misc_feature 1..339: note = Description of Artificial Sequence: Synthetic coding sequence
  source 1..339: mol_type = other DNA
atgggcctgctggagtgctgcgccagatgcctggtgggcgcccccttcgccagcctggtggccaccggcctgtgcttcttcggcgtggccctgttctgcggctgcggccacgaggccctgaccggcaccgagaagctgatcgagacctacttcagcaagaactaccaggactacgagtacctgatcaacgtgatccacgccttccagtacgtgatctacggcaccgccagcttcttcttcctgtacggcgccctgctgctggccgagggcttctacaccaccggcgccgtgagacagatcttcggcgactacaagaccaccatctgcggcaagggctag

SEQ ID NO: 95644 - DNA, 411 bp, synthetic construct
  misc_feature 1..411: note = Description of Artificial Sequence: Synthetic coding sequence
  source 1..411: mol_type = other DNA
atgggcctgctggagtgctgcgccagatgcctggtgggcgcccccttcgccagcctggtggccaccggcctgtgcttcttcggcgtggccctgttctgcggctgcggccacgaggccctgaccggcaccgagaagctgatcgagacctacttcagcaagaactaccaggactacgagtacctgatcaacgtgatccacgccttccagtacgtgatctacggcaccgccagcttcttcttcctgtacggcgccctgctgctggccgagggcttctacaccaccggcgccgtgagacagatcttcggcgactacaagaccaccatctgcggcaagggcctgagcgccaccgtgaccggcggccagaagggcagaggcagcagaggccagcaccaggcccacagcctggagtag

SEQ ID NO: 95645 - DNA, 438 bp, synthetic construct
  misc_feature 1..438: note = Description of Artificial Sequence: Synthetic coding sequence
  source 1..438: mol_type = other DNA
atggccgacagcgagagactgagcgcccccggctgctgggccgcctgcaccaacttcagcagaaccagaaagggcatcctgctgttcgccgagatcatcctgtgcctggtgatcctgatctgcttcagcgccagcacccccggctacagcagcctgagcgtgatcgagatgatcctggccgccatcttcttcgtggtgtacatgtgcgacctgcacaccaagatccccttcatcaactggccctggagcgacttcttcagaaccctgatcgccgccatcctgtacctgatcaccagcatcgtggtgctggtggagagaggcaaccacagcaagatcgtggccggcgtgaaggccatgggcgccgccctgaagcacagagccaagggcctgagaagccagggccccttcctgcccctgctgctggccgagatcgtgtag

SEQ ID NO: 95646 - DNA, 459 bp, synthetic construct
  misc_feature 1..459: note = Description of Artificial Sequence: Synthetic coding sequence
  source 1..459: mol_type = other DNA
atggccgacagcgagagactgagcgcccccggctgctgggccgcctgcaccaacttcagcagaaccagaaagggcatcctgctgttcgccgagatcatcctgtgcctggtgatcctgatctgcttcagcgccagcacccccggctacagcagcctgagcgtgatcgagatgatcctggccgccatcttcttcgtggtgtacatgtgcgacctgcacaccaagatccccttcatcaactggccctggagcgacttcttcagaaccctgatcgccgccatcctgtacctgatcaccagcatcgtggtgctggtggagagaggcaaccacagcaagatcgtggccggcgtgctgggcctgatcgccacctgcctgttcggctacgacgcctacgtgaccttccccgtgagacagcccagacacaccgccgcccccaccgaccccgccgacggccccgtgtag

SEQ ID NO: 95647 - DNA, 336 bp, synthetic construct
  misc_feature 1..336: note = Description of Artificial Sequence: Synthetic coding sequence
  source 1..336: mol_type = other DNA
atgagcgacgccgccgtggacaccagcagcgagatcaccaccaaggacctgaaggagaagaaggaggtggtggaggaggccgagaacggcagagacgcccccgccaacggcaacgccgagaacgaggagaacggcgagcaggaggccgacaacgaggtggacgaggaggaggaggagggcggcgaggaggaggaggaggaggaggagggcgacggcgaggaggaggacggcgacgaggacgaggaggccgagagcgccaccggcaagagagccgccgaggacgacgaggacgacgacgtggacaccaagaagcagaagaccgacgaggacgactag

SEQ ID NO: 95648 - DNA, 408 bp, synthetic construct
  misc_feature 1..408: note = Description of Artificial Sequence: Synthetic coding sequence
  source 1..408: mol_type = other DNA
atgcagaccttcggccccgccggcgtggccgccgtgggcagaagagtggagagccccgccgacagaagagccaccagagcctgccactgcaagctgtgcctgcccgccggcagcctgcagggcctgaagggcgaggagggcagcgtggaggaggccgagaacggcagagacgcccccgccaacggcaacgccaacgaggagaacggcgagcaggaggccgacaacgaggtggacgaggaggaggaggagggcggcgaggaggaggaggaggaggaggagggcgacggcgaggaggaggacggcgacgaggacgaggaggccgagagcgccaccggcaagagagccgccgaggacgacgaggacgacgacgtggacaccaagaagcagaagaccgacgaggacgactag

SEQ ID NO: 95649 - DNA, 333 bp, synthetic construct
  misc_feature 1..333: note = Description of Artificial Sequence: Synthetic coding sequence
  source 1..333: mol_type = other DNA
atgagcgacgccgccgtggacaccagcagcgagatcaccaccaaggacctgaaggagaagaaggaggtggtggaggaggccgagaacggcagagacgcccccgccaacggcaacgccaacgaggagaacggcgagcaggaggccgacaacgaggtggacgaggaggaggaggagggcggcgaggaggaggaggaggaggaggagggcgacggcgaggaggaggacggcgacgaggacgaggaggccgagagcgccaccggcaagagagccgccgaggacgacgaggacgacgacgtggacaccaagaagcagaagaccgacgaggacgactag

SEQ ID NO: 95650 - DNA, 3714 bp, synthetic construct
  misc_feature 1..3714: note = Description of Artificial Sequence: Synthetic coding sequence
  source 1..3714: mol_type = other DNA
atggacagcggcgccggcggcagaagatgccccgaggccgccctgctgatcctgggcccccccagaatggagcacctgagacacagccccggccccggcggccagagactgctgctgcccagcatgctgctggccctgctgctgctgctggcccccagccccggccacgccaccagagtggtgtacaaggtgcccgaggagcagccccccaacaccctgatcggcagcctggccgccgactacggcttccccgacgtgggccacctgtacaagctggaggtgggcgccccctacctgagagtggacggcaagaccggcgacatcttcaccaccgagaccagcatcgacagagagggcctgagagagtgccagaaccagctgcccggcgacccctgcatcctggagttcgaggtgagcatcaccgacctggtgcagaacggcagccccagactgctggagggccagatcgaggtgcaggacatcaacgacaacacccccaacttcgccagccccgtgatcaccctggccatccccgagaacaccaacatcggcagcctgttccccatccccctggccagcgacagagacgccggccccaacggcgtggccagctacgagctgcaggccggccccgaggcccaggagctgttcggcctgcaggtggccgaggaccaggaggagaagcagccccagctgatcgtgatgggcaacctggacagagagagatgggacagctacgacctgaccatcaaggtgcaggacggcggcagcccccccagagccagcagcgccctgctgagagtgaccgtgctggacaccaacgacaacgcccccaagttcgagagacccagctacgaggccgagctgagcgagaacagccccatcggccacagcgtgatccaggtgaaggccaacgacagcgaccagggcgccaacgccgagatcgagtacaccttccaccaggcccccgaggtggtgagaagactgctgagactggacagaaacaccggcctgatcaccgtgcagggccccgtggacagagaggacctgagcaccctgagattcagcgtgctggccaaggacagaggcaccaaccccaagagcgccagagcccaggtggtggtgaccgtgaaggacatgaacgacaacgcccccaccatcgagatcagaggcatcggcctggtgacccaccaggacggcatggccaacatcagcgaggacgtggccgaggagaccgccgtggccctggtgcaggtgagcgacagagacgagggcgagaacgccgccgtgacctgcgtggtggccggcgacgtgcccttccagctgagacaggccagcgagaccggcagcgacagcaagaagaagtacttcctgcagaccaccacccccctggactacgagaaggtgaaggactacaccatcgagatcgtggccgtggacagcggcaacccccccctgagcagcaccaacagcctgaaggtgcaggtggtggacgtgaacgacaacgcccccgtgttcacccagagcgtgaccgaggtggccttccccgagaacaacaagcccggcgaggtgatcgccgagatcaccgccagcgacgccgacagcggcagcaacgccgagctggtgtacagcctggagcccgagcccgccgccaagggcctgttcaccatcagccccgagaccggcgagatccaggtgaagaccagcctggacagagagcagagagagagctacgagctgaaggtggtggccgccgacagaggcagccccagcctgcagggcaccgccaccgtgctggtgaacgtgctggactgcaacgacaacgaccccaagttcatgctgagcggctacaacttcagcgtgatggagaacatgcccgccctgagccccgtgggcatggtgaccgtgatcgacggcgacaagggcgagaacgcccaggtgcagctgagcgtggagcaggacaacggcgacttcgtgatccagaacggcaccggcaccatcctgagcagcctgagcttcgacagagagcagcagagcacctacaccttccagctgaaggccgtggacggcggcgtgccccccagaagcgcctacgtgggcgtgaccatcaacgtgctggacgagaacgacaacgccccctacatcaccgcccccagcaacaccagccacaagctgctgaccccccagaccagactgggcgagaccgtgagccaggtggccgccgaggacttcgacagcggcgtgaacgccgagctgatctacagcatcgccggcggcaacccctacggcctgttccagatcggcagccacagcggcgccatcaccctggagaaggagatcgagagaagacaccacggcctgcacagactggtggtgaaggtgagcgacagaggcaagccccccagatacggcaccgccctggtgcacctgtacgtgaacgagaccctggccaacagaaccctgctggagaccctgctgggccacagcctggacacccccctggacatcgacatcgccggcgaccccgagtacgagagaagcaagcagagaggcaacatcctgttcggcgtggtggccggcgtggtggccgtggccctgctgatcgccctggccgtgctggtgagatactgcagacagagagaggccaagagcggctaccaggccggcaagaaggagaccaaggacctgtacgcccccaagcccagcggcaaggccagcaagggcaacaagagcaagggcaagaagagcaagagccccaagcccgtgaagcccgtggaggacgaggacgaggccggcctgcagaagagcctgaagttcaacctgatgagcgacgcccccggcgacagccccagaatccacctgcccctgaactacccccccggcagccccgacctgggcagacactacagaagcaacagccccctgcccagcatccagctgcagccccagagccccagcgccagcaagaagcaccaggtggtgcaggacctgccccccgccaacaccttcgtgggcaccggcgacaccaccagcaccggcagcgagcagtacagcgactacagctacagaaccaacccccccaagtaccccagcaagcagctgccccacagaagagtgaccttcagcgccaccagccaggcccaggagctgcaggaccccagccagcacagctactacgacagcggcctggaggagagcgagacccccagcagcaagagcagcagcggccccagactgggccccctggccctgcccgaggaccactacgagagaaccacccccgacggcagcatcggcgagatggagcaccccgagaacgacctgagacccctgcccgacgtggccatgaccggcacctgcaccagagagtgcagcgagttcggccacagcgacacctgctggatgcccggccagagcagccccagcagaagaaccaagagcagcgccctgaagctgagcaccttcgtgccctaccaggacagaggcggccaggagcccgccggcgccggcagccccagcccccccgaggacagaaacaccaagaccgcccccgtgagactgctgcccagctacagcgccttcagccacagcagccacgacagctgcaaggacagcgccaccctggaggagatccccctgacccagaccagcgacttcccccccgccgccacccccgccagcgcccagaccgccaagagagagatctacctgtag

SEQ ID NO: 95651 - DNA, 3183 bp, synthetic construct
  misc_feature 1..3183: note = Description of Artificial Sequence: Synthetic coding sequence
  source 1..3183: mol_type = other DNA
atggacagcggcgccggcggcagaagatgccccgaggccgccctgctgatcctgggcccccccagaatggagcacctgagacacagccccggccccggcggccagagactgctgctgcccagcatgctgctggccctgctgctgctgctggcccccagccccggccacgccaccagagtggtgtacaaggtgcccgaggagcagccccccaacaccctgatcggcagcctggccgccgactacggcttccccgacgtgggccacctgtacaagctggaggtgggcgccccctacctgagagtggacggcaagaccggcgacatcttcaccaccgagaccagcatcgacagagagggcctgagagagtgccagaaccagctgcccggcgacccctgcatcctggagttcgaggtgagcatcaccgacctggtgcagaacggcagccccagactgctggagggccagatcgaggtgcaggacatcaacgacaacacccccaacttcgccagccccgtgatcaccctggccatccccgagaacaccaacatcggcagcctgttccccatccccctggccagcgacagagacgccggccccaacggcgtggccagctacgagctgcaggccggccccgaggcccaggagctgttcggcctgcaggtggccgaggaccaggaggagaagcagccccagctgatcgtgatgggcaacctggacagagagagatgggacagctacgacctgaccatcaaggtgcaggacggcggcagcccccccagagccagcagcgccctgctgagagtgaccgtgctggacaccaacgacaacgcccccaagttcgagagacccagctacgaggccgagctgagcgagaacagccccatcggccacagcgtgatccaggtgaaggccaacgacagcgaccagggcgccaacgccgagatcgagtacaccttccaccaggcccccgaggtggtgagaagactgctgagactggacagaaacaccggcctgatcaccgtgcagggccccgtggacagagaggacctgagcaccctgagattcagcgtgctggccaaggacagaggcaccaaccccaagagcgccagagcccaggtggtggtgaccgtgaaggacatgaacgacaacgcccccaccatcgagatcagaggcatcggcctggtgacccaccaggacggcatggccaacatcagcgaggacgtggccgaggagaccgccgtggccctggtgcaggtgagcgacagagacgagggcgagaacgccgccgtgacctgcgtggtggccggcgacgtgcccttccagctgagacaggccagcgagaccggcagcgacagcaagaagaagtacttcctgcagaccaccacccccctggactacgagaaggtgaaggactacaccatcgagatcgtggccgtggacagcggcaacccccccctgagcagcaccaacagcctgaaggtgcaggtggtggacgtgaacgacaacgcccccgtgttcacccagagcgtgaccgaggtggccttccccgagaacaacaagcccggcgaggtgatcgccgagatcaccgccagcgacgccgacagcggcagcaacgccgagctggtgtacagcctggagcccgagcccgccgccaagggcctgttcaccatcagccccgagaccggcgagatccaggtgaagaccagcctggacagagagcagagagagagctacgagctgaaggtggtggccgccgacagaggcagccccagcctgcagggcaccgccaccgtgctggtgaacgtgctggactgcaacgacaacgaccccaagttcatgctgagcggctacaacttcagcgtgatggagaacatgcccgccctgagccccgtgggcatggtgaccgtgatcgacggcgacaagggcgagaacgcccaggtgcagctgagcgtggagcaggacaacggcgacttcgtgatccagaacggcaccggcaccatcctgagcagcctgagcttcgacagagagcagcagagcacctacaccttccagctgaaggccgtggacggcggcgtgccccccagaagcgcctacgtgggcgtgaccatcaacgtgctggacgagaacgacaacgccccctacatcaccgcccccagcaacaccagccacaagctgctgaccccccagaccagactgggcgagaccgtgagccaggtggccgccgaggacttcgacagcggcgtgaacgccgagctgatctacagcatcgccggcggcaacccctacggcctgttccagatcggcagccacagcggcgccatcaccctggagaaggagatcgagagaagacaccacggcctgcacagactggtggtgaaggtgagcgacagaggcaagccccccagatacggcaccgccctggtgcacctgtacgtgaacgagaccctggccaacagaaccctgctggagaccctgctgggccacagcctggacacccccctggacatcgacatcgccggcgaccccgagtacgagagaagcaagcagagaggcaacatcctgttcggcgtggtggccggcgtggtggccgtggccctgctgatcgccctggccgtgctggtgagatactgcagacagagagaggccaagagcggctaccaggccggcaagaaggagaccaaggacctgtacgcccccaagcccagcggcaaggccagcaagggcaacaagagcaagggcaagaagagcaagagccccaagcccgtgaagcccgtggaggacgaggacgaggccggcctgcagaagagcctgaagttcaacctgatgagcgacgcccccggcgacagccccagaatccacctgcccctgaactacccccccggcagccccgacctgggcagacactacagaagcaacagccccctgcccagcatccagctgcagccccagagccccagcgccagcaagaagcaccaggtggtgcaggacctgccccccgccaacaccttcgtgggcaccggcgacaccaccagcaccggcagcgagcagtacagcgactacagctacagaaccaacccccccaagtaccccagcaagcaggtgggccagcccttccagctgagcaccccccagcccctgccccacccctaccacggcgccatctggaccgaggtgtgggagtag

SEQ ID NO: 95652 - DNA, 3147 bp, synthetic construct
  misc_feature 1..3147: note = Description of Artificial Sequence: Synthetic coding sequence
  source 1..3147: mol_type = other DNA
atggacagcggcgccggcggcagaagatgccccgaggccgccctgctgatcctgggcccccccagaatggagcacctgagacacagccccggccccggcggccagagactgctgctgcccagcatgctgctggccctgctgctgctgctggcccccagccccggccacgccaccagagtggtgtacaaggtgcccgaggagcagccccccaacaccctgatcggcagcctggccgccgactacggcttccccgacgtgggccacctgtacaagctggaggtgggcgccccctacctgagagtggacggcaagaccggcgacatcttcaccaccgagaccagcatcgacagagagggcctgagagagtgccagaaccagctgcccggcgacccctgcatcctggagttcgaggtgagcatcaccgacctggtgcagaacggcagccccagactgctggagggccagatcgaggtgcaggacatcaacgacaacacccccaacttcgccagccccgtgatcaccctggccatccccgagaacaccaacatcggcagcctgttccccatccccctggccagcgacagagacgccggccccaacggcgtggccagctacgagctgcaggtggccgaggaccaggaggagaagcagccccagctgatcgtgatgggcaacctggacagagagagatgggacagctacgacctgaccatcaaggtgcaggacggcggcagcccccccagagccagcagcgccctgctgagagtgaccgtgctggacaccaacgacaacgcccccaagttcgagagacccagctacgaggccgagctgagcgagaacagccccatcggccacagcgtgatccaggtgaaggccaacgacagcgaccagggcgccaacgccgagatcgagtacaccttccaccaggcccccgaggtggtgagaagactgctgagactggacagaaacaccggcctgatcaccgtgcagggccccgtggacagagaggacctgagcaccctgagattcagcgtgctggccaaggacagaggcaccaaccccaagagcgccagagcccaggtggtggtgaccgtgaaggacatgaacgacaacgcccccaccatcgagatcagaggcatcggcctggtgacccaccaggacggcatggccaacatcagcgaggacgtggccgaggagaccgccgtggccctggtgcaggtgagcgacagagacgagggcgagaacgccgccgtgacctgcgtggtggccggcgacgtgcccttccagctgagacaggccagcgagaccggcagcgacagcaagaagaagtacttcctgcagaccaccacccccctggactacgagaaggtgaaggactacaccatcgagatcgtggccgtggacagcggcaacccccccctgagcagcaccaacagcctgaaggtgcaggtggtggacgtgaacgacaacgcccccgtgttcacccagagcgtgaccgaggtggccttccccgagaacaacaagcccggcgaggtgatcgccgagatcaccgccagcgacgccgacagcggcagcaacgccgagctggtgtacagcctggagcccgagcccgccgccaagggcctgttcaccatcagccccgagaccggcgagatccaggtgaagaccagcctggacagagagcagagagagagctacgagctgaaggtggtggccgccgacagaggcagccccagcctgcagggcaccgccaccgtgctggtgaacgtgctggactgcaacgacaacgaccccaagttcatgctgagcggctacaacttcagcgtgatggagaacatgcccgccctgagccccgtgggcatggtgaccgtgatcgacggcgacaagggcgagaacgcccaggtgcagctgagcgtggagcaggacaacggcgacttcgtgatccagaacggcaccggcaccatcctgagcagcctgagcttcgacagagagcagcagagcacctacaccttccagctgaaggccgtggacggcggcgtgccccccagaagcgcctacgtgggcgtgaccatcaacgtgctggacgagaacgacaacgccccctacatcaccgcccccagcaacaccagccacaagctgctgaccccccagaccagactgggcgagaccgtgagccaggtggccgccgaggacttcgacagcggcgtgaacgccgagctgatctacagcatcgccggcggcaacccctacggcctgttccagatcggcagccacagcggcgccatcaccctggagaaggagatcgagagaagacaccacggcctgcacagactggtggtgaaggtgagcgacagaggcaagccccccagatacggcaccgccctggtgcacctgtacgtgaacgagaccctggccaacagaaccctgctggagaccctgctgggccacagcctggacacccccctggacatcgacatcgccggcgaccccgagtacgagagaagcaagcagagaggcaacatcctgttcggcgtggtggccggcgtggtggccgtggccctgctgatcgccctggccgtgctggtgagatactgcagacagagagaggccaagagcggctaccaggccggcaagaaggagaccaaggacctgtacgcccccaagcccagcggcaaggccagcaagggcaacaagagcaagggcaagaagagcaagagccccaagcccgtgaagcccgtggaggacgaggacgaggccggcctgcagaagagcctgaagttcaacctgatgagcgacgcccccggcgacagccccagaatccacctgcccctgaactacccccccggcagccccgacctgggcagacactacagaagcaacagccccctgcccagcatccagctgcagccccagagccccagcgccagcaagaagcaccaggtggtgcaggacctgccccccgccaacaccttcgtgggcaccggcgacaccaccagcaccggcagcgagcagtacagcgactacagctacagaaccaacccccccaagtaccccagcaagcaggtgggccagcccttccagctgagcaccccccagcccctgccccacccctaccacggcgccatctggaccgaggtgtgggagtag

SEQ ID NO: 95653 - DNA, 3117 bp, synthetic construct
  misc_feature 1..3117: note = Description of Artificial Sequence: Synthetic coding sequence
  source 1..3117: mol_type = other DNA
atggagcacctgagacacagccccggccccggcggccagagactgctgctgcccagcatgctgctggccctgctgctgctgctggcccccagccccggccacgccaccagagtggtgtacaaggtgcccgaggagcagccccccaacaccctgatcggcagcctggccgccgactacggcttccccgacgtgggccacctgtacaagctggaggtgggcgccccctacctgagagtggacggcaagaccggcgacatcttcaccaccgagaccagcatcgacagagagggcctgagagagtgccagaaccagctgcccggcgacccctgcatcctggagttcgaggtgagcatcaccgacctggtgcagaacggcagccccagactgctggagggccagatcgaggtgcaggacatcaacgacaacacccccaacttcgccagccccgtgatcaccctggccatccccgagaacaccaacatcggcagcctgttccccatccccctggccagcgacagagacgccggccccaacggcgtggccagctacgagctgcaggccggccccgaggcccaggagctgttcggcctgcaggtggccgaggaccaggaggagaagcagccccagctgatcgtgatgggcaacctggacagagagagatgggacagctacgacctgaccatcaaggtgcaggacggcggcagcccccccagagccagcagcgccctgctgagagtgaccgtgctggacaccaacgacaacgcccccaagttcgagagacccagctacgaggccgagctgagcgagaacagccccatcggccacagcgtgatccaggtgaaggccaacgacagcgaccagggcgccaacgccgagatcgagtacaccttccaccaggcccccgaggtggtgagaagactgctgagactggacagaaacaccggcctgatcaccgtgcagggccccgtggacagagaggacctgagcaccctgagattcagcgtgctggccaaggacagaggcaccaaccccaagagcgccagagcccaggtggtggtgaccgtgaaggacatgaacgacaacgcccccaccatcgagatcagaggcatcggcctggtgacccaccaggacggcatggccaacatcagcgaggacgtggccgaggagaccgccgtggccctggtgcaggtgagcgacagagacgagggcgagaacgccgccgtgacctgcgtggtggccggcgacgtgcccttccagctgagacaggccagcgagaccggcagcgacagcaagaagaagtacttcctgcagaccaccacccccctggactacgagaaggtgaaggactacaccatcgagatcgtggccgtggacagcggcaacccccccctgagcagcaccaacagcctgaaggtgcaggtggtggacgtgaacgacaacgcccccgtgttcacccagagcgtgaccgaggtggccttccccgagaacaacaagcccggcgaggtgatcgccgagatcaccgccagcgacgccgacagcggcagcaacgccgagctggtgtacagcctggagcccgagcccgccgccaagggcctgttcaccatcagccccgagaccggcgagatccaggtgaagaccagcctggacagagagcagagagagagctacgagctgaaggtggtggccgccgacagaggcagccccagcctgcagggcaccgccaccgtgctggtgaacgtgctggactgcaacgacaacgaccccaagttcatgctgagcggctacaacttcagcgtgatggagaacatgcccgccctgagccccgtgggcatggtgaccgtgatcgacggcgacaagggcgagaacgcccaggtgcagctgagcgtggagcaggacaacggcgacttcgtgatccagaacggcaccggcaccatcctgagcagcctgagcttcgacagagagcagcagagcacctacaccttccagctgaaggccgtggacggcggcgtgccccccagaagcgcctacgtgggcgtgaccatcaacgtgctggacgagaacgacaacgccccctacatcaccgcccccagcaacaccagccacaagctgctgaccccccagaccagactgggcgagaccgtgagccaggtggccgccgaggacttcgacagcggcgtgaacgccgagctgatctacagcatcgccggcggcaacccctacggcctgttccagatcggcagccacagcggcgccatcaccctggagaaggagatcgagagaagacaccacggcctgcacagactggtggtgaaggtgagcgacagaggcaagccccccagatacggcaccgccctggtgcacctgtacgtgaacgagaccctggccaacagaaccctgctggagaccctgctgggccacagcctggacacccccctggacatcgacatcgccggcgaccccgagtacgagagaagcaagcagagaggcaacatcctgttcggcgtggtggccggcgtggtggccgtggccctgctgatcgccctggccgtgctggtgagatactgcagacagagagaggccaagagcggctaccaggccggcaagaaggagaccaaggacctgtacgcccccaagcccagcggcaaggccagcaagggcaacaagagcaagggcaagaagagcaagagccccaagcccgtgaagcccgtggaggacgaggacgaggccggcctgcagaagagcctgaagttcaacctgatgagcgacgcccccggcgacagccccagaatccacctgcccctgaactacccccccggcagccccgacctgggcagacactacagaagcaacagccccctgcccagcatccagctgcagccccagagccccagcgccagcaagaagcaccaggtggtgcaggacctgccccccgccaacaccttcgtgggcaccggcgacaccaccagcaccggcagcgagcagtacagcgactacagctacagaaccaacccccccaagtaccccagcaagcaggtgggccagcccttccagctgagcaccccccagcccctgccccacccctaccacggcgccatctggaccgaggtgtgggagtag

SEQ ID NO: 95654 - DNA, 3123 bp, synthetic construct
  misc_feature 1..3123: note = Description of Artificial Sequence: Synthetic coding sequence
  source 1..3123: mol_type = other DNA
atgatcgtgctgctgctgttcgccctgctgtggatggtggagggcgtgttcagccagctgcactacaccgtgcaggaggagcaggagcacggcaccttcgtgggcaacatcgccgaggacctgggcctggacatcaccaagctgagcgccagaggcttccagaccgtgcccaacagcagaaccccctacctggacctgaacctggagaccggcgtgctgtacgtgaacgagaagatcgacagagagcagatctgcaagcagagccccagctgcgtgctgcacctggaggtgttcctggagaaccccctggagctgttccaggtggagatcgaggtgctggacatcaacgacaacccccccagcttccccgagcccgacctgaccgtggagatcagcgagagcgccacccccggcaccagattccccctggagagcgccttcgaccccgacgtgggcaccaacagcctgagagactacgagatcacccccaacagctacttcagcctggacgtgcagacccagggcgacggcaacagattcgccgagctggtgctggagaagcccctggacagagagcagcaggccgtgcacagatacgtgctgaccgccgtggacggcggcggcggcggcggcgtgggcgagggcggcggcggcggcggcggcgccggcctgcccccccagcagcagagaaccggcaccgccctgctgaccatcagagtgctggacagcaacgacaacgtgcccgccttcgaccagcccgtgtacaccgtgagcctgcccgagaacagcccccccggcaccctggtgatccagctgaacgccaccgaccccgacgagggccagaacggcgaggtggtgtacagcttcagcagccacatcagccccagagccagagagctgttcggcctgagccccagaaccggcagactggaggtgagcggcgagctggactacgaggagagccccgtgtaccaggtgtacgtgcaggccaaggacctgggccccaacgccgtgcccgcccactgcaaggtgctggtgagagtgctggacgccaacgacaacgcccccgagatcagcttcagcaccgtgaaggaggccgtgagcgagggcgccgcccccggcaccgtggtggccctgttcagcgtgaccgacagagacagcgaggagaacggccaggtgcagtgcgagctgctgggcgacgtgcccttcagactgaagagcagcttcaagaactactacaccatcgtgaccgaggcccccctggacagagaggccggcgacagctacaccctgaccgtggtggccagagacagaggcgagcccgccctgagcaccagcaagagcatccaggtgcaggtgagcgacgtgaacgacaacgcccccagattcagccagcccgtgtacgacgtgtacgtgaccgagaacaacgtgcccggcgcctacatctacgccgtgagcgccaccgacagagacgagggcgccaacgcccagctggcctacagcatcctggagtgccagatccagggcatgagcgtgttcacctacgtgagcatcaacagcgagaacggctacctgtacgccctgagaagcttcgactacgagcagctgaaggacttcagcttccaggtggaggccagagacgccggcagcccccaggccctggccggcaacgccaccgtgaacatcctgatcgtggaccagaacgacaacgcccccgccatcgtggcccccctgcccggcagaaacggcacccccgccagagaggtgctgcccagaagcgccgagcccggctacctgctgaccagagtggccgccgtggacgccgacgacggcgagaacgccagactgacctacagcatcgtgagaggcaacgagatgaacctgttcagaatggactggagaaccggcgagctgagaaccgccagaagagtgcccgccaagagagacccccagagaccctacgagctggtgatcgaggtgagagaccacggccagccccccctgagcagcaccgccaccctggtggtgcagctggtggacggcgccgtggagccccagggcggcggcggcagcggcggcggcggcagcggcgagcaccagagacccagcagaagcggcggcggcgagaccagcctggacctgaccctgatcctgatcatcgccctgggcagcgtgagcttcatcttcctgctggccatgatcgtgctggccgtgagatgccagaaggagaagaagctgaacatctacacctgcctggccagcgactgctgcctgtgctgctgctgctgcggcggcggcggcagcacctgctgcggcagacaggccagagccagaaagaagaagctgagcaagagcgacatcatgctggtgcagagcagcaacgtgcccagcaaccccgcccaggtgcccatcgaggagagcggcggcttcggcagccaccaccacaaccagaactactgctaccaggtgtgcctgacccccgagagcgccaagaccgacctgatgttcctgaagccctgcagccccagcagaagcaccgacaccgagcacaacccctgcggcgccatcgtgaccggctacaccgaccagcagcccgacatcatcagcaacggcagcatcctgagcaacgagaccaagcaccagagagccgagctgagctacctggtggacagacccagaagagtgaacagcagcgccttccaggaggccgacatcgtgagcagcaaggacagcggccacggcgacagcgagcagggcgacagcgaccacgacgccaccaacagagcccagagcgccggcatggacctgttcagcaactgcaccgaggagtgcaaggccctgggccacagcgacagatgctggatgcccagcttcgtgcccagcgacggcagacaggccgccgactacagaagcaacctgcacgtgcccggcatggacagcgtgcccgacaccgaggtgttcgagacccccgaggcccagcccggcgccgagagaagcttcagcaccttcggcaaggagaaggccctgcacagcaccctggagagaaaggagctggacggcctgctgaccaacaccagagccccctacaagcccccctacctgaccagaaagagaatctgctag

SEQ ID NO: 95655 - DNA, 3123 bp, synthetic construct
  misc_feature 1..3123: note = Description of Artificial Sequence: Synthetic coding sequence
  source 1..3123: mol_type = other DNA
atgatcgtgctgctgctgttcgccctgctgtggatggtggagggcgtgttcagccagctgcactacaccgtgcaggaggagcaggagcacggcaccttcgtgggcaacatcgccgaggacctgggcctggacatcaccaagctgagcgccagaggcttccagaccgtgcccaacagcagaaccccctacctggacctgaacctggagaccggcgtgctgtacgtgaacgagaagatcgacagagagcagatctgcaagcagagccccagctgcgtgctgcacctggaggtgttcctggagaaccccctggagctgttccaggtggagatcgaggtgctggacatcaacgacaacccccccagcttccccgagcccgacctgaccgtggagatcagcgagagcgccacccccggcaccagattccccctggagagcgccttcgaccccgacgtgggcaccaacagcctgagagactacgagatcacccccaacagctacttcagcctggacgtgcagacccagggcgacggcaacagattcgccgagctggtgctggagaagcccctggacagagagcagcaggccgtgcacagatacgtgctgaccgccgtggacggcggcggcggcggcggcgtgggcgagggcggcggcggcggcggcggcgccggcctgcccccccagcagcagagaaccggcaccgccctgctgaccatcagagtgctggacagcaacgacaacgtgcccgccttcgaccagcccgtgtacaccgtgagcctgcccgagaacagcccccccggcaccctggtgatccagctgaacgccaccgaccccgacgagggccagaacggcgaggtggtgtacagcttcagcagccacatcagccccagagccagagagctgttcggcctgagccccagaaccggcagactggaggtgagcggcgagctggactacgaggagagccccgtgtaccaggtgtacgtgcaggccaaggacctgggccccaacgccgtgcccgcccactgcaaggtgctggtgagagtgctggacgccaacgacaacgcccccgagatcagcttcagcaccgtgaaggaggccgtgagcgagggcgccgcccccggcaccgtggtggccctgttcagcgtgaccgacagagacagcgaggagaacggccaggtgcagtgcgagctgctgggcgacgtgcccttcagactgaagagcagcttcaagaactactacaccatcgtgaccgaggcccccctggacagagaggccggcgacagctacaccctgaccgtggtggccagagacagaggcgagcccgccctgagcaccagcaagagcatccaggtgcaggtgagcgacgtgaacgacaacgcccccagattcagccagcccgtgtacgacgtgtacgtgaccgagaacaacgtgcccggcgcctacatctacgccgtgagcgccaccgacagagacgagggcgccaacgcccagctggcctacagcatcctggagtgccagatccagggcatgagcgtgttcacctacgtgagcatcaacagcgagaacggctacctgtacgccctgagaagcttcgactacgagcagctgaaggacttcagcttccaggtggaggccagagacgccggcagcccccaggccctggccggcaacgccaccgtgaacatcctgatcgtggaccagaacgacaacgcccccgccatcgtggcccccctgcccggcagaaacggcacccccgccagagaggtgctgcccagaagcgccgagcccggctacctgctgaccagagtggccgccgtggacgccgacgacggcgagaacgccagactgacctacagcatcgtgagaggcaacgagatgaacctgttcagaatggactggagaaccggcgagctgagaaccgccagaagagtgcccgccaagagagacccccagagaccctacgagctggtgatcgaggtgagagaccacggccagccccccctgagcagcaccgccaccctggtggtgcagctggtggacggcgccgtggagccccagggcggcggcggcagcggcggcggcggcagcggcgagcaccagagacccagcagaagcggcggcggcgagaccagcctggacctgaccctgatcctgatcatcgccctgggcagcgtgagcttcatcttcctgctggccatgatcgtgctggccgtgagatgccagaaggagaagaagctgaacatctacacctgcctggccagcgactgctgcctgtgctgctgctgctgcggcggcggcggcagcacctgctgcggcagacaggccagagccagaaagaagaagctgagcaagagcgacatcatgctggtgcagagcagcaacgtgcccagcaaccccgcccaggtgcccatcgaggagagcggcggcttcggcagccaccaccacaaccagaactactgctaccaggtgtgcctgacccccgagagcgccaagaccgacctgatgttcctgaagccctgcagccccagcagaagcaccgacaccgagcacaacccctgcggcgccatcgtgaccggctacaccgaccagcagcccgacatcatcagcaacggcagcatcctgagcaacgagaccaagcaccagagagccgagctgagctacctggtggacagacccagaagagtgaacagcagcgccttccaggaggccgacatcgtgagcagcaaggacagcggccacggcgacagcgagcagggcgacagcgaccacgacgccaccaacagagcccagagcgccggcatggacctgttcagcaactgcaccgaggagtgcaaggccctgggccacagcgacagatgctggatgcccagcttcgtgcccagcgacggcagacaggccgccgactacagaagcaacctgcacgtgcccggcatggacagcgtgcccgacaccgaggtgttcgagacccccgaggcccagcccggcgccgagagaagcttcagcaccttcggcaaggagaaggccctgcacagcaccctggagagaaaggagctggacggcctgctgaccaacaccagagccccctacaagcccccctacctgagaaagaagcagagatgctag

SEQ ID NO: 95656 - DNA, 3933 bp, synthetic construct
  misc_feature 1..3933: note = Description of Artificial Sequence: Synthetic coding sequence
  source 1..3933: mol_type = other DNA
atggacctgctgagcggcacctacatcttcgccgtgctgctggcctgcgtggtgttccacagcggcgcccaggagaagaactacaccatcagagaggagatgcccgagaacgtgctgatcggcgacctgctgaaggacctgaacctgagcctgatccccaacaagagcctgaccaccgccatgcagttcaagctggtgtacaagaccggcgacgtgcccctgatcagaatcgaggaggacaccggcgagatcttcaccaccggcgccagaatcgacagagagaagctgtgcgccggcatccccagagacgagcactgcttctacgaggtggaggtggccatcctgcccgacgagatcttcagactggtgaagatcagattcctgatcgaggacatcaacgacaacgcccccctgttccccgccaccgtgatcaacatcagcatccccgagaacagcgccatcaacagcaagtacaccctgcccgccgccgtggaccccgacgtgggcatcaacggcgtgcagaactacgagctgatcaagagccagaacatcttcggcctggacgtgatcgagacccccgagggcgacaagatgccccagctgatcgtgcagaaggagctggacagagaggagaaggacacctacgtgatgaaggtgaaggtggaggacggcggcttcccccagagaagcagcaccgccatcctgcaggtgagcgtgaccgacaccaacgacaaccaccccgtgttcaaggagaccgagatcgaggtgagcatccccgagaacgcccccgtgggcaccagcgtgacccagctgcacgccaccgacgccgacatcggcgagaacgccaagatccacttcagcttcagcaacctggtgagcaacatcgccagaagactgttccacctgaacgccaccaccggcctgatcaccatcaaggagcccctggacagagaggagacccccaaccacaagctgctggtgctggccagcgacggcggcctgatgcccgccagagccatggtgctggtgaacgtgaccgacgtgaacgacaacgtgcccagcatcgacatcagatacatcgtgaaccccgtgaacgacaccgtggtgctgagcgagaacatccccctgaacaccaagatcgccctgatcaccgtgaccgacaaggacgccgaccacaacggcagagtgacctgcttcaccgaccacgagatccccttcagactgagacccgtgttcagcaaccagttcctgctggagaccgccgcctacctggactacgagagcaccaaggagtacgccatcaagctgctggccgccgacgccggcaagccccccctgaaccagagcgccatgctgttcatcaaggtgaaggacgagaacgacaacgcccccgtgttcacccagagcttcgtgaccgtgagcatccccgagaacaacagccccggcatccagctgaccaaggtgagcgccatggacgccgacagcggccccaacgccaagatcaactacctgctgggccccgacgccccccccgagttcagcctggactgcagaaccggcatgctgaccgtggtgaagaagctggacagagagaaggaggacaagtacctgttcaccatcctggccaaggacaacggcgtgccccccctgaccagcaacgtgaccgtgttcgtgagcatcatcgaccagaacgacaacagccccgtgttcacccacaacgagtacaacttctacgtgcccgagaacctgcccagacacggcaccgtgggcctgatcaccgtgaccgaccccgactacggcgacaacagcgccgtgaccctgagcatcctggacgagaacgacgacttcaccatcgacagccagaccggcgtgatcagacccaacatcagcttcgacagagagaagcaggagagctacaccttctacgtgaaggccgaggacggcggcagagtgagcagaagcagcagcgccaaggtgaccatcaacgtggtggacgtgaacgacaacaagcccgtgttcatcgtgccccccagcaactgcagctacgagctggtgctgcccagcaccaaccccggcaccgtggtgttccaggtgatcgccgtggacaacgacaccggcatgaacgccgaggtgagatacagcatcgtgggcggcaacaccagagacctgttcgccatcgaccaggagaccggcaacatcaccctgatggagaagtgcgacgtgaccgacctgggcctgcacagagtgctggtgaaggccaacgacctgggccagcccgacagcctgttcagcgtggtgatcgtgaacctgttcgtgaacgagagcgtgaccaacgccaccctgatcaacgagctggtgagaaagagcaccgaggcccccgtgacccccaacaccgagatcgccgacgtgagcagccccaccagcgactacgtgaagatcctggtggccgccgtggccggcaccatcaccgtggtggtggtgatcttcatcaccgccgtggtgagatgcagacaggccccccacctgaaggccgcccagaagaacaagcagaacagcgagtgggccacccccaaccccgagaacagacagatgatcatgatgaagaagaagaagaagaagaagaagcacagccccaagaacctgctgctgaacttcgtgaccatcgaggagaccaaggccgacgacgtggacagcgacggcaacagagtgaccctggacctgcccatcgacctggaggagcagaccatgggcaagtacaactgggtgaccacccccaccaccttcaagcccgacagccccgacctggccagacactacaagagcgccagcccccagcccgccttccagatccagcccgagacccccctgaacagcaagcaccacatcatccaggagctgcccctggacaacaccttcgtggcctgcgacagcatcagcaagtgcagcagcagcagcagcgacccctacagcgtgagcgactgcggctaccccgtgaccaccttcgaggtgcccgtgagcgtgcacaccagacccagccagagaagagtgaccttccacctgcccgagggcagccaggagagcagcagcgacggcggcctgggcgaccacgacgccggcagcctgaccagcaccagccacggcctgcccctgggctacccccaggaggagtacttcgacagagccacccccagcaacagaaccgagggcgacggcaacagcgaccccgagagcaccttcatccccagaagccccaccgccgccgagatcaccgtgcagcccaccgtggaggaggccagcgacaactgcacccaggagtgcctgatctacggccacagcgacgcctgctggatgcccgccagcctggaccacagcagcagcagccaggcccaggccagcgccctgtgccacagcccccccctgagccaggccagcacccagcaccacagccccagagtgacccagaccatcgccctgtgccacagcccccccgtgacccagaccatcgccctgtgccacagccccccccccatccaggtgagcgccctgcaccacagcccccccctggtgcaggccaccgccctgcaccacagcccccccagcgcccaggccagcgccctgtgctacagcccccccctggcccaggccgccgccatcagccacagcagccccctgccccaggtgatcgccctgcacagaagccaggcccagagcagcgtgagcctgcagcagggctgggtgcagggcgccgacggcctgtgcagcgtggaccagggcgtgcagggcagcgccaccagccagttctacaccatgagcgagagactgcaccccagcgacgacagcatcaaggtgatccccctgaccaccttcacccccagacagcaggccagacccagcagaggcgacagccccatcatggaggagcaccccctgtag

SEQ ID NO: 95657 - DNA, 4044 bp, synthetic construct
  misc_feature 1..4044: note = Description of Artificial Sequence: Synthetic coding sequence
  source 1..4044: mol_type = other DNA
atggacctgctgagcggcacctacatcttcgccgtgctgctggcctgcgtggtgttccacagcggcgcccaggagaagaactacaccatcagagaggagatgcccgagaacgtgctgatcggcgacctgctgaaggacctgaacctgagcctgatccccaacaagagcctgaccaccgccatgcagttcaagctggtgtacaagaccggcgacgtgcccctgatcagaatcgaggaggacaccggcgagatcttcaccaccggcgccagaatcgacagagagaagctgtgcgccggcatccccagagacgagcactgcttctacgaggtggaggtggccatcctgcccgacgagatcttcagactggtgaagatcagattcctgatcgaggacatcaacgacaacgcccccctgttccccgccaccgtgatcaacatcagcatccccgagaacagcgccatcaacagcaagtacaccctgcccgccgccgtggaccccgacgtgggcatcaacggcgtgcagaactacgagctgatcaagagccagaacatcttcggcctggacgtgatcgagacccccgagggcgacaagatgccccagctgatcgtgcagaaggagctggacagagaggagaaggacacctacgtgatgaaggtgaaggtggaggacggcggcttcccccagagaagcagcaccgccatcctgcaggtgagcgtgaccgacaccaacgacaaccaccccgtgttcaaggagaccgagatcgaggtgagcatccccgagaacgcccccgtgggcaccagcgtgacccagctgcacgccaccgacgccgacatcggcgagaacgccaagatccacttcagcttcagcaacctggtgagcaacatcgccagaagactgttccacctgaacgccaccaccggcctgatcaccatcaaggagcccctggacagagaggagacccccaaccacaagctgctggtgctggccagcgacggcggcctgatgcccgccagagccatggtgctggtgaacgtgaccgacgtgaacgacaacgtgcccagcatcgacatcagatacatcgtgaaccccgtgaacgacaccgtggtgctgagcgagaacatccccctgaacaccaagatcgccctgatcaccgtgaccgacaaggacgccgaccacaacggcagagtgacctgcttcaccgaccacgagatccccttcagactgagacccgtgttcagcaaccagttcctgctggagaccgccgcctacctggactacgagagcaccaaggagtacgccatcaagctgctggccgccgacgccggcaagccccccctgaaccagagcgccatgctgttcatcaaggtgaaggacgagaacgacaacgcccccgtgttcacccagagcttcgtgaccgtgagcatccccgagaacaacagccccggcatccagctgaccaaggtgagcgccatggacgccgacagcggccccaacgccaagatcaactacctgctgggccccgacgccccccccgagttcagcctggactgcagaaccggcatgctgaccgtggtgaagaagctggacagagagaaggaggacaagtacctgttcaccatcctggccaaggacaacggcgtgccccccctgaccagcaacgtgaccgtgttcgtgagcatcatcgaccagaacgacaacagccccgtgttcacccacaacgagtacaacttctacgtgcccgagaacctgcccagacacggcaccgtgggcctgatcaccgtgaccgaccccgactacggcgacaacagcgccgtgaccctgagcatcctggacgagaacgacgacttcaccatcgacagccagaccggcgtgatcagacccaacatcagcttcgacagagagaagcaggagagctacaccttctacgtgaaggccgaggacggcggcagagtgagcagaagcagcagcgccaaggtgaccatcaacgtggtggacgtgaacgacaacaagcccgtgttcatcgtgccccccagcaactgcagctacgagctggtgctgcccagcaccaaccccggcaccgtggtgttccaggtgatcgccgtggacaacgacaccggcatgaacgccgaggtgagatacagcatcgtgggcggcaacaccagagacctgttcgccatcgaccaggagaccggcaacatcaccctgatggagaagtgcgacgtgaccgacctgggcctgcacagagtgctggtgaaggccaacgacctgggccagcccgacagcctgttcagcgtggtgatcgtgaacctgttcgtgaacgagagcgtgaccaacgccaccctgatcaacgagctggtgagaaagagcaccgaggcccccgtgacccccaacaccgagatcgccgacgtgagcagccccaccagcgactacgtgaagatcctggtggccgccgtggccggcaccatcaccgtggtggtggtgatcttcatcaccgccgtggtgagatgcagacaggccccccacctgaaggccgcccagaagaacaagcagaacagcgagtgggccacccccaaccccgagaacagacagatgatcatgatgaagaagaagaagaagaagaagaagcacagccccaagaacctgctgctgaacttcgtgaccatcgaggagaccaaggccgacgacgtggacagcgacggcaacagagtgaccctggacctgcccatcgacctggaggagcagaccatgggcaagtacaactgggtgaccacccccaccaccttcaagcccgacagccccgacctggccagacactacaagagcgccagcccccagcccgccttccagatccagcccgagacccccctgaacagcaagcaccacatcatccaggagctgcccctggacaacaccttcgtggcctgcgacagcatcagcaagtgcagcagcagcagcagcgacccctacagcgtgagcgactgcggctaccccgtgaccaccttcgaggtgcccgtgagcgtgcacaccagaccccccatgaaggaggtggtgagaagctgcacccccatgaaggagagcaccaccatggagatctggatccacccccagccccagagaaagagcgagggcaaggtggccggcaagagccagagaagagtgaccttccacctgcccgagggcagccaggagagcagcagcgacggcggcctgggcgaccacgacgccggcagcctgaccagcaccagccacggcctgcccctgggctacccccaggaggagtacttcgacagagccacccccagcaacagaaccgagggcgacggcaacagcgaccccgagagcaccttcatccccagaagccccaccgccgccgagatcaccgtgcagcccaccgtggaggaggccagcgacaactgcacccaggagtgcctgatctacggccacagcgacgcctgctggatgcccgccagcctggaccacagcagcagcagccaggcccaggccagcgccctgtgccacagcccccccctgagccaggccagcacccagcaccacagccccagagtgacccagaccatcgccctgtgccacagcccccccgtgacccagaccatcgccctgtgccacagccccccccccatccaggtgagcgccctgcaccacagcccccccctggtgcaggccaccgccctgcaccacagcccccccagcgcccaggccagcgccctgtgctacagcccccccctggcccaggccgccgccatcagccacagcagccccctgccccaggtgatcgccctgcacagaagccaggcccagagcagcgtgagcctgcagcagggctgggtgcagggcgccgacggcctgtgcagcgtggaccagggcgtgcagggcagcgccaccagccagttctacaccatgagcgagagactgcaccccagcgacgacagcatcaaggtgatccccctgaccaccttcacccccagacagcaggccagacccagcagaggcgacagccccatcatggaggagcaccccctgtag

SEQ ID NO: 95658 - DNA, 3990 bp, synthetic construct
  misc_feature 1..3990: note = Description of Artificial Sequence: Synthetic coding sequence
  source 1..3990: mol_type = other DNA
atggacctgctgagcggcacctacatcttcgccgtgctgctggcctgcgtggtgttccacagcggcgcccaggagaagaactacaccatcagagaggagatgcccgagaacgtgctgatcggcgacctgctgaaggacctgaacctgagcctgatccccaacaagagcctgaccaccgccatgcagttcaagctggtgtacaagaccggcgacgtgcccctgatcagaatcgaggaggacaccggcgagatcttcaccaccggcgccagaatcgacagagagaagctgtgcgccggcatccccagagacgagcactgcttctacgaggtggaggtggccatcctgcccgacgagatcttcagactggtgaagatcagattcctgatcgaggacatcaacgacaacgcccccctgttccccgccaccgtgatcaacatcagcatccccgagaacagcgccatcaacagcaagtacaccctgcccgccgccgtggaccccgacgtgggcatcaacggcgtgcagaactacgagctgatcaagagccagaacatcttcggcctggacgtgatcgagacccccgagggcgacaagatgccccagctgatcgtgcagaaggagctggacagagaggagaaggacacctacgtgatgaaggtgaaggtggaggacggcggcttcccccagagaagcagcaccgccatcctgcaggtgagcgtgaccgacaccaacgacaaccaccccgtgttcaaggagaccgagatcgaggtgagcatccccgagaacgcccccgtgggcaccagcgtgacccagctgcacgccaccgacgccgacatcggcgagaacgccaagatccacttcagcttcagcaacctggtgagcaacatcgccagaagactgttccacctgaacgccaccaccggcctgatcaccatcaaggagcccctggacagagaggagacccccaaccacaagctgctggtgctggccagcgacggcggcctgatgcccgccagagccatggtgctggtgaacgtgaccgacgtgaacgacaacgtgcccagcatcgacatcagatacatcgtgaaccccgtgaacgacaccgtggtgctgagcgagaacatccccctgaacaccaagatcgccctgatcaccgtgaccgacaaggacgccgaccacaacggcagagtgacctgcttcaccgaccacgagatccccttcagactgagacccgtgttcagcaaccagttcctgctggagaccgccgcctacctggactacgagagcaccaaggagtacgccatcaagctgctggccgccgacgccggcaagccccccctgaaccagagcgccatgctgttcatcaaggtgaaggacgagaacgacaacgcccccgtgttcacccagagcttcgtgaccgtgagcatccccgagaacaacagccccggcatccagctgaccaaggtgagcgccatggacgccgacagcggccccaacgccaagatcaactacctgctgggccccgacgccccccccgagttcagcctggactgcagaaccggcatgctgaccgtggtgaagaagctggacagagagaaggaggacaagtacctgttcaccatcctggccaaggacaacggcgtgccccccctgaccagcaacgtgaccgtgttcgtgagcatcatcgaccagaacgacaacagccccgtgttcacccacaacgagtacaacttctacgtgcccgagaacctgcccagacacggcaccgtgggcctgatcaccgtgaccgaccccgactacggcgacaacagcgccgtgaccctgagcatcctggacgagaacgacgacttcaccatcgacagccagaccggcgtgatcagacccaacatcagcttcgacagagagaagcaggagagctacaccttctacgtgaaggccgaggacggcggcagagtgagcagaagcagcagcgccaaggtgaccatcaacgtggtggacgtgaacgacaacaagcccgtgttcatcgtgccccccagcaactgcagctacgagctggtgctgcccagcaccaaccccggcaccgtggtgttccaggtgatcgccgtggacaacgacaccggcatgaacgccgaggtgagatacagcatcgtgggcggcaacaccagagacctgttcgccatcgaccaggagaccggcaacatcaccctgatggagaagtgcgacgtgaccgacctgggcctgcacagagtgctggtgaaggccaacgacctgggccagcccgacagcctgttcagcgtggtgatcgtgaacctgttcgtgaacgagagcgtgaccaacgccaccctgatcaacgagctggtgagaaagagcaccgaggcccccgtgacccccaacaccgagatcgccgacgtgagcagccccaccagcgactacgtgaagatcctggtggccgccgtggccggcaccatcaccgtggtggtggtgatcttcatcaccgccgtggtgagatgcagacaggccccccacctgaaggccgcccagaagaacaagcagaacagcgagtgggccacccccaaccccgagaacagacagatgatcatgatgaagaagaagaagaagaagaagaagcacagccccaagaacctgctgctgaacttcgtgaccatcgaggagaccaaggccgacgacgtggacagcgacggcaacagagtgaccctggacctgcccatcgacctggaggagcagaccatgggcaagtacaactgggtgaccacccccaccaccttcaagcccgacagccccgacctggccagacactacaagagcgccagcccccagcccgccttccagatccagcccgagacccccctgaacagcaagcaccacatcatccaggagctgcccctggacaacaccttcgtggcctgcgacagcatcagcaagtgcagcagcagcagcagcgacccctacagcgtgagcgactgcggctaccccgtgaccaccttcgaggtgcccgtgagcgtgcacaccagaccccccatgaaggaggtggtgagaagctgcacccccatgaaggagagcaccaccatggagatctggatccacccccagccccagagccagagaagagtgaccttccacctgcccgagggcagccaggagagcagcagcgacggcggcctgggcgaccacgacgccggcagcctgaccagcaccagccacggcctgcccctgggctacccccaggaggagtacttcgacagagccacccccagcaacagaaccgagggcgacggcaacagcgaccccgagagcaccgccgagatcaccgtgcagcccaccgtggaggaggccagcgacaactgcacccaggagtgcctgatctacggccacagcgacgcctgctggatgcccgccagcctggaccacagcagcagcagccaggcccaggccagcgccctgtgccacagcccccccctgagccaggccagcacccagcaccacagccccagagtgacccagaccatcgccctgtgccacagcccccccgtgacccagaccatcgccctgtgccacagccccccccccatccaggtgagcgccctgcaccacagcccccccctggtgcaggccaccgccctgcaccacagcccccccagcgcccaggccagcgccctgtgctacagcccccccctggcccaggccgccgccatcagccacagcagccccctgccccaggtgatcgccctgcacagaagccaggcccagagcagcgtgagcctgcagcagggctgggtgcagggcgccgacggcctgtgcagcgtggaccagggcgtgcagggcagcgccaccagccagttctacaccatgagcgagagactgcaccccagcgacgacagcatcaaggtgatccccctgaccaccttcacccccagacagcaggccagacccagcagaggcgacagccccatcatggaggagcaccccctgtag

SEQ ID NO: 95659 - DNA, 3066 bp, synthetic construct
  misc_feature 1..3066: note = Description of Artificial Sequence: Synthetic coding sequence
  source 1..3066: mol_type = other DNA
atggacctgctgagcggcacctacatcttcgccgtgctgctggcctgcgtggtgttccacagcggcgcccaggagaagaactacaccatcagagaggagatgcccgagaacgtgctgatcggcgacctgctgaaggacctgaacctgagcctgatccccaacaagagcctgaccaccgccatgcagttcaagctggtgtacaagaccggcgacgtgcccctgatcagaatcgaggaggacaccggcgagatcttcaccaccggcgccagaatcgacagagagaagctgtgcgccggcatccccagagacgagcactgcttctacgaggtggaggtggccatcctgcccgacgagatcttcagactggtgaagatcagattcctgatcgaggacatcaacgacaacgcccccctgttccccgccaccgtgatcaacatcagcatccccgagaacagcgccatcaacagcaagtacaccctgcccgccgccgtggaccccgacgtgggcatcaacggcgtgcagaactacgagctgatcaagagccagaacatcttcggcctggacgtgatcgagacccccgagggcgacaagatgccccagctgatcgtgcagaaggagctggacagagaggagaaggacacctacgtgatgaaggtgaaggtggaggacggcggcttcccccagagaagcagcaccgccatcctgcaggtgagcgtgaccgacaccaacgacaaccaccccgtgttcaaggagaccgagatcgaggtgagcatccccgagaacgcccccgtgggcaccagcgtgacccagctgcacgccaccgacgccgacatcggcgagaacgccaagatccacttcagcttcagcaacctggtgagcaacatcgccagaagactgttccacctgaacgccaccaccggcctgatcaccatcaaggagcccctggacagagaggagacccccaaccacaagctgctggtgctggccagcgacggcggcctgatgcccgccagagccatggtgctggtgaacgtgaccgacgtgaacgacaacgtgcccagcatcgacatcagatacatcgtgaaccccgtgaacgacaccgtggtgctgagcgagaacatccccctgaacaccaagatcgccctgatcaccgtgaccgacaaggacgccgaccacaacggcagagtgacctgcttcaccgaccacgagatccccttcagactgagacccgtgttcagcaaccagttcctgctggagaccgccgcctacctggactacgagagcaccaaggagtacgccatcaagctgctggccgccgacgccggcaagccccccctgaaccagagcgccatgctgttcatcaaggtgaaggacgagaacgacaacgcccccgtgttcacccagagcttcgtgaccgtgagcatccccgagaacaacagccccggcatccagctgaccaaggtgagcgccatggacgccgacagcggccccaacgccaagatcaactacctgctgggccccgacgccccccccgagttcagcctggactgcagaaccggcatgctgaccgtggtgaagaagctggacagagagaaggaggacaagtacctgttcaccatcctggccaaggacaacggcgtgccccccctgaccagcaacgtgaccgtgttcgtgagcatcatcgaccagaacgacaacagccccgtgttcacccacaacgagtacaacttctacgtgcccgagaacctgcccagacacggcaccgtgggcctgatcaccgtgaccgaccccgactacggcgacaacagcgccgtgaccctgagcatcctggacgagaacgacgacttcaccatcgacagccagaccggcgtgatcagacccaacatcagcttcgacagagagaagcaggagagctacaccttctacgtgaaggccgaggacggcggcagagtgagcagaagcagcagcgccaaggtgaccatcaacgtggtggacgtgaacgacaacaagcccgtgttcatcgtgccccccagcaactgcagctacgagctggtgctgcccagcaccaaccccggcaccgtggtgttccaggtgatcgccgtggacaacgacaccggcatgaacgccgaggtgagatacagcatcgtgggcggcaacaccagagacctgttcgccatcgaccaggagaccggcaacatcaccctgatggagaagtgcgacgtgaccgacctgggcctgcacagagtgctggtgaaggccaacgacctgggccagcccgacagcctgttcagcgtggtgatcgtgaacctgttcgtgaacgagagcgtgaccaacgccaccctgatcaacgagctggtgagaaagagcaccgaggcccccgtgacccccaacaccgagatcgccgacgtgagcagccccaccagcgactacgtgaagatcctggtggccgccgtggccggcaccatcaccgtggtggtggtgatcttcatcaccgccgtggtgagatgcagacaggccccccacctgaaggccgcccagaagaacaagcagaacagcgagtgggccacccccaaccccgagaacagacagatgatcatgatgaagaagaagaagaagaagaagaagcacagccccaagaacctgctgctgaacttcgtgaccatcgaggagaccaaggccgacgacgtggacagcgacggcaacagagtgaccctggacctgcccatcgacctggaggagcagaccatgggcaagtacaactgggtgaccacccccaccaccttcaagcccgacagccccgacctggccagacactacaagagcgccagcccccagcccgccttccagatccagcccgagacccccctgaacagcaagcaccacatcatccaggagctgcccctggacaacaccttcgtggcctgcgacagcatcagcaagtgcagcagcagcagcagcgacccctacagcgtgagcgactgcggctaccccgtgaccaccttcgaggtgcccgtgagcgtgcacaccagacccgtgggcatccaggtgagcaacaccaccttctag

SEQ ID NO: 95660 - DNA, 3933 bp, synthetic construct
  misc_feature 1..3933: note = Description of Artificial Sequence: Synthetic coding sequence
  source 1..3933: mol_type = other DNA
atggacctgctgagcggcacctacatcttcgccgtgctgctggcctgcgtggtgttccacagcggcgcccaggagaagaactacaccatcagagaggagatgcccgagaacgtgctgatcggcgacctgctgaaggacctgaacctgagcctgatccccaacaagagcctgaccaccgccatgcagttcaagctggtgtacaagaccggcgacgtgcccctgatcagaatcgaggaggacaccggcgagatcttcaccaccggcgccagaatcgacagagagaagctgtgcgccggcatccccagagacgagcactgcttctacgaggtggaggtggccatcctgcccgacgagatcttcagactggtgaagatcagattcctgatcgaggacatcaacgacaacgcccccctgttccccgccaccgtgatcaacatcagcatccccgagaacagcgccatcaacagcaagtacaccctgcccgccgccgtggaccccgacgtgggcatcaacggcgtgcagaactacgagctgatcaagagccagaacatcttcggcctggacgtgatcgagacccccgagggcgacaagatgccccagctgatcgtgcagaaggagctggacagagaggagaaggacacctacgtgatgaaggtgaaggtggaggacggcggcttcccccagagaagcagcaccgccatcctgcaggtgagcgtgaccgacaccaacgacaaccaccccgtgttcaaggagaccgagatcgaggtgagcatccccgagaacgcccccgtgggcaccagcgtgacccagctgcacgccaccgacgccgacatcggcgagaacgccaagatccacttcagcttcagcaacctggtgagcaacatcgccagaagactgttccacctgaacgccaccaccggcctgatcaccatcaaggagcccctggacagagaggagacccccaaccacaagctgctggtgctggccagcgacggcggcctgatgcccgccagagccatggtgctggtgaacgtgaccgacgtgaacgacaacgtgcccagcatcgacatcagatacatcgtgaaccccgtgaacgacaccgtggtgctgagcgagaacatccccctgaacaccaagatcgccctgatcaccgtgaccgacaaggacgccgaccacaacggcagagtgacctgcttcaccgaccacgagatccccttcagactgagacccgtgttcagcaaccagttcctgctggagaccgccgcctacctggactacgagagcaccaaggagtacgccatcaagctgctggccgccgacgccggcaagccccccctgaaccagagcgccatgctgttcatcaaggtgaaggacgagaacgacaacgcccccgtgttcacccagagcttcgtgaccgtgagcatccccgagaacaacagccccggcatccagctgaccaaggtgagcgccatggacgccgacagcggccccaacgccaagatcaactacctgctgggccccgacgccccccccgagttcagcctggactgcagaaccggcatgctgaccgtggtgaagaagctggacagagagaaggaggacaagtacctgttcaccatcctggccaaggacaacggcgtgccccccctgaccagcaacgtgaccgtgttcgtgagcatcatcgaccagaacgacaacagccccgtgttcacccacaacgagtacaacttctacgtgcccgagaacctgcccagacacggcaccgtgggcctgatcaccgtgaccgaccccgactacggcgacaacagcgccgtgaccctgagcatcctggacgagaacgacgacttcaccatcgacagccagaccggcgtgatcagacccaacatcagcttcgacagagagaagcaggagagctacaccttctacgtgaaggccgaggacggcggcagagtgagcagaagcagcagcgccaaggtgaccatcaacgtggtggacgtgaacgacaacaagcccgtgttcatcgtgccccccagcaactgcagctacgagctggtgctgcccagcaccaaccccggcaccgtggtgttccaggtgatcgccgtggacaacgacaccggcatgaacgccgaggtgagatacagcatcgtgggcggcaacaccagagacctgttcgccatcgaccaggagaccggcaacatcaccctgatggagaagtgcgacgtgaccgacctgggcctgcacagagtgctggtgaaggccaacgacctgggccagcccgacagcctgttcagcgtggtgatcgtgaacctgttcgtgaacgagagcgtgaccaacgccaccctgatcaacgagctggtgagaaagagcaccgaggcccccgtgacccccaacaccgagatcgccgacgtgagcagccccaccagcgactacgtgaagatcctggtggccgccgtggccggcaccatcaccgtggtggtggtgatcttcatcaccgccgtggtgagatgcagacaggccccccacctgaaggccgcccagaagaacaagcagaacagcgagtgggccacccccaaccccgagaacagacagatgatcatgatgaagaagaagaagaagaagaagaagcacagccccaagaacctgctgctgaacttcgtgaccatcgaggagaccaaggccgacgacgtggacagcgacggcaacagagtgaccctggacctgcccatcgacctggaggagcagaccatgggcaagtacaactgggtgaccacccccaccaccttcaagcccgacagccccgacctggccagacactacaagagcgccagcccccagcccgccttccagatccagcccgagacccccctgaacagcaagcaccacatcatccaggagctgcccctggacaacaccttcgtggcctgcgacagcatcagcaagtgcagcagcagcagcagcgacccctacagcgtgagcgactgcggctaccccgtgaccaccttcgaggtgcccgtgagcgtgcacaccagacccagccagagaagagtgaccttccacctgcccgagggcagccaggagagcagcagcgacggcggcctgggcgaccacgacgccggcagcctgaccagcaccagccacggcctgcccctgggctacccccaggaggagtacttcgacagagccacccccagcaacagaaccgagggcgacggcaacagcgaccccgagagcaccttcatccccggcctgaagaaggccgccgagatcaccgtgcagcccaccgtggaggaggccagcgacaactgcacccaggagtgcctgatctacggccacagcgacgcctgctggatgcccgccagcctggaccacagcagcagcagccaggcccaggccagcgccctgtgccacagcccccccctgagccaggccagcacccagcaccacagccccagagtgacccagaccatcgccctgtgccacagcccccccgtgacccagaccatcgccctgtgccacagccccccccccatccaggtgagcgccctgcaccacagcccccccctggtgcaggccaccgccctgcaccacagcccccccagcgcccaggccagcgccctgtgctacagcccccccctggcccaggccgccgccatcagccacagcagccccctgccccaggtgatcgccctgcacagaagccaggcccagagcagcgtgagcctgcagcagggctgggtgcagggcgccgacggcctgtgcagcgtggaccagggcgtgcagggcagcgccaccagccagttctacaccatgagcgagagactgcaccccagcgacgacagcatcaaggtgatccccctgaccaccttcacccccagacagcaggccagacccagcagaggcgacagccccatcatggaggagcaccccctgtag

SEQ ID NO: 95661 - DNA, 4044 bp, synthetic construct
  misc_feature 1..4044: note = Description of Artificial Sequence: Synthetic coding sequence
  source 1..4044: mol_type = other DNA
atggacctgctgagcggcacctacatcttcgccgtgctgctggcctgcgtggtgttccacagcggcgcccaggagaagaactacaccatcagagaggagatgcccgagaacgtgctgatcggcgacctgctgaaggacctgaacctgagcctgatccccaacaagagcctgaccaccgccatgcagttcaagctggtgtacaagaccggcgacgtgcccctgatcagaatcgaggaggacaccggcgagatcttcaccaccggcgccagaatcgacagagagaagctgtgcgccggcatccccagagacgagcactgcttctacgaggtggaggtggccatcctgcccgacgagatcttcagactggtgaagatcagattcctgatcgaggacatcaacgacaacgcccccctgttccccgccaccgtgatcaacatcagcatccccgagaacagcgccatcaacagcaagtacaccctgcccgccgccgtggaccccgacgtgggcatcaacggcgtgcagaactacgagctgatcaagagccagaacatcttcggcctggacgtgatcgagacccccgagggcgacaagatgccccagctgatcgtgcagaaggagctggacagagaggagaaggacacctacgtgatgaaggtgaaggtggaggacggcggcttcccccagagaagcagcaccgccatcctgcaggtgagcgtgaccgacaccaacgacaaccaccccgtgttcaaggagaccgagatcgaggtgagcatccccgagaacgcccccgtgggcaccagcgtgacccagctgcacgccaccgacgccgacatcggcgagaacgccaagatccacttcagcttcagcaacctggtgagcaacatcgccagaagactgttccacctgaacgccaccaccggcctgatcaccatcaaggagcccctggacagagaggagacccccaaccacaagctgctggtgctggccagcgacggcggcctgatgcccgccagagccatggtgctggtgaacgtgaccgacgtgaacgacaacgtgcccagcatcgacatcagatacatcgtgaaccccgtgaacgacaccgtggtgctgagcgagaacatccccctgaacaccaagatcgccctgatcaccgtgaccgacaaggacgccgaccacaacggcagagtgacctgcttcaccgaccacgagatccccttcagactgagacccgtgttcagcaaccagttcctgctggagaccgccgcctacctggactacgagagcaccaaggagtacgccatcaagctgctggccgccgacgccggcaagccccccctgaaccagagcgccatgctgttcatcaaggtgaaggacgagaacgacaacgcccccgtgttcacccagagcttcgtgaccgtgagcatccccgagaacaacagccccggcatccagctgaccaaggtgagcgccatggacgccgacagcggccccaacgccaagatcaactacctgctgggccccgacgccccccccgagttcagcctggactgcagaaccggcatgctgaccgtggtgaagaagctggacagagagaaggaggacaagtacctgttcaccatcctggccaaggacaacggcgtgccccccctgaccagcaacgtgaccgtgttcgtgagcatcatcgaccagaacgacaacagccccgtgttcacccacaacgagtacaacttctacgtgcccgagaacctgcccagacacggcaccgtgggcctgatcaccgtgaccgaccccgactacggcgacaacagcgccgtgaccctgagcatcctggacgagaacgacgacttcaccatcgacagccagaccggcgtgatcagacccaacatcagcttcgacagagagaagcaggagagctacaccttctacgtgaaggccgaggacggcggcagagtgagcagaagcagcagcgccaaggtgaccatcaacgtggtggacgtgaacgacaacaagcccgtgttcatcgtgccccccagcaactgcagctacgagctggtgctgcccagcaccaaccccggcaccgtggtgttccaggtgatcgccgtggacaacgacaccggcatgaacgccgaggtgagatacagcatcgtgggcggcaacaccagagacctgttcgccatcgaccaggagaccggcaacatcaccctgatggagaagtgcgacgtgaccgacctgggcctgcacagagtgctggtgaaggccaacgacctgggccagcccgacagcctgttcagcgtggtgatcgtgaacctgttcgtgaacgagagcgtgaccaacgccaccctgatcaacgagctggtgagaaagagcaccgaggcccccgtgacccccaacaccgagatcgccgacgtgagcagccccaccagcgactacgtgaagatcctggtggccgccgtggccggcaccatcaccgtggtggtggtgatcttcatcaccgccgtggtgagatgcagacaggccccccacctgaaggccgcccagaagaacaagcagaacagcgagtgggccacccccaaccccgagaacagacagatgatcatgatgaagaagaagaagaagaagaagaagcacagccccaagaacctgctgctgaacttcgtgaccatcgaggagaccaaggccgacgacgtggacagcgacggcaacagagtgaccctggacctgcccatcgacctggaggagcagaccatgggcaagtacaactgggtgaccacccccaccaccttcaagcccgacagccccgacctggccagacactacaagagcgccagcccccagcccgccttccagatccagcccgagacccccctgaacagcaagcaccacatcatccaggagctgcccctggacaacaccttcgtggcctgcgacagcatcagcaagtgcagcagcagcagcagcgacccctacagcgtgagcgactgcggctaccccgtgaccaccttcgaggtgcccgtgagcgtgcacaccagaccccccatgaaggaggtggtgagaagctgcacccccatgaaggagagcaccaccatggagatctggatccacccccagccccagagaaagagcgagggcaaggtggccggcaagagccagagaagagtgaccttccacctgcccgagggcagccaggagagcagcagcgacggcggcctgggcgaccacgacgccggcagcctgaccagcaccagccacggcctgcccctgggctacccccaggaggagtacttcgacagagccacccccagcaacagaaccgagggcgacggcaacagcgaccccgagagcaccttcatccccggcctgaagaaggccgccgagatcaccgtgcagcccaccgtggaggaggccagcgacaactgcacccaggagtgcctgatctacggccacagcgacgcctgctggatgcccgccagcctggaccacagcagcagcagccaggcccaggccagcgccctgtgccacagcccccccctgagccaggccagcacccagcaccacagccccagagtgacccagaccatcgccctgtgccacagcccccccgtgacccagaccatcgccctgtgccacagccccccccccatccaggtgagcgccctgcaccacagcccccccctggtgcaggccaccgccctgcaccacagcccccccagcgcccaggccagcgccctgtgctacagcccccccctggcccaggccgccgccatcagccacagcagccccctgccccaggtgatcgccctgcacagaagccaggcccagagcagcgtgagcctgcagcagggctgggtgcagggcgccgacggcctgtgcagcgtggaccagggcgtgcagggcagcgccaccagccagttctacaccatgagcgagagactgcaccccagcgacgacagcatcaaggtgatccccctgaccaccttcacccccagacagcaggccagacccagcagaggcgacagccccatcatggaggagcaccccctgtag

SEQ ID NO: 95662 - DNA, 4014 bp, synthetic construct
  misc_feature 1..4014: note = Description of Artificial Sequence: Synthetic coding sequence
  source 1..4014: mol_type = other DNA
atggacctgctgagcggcacctacatcttcgccgtgctgctggcctgcgtggtgttccacagcggcgcccaggagaagaactacaccatcagagaggagatgcccgagaacgtgctgatcggcgacctgctgaaggacctgaacctgagcctgatccccaacaagagcctgaccaccgccatgcagttcaagctggtgtacaagaccggcgacgtgcccctgatcagaatcgaggaggacaccggcgagatcttcaccaccggcgccagaatcgacagagagaagctgtgcgccggcatccccagagacgagcactgcttctacgaggtggaggtggccatcctgcccgacgagatcttcagactggtgaagatcagattcctgatcgaggacatcaacgacaacgcccccctgttccccgccaccgtgatcaacatcagcatccccgagaacagcgccatcaacagcaagtacaccctgcccgccgccgtggaccccgacgtgggcatcaacggcgtgcagaactacgagctgatcaagagccagaacatcttcggcctggacgtgatcgagacccccgagggcgacaagatgccccagctgatcgtgcagaaggagctggacagagaggagaaggacacctacgtgatgaaggtgaaggtggaggacggcggcttcccccagagaagcagcaccgccatcctgcaggtgagcgtgaccgacaccaacgacaaccaccccgtgttcaaggagaccgagatcgaggtgagcatccccgagaacgcccccgtgggcaccagcgtgacccagctgcacgccaccgacgccgacatcggcgagaacgccaagatccacttcagcttcagcaacctggtgagcaacatcgccagaagactgttccacctgaacgccaccaccggcctgatcaccatcaaggagcccctggacagagaggagacccccaaccacaagctgctggtgctggccagcgacggcggcctgatgcccgccagagccatggtgctggtgaacgtgaccgacgtgaacgacaacgtgcccagcatcgacatcagatacatcgtgaaccccgtgaacgacaccgtggtgctgagcgagaacatccccctgaacaccaagatcgccctgatcaccgtgaccgacaaggacgccgaccacaacggcagagtgacctgcttcaccgaccacgagatccccttcagactgagacccgtgttcagcaaccagttcctgctggagaccgccgcctacctggactacgagagcaccaaggagtacgccatcaagctgctggccgccgacgccggcaagccccccctgaaccagagcgccatgctgttcatcaaggtgaaggacgagaacgacaacgcccccgtgttcacccagagcttcgtgaccgtgagcatccccgagaacaacagccccggcatccagctgaccaaggtgagcgccatggacgccgacagcggccccaacgccaagatcaactacctgctgggccccgacgccccccccgagttcagcctggactgcagaaccggcatgctgaccgtggtgaagaagctggacagagagaaggaggacaagtacctgttcaccatcctggccaaggacaacggcgtgccccccctgaccagcaacgtgaccgtgttcgtgagcatcatcgaccagaacgacaacagccccgtgttcacccacaacgagtacaacttctacgtgcccgagaacctgcccagacacggcaccgtgggcctgatcaccgtgaccgaccccgactacggcgacaacagcgccgtgaccctgagcatcctggacgagaacgacgacttcaccatcgacagccagaccggcgtgatcagacccaacatcagcttcgacagagagaagcaggagagctacaccttctacgtgaaggccgaggacggcggcagagtgagcagaagcagcagcgccaaggtgaccatcaacgtggtggacgtgaacgacaacaagcccgtgttcatcgtgccccccagcaactgcagctacgagctggtgctgcccagcaccaaccccggcaccgtggtgttccaggtgatcgccgtggacaacgacaccggcatgaacgccgaggtgagatacagcatcgtgggcggcaacaccagagacctgttcgccatcgaccaggagaccggcaacatcaccctgatggagaagtgcgacgtgaccgacctgggcctgcacagagtgctggtgaaggccaacgacctgggccagcccgacagcctgttcagcgtggtgatcgtgaacctgttcgtgaacgagagcgtgaccaacgccaccctgatcaacgagctggtgagaaagagcaccgaggcccccgtgacccccaacaccgagatcgccgacgtgagcagccccaccagcgactacgtgaagatcctggtggccgccgtggccggcaccatcaccgtggtggtggtgatcttcatcaccgccgtggtgagatgcagacaggccccccacctgaaggccgcccagaagaacaagcagaacagcgagtgggccacccccaaccccgagaacagacagatgatcatgatgaagaagaagaagaagaagaagaagcacagccccaagaacctgctgctgaacttcgtgaccatcgaggagaccaaggccgacgacgtggacagcgacggcaacagagtgaccctggacctgcccatcgacctggaggagcagaccatgggcaagtacaactgggtgaccacccccaccaccttcaagcccgacagccccgacctggccagacactacaagagcgccagcccccagcccgccttccagatccagcccgagacccccctgaacagcaagcaccacatcatccaggagctgcccctggacaacaccttcgtggcctgcgacagcatcagcaagtgcagcagcagcagcagcgacccctacagcgtgagcgactgcggctaccccgtgaccaccttcgaggtgcccgtgagcgtgcacaccagaccccccatgaaggaggtggtgagaagctgcacccccatgaaggagagcaccaccatggagatctggatccacccccagccccagagccagagaagagtgaccttccacctgcccgagggcagccaggagagcagcagcgacggcggcctgggcgaccacgacgccggcagcctgaccagcaccagccacggcctgcccctgggctacccccaggaggagtacttcgacagagccacccccagcaacagaaccgagggcgacggcaacagcgaccccgagagcaccttcatccccggcctgaagaaggccgccgagatcaccgtgcagcccaccgtggaggaggccagcgacaactgcacccaggagtgcctgatctacggccacagcgacgcctgctggatgcccgccagcctggaccacagcagcagcagccaggcccaggccagcgccctgtgccacagcccccccctgagccaggccagcacccagcaccacagccccagagtgacccagaccatcgccctgtgccacagcccccccgtgacccagaccatcgccctgtgccacagccccccccccatccaggtgagcgccctgcaccacagcccccccctggtgcaggccaccgccctgcaccacagcccccccagcgcccaggccagcgccctgtgctacagcccccccctggcccaggccgccgccatcagccacagcagccccctgccccaggtgatcgccctgcacagaagccaggcccagagcagcgtgagcctgcagcagggctgggtgcagggcgccgacggcctgtgcagcgtggaccagggcgtgcagggcagcgccaccagccagttctacaccatgagcgagagactgcaccccagcgacgacagcatcaaggtgatccccctgaccaccttcacccccagacagcaggccagacccagcagaggcgacagccccatcatggaggagcaccccctgtag

SEQ ID NO: 95663 - DNA, 3078 bp, synthetic construct
  misc_feature 1..3078: note = Description of Artificial Sequence: Synthetic coding sequence
  source 1..3078: mol_type = other DNA
atggacctgctgagcggcacctacatcttcgccgtgctgctggcctgcgtggtgttccacagcggcgcccaggagaagaactacaccatcagagaggagatgcccgagaacgtgctgatcggcgacctgctgaaggacctgaacctgagcctgatccccaacaagagcctgaccaccgccatgcagttcaagctggtgtacaagaccggcgacgtgcccctgatcagaatcgaggaggacaccggcgagatcttcaccaccggcgccagaatcgacagagagaagctgtgcgccggcatccccagagacgagcactgcttctacgaggtggaggtggccatcctgcccgacgagatcttcagactggtgaagatcagattcctgatcgaggacatcaacgacaacgcccccctgttccccgccaccgtgatcaacatcagcatccccgagaacagcgccatcaacagcaagtacaccctgcccgccgccgtggaccccgacgtgggcatcaacggcgtgcagaactacgagctgatcaagagccagaacatcttcggcctggacgtgatcgagacccccgagggcgacaagatgccccagctgatcgtgcagaaggagctggacagagaggagaaggacacctacgtgatgaaggtgaaggtggaggacggcggcttcccccagagaagcagcaccgccatcctgcaggtgagcgtgaccgacaccaacgacaaccaccccgtgttcaaggagaccgagatcgaggtgagcatccccgagaacgcccccgtgggcaccagcgtgacccagctgcacgccaccgacgccgacatcggcgagaacgccaagatccacttcagcttcagcaacctggtgagcaacatcgccagaagactgttccacctgaacgccaccaccggcctgatcaccatcaaggagcccctggacagagaggagacccccaaccacaagctgctggtgctggccagcgacggcggcctgatgcccgccagagccatggtgctggtgaacgtgaccgacgtgaacgacaacgtgcccagcatcgacatcagatacatcgtgaaccccgtgaacgacaccgtggtgctgagcgagaacatccccctgaacaccaagatcgccctgatcaccgtgaccgacaaggacgccgaccacaacggcagagtgacctgcttcaccgaccacgagatccccttcagactgagacccgtgttcagcaaccagttcctgctggagaccgccgcctacctggactacgagagcaccaaggagtacgccatcaagctgctggccgccgacgccggcaagccccccctgaaccagagcgccatgctgttcatcaaggtgaaggacgagaacgacaacgcccccgtgttcacccagagcttcgtgaccgtgagcatccccgagaacaacagccccggcatccagctgaccaaggtgagcgccatggacgccgacagcggccccaacgccaagatcaactacctgctgggccccgacgccccccccgagttcagcctggactgcagaaccggcatgctgaccgtggtgaagaagctggacagagagaaggaggacaagtacctgttcaccatcctggccaaggacaacggcgtgccccccctgaccagcaacgtgaccgtgttcgtgagcatcatcgaccagaacgacaacagccccgtgttcacccacaacgagtacaacttctacgtgcccgagaacctgcccagacacggcaccgtgggcctgatcaccgtgaccgaccccgactacggcgacaacagcgccgtgaccctgagcatcctggacgagaacgacgacttcaccatcgacagccagaccggcgtgatcagacccaacatcagcttcgacagagagaagcaggagagctacaccttctacgtgaaggccgaggacggcggcagagtgagcagaagcagcagcgccaaggtgaccatcaacgtggtggacgtgaacgacaacaagcccgtgttcatcgtgccccccagcaactgcagctacgagctggtgctgcccagcaccaaccccggcaccgtggtgttccaggtgatcgccgtggacaacgacaccggcatgaacgccgaggtgagatacagcatcgtgggcggcaacaccagagacctgttcgccatcgaccaggagaccggcaacatcaccctgatggagaagtgcgacgtgaccgacctgggcctgcacagagtgctggtgaaggccaacgacctgggccagcccgacagcctgttcagcgtggtgatcgtgaacctgttcgtgaacgagagcgtgaccaacgccaccctgatcaacgagctggtgagaaagagcaccgaggcccccgtgacccccaacaccgagatcgccgacgtgagcagccccaccagcgactacgtgaagatcctggtggccgccgtggccggcaccatcaccgtggtggtggtgatcttcatcaccgccgtggtgagatgcagacaggccccccacctgaaggccgcccagaagaacaagcagaacagcgagtgggccacccccaaccccgagaacagacagatgatcatgatgaagaagaagaagaagaagaagaagcacagccccaagaacctgctgctgaacttcgtgaccatcgaggagaccaaggccgacgacgtggacagcgacggcaacagagtgaccctggacctgcccatcgacctggaggagcagaccatgggcaagtacaactgggtgaccacccccaccaccttcaagcccgacagccccgacctggccagacactacaagagcgccagcccccagcccgccttccagatccagcccgagacccccctgaacagcaagcaccacatcatccaggagctgcccctggacaacaccttcgtggcctgcgacagcatcagcaagtgcagcagcagcagcagcgacccctacagcgtgagcgactgcggctaccccgtgaccaccttcgaggtgcccgtgagcgtgcacaccagacccaccgacagcagaaccagcaccatcgagatctgcagcgagatctag

SEQ ID NO: 95664 - DNA, 4020 bp, synthetic construct
  misc_feature 1..4020: note = Description of Artificial Sequence: Synthetic coding sequence
  source 1..4020: mol_type = other DNA
atggacctgctgagcggcacctacatcttcgccgtgctgctggcctgcgtggtgttccacagcggcgcccaggagaagaactacaccatcagagaggagatgcccgagaacgtgctgatcggcgacctgctgaaggacctgaacctgagcctgatccccaacaagagcctgaccaccgccatgcagttcaagctggtgtacaagaccggcgacgtgcccctgatcagaatcgaggaggacaccggcgagatcttcaccaccggcgccagaatcgacagagagaagctgtgcgccggcatccccagagacgagcactgcttctacgaggtggaggtggccatcctgcccgacgagatcttcagactggtgaagatcagattcctgatcgaggacatcaacgacaacgcccccctgttccccgccaccgtgatcaacatcagcatccccgagaacagcgccatcaacagcaagtacaccctgcccgccgccgtggaccccgacgtgggcatcaacggcgtgcagaactacgagctgatcaagagccagaacatcttcggcctggacgtgatcgagacccccgagggcgacaagatgccccagctgatcgtgcagaaggagctggacagagaggagaaggacacctacgtgatgaaggtgaaggtggaggacggcggcttcccccagagaagcagcaccgccatcctgcaggtgagcgtgaccgacaccaacgacaaccaccccgtgttcaaggagaccgagatcgaggtgagcatccccgagaacgcccccgtgggcaccagcgtgacccagctgcacgccaccgacgccgacatcggcgagaacgccaagatccacttcagcttcagcaacctggtgagcaacatcgccagaagactgttccacctgaacgccaccaccggcctgatcaccatcaaggagcccctggacagagaggagacccccaaccacaagctgctggtgctggccagcgacggcggcctgatgcccgccagagccatggtgctggtgaacgtgaccgacgtgaacgacaacgtgcccagcatcgacatcagatacatcgtgaaccccgtgaacgacaccgtggtgctgagcgagaacatccccctgaacaccaagatcgccctgatcaccgtgaccgacaaggacgccgaccacaacggcagagtgacctgcttcaccgaccacgagatccccttcagactgagacccgtgttcagcaaccagttcctgctggagaccgccgcctacctggactacgagagcaccaaggagtacgccatcaagctgctggccgccgacgccggcaagccccccctgaaccagagcgccatgctgttcatcaaggtgaaggacgagaacgacaacgcccccgtgttcacccagagcttcgtgaccgtgagcatccccgagaacaacagccccggcatccagctgaccaaggtgagcgccatggacgccgacagcggccccaacgccaagatcaactacctgctgggccccgacgccccccccgagttcagcctggactgcagaaccggcatgctgaccgtggtgaagaagctggacagagagaaggaggacaagtacctgttcaccatcctggccaaggacaacggcgtgccccccctgaccagcaacgtgaccgtgttcgtgagcatcatcgaccagaacgacaacagccccgtgttcacccacaacgagtacaacttctacgtgcccgagaacctgcccagacacggcaccgtgggcctgatcaccgtgaccgaccccgactacggcgacaacagcgccgtgaccctgagcatcctggacgagaacgacgacttcaccatcgacagccagaccggcgtgatcagacccaacatcagcttcgacagagagaagcaggagagctacaccttctacgtgaaggccgaggacggcggcagagtgagcagaagcagcagcgccaaggtgaccatcaacgtggtggacgtgaacgacaacaagcccgtgttcatcgtgccccccagcaactgcagctacgagctggtgctgcccagcaccaaccccggcaccgtggtgttccaggtgatcgccgtggacaacgacaccggcatgaacgccgaggtgagatacagcatcgtgggcggcaacaccagagacctgttcgccatcgaccaggagaccggcaacatcaccctgatggagaagtgcgacgtgaccgacctgggcctgcacagagtgctggtgaaggccaacgacctgggccagcccgacagcctgttcagcgtggtgatcgtgaacctgttcgtgaacgagagcgtgaccaacgccaccctgatcaacgagctggtgagaaagagcaccgaggcccccgtgacccccaacaccgagatcgccgacgtgagcagccccaccagcgactacgtgaagatcctggtggccgccgtggccggcaccatcaccgtggtggtggtgatcttcatcaccgccgtggtgagatgcagacaggccccccacctgaaggccgcccagaagaacaagcagaacagcgagtgggccacccccaaccccgagaacagacagatgatcatgatgaagaagaagaagaagaagaagaagcacagccccaagaacctgctgctgaacttcgtgaccatcgaggagaccaaggccgacgacgtggacagcgacggcaacagagtgaccctggacctgcccatcgacctggaggagcagaccatgggcaagtacaactgggtgaccacccccaccaccttcaagcccgacagccccgacctggccagacactacaagagcgccagcccccagcccgccttccagatccagcccgagacccccctgaacagcaagcaccacatcatccaggagctgcccctggacaacaccttcgtggcctgcgacagcatcagcaagtgcagcagcagcagcagcgacccctacagcgtgagcgactgcggctaccccgtgaccaccttcgaggtgcccgtgagcgtgcacaccagaccccccatgaaggaggtggtgagaagctgcacccccatgaaggagagcaccaccatggagatctggatccacccccagccccagagaaagagcgagggcaaggtggccggcaagagccagagaagagtgaccttccacctgcccgagggcagccaggagagcagcagcgacggcggcctgggcgaccacgacgccggcagcctgaccagcaccagccacggcctgcccctgggctacccccaggaggagtacttcgacagagccacccccagcaacagaaccgagggcgacggcaacagcgaccccgagagcaccgccgagatcaccgtgcagcccaccgtggaggaggccagcgacaactgcacccaggagtgcctgatctacggccacagcgacgcctgctggatgcccgccagcctggaccacagcagcagcagccaggcccaggccagcgccctgtgccacagcccccccctgagccaggccagcacccagcaccacagccccagagtgacccagaccatcgccctgtgccacagcccccccgtgacccagaccatcgccctgtgccacagccccccccccatccaggtgagcgccctgcaccacagcccccccctggtgcaggccaccgccctgcaccacagcccccccagcgcccaggccagcgccctgtgctacagcccccccctggcccaggccgccgccatcagccacagcagccccctgccccaggtgatcgccctgcacagaagccaggcccagagcagcgtgagcctgcagcagggctgggtgcagggcgccgacggcctgtgcagcgtggaccagggcgtgcagggcagcgccaccagccagttctacaccatgagcgagagactgcaccccagcgacgacagcatcaaggtgatccccctgaccaccttcacccccagacagcaggccagacccagcagaggcgacagccccatcatggaggagcaccccctgtag

SEQ ID NO: 95665 - DNA, 3198 bp, synthetic construct
  misc_feature 1..3198: note = Description of Artificial Sequence: Synthetic coding sequence
  source 1..3198: mol_type = other DNA
atggacctgctgagcggcacctacatcttcgccgtgctgctggcctgcgtggtgttccacagcggcgcccaggagaagaactacaccatcagagaggagatgcccgagaacgtgctgatcggcgacctgctgaaggacctgaacctgagcctgatccccaacaagagcctgaccaccgccatgcagttcaagctggtgtacaagaccggcgacgtgcccctgatcagaatcgaggaggacaccggcgagatcttcaccaccggcgccagaatcgacagagagaagctgtgcgccggcatccccagagacgagcactgcttctacgaggtggaggtggccatcctgcccgacgagatcttcagactggtgaagatcagattcctgatcgaggacatcaacgacaacgcccccctgttccccgccaccgtgatcaacatcagcatccccgagaacagcgccatcaacagcaagtacaccctgcccgccgccgtggaccccgacgtgggcatcaacggcgtgcagaactacgagctgatcaagagccagaacatcttcggcctggacgtgatcgagacccccgagggcgacaagatgccccagctgatcgtgcagaaggagctggacagagaggagaaggacacctacgtgatgaaggtgaaggtggaggacggcggcttcccccagagaagcagcaccgccatcctgcaggtgagcgtgaccgacaccaacgacaaccaccccgtgttcaaggagaccgagatcgaggtgagcatccccgagaacgcccccgtgggcaccagcgtgacccagctgcacgccaccgacgccgacatcggcgagaacgccaagatccacttcagcttcagcaacctggtgagcaacatcgccagaagactgttccacctgaacgccaccaccggcctgatcaccatcaaggagcccctggacagagaggagacccccaaccacaagctgctggtgctggccagcgacggcggcctgatgcccgccagagccatggtgctggtgaacgtgaccgacgtgaacgacaacgtgcccagcatcgacatcagatacatcgtgaaccccgtgaacgacaccgtggtgctgagcgagaacatccccctgaacaccaagatcgccctgatcaccgtgaccgacaaggacgccgaccacaacggcagagtgacctgcttcaccgaccacgagatccccttcagactgagacccgtgttcagcaaccagttcctgctggagaccgccgcctacctggactacgagagcaccaaggagtacgccatcaagctgctggccgccgacgccggcaagccccccctgaaccagagcgccatgctgttcatcaaggtgaaggacgagaacgacaacgcccccgtgttcacccagagcttcgtgaccgtgagcatccccgagaacaacagccccggcatccagctgaccaaggtgagcgccatggacgccgacagcggccccaacgccaagatcaactacctgctgggccccgacgccccccccgagttcagcctggactgcagaaccggcatgctgaccgtggtgaagaagctggacagagagaaggaggacaagtacctgttcaccatcctggccaaggacaacggcgtgccccccctgaccagcaacgtgaccgtgttcgtgagcatcatcgaccagaacgacaacagccccgtgttcacccacaacgagtacaacttctacgtgcccgagaacctgcccagacacggcaccgtgggcctgatcaccgtgaccgaccccgactacggcgacaacagcgccgtgaccctgagcatcctggacgagaacgacgacttcaccatcgacagccagaccggcgtgatcagacccaacatcagcttcgacagagagaagcaggagagctacaccttctacgtgaaggccgaggacggcggcagagtgagcagaagcagcagcgccaaggtgaccatcaacgtggtggacgtgaacgacaacaagcccgtgttcatcgtgccccccagcaactgcagctacgagctggtgctgcccagcaccaaccccggcaccgtggtgttccaggtgatcgccgtggacaacgacaccggcatgaacgccgaggtgagatacagcatcgtgggcggcaacaccagagacctgttcgccatcgaccaggagaccggcaacatcaccctgatggagaagtgcgacgtgaccgacctgggcctgcacagagtgctggtgaaggccaacgacctgggccagcccgacagcctgttcagcgtggtgatcgtgaacctgttcgtgaacgagagcgtgaccaacgccaccctgatcaacgagctggtgagaaagagcaccgaggcccccgtgacccccaacaccgagatcgccgacgtgagcagccccaccagcgactacgtgaagatcctggtggccgccgtggccggcaccatcaccgtggtggtggtgatcttcatcaccgccgtggtgagatgcagacaggccccccacctgaaggccgcccagaagaacaagcagaacagcgagtgggccacccccaaccccgagaacagacagatgatcatgatgaagaagaagaagaagaagaagaagcacagccccaagaacctgctgctgaacttcgtgaccatcgaggagaccaaggccgacgacgtggacagcgacggcaacagagtgaccctggacctgcccatcgacctggaggagcagaccatgggcaagtacaactgggtgaccacccccaccaccttcaagcccgacagccccgacctggccagacactacaagagcgccagcccccagcccgccttccagatccagcccgagacccccctgaacagcaagcaccacatcatccaggagctgcccctggacaacaccttcgtggcctgcgacagcatcagcaagtgcagcagcagcagcagcgacccctacagcgtgagcgactgcggctaccccgtgaccaccttcgaggtgcccgtgagcgtgcacaccagaccccccatgaaggaggtggtgagaagctgcacccccatgaaggagagcaccaccatggagatctggatccacccccagccccagagaaagagcgagggcaaggtggccggcaagaccgtgctgaccagcagcagccccagcgccatgaccctgagctacctggactag

SEQ ID NO: 95666 - DNA, 1344 bp, synthetic construct
  misc_feature 1..1344: note = Description of Artificial Sequence: Synthetic coding sequence
  source 1..1344: mol_type = other DNA
atggccaccgccgccaccaccaccaccaccaccaccgccaccgtggccctgaccaccagctgggacaacgccaccggcagacccaccgccgagcccgaccccatcctggacaactacgtgctgctggtggtggtgatgagcctgttcgtgggcggcaccctggtggtgctgagcggcgtgctgctgctgtgcaagagatgctgggacgtgcaccagagactgaacagagccatggaggaggccgagaagaccaccaccacctacctggacaacggcacccaccccgcccaggaccccgacttcagaggcgaggaccccgagtgccaggacgccgagaccgagagattcctgagcaccagcagcaccggcagaagagtgagcttcaacgaggccgccctgttcgagcagagcagaaagacccaggacaagggcagaagatacaccctgaccgagggcgacttccaccacctgaagaacgccagactgacccacctgcacctgccccccctgaagatcgtgaccatccacgagtgcgacagcggcgaggccagcagcgccaccaccccccaccccgccaccagccccaaggccaccctggccatcttccagccccccggcaaggccctgaccggcagaagcgtgggccccagcagcgccctgcccggcgacccctacaacagcgccgccggcgccaccgacttcgccgagatcagccccagcgccagcagcgacagcggcgagggcaccagcctggacgccggcaccagaagcaccaaggccggcggccccggcgccgccgccggccccggcgaggccggccccggcagcggcgccggcaccgtgctgcagttcctgaccagactgagaagacacgccagcctggacggcgccagcccctacttcaaggtgaagaagtggaagctggagcccagccagagagccgccagcctggacaccagaggcagccccaagagacaccacttccagagacagagagccgccagcgagagcaccgagcaggaggagggcgacgccccccaggaggacttcatccagtacatcgccagagccggcgacgccgtggccttcccccaccccagacccttcctggccagccccccccccgccctgggcagatacttcagcgtggacggcggcgccagaggcggccccgtgggcccctgcccccccagccccccccccagaagacccagagagagaagccccggccccgtggacaccagaagccccgccagcagcggcaaggccccccccagaggcggcctgaccggcgccaccagccccgcctggaccagaggcggcaagcagggcgagaccggctag

SEQ ID NO: 95667 - DNA, 3114 bp, synthetic construct
  misc_feature 1..3114: note = Description of Artificial Sequence: Synthetic coding sequence
  source 1..3114: mol_type = other DNA
atgaccgtgggcttcaacagcgacatcagcagcgtggtgagagtgaacaccaccaactgccacaagtgcctgctgagcggcacctacatcttcgccgtgctgctggtgtgcgtggtgttccacagcggcgcccaggagaagaactacaccatcagagaggagatccccgagaacgtgctgatcggcaacctgctgaaggacctgaacctgagcctgatccccaacaagagcctgaccaccaccatgcagttcaagctggtgtacaagaccggcgacgtgcccctgatcagaatcgaggaggacaccggcgagatcttcaccaccggcgccagaatcgacagagagaagctgtgcgccggcatccccagagacgagcactgcttctacgaggtggaggtggccatcctgcccgacgagatcttcagactggtgaagatcagattcctgatcgaggacatcaacgacaacgcccccctgttccccgccaccgtgatcaacatcagcatccccgagaacagcgccatcaacagcaagtacaccctgcccgccgccgtggaccccgacgtgggcatcaacggcgtgcagaactacgagctgatcaagagccagaacatcttcggcctggacgtgatcgagacccccgagggcgacaagatgccccagctgatcgtgcagaaggagctggacagagaggagaaggacacctacgtgatgaaggtgaaggtggaggacggcggcttcccccagagaagcagcaccgccatcctgcaggtgagcgtgaccgacaccaacgacaaccaccccgtgttcaaggagaccgagatcgaggtgagcatccccgagaacgcccccgtgggcaccagcgtgacccagctgcacgccaccgacgccgacatcggcgagaacgccaagatccacttcagcttcagcaacctggtgagcaacatcgccagaagactgttccacctgaacgccaccaccggcctgatcaccatcaaggagcccctggacagagaggagacccccaaccacaagctgctggtgctggccagcgacggcggcctgatgcccgccagagccatggtgctggtgaacgtgaccgacgtgaacgacaacgtgcccagcatcgacatcagatacatcgtgaaccccgtgaacgacaccgtggtgctgagcgagaacatccccctgaacaccaagatcgccctgatcaccgtgaccgacaaggacgccgaccacaacggcagagtgacctgcttcaccgaccacgagatccccttcagactgagacccgtgttcagcaaccagttcctgctggagaacgccgcctacctggactacgagagcaccaaggagtacgccatcaagctgctggccgccgacgccggcaagccccccctgaaccagagcgccatgctgttcatcaaggtgaaggacgagaacgacaacgcccccgtgttcacccagagcttcgtgaccgtgagcatccccgagaacaacagccccggcatccagctgatgaaggtgagcgccaccgacgccgacagcggccccaacgccgagatcaactacctgctgggccccgacgccccccccgagttcagcctggacagaagaaccggcatgctgaccgtggtgaagaagctggacagagagaaggaggacaagtacctgttcaccatcctggccaaggacaacggcgtgccccccctgaccagcaacgtgaccgtgttcgtgagcatcatcgaccagaacgacaacagccccgtgttcacccacaacgagtacaagttctacgtgcccgagaacctgcccagacacggcaccgtgggcctgatcaccgtgaccgaccccgactacggcgacaacagcgccgtgaccctgagcatcctggacgagaacgacgacttcaccatcgacagccagaccggcgtgatcagacccaacatcagcttcgacagagagaagcaggagagctacaccttctacgtgaaggccgaggacggcggcagagtgagcagaagcagcagcgccaaggtgaccatcaacgtggtggacgtgaacgacaacaagcccgtgttcatcgtgcccccctacaactacagctacgagctggtgctgcccagcaccaaccccggcaccgtggtgttccaggtgatcgccgtggacaacgacaccggcatgaacgccgaggtgagatacagcatcgtgggcggcaacaccagagacctgttcgccatcgaccaggagaccggcaacatcaccctgatggagaagtgcgacgtgaccgacctgggcctgcacagagtgctggtgaaggccaacgacctgggccagcccgacagcctgttcagcgtggtgatcgtgaacctgttcgtgaacgagagcgtgaccaacgccaccctgatcaacgagctggtgagaaagagcatcgaggcccccgtgacccccaacaccgagatcgccgacgtgagcagccccaccagcgactacgtgaagatcctggtggccgccgtggccggcaccatcaccgtggtggtggtgatcttcatcaccgccgtggtgagatgcagacaggccccccacctgaaggccgcccagaagaacatgcagaacagcgagtgggccacccccaaccccgagaacagacagatgatcatgatgaagaagaagaagaagaagaagaagcacagccccaagaacctgctgctgaacgtggtgaccatcgaggagaccaaggccgacgacgtggacagcgacggcaacagagtgaccctggacctgcccatcgacctggaggagcagaccatgggcaagtacaactgggtgaccacccccaccaccttcaagcccgacagccccgacctggccagacactacaagagcgccagcccccagcccgccttccagatccagcccgagacccccctgaacctgaagcaccacatcatccaggagctgcccctggacaacaccttcgtggcctgcgacagcatcagcaactgcagcagcagcagcagcgacccctacagcgtgagcgactgcggctaccccgtgaccaccttcgaggtgcccgtgagcgtgcacaccagacccaccgacagcagaacctag

SEQ ID NO: 95668 - DNA, 3147 bp, synthetic construct
  misc_feature 1..3147: note = Description of Artificial Sequence: Synthetic coding sequence
  source 1..3147: mol_type = other DNA
atgttcagagtgggcttcctgatcatcagcagcagcagcagcctgagccccctgctgctggtgagcgtggtgagagtgaacaccaccaactgccacaagtgcctgctgagcggcacctacatcttcgccgtgctgctggtgtgcgtggtgttccacagcggcgcccaggagaagaactacaccatcagagaggagatccccgagaacgtgctgatcggcaacctgctgaaggacctgaacctgagcctgatccccaacaagagcctgaccaccaccatgcagttcaagctggtgtacaagaccggcgacgtgcccctgatcagaatcgaggaggacaccggcgagatcttcaccaccggcgccagaatcgacagagagaagctgtgcgccggcatccccagagacgagcactgcttctacgaggtggaggtggccatcctgcccgacgagatcttcagactggtgaagatcagattcctgatcgaggacatcaacgacaacgcccccctgttccccgccaccgtgatcaacatcagcatccccgagaacagcgccatcaacagcaagtacaccctgcccgccgccgtggaccccgacgtgggcatcaacggcgtgcagaactacgagctgatcaagagccagaacatcttcggcctggacgtgatcgagacccccgagggcgacaagatgccccagctgatcgtgcagaaggagctggacagagaggagaaggacacctacgtgatgaaggtgaaggtggaggacggcggcttcccccagagaagcagcaccgccatcctgcaggtgagcgtgaccgacaccaacgacaaccaccccgtgttcaaggagaccgagatcgaggtgagcatccccgagaacgcccccgtgggcaccagcgtgacccagctgcacgccaccgacgccgacatcggcgagaacgccaagatccacttcagcttcagcaacctggtgagcaacatcgccagaagactgttccacctgaacgccaccaccggcctgatcaccatcaaggagcccctggacagagaggagacccccaaccacaagctgctggtgctggccagcgacggcggcctgatgcccgccagagccatggtgctggtgaacgtgaccgacgtgaacgacaacgtgcccagcatcgacatcagatacatcgtgaaccccgtgaacgacaccgtggtgctgagcgagaacatccccctgaacaccaagatcgccctgatcaccgtgaccgacaaggacgccgaccacaacggcagagtgacctgcttcaccgaccacgagatccccttcagactgagacccgtgttcagcaaccagttcctgctggagaacgccgcctacctggactacgagagcaccaaggagtacgccatcaagctgctggccgccgacgccggcaagccccccctgaaccagagcgccatgctgttcatcaaggtgaaggacgagaacgacaacgcccccgtgttcacccagagcttcgtgaccgtgagcatccccgagaacaacagccccggcatccagctgatgaaggtgagcgccaccgacgccgacagcggccccaacgccgagatcaactacctgctgggccccgacgccccccccgagttcagcctggacagaagaaccggcatgctgaccgtggtgaagaagctggacagagagaaggaggacaagtacctgttcaccatcctggccaaggacaacggcgtgccccccctgaccagcaacgtgaccgtgttcgtgagcatcatcgaccagaacgacaacagccccgtgttcacccacaacgagtacaagttctacgtgcccgagaacctgcccagacacggcaccgtgggcctgatcaccgtgaccgaccccgactacggcgacaacagcgccgtgaccctgagcatcctggacgagaacgacgacttcaccatcgacagccagaccggcgtgatcagacccaacatcagcttcgacagagagaagcaggagagctacaccttctacgtgaaggccgaggacggcggcagagtgagcagaagcagcagcgccaaggtgaccatcaacgtggtggacgtgaacgacaacaagcccgtgttcatcgtgcccccctacaactacagctacgagctggtgctgcccagcaccaaccccggcaccgtggtgttccaggtgatcgccgtggacaacgacaccggcatgaacgccgaggtgagatacagcatcgtgggcggcaacaccagagacctgttcgccatcgaccaggagaccggcaacatcaccctgatggagaagtgcgacgtgaccgacctgggcctgcacagagtgctggtgaaggccaacgacctgggccagcccgacagcctgttcagcgtggtgatcgtgaacctgttcgtgaacgagagcgtgaccaacgccaccctgatcaacgagctggtgagaaagagcatcgaggcccccgtgacccccaacaccgagatcgccgacgtgagcagccccaccagcgactacgtgaagatcctggtggccgccgtggccggcaccatcaccgtggtggtggtgatcttcatcaccgccgtggtgagatgcagacaggccccccacctgaaggccgcccagaagaacatgcagaacagcgagtgggccacccccaaccccgagaacagacagatgatcatgatgaagaagaagaagaagaagaagaagcacagccccaagaacctgctgctgaacgtggtgaccatcgaggagaccaaggccgacgacgtggacagcgacggcaacagagtgaccctggacctgcccatcgacctggaggagcagaccatgggcaagtacaactgggtgaccacccccaccaccttcaagcccgacagccccgacctggccagacactacaagagcgccagcccccagcccgccttccagatccagcccgagacccccctgaacctgaagcaccacatcatccaggagctgcccctggacaacaccttcgtggcctgcgacagcatcagcaactgcagcagcagcagcagcgacccctacagcgtgagcgactgcggctaccccgtgaccaccttcgaggtgcccgtgagcgtgcacaccagacccaccgacagcagaacctag

SEQ ID NO: 95669 - DNA, 3960 bp, synthetic construct
  misc_feature 1..3960: note = Description of Artificial Sequence: Synthetic coding sequence
  source 1..3960: mol_type = other DNA
tgagtggtgagagtgaacaccaccaactgccacaagtgcctgctgagcggcacctacatcttcgccgtgctgctggtgtgcgtggtgttccacagcggcgcccaggagaagaactacaccatcagagaggagatccccgagaacgtgctgatcggcaacctgctgaaggacctgaacctgagcctgatccccaacaagagcctgaccaccaccatgcagttcaagctggtgtacaagaccggcgacgtgcccctgatcagaatcgaggaggacaccggcgagatcttcaccaccggcgccagaatcgacagagagaagctgtgcgccggcatccccagagacgagcactgcttctacgaggtggaggtggccatcctgcccgacgagatcttcagactggtgaagatcagattcctgatcgaggacatcaacgacaacgcccccctgttccccgccaccgtgatcaacatcagcatccccgagaacagcgccatcaacagcaagtacaccctgcccgccgccgtggaccccgacgtgggcatcaacggcgtgcagaactacgagctgatcaagagccagaacatcttcggcctggacgtgatcgagacccccgagggcgacaagatgccccagctgatcgtgcagaaggagctggacagagaggagaaggacacctacgtgatgaaggtgaaggtggaggacggcggcttcccccagagaagcagcaccgccatcctgcaggtgagcgtgaccgacaccaacgacaaccaccccgtgttcaaggagaccgagatcgaggtgagcatccccgagaacgcccccgtgggcaccagcgtgacccagctgcacgccaccgacgccgacatcggcgagaacgccaagatccacttcagcttcagcaacctggtgagcaacatcgccagaagactgttccacctgaacgccaccaccggcctgatcaccatcaaggagcccctggacagagaggagacccccaaccacaagctgctggtgctggccagcgacggcggcctgatgcccgccagagccatggtgctggtgaacgtgaccgacgtgaacgacaacgtgcccagcatcgacatcagatacatcgtgaaccccgtgaacgacaccgtggtgctgagcgagaacatccccctgaacaccaagatcgccctgatcaccgtgaccgacaaggacgccgaccacaacggcagagtgacctgcttcaccgaccacgagatccccttcagactgagacccgtgttcagcaaccagttcctgctggagaacgccgcctacctggactacgagagcaccaaggagtacgccatcaagctgctggccgccgacgccggcaagccccccctgaaccagagcgccatgctgttcatcaaggtgaaggacgagaacgacaacgcccccgtgttcacccagagcttcgtgaccgtgagcatccccgagaacaacagccccggcatccagctgatgaaggtgagcgccaccgacgccgacagcggccccaacgccgagatcaactacctgctgggccccgacgccccccccgagttcagcctggacagaagaaccggcatgctgaccgtggtgaagaagctggacagagagaaggaggacaagtacctgttcaccatcctggccaaggacaacggcgtgccccccctgaccagcaacgtgaccgtgttcgtgagcatcatcgaccagaacgacaacagccccgtgttcacccacaacgagtacaagttctacgtgcccgagaacctgcccagacacggcaccgtgggcctgatcaccgtgaccgaccccgactacggcgacaacagcgccgtgaccctgagcatcctggacgagaacgacgacttcaccatcgacagccagaccggcgtgatcagacccaacatcagcttcgacagagagaagcaggagagctacaccttctacgtgaaggccgaggacggcggcagagtgagcagaagcagcagcgccaaggtgaccatcaacgtggtggacgtgaacgacaacaagcccgtgttcatcgtgcccccctacaactacagctacgagctggtgctgcccagcaccaaccccggcaccgtggtgttccaggtgatcgccgtggacaacgacaccggcatgaacgccgaggtgagatacagcatcgtgggcggcaacaccagagacctgttcgccatcgaccaggagaccggcaacatcaccctgatggagaagtgcgacgtgaccgacctgggcctgcacagagtgctggtgaaggccaacgacctgggccagcccgacagcctgttcagcgtggtgatcgtgaacctgttcgtgaacgagagcgtgaccaacgccaccctgatcaacgagctggtgagaaagagcatcgaggcccccgtgacccccaacaccgagatcgccgacgtgagcagccccaccagcgactacgtgaagatcctggtggccgccgtggccggcaccatcaccgtggtggtggtgatcttcatcaccgccgtggtgagatgcagacaggccccccacctgaaggccgcccagaagaacatgcagaacagcgagtgggccacccccaaccccgagaacagacagatgatcatgatgaagaagaagaagaagaagaagaagcacagccccaagaacctgctgctgaacgtggtgaccatcgaggagaccaaggccgacgacgtggacagcgacggcaacagagtgaccctggacctgcccatcgacctggaggagcagaccatgggcaagtacaactgggtgaccacccccaccaccttcaagcccgacagccccgacctggccagacactacaagagcgccagcccccagcccgccttccagatccagcccgagacccccctgaacctgaagcaccacatcatccaggagctgcccctggacaacaccttcgtggcctgcgacagcatcagcaactgcagcagcagcagcagcgacccctacagcgtgagcgactgcggctaccccgtgaccaccttcgaggtgcccgtgagcgtgcacaccagacccagccagagaagagtgaccttccacctgcccgagggcagccaggagagcagcagcgacggcggcctgggcgaccacgacgccggcagcctgaccagcaccagccacggcctgcccctgggctacccccaggaggagtacttcgacagagccacccccagcaacagaaccgagggcgacggcaacagcgaccccgagagcaccttcatccccggcctgaagaaggagatcaccgtgcagcccaccgtggaggaggccagcgacaactgcacccaggagtgcctgatctacggccacagcgacgcctgctggatgcccgccagcctggaccacagcagcagcagccaggcccaggccagcgccctgtgccacagcccccccctgagccaggccagcacccagcaccacagcccccccgtgacccagaccatcgtgctgtgccacagcccccccgtgacccagaccatcgccctgtgccacagccccccccccatccaggtgagcgccctgcaccacagcccccccctggtgcagggcaccgccctgcaccacagcccccccagcgcccaggccagcgccctgtgctacagcccccccctggcccaggccgccgccatcagccacagcagcagcctgccccaggtgatcgccctgcacagaagccaggcccagagcagcgtgagcctgcagcagggctgggtgcagggcgccaacggcctgtgcagcgtggaccagggcgtgcagggcagcgccaccagccagttctacaccatgagcgagagactgcaccccagcgacgacagcatcaaggtgatccccctgaccaccttcgcccccagacagcaggccagacccagcagaggcgacagccccatcatggagacccaccccctgtag

SEQ ID NO: 95670 - DNA, 1080 bp, synthetic construct
  misc_feature 1..1080: note = Description of Artificial Sequence: Synthetic coding sequence
  source 1..1080: mol_type = other DNA
atgagaagcatcagaaagagatggaccatctgcaccatcagcctgctgctgatcttctacaagaccaaggagatcgccagaaccgaggagcaccaggagacccagctgatcggcgacggcgagctgagcctgagcagaagcctggtgaacagcagcgacaagatcatcagaaaggccggcagcagcatcttccagcacaacgtggagggctggaagatcaacagcagcctggtgctggagatcagaaagaacatcctgagattcctggacgccgagagagacgtgagcgtggtgaagagcagcttcaagcccggcgacgtgatccactacgtgctggacagaagaagaaccctgaacatcagccacgacctgcacagcctgctgcccgaggtgagccccatgaagaacagaagattcaagacctgcgccgtggtgggcaacagcggcatcctgctggacagcgagtgcggcaaggagatcgacagccacaacttcgtgatcagatgcaacctggcccccgtggtggagttcgccgccgacgtgggcaccaagagcgacttcatcaccatgaaccccagcgtggtgcagagagccttcggcggcttcagaaacgagagcgacagagagaagttcgtgcacagactgagcatgctgaacgacagcgtgctgtggatccccgccttcatggtgaagggcggcgagaagcacgtggagtgggtgaacgccctgatcctgaagaacaagctgaaggtgagaaccgcctaccccagcctgagactgatccacgccgtgagaggctactggctgaccaacaaggtgcccatcaagagacccagcaccggcctgctgatgtacaccctggccaccagattctgcgacgagatccacctgtacggcttctggcccttccccaaggacctgaacggcaaggccgtgaagtaccactactacgacgacctgaagtacagatacttcagcaacgccagcccccacagaatgcccctggagttcaagaccctgaacgtgctgcacaacagaggcgccctgaagctgaccaccggcaagtgcgtgaagcagtag

SEQ ID NO: 95671 - DNA, 72 bp, synthetic construct
  misc_feature 1..72: note = Description of Artificial Sequence: Synthetic coding sequence
  source 1..72: mol_type = other DNA
atgatgcagctgctgcagctgctgctgggcctgctgggccccggcggctacctgttcctgctgggcgactag

SEQ ID NO: 95672 - DNA, 3480 bp, synthetic construct
  misc_feature 1..3480: note = Description of Artificial Sequence: Synthetic coding sequence
  source 1..3480: mol_type = other DNA
atgtacctgagcatctgctgctgcttcctgctgtgggcccccgccctgaccctgaagaacctgaactacagcgtgcccgaggagcagggcgccggcaccgtgatcggcaacatcggcagagacgccagactgcagcccggcctgccccccgccgagagaggcggcggcggcagaagcaagagcggcagctacagagtgctggagaacagcgccccccacctgctggacgtggacgccgacagcggcctgctgtacaccaagcagagaatcgacagagagagcctgtgcagacacaacgccaagtgccagctgagcctggaggtgttcgccaacgacaaggagatctgcatgatcaaggtggagatccaggacatcaacgacaacgcccccagcttcagcagcgaccagatcgagatggacatcagcgagaacgccgcccccggcaccagattccccctgaccagcgcccacgaccccgacgccggcgagaacggcctgagaacctacctgctgaccagagacgaccacggcctgttcggcctggacgtgaagagcagaggcgacggcaccaagttccccgagctggtgatccagaaggccctggacagagagcagcagaaccaccacaccctggtgctgaccgccctggacggcggcgagccccccagaagcgccaccgtgcagatcaacgtgaaggtgatcgacagcaacgacaacagccccgtgttcgaggcccccagctacctggtggagctgcccgagaacgcccccctgggcaccgtggtgatcgacctgaacgccaccgacgccgacgagggccccaacggcgaggtgctgtacagcttcagcagctacgtgcccgacagagtgagagagctgttcagcatcgaccccaagaccggcctgatcagagtgaagggcaacctggactacgaggagaacggcatgctggagatcgacgtgcaggccagagacctgggccccaaccccatccccgcccactgcaaggtgaccgtgaagctgatcgacagaaacgacaacgcccccagcatcggcttcgtgagcgtgagacagggcgccctgagcgaggccgccccccccggcaccgtgatcgccctggtgagagtgaccgacagagacagcggcaagaacggccagctgcagtgcagagtgctgggcggcggcggcaccggcggcggcggcggcctgggcggccccggcggcagcgtgcccttcaagctggaggagaactacgacaacttctacaccgtggtgaccgacagacccctggacagagagacccaggacgagtacaacgtgaccatcgtggccagagacggcggcagcccccccctgaacagcaccaagagcttcgccatcaagatcctggacgagaacgacaacccccccagattcaccaagggcctgtacgtgctgcaggtgcacgagaacaacatccccggcgagtacctgggcagcgtgctggcccaggaccccgacctgggccagaacggcaccgtgagctacagcatcctgcccagccacatcggcgacgtgagcatctacacctacgtgagcgtgaaccccaccaacggcgccatctacgccctgagaagcttcaacttcgagcagaccaaggccttcgagttcaaggtgctggccaaggacagcggcgcccccgcccacctggagagcaacgccaccgtgagagtgaccgtgctggacgtgaacgacaacgcccccgtgatcgtgctgcccaccctgcagaacgacaccgccgagctgcaggtgcccagaaacgccggcctgggctacctggtgagcaccgtgagagccctggacagcgacttcggcgagagcggcagactgacctacgagatcgtggacggcaacgacgaccacctgttcgagatcgaccccagcagcggcgagatcagaaccctgcaccccttctgggaggacgtgacccccgtggtggagctggtggtgaaggtgaccgaccacggcaagcccaccctgagcgccgtggccaagctgatcatcagaagcgtgagcggcagcctgcccgagggcgtgcccagagtgaacggcgagcagcaccactgggacatgagcctgcccctgatcgtgaccctgagcaccatcagcatcatcctgctggccgccatgatcaccatcgccgtgaagtgcaagagagagaacaaggagatcagaacctacaactgcagaatcgccgagtacagccacccccagctgggcggcggcaagggcaagaagaagaagatcaacaagaacgacatcatgctggtgcagagcgaggtggaggagagaaacgccatgaacgtgatgaacgtggtgagcagccccagcctggccaccagccccatgtacttcgactaccagaccagactgcccctgagcagccccagaagcgaggtgatgtacctgaagcccgccagcaacaacctgaccgtgccccagggccacgccggctgccacaccagcttcaccggccagggcaccaacgccagcgagacccccgccaccagaatgagcatcatccagaccgacaacttccccgccgagcccaactacatgggcagcagacagcagttcgtgcagagcagcagcaccttcaaggaccccgagagagccagcctgagagacagcggccacggcgacagcgaccaggccgacagcgaccaggacaccaacaagggcagctgctgcgacatgagcgtgagagaggccctgaagatgaagaccaccagcaccaagagccagcccctggagcaggagcccgaggagtgcgtgaactgcaccgacgagtgcagagtgctgggccacagcgacagatgctggatgccccagttccccgccgccaaccaggccgagaacgccgactacagaaccaacctgttcgtgcccaccgtggaggccaacgtggagaccgagacctacgagaccgtgaaccccaccggcaagaagaccttctgcaccttcggcaaggacaagagagagcacaccatcctgatcgccaacgtgaagccctacctgaaggccaagagagccctgagccccctgctgcaggaggtgcccagcgccagcagcagccccaccaaggcctgcatcgagccctgcaccagcaccaagggcagcctggacggctgcgaggccaagcccggcgccctggccgaggccagcagccagtacctgcccaccgacagccagtacctgagccccagcaagcagcccagagacccccccttcatggccagcgaccagatggccagagtgttcgccgacgtgcacagcagagccagcagagacagcagcgagatgggcgccgtgctggagcagctggaccaccccaacagagacctgggcagagagagcgtggacgccgaggaggtggtgagagagatcgacaagctgctgcaggactgcagaggcaacgaccccgtggccgtgagaaagtag

SEQ ID NO: 95673 - DNA, 3408 bp, synthetic construct
  misc_feature 1..3408: note = Description of Artificial Sequence: Synthetic coding sequence
  source 1..3408: mol_type = other DNA
atgcaccagatgaacgccaagatgcacttcagattcgtgttcgccctgctgatcgtgagcttcaaccacgacgtgctgggcaagaacctgaagtacagaatctacgaggagcagagagtgggcagcgtgatcgccagactgagcgaggacgtggccgacgtgctgctgaagctgcccaaccccagcaccgtgagattcagagccatgcagagaggcaacagccccctgctggtggtgaacgaggacaacggcgagatcagcatcggcgccaccatcgacagagagcagctgtgccagaagaacctgaactgcagcatcgagttcgacgtgatcaccctgcccaccgagcacctgcagctgttccacatcgaggtggaggtgctggacatcaacgacaacagcccccagttcagcagaagcctgatccccatcgagatcagcgagagcgccgccgtgggcaccagaatccccctggacagcgccttcgaccccgacgtgggcgagaacagcctgcacacctacagcctgagcgccaacgacttcttcaacatcgaggtgagaaccagaaccgacggcgccaagtacgccgagctgatcgtggtgagagagctggacagagagctgaagagcagctacgagctgcagctgaccgccagcgacatgggcgtgccccagagaagcggcagcagcatcctgaagatcagcatcagcgacagcaacgacaacagccccgccttcgagcagcagagctacatcatccagctgctggagaacagccccgtgggcaccctgctgctggacctgaacgccaccgaccccgacgagggcgccaacggcaagatcgtgtacagcttcagcagccacgtgagccccaagatcatggagaccttcaagatcgacagcgagagaggccacctgaccctgttcaagcaggtggactacgagatcaccaagagctacgagatcgacgtgcaggcccaggacctgggccccaacagcatccccgcccactgcaagatcatcatcaaggtggtggacgtgaacgacaacaagcccgagatcaacatcaacctgatgagccccggcaaggaggagatcagctacatcttcgagggcgaccccatcgacaccttcgtggccctggtgagagtgcaggacaaggacagcggcctgaacggcgagatcgtgtgcaagctgcacggccacggccacttcaagctgcagaagacctacgagaacaactacctgatcctgaccaacgccaccctggacagagagaagagaagcgagtacagcctgaccgtgatcgccgaggacagaggcacccccagcctgagcaccgtgaagcacttcaccgtgcagatcaacgacatcaacgacaaccccccccacttccagagaagcagatacgagttcgtgatcagcgagaacaacagccccggcgcctacatcaccaccgtgaccgccaccgaccccgacctgggcgagaacggccaggtgacctacaccatcctggagagcttcatcctgggcagcagcatcaccacctacgtgaccatcgaccccagcaacggcgccatctacgccctgagaatcttcgaccacgaggaggtgagccagatcaccttcgtggtggaggccagagacggcggcagccccaagcagctggtgagcaacaccaccgtggtgctgaccatcatcgacgagaacgacaacgtgcccgtggtgatcggccccgccctgagaaacaacaccgccgagatcaccatccccaagggcgccgagagcggcttccacgtgaccagaatcagagccatcgacagagacagcggcgtgaacgccgagctgagctgcgccatcgtggccggcaacgaggagaacatcttcatcatcgaccccagaagctgcgacatccacaccaacgtgagcatggacagcgtgccctacaccgagtgggagctgagcgtgatcatccaggacaagggcaacccccagctgcacaccaaggtgctgctgaagtgcatgatcttcgagtacgccgagagcgtgaccagcaccgccatgaccagcgtgagccaggccagcctggacgtgagcatgatcatcatcatcagcctgggcgccatctgcgccgtgctgctggtgatcatggtgctgttcgccaccagatgcaacagagagaagaaggacaccagaagctacaactgcagagtggccgagagcacctaccagcaccaccccaagagacccagcagacagatccacaagggcgacatcaccctggtgcccaccatcaacggcaccctgcccatcagaagccaccacagaagcagccccagcagcagccccaccctggagagaggccagatgggcagcagacagagccacaacagccaccagagcctgaacagcctggtgaccatcagcagcaaccacgtgcccgagaacttcagcctggagctgacccacgccacccccgccgtggagcaggtgagccagctgctgagcatgctgcaccagggccagtaccagcccagacccagcttcagaggcaacaagtacagcagaagctacagatacgccctgcaggacatggacaagttcagcctgaaggacagcggcagaggcgacagcgaggccggcgacagcgactacgacctgggcagagacagccccatcgacagactgctgggcgagggcttcagcgacctgttcctgaccgacggcagaatccccgccgccatgagactgtgcaccgaggagtgcagagtgctgggccacagcgaccagtgctggatgccccccctgcccagccccagcagcgactacagaagcaacatgttcatccccggcgaggagttccccacccagccccagcagcagcacccccaccagagcctggaggacgacgcccagcccgccgacagcggcgagaagaagaagagcttcagcaccttcggcaaggacagccccaacgacgaggacaccggcgacaccagcaccagcagcctgctgagcgagatgagcagcgtgttccagagactgctgccccccagcctggacacctacagcgagtgcagcgaggtggacagaagcaacagcctggagagaagaaagggccccctgcccgccaagaccgtgggctacccccagggcgtggccgcctgggccgccagcacccacttccagaaccccaccaccaactgcggcccccccctgggcacccacagcagcgtgcagcccagcagcaagtggctgcccgccatggaggagatccccgagaactacgaggaggacgacttcgacaacgtgctgaaccacctgaacgacggcaagcacgagctgatggacgccagcgagctggtggccgagatcaacaagctgctgcaggacgtgagacagagctag

SEQ ID NO: 95674 - DNA, 3405 bp, synthetic construct
  misc_feature 1..3405: note = Description of Artificial Sequence: Synthetic coding sequence
  source 1..3405: mol_type = other DNA
atgcaccagatgaacgccaagatgcacttcagattcgtgttcgccctgctgatcgtgagcttcaaccacgacgtgctgggcaagaacctgaagtacagaatctacgaggagcagagagtgggcagcgtgatcgccagactgagcgaggacgtggccgacgtgctgctgaagctgcccaaccccagcaccgtgagattcagagccatgcagagaggcaacagccccctgctggtggtgaacgaggacaacggcgagatcagcatcggcgccaccatcgacagagagcagctgtgccagaagaacctgaactgcagcatcgagttcgacgtgatcaccctgcccaccgagcacctgcagctgttccacatcgaggtggaggtgctggacatcaacgacaacagcccccagttcagcagaagcctgatccccatcgagatcagcgagagcgccgccgtgggcaccagaatccccctggacagcgccttcgaccccgacgtgggcgagaacagcctgcacacctacagcctgagcgccaacgacttcttcaacatcgaggtgagaaccagaaccgacggcgccaagtacgccgagctgatcgtggtgagagagctggacagagagctgaagagcagctacgagctgcagctgaccgccagcgacatgggcgtgccccagagaagcggcagcagcatcctgaagatcagcatcagcgacagcaacgacaacagccccgccttcgagcagcagagctacatcatccagctgctggagaacagccccgtgggcaccctgctgctggacctgaacgccaccgaccccgacgagggcgccaacggcaagatcgtgtacagcttcagcagccacgtgagccccaagatcatggagaccttcaagatcgacagcgagagaggccacctgaccctgttcaagcaggtggactacgagatcaccaagagctacgagatcgacgtgcaggcccaggacctgggccccaacagcatccccgcccactgcaagatcatcatcaaggtggtggacgtgaacgacaacaagcccgagatcaacatcaacctgatgagccccggcaaggaggagatcagctacatcttcgagggcgaccccatcgacaccttcgtggccctggtgagagtgcaggacaaggacagcggcctgaacggcgagatcgtgtgcaagctgcacggccacggccacttcaagctgcagaagacctacgagaacaactacctgatcctgaccaacgccaccctggacagagagaagagaagcgagtacagcctgaccgtgatcgccgaggacagaggcacccccagcctgagcaccgtgaagcacttcaccgtgcagatcaacgacatcaacgacaaccccccccacttccagagaagcagatacgagttcgtgatcagcgagaacaacagccccggcgcctacatcaccaccgtgaccgccaccgaccccgacctgggcgagaacggccaggtgacctacaccatcctggagagcttcatcctgggcagcagcatcaccacctacgtgaccatcgaccccagcaacggcgccatctacgccctgagaatcttcgaccacgaggaggtgagccagatcaccttcgtggtggaggccagagacggcggcagccccaagcagctggtgagcaacaccaccgtggtgctgaccatcatcgacgagaacgacaacgtgcccgtggtgatcggccccgccctgagaaacaacaccgccgagatcaccatccccaagggcgccgagagcggcttccacgtgaccagaatcagagccatcgacagagacagcggcgtgaacgccgagctgagctgcgccatcgtggccggcaacgaggagaacatcttcatcatcgaccccagaagctgcgacatccacaccaacgtgagcatggacagcgtgccctacaccgagtgggagctgagcgtgatcatccaggacaagggcaacccccagctgcacaccaaggtgctgctgaagtgcatgatcttcgagtacgccgagagcgtgaccagcaccgccatgaccagcgtgagccaggccagcctggacgtgagcatgatcatcatcatcagcctgggcgccatctgcgccgtgctgctggtgatcatggtgctgttcgccaccagatgcaacagagagaagaaggacaccagaagctacaactgcagagtggccgagagcacctaccagcaccaccccaagagacccagcagacagatccacaagggcgacatcaccctggtgcccaccatcaacggcaccctgcccatcagaagccaccacagaagcagccccagcagcagccccaccctggagagaggccagatgggcagcagacagagccacaacagccaccagagcctgaacagcctggtgaccatcagcagcaaccacgtgcccgagaacttcagcctggagctgacccacgccacccccgccgtggaggtgagccagctgctgagcatgctgcaccagggccagtaccagcccagacccagcttcagaggcaacaagtacagcagaagctacagatacgccctgcaggacatggacaagttcagcctgaaggacagcggcagaggcgacagcgaggccggcgacagcgactacgacctgggcagagacagccccatcgacagactgctgggcgagggcttcagcgacctgttcctgaccgacggcagaatccccgccgccatgagactgtgcaccgaggagtgcagagtgctgggccacagcgaccagtgctggatgccccccctgcccagccccagcagcgactacagaagcaacatgttcatccccggcgaggagttccccacccagccccagcagcagcacccccaccagagcctggaggacgacgcccagcccgccgacagcggcgagaagaagaagagcttcagcaccttcggcaaggacagccccaacgacgaggacaccggcgacaccagcaccagcagcctgctgagcgagatgagcagcgtgttccagagactgctgccccccagcctggacacctacagcgagtgcagcgaggtggacagaagcaacagcctggagagaagaaagggccccctgcccgccaagaccgtgggctacccccagggcgtggccgcctgggccgccagcacccacttccagaaccccaccaccaactgcggcccccccctgggcacccacagcagcgtgcagcccagcagcaagtggctgcccgccatggaggagatccccgagaactacgaggaggacgacttcgacaacgtgctgaaccacctgaacgacggcaagcacgagctgatggacgccagcgagctggtggccgagatcaacaagctgctgcaggacgtgagacagagctag

SEQ ID NO: 95675 - DNA, 3306 bp, synthetic construct
  misc_feature 1..3306: note = Description of Artificial Sequence: Synthetic coding sequence
  source 1..3306: mol_type = other DNA
atggagagcctgctgctgcccgtgctgctgctgctggccatcctgtggacccaggccgccgccctgatcaacctgaagtacagcgtggaggaggagcagagagccggcaccgtgatcgccaacgtggccaaggacgccagagaggccggcttcgccctggaccccagacaggccagcgccttcagagtggtgagcaacagcgccccccacctggtggacatcaaccccagcagcggcctgctggtgaccaagcagaagatcgacagagacctgctgtgcagacagagccccaagtgcatcatcagcctggaggtgatgagcagcagcatggagatctgcgtgatcaaggtggagatcaaggacctgaacgacaacgcccccagcttccccgccgcccagatcgagctggagatcagcgaggccgccagccccggcaccagaatccccctggacagcgcctacgaccccgacagcggcagcttcggcgtgcagacctacgagctgacccccaacgagctgttcggcctggagatcaagaccagaggcgacggcagcagattcgccgagctggtggtggagaagagcctggacagagagacccagagccactacagcttcagaatcaccgccctggacggcggcgacccccccagactgggcaccgtgggcctgagcatcaaggtgaccgacagcaacgacaacaaccccgtgttcagcgagagcacctacgccgtgagcgtgcccgagaacagcccccccaacacccccgtgatcagactgaacgccagcgaccccgacgagggcaccaacggccaggtggtgtacagcttctacggctacgtgaacgacagaaccagagagctgttccagatcgacccccacagcggcctggtgaccgtgaccggcgccctggactacgaggagggccacgtgtacgagctggacgtgcaggccaaggacctgggccccaacagcatccccgcccactgcaaggtgaccgtgagcgtgctggacaccaacgacaacccccccgtgatcaacctgctgagcgtgaacagcgagctggtggaggtgagcgagagcgccccccccggctacgtgatcgccctggtgagagtgagcgacagagacagcggcctgaacggcagagtgcagtgcagactgctgggcaacgtgcccttcagactgcaggagtacgagagcttcagcaccatcctggtggacggcagactggacagagagcagcacgaccagtacaacctgaccatccaggccagagacggcggcgtgcccatgctgcagagcgccaagagcttcaccgtgctgatcaccgacgagaacgacaaccacccccacttcagcaagccctactaccaggtgatcgtgcaggagaacaacacccccggcgcctacctgctgagcgtgagcgccagagaccccgacctgggcctgaacggcagcgtgagctaccagatcgtgcccagccaggtgagagacatgcccgtgttcacctacgtgagcatcaaccccaacagcggcgacatctacgccctgagaagcttcaaccacgagcagaccaaggccttcgagttcaaggtgctggccaaggacggcggcctgcccagcctgcagagcaacgccaccgtgagagtgatcatcctggacgtgaacgacaacacccccgtgatcaccgccccccccctgatcaacggcaccgccgaggtgtacatccccagaaacagcggcatcggctacctggtgaccgtggtgaaggccgaggactacgacgagggcgagaacggcagagtgacctacgacatgaccgagggcgacagaggcttcttcgagatcgaccaggtgaacggcgaggtgagaaccaccagaaccttcggcgagagcagcaagagcagctacgagctgatcgtggtggcccacgaccacggcaagaccagcctgagcgccagcgccctggtgctgatctacctgagccccgccctggacgcccaggagagcatgggcagcgtgaacctgagcctgatcttcatcatcgccctgggcagcatcgccggcatcctgttcgtgaccatgatcttcgtggccatcaagtgcaagagagacaacaaggagatcagaacctacaactgcagaatcgccgagtacagctacggccaccagaagaagagcagcaagaagaagaagatcagcaagaacgacatcagactggtgcccagagacgtggaggagaccgacaagatgaacgtggtgagctgcagcagcctgaccagcagcctgaactacttcgactaccaccagcagaccctgcccctgggctgcagaagaagcgagagcaccttcctgaacgtggagaaccagaacaccagaaacaccagcgccaaccacatctaccaccacagcttcaacagccagggcccccagcagcccgacctgatcatcaacggcgtgcccctgcccgagaccgagaactacagcttcgacagcaactacgtgaacagcagagcccacctgatcaagagcagcagcaccttcaaggacctggagggcaacagcctgaaggacagcggccacgaggagagcgaccagaccgacagcgagcacgacgtgcagagaagcctgtactgcgacaccgccgtgaacgacgtgctgaacaccagcgtgaccagcatgggcagccagatgcccgaccacgaccagaacgagggcttccactgcagagaggagtgcagaatcctgggccacagcgacagatgctggatgcccagaaaccccatgcccatcagaagcaagagccccgagcacgtgagaaacatcatcgccctgagcatcgaggccaccgccgccgacgtggaggcctacgacgactgcggccccaccaagagaaccttcgccaccttcggcaaggacgtgagcgaccaccccgccgaggagagacccaccctgaagggcaagagaaccgtggacgtgaccatctgcagccccaaggtgaacagcgtgatcagagaggccggcaacggctgcgaggccatcagccccgtgaccagccccctgcacctgaagagcagcctgcccaccaagcccagcgtgagctacaccatcgccctggccccccccgccagagacctggagcagtacgtgaacaacgtgaacaacggccccaccagacccagcgaggccgagcccagaggcgccgacagcgagaaggtgatgcacgaggtgagccccatcctgaaggagggcagaaacaaggagagccccggcgtgaagagactgaaggacatcgtgctgtag

SEQ ID NO: 95676 - DNA, 3447 bp, synthetic construct
  misc_feature 1..3447: note = Description of Artificial Sequence: Synthetic coding sequence
  source 1..3447: mol_type = other DNA
atggagagcctgctgctgcccgtgctgctgctgctggccatcctgtggacccaggccgccgccctgatcaacctgaagtacagcgtggaggaggagcagagagccggcaccgtgatcgccaacgtggccaaggacgccagagaggccggcttcgccctggaccccagacaggccagcgccttcagagtggtgagcaacagcgccccccacctggtggacatcaaccccagcagcggcctgctggtgaccaagcagaagatcgacagagacctgctgtgcagacagagccccaagtgcatcatcagcctggaggtgatgagcagcagcatggagatctgcgtgatcaaggtggagatcaaggacctgaacgacaacgcccccagcttccccgccgcccagatcgagctggagatcagcgaggccgccagccccggcaccagaatccccctggacagcgcctacgaccccgacagcggcagcttcggcgtgcagacctacgagctgacccccaacgagctgttcggcctggagatcaagaccagaggcgacggcagcagattcgccgagctggtggtggagaagagcctggacagagagacccagagccactacagcttcagaatcaccgccctggacggcggcgacccccccagactgggcaccgtgggcctgagcatcaaggtgaccgacagcaacgacaacaaccccgtgttcagcgagagcacctacgccgtgagcgtgcccgagaacagcccccccaacacccccgtgatcagactgaacgccagcgaccccgacgagggcaccaacggccaggtggtgtacagcttctacggctacgtgaacgacagaaccagagagctgttccagatcgacccccacagcggcctggtgaccgtgaccggcgccctggactacgaggagggccacgtgtacgagctggacgtgcaggccaaggacctgggccccaacagcatccccgcccactgcaaggtgaccgtgagcgtgctggacaccaacgacaacccccccgtgatcaacctgctgagcgtgaacagcgagctggtggaggtgagcgagagcgccccccccggctacgtgatcgccctggtgagagtgagcgacagagacagcggcctgaacggcagagtgcagtgcagactgctgggcaacgtgcccttcagactgcaggagtacgagagcttcagcaccatcctggtggacggcagactggacagagagcagcacgaccagtacaacctgaccatccaggccagagacggcggcgtgcccatgctgcagagcgccaagagcttcaccgtgctgatcaccgacgagaacgacaaccacccccacttcagcaagccctactaccaggtgatcgtgcaggagaacaacacccccggcgcctacctgctgagcgtgagcgccagagaccccgacctgggcctgaacggcagcgtgagctaccagatcgtgcccagccaggtgagagacatgcccgtgttcacctacgtgagcatcaaccccaacagcggcgacatctacgccctgagaagcttcaaccacgagcagaccaaggccttcgagttcaaggtgctggccaaggacggcggcctgcccagcctgcagagcaacgccaccgtgagagtgatcatcctggacgtgaacgacaacacccccgtgatcaccgccccccccctgatcaacggcaccgccgaggtgtacatccccagaaacagcggcatcggctacctggtgaccgtggtgaaggccgaggactacgacgagggcgagaacggcagagtgacctacgacatgaccgagggcgacagaggcttcttcgagatcgaccaggtgaacggcgaggtgagaaccaccagaaccttcggcgagagcagcaagagcagctacgagctgatcgtggtggcccacgaccacggcaagaccagcctgagcgccagcgccctggtgctgatctacctgagccccgccctggacgcccaggagagcatgggcagcgtgaacctgagcctgatcttcatcatcgccctgggcagcatcgccggcatcctgttcgtgaccatgatcttcgtggccatcaagtgcaagagagacaacaaggagatcagaacctacaactgcagcaactgcctgaccatcacctgcctgctgggctgcttcatcaagggccagaacagcaagtgcctgcactgcatcagcgtgagccccatcagcgaggagcaggacaagaagaccgaggagaaggtgagcctgagaggcaagagaatcgccgagtacagctacggccaccagaagaagagcagcaagaagaagaagatcagcaagaacgacatcagactggtgcccagagacgtggaggagaccgacaagatgaacgtggtgagctgcagcagcctgaccagcagcctgaactacttcgactaccaccagcagaccctgcccctgggctgcagaagaagcgagagcaccttcctgaacgtggagaaccagaacaccagaaacaccagcgccaaccacatctaccaccacagcttcaacagccagggcccccagcagcccgacctgatcatcaacggcgtgcccctgcccgagaccgagaactacagcttcgacagcaactacgtgaacagcagagcccacctgatcaagagcagcagcaccttcaaggacctggagggcaacagcctgaaggacagcggccacgaggagagcgaccagaccgacagcgagcacgacgtgcagagaagcctgtactgcgacaccgccgtgaacgacgtgctgaacaccagcgtgaccagcatgggcagccagatgcccgaccacgaccagaacgagggcttccactgcagagaggagtgcagaatcctgggccacagcgacagatgctggatgcccagaaaccccatgcccatcagaagcaagagccccgagcacgtgagaaacatcatcgccctgagcatcgaggccaccgccgccgacgtggaggcctacgacgactgcggccccaccaagagaaccttcgccaccttcggcaaggacgtgagcgaccaccccgccgaggagagacccaccctgaagggcaagagaaccgtggacgtgaccatctgcagccccaaggtgaacagcgtgatcagagaggccggcaacggctgcgaggccatcagccccgtgaccagccccctgcacctgaagagcagcctgcccaccaagcccagcgtgagctacaccatcgccctggccccccccgccagagacctggagcagtacgtgaacaacgtgaacaacggccccaccagacccagcgaggccgagcccagaggcgccgacagcgagaaggtgatgcacgaggtgagccccatcctgaaggagggcagaaacaaggagagccccggcgtgaagagactgaaggacatcgtgctgtag

SEQ ID NO: 95677 - DNA, 3303 bp, synthetic construct
  misc_feature 1..3303: note = Description of Artificial Sequence: Synthetic coding sequence
  source 1..3303: mol_type = other DNA
atggagagcctgctgctgcccgtgctgctgctgctggccatcctgtggacccaggccgccgccctgatcaacctgaagtacagcgtggaggaggagcagagagccggcaccgtgatcgccaacgtggccaaggacgccagagaggccggcttcgccctggaccccagacaggccagcgccttcagagtggtgagcaacagcgccccccacctggtggacatcaaccccagcagcggcctgctggtgaccaagcagaagatcgacagagacctgctgtgcagacagagccccaagtgcatcatcagcctggaggtgatgagcagcagcatggagatctgcgtgatcaaggtggagatcaaggacctgaacgacaacgcccccagcttccccgccgcccagatcgagctggagatcagcgaggccgccagccccggcaccagaatccccctggacagcgcctacgaccccgacagcggcagcttcggcgtgcagacctacgagctgacccccaacgagctgttcggcctggagatcaagaccagaggcgacggcagcagattcgccgagctggtggtggagaagagcctggacagagagacccagagccactacagcttcagaatcaccgccctggacggcggcgacccccccagactgggcaccgtgggcctgagcatcaaggtgaccgacagcaacgacaacaaccccgtgttcagcgagagcacctacgccgtgagcgtgcccgagaacagcccccccaacacccccgtgatcagactgaacgccagcgaccccgacgagggcaccaacggccaggtggtgtacagcttctacggctacgtgaacgacagaaccagagagctgttccagatcgacccccacagcggcctggtgaccgtgaccggcgccctggactacgaggagggccacgtgtacgagctggacgtgcaggccaaggacctgggccccaacagcatccccgcccactgcaaggtgaccgtgagcgtgctggacaccaacgacaacccccccgtgatcaacctgctgagcgtgaacagcgagctggtggaggtgagcgagagcgccccccccggctacgtgatcgccctggtgagagtgagcgacagagacagcggcctgaacggcagagtgcagtgcagactgctgggcaacgtgcccttcagactgcaggagtacgagagcttcagcaccatcctggtggacggcagactggacagagagcagcacgaccagtacaacctgaccatccaggccagagacggcggcgtgcccatgctgcagagcgccaagagcttcaccgtgctgatcaccgacgagaacgacaaccacccccacttcagcaagccctactaccaggtgatcgtgcaggagaacaacacccccggcgcctacctgctgagcgtgagcgccagagaccccgacctgggcctgaacggcagcgtgagctaccagatcgtgcccagccaggtgagagacatgcccgtgttcacctacgtgagcatcaaccccaacagcggcgacatctacgccctgagaagcttcaaccacgagcagaccaaggccttcgagttcaaggtgctggccaaggacggcggcctgcccagcctgcagagcaacgccaccgtgagagtgatcatcctggacgtgaacgacaacacccccgtgatcaccgccccccccctgatcaacggcaccgccgaggtgtacatccccagaaacagcggcatcggctacctggtgaccgtggtgaaggccgaggactacgacgagggcgagaacggcagagtgacctacgacatgaccgagggcgacagaggcttcttcgagatcgaccaggtgaacggcgaggtgagaaccaccagaaccttcggcgagagcagcaagagcagctacgagctgatcgtggtggcccacgaccacggcaagaccagcctgagcgccagcgccctggtgctgatctacctgagccccgccctggacgcccaggagagcatgggcagcgtgaacctgagcctgatcttcatcatcgccctgggcagcatcgccggcatcctgttcgtgaccatgatcttcgtggccatcaagtgcaagagagacaacaaggagatcagaacctacaactgcagaatcgccgagtacagctacggccaccagaagaagagcagcaagaagaagaagatcagcaagaacgacatcagactggtgcccagagacgtggaggagaccgacaagatgaacgtggtgagctgcagcagcctgaccagcagcctgaactacttcgactaccaccagcagaccctgcccctgggctgcagaagaagcgagagcaccttcctgaacgtggagaaccagaacaccagaaacaccagcgccaaccacatctaccaccacagcttcaacagccagggcccccagcagcccgacctgatcatcaacggcgtgcccctgcccgagaccgagaactacagcttcgacagcaactacgtgaacagcagagcccacctgatcaagagcagcaccttcaaggacctggagggcaacagcctgaaggacagcggccacgaggagagcgaccagaccgacagcgagcacgacgtgcagagaagcctgtactgcgacaccgccgtgaacgacgtgctgaacaccagcgtgaccagcatgggcagccagatgcccgaccacgaccagaacgagggcttccactgcagagaggagtgcagaatcctgggccacagcgacagatgctggatgcccagaaaccccatgcccatcagaagcaagagccccgagcacgtgagaaacatcatcgccctgagcatcgaggccaccgccgccgacgtggaggcctacgacgactgcggccccaccaagagaaccttcgccaccttcggcaaggacgtgagcgaccaccccgccgaggagagacccaccctgaagggcaagagaaccgtggacgtgaccatctgcagccccaaggtgaacagcgtgatcagagaggccggcaacggctgcgaggccatcagccccgtgaccagccccctgcacctgaagagcagcctgcccaccaagcccagcgtgagctacaccatcgccctggccccccccgccagagacctggagcagtacgtgaacaacgtgaacaacggccccaccagacccagcgaggccgagcccagaggcgccgacagcgagaaggtgatgcacgaggtgagccccatcctgaaggagggcagaaacaaggagagccccggcgtgaagagactgaaggacatcgtgctgtag

SEQ ID NO: 95678 - DNA, 2094 bp, synthetic construct
  misc_feature 1..2094: note = Description of Artificial Sequence: Synthetic coding sequence
  source 1..2094: mol_type = other DNA
atgttcaccctggacgtggaggagaacgagaacggcgagagaaccccctacctgatcgtgatgggcgccctggacagagagacccaggaccagtacgtgagcatcatcatcgccgaggacggcggcagcccccccctgctgggcagcgccaccctgaccatcggcatcagcgacatcaacgacaactgccccctgttcaccgacagccagatcaacgtgaccgtgtacggcaacgccaccgtgggcacccccatcgccgccgtgcaggccgtggacaaggacctgggcaccaacgcccagatcacctacagctacagccagaaggtgccccaggccagcaaggacctgttccacctggacgagaacaccggcgtgatcaagctgttcagcaagatcggcggcagcgtgctggagagccacaagctgaccatcctggccaacggccccggctgcatccccgccgtgatcaccgccctggtgagcatcatcaaggtgatcttcagaccccccgagatcgtgcccagatacatcgccaacgagatcgacggcgtggtgtacctgaaggagctggagcccgtgaacacccccatcgccttcttcaccatcagagaccccgagggcaagtacaaggtgaactgctacctggacggcgagggccccttcagactgagcccctacaagccctacaacaacgagtacctgctggagaccaccaagcccatggactacgagctgcagcagttctacgaggtggccgtggtggcctggaacagcgagggcttccacgtgaagagagtgatcaaggtgcagctgctggacgacaacgacaacgcccccatcttcctgcagcccctgatcgagctgaccatcgaggagaacaacagccccaacgccttcctgaccaagctgtacgccaccgacgccgacagcgaggagagaggccaggtgagctacttcctgggccccgacgcccccagctacttcagcctggacagcgtgaccggcatcctgaccgtgagcacccagctggacagagaggagaaggagaagtacagatacaccgtgagagccgtggactgcggcaagccccccagagagagcgtggccaccgtggccctgaccgtgctggacaagaacgacaacagccccagattcatcaacaaggacttcagcttcttcgtgcccgagaacttccccggctacggcgagatcggcgtgatcagcgtgaccgacgccgacgccggcagaaacggctgggtggccctgagcgtggtgaaccagagcgacatcttcgtgatcgacaccggcaagggcatgctgagagccaaggtgagcctggacagagagcagcagagcagctacaccctgtgggtggaggccgtggacggcggcgagcccgccctgagcagcaccgccaagatcaccatcctgctgctggacatcaacgacaacccccccctggtgctgttcccccagagcaacatgagctacctgctggtgctgcccagcaccctgcccggcagccccgtgaccgaggtgtacgccgtggacaaggacaccggcatgaacgccgtgatcgcctacagcatcatcggcagaagaggccccagacccgagagcttcagaatcgaccccaagaccggcaacatcaccctggaggaggccctgctgcagaccgactacggcctgcacagactgctggtgaaggtgagcgaccacggctaccccgagcccctgcacagcaccgtgatggtgaacctgttcgtgaacgacaccgtgagcaacgagagctacatcgagagcctgctgagaaaggagcccgagatcaacatcgaggagaaggagccccagatcagcatcgagcccacccacagaaaggtggagagcgtgagctgcatgcccaccctggtggccctgagcgtgatcagcctgggcagcatcaccctggtgaccggcatgggcatctacatctgcctgagaaagggcgagaagcaccccagagaggacgagaacctggaggtgcagatccccctgaagggcaagatcgacctgcacatgagagagagaaagcccatggacatcagcaacatctag

SEQ ID NO: 95679 - DNA, 2856 bp, synthetic construct
  misc_feature 1..2856: note = Description of Artificial Sequence: Synthetic coding sequence
  source 1..2856: mol_type = other DNA
atgagaggcagaggcaacgccagaagcagccaggccctgggcgtgagctggtgccccgccacctggcaccccagactggacatgggcagactgcacagacccagaagcagcaccagctacagaaacctgccccacctgttcctgttcttcctgttcgtgggccccttcagctgcctgggcagctacagcagagccaccgagctgctgtacagcctgaacgagggcctgcccgccggcgtgctgatcggcagcctggccgaggacctgagactgctgcccagaagcgccggcagacccgacccccagagccagctgcccgagagaaccggcgccgagtggaacccccccctgagcttcagcctggccagcagaggcctgagcggccagtacgtgaccctggacaacagaagcggcgagctgcacaccagcgcccaggagatcgacagagaggccctgtgcgtggagggcggcggcggcaccgcctggagcggcagcgtgagcatcagcagcagccccagcgacagctgcctgctgctgctggacgtgctggtgctgccccaggagtacttcagattcgtgaaggtgaagatcgccatcagagacatcaacgacaacgccccccagttccccgtgagccagatcagcgtgtgggtgcccgagaacgcccccgtgaacaccagactggccatcgagcaccccgccgtggaccccgacgtgggcatcaacggcgtgcagacctacagactgctggactaccacggcatgttcaccctggacgtggaggagaacgagaacggcgagagaaccccctacctgatcgtgatgggcgccctggacagagagacccaggaccagtacgtgagcatcatcatcgccgaggacggcggcagcccccccctgctgggcagcgccaccctgaccatcggcatcagcgacatcaacgacaactgccccctgttcaccgacagccagatcaacgtgaccgtgtacggcaacgccaccgtgggcacccccatcgccgccgtgcaggccgtggacaaggacctgggcaccaacgcccagatcacctacagctacagccagaaggtgccccaggccagcaaggacctgttccacctggacgagaacaccggcgtgatcaagctgttcagcaagatcggcggcagcgtgctggagagccacaagctgaccatcctggccaacggccccggctgcatccccgccgtgatcaccgccctggtgagcatcatcaaggtgatcttcagaccccccgagatcgtgcccagatacatcgccaacgagatcgacggcgtggtgtacctgaaggagctggagcccgtgaacacccccatcgccttcttcaccatcagagaccccgagggcaagtacaaggtgaactgctacctggacggcgagggccccttcagactgagcccctacaagccctacaacaacgagtacctgctggagaccaccaagcccatggactacgagctgcagcagttctacgaggtggccgtggtggcctggaacagcgagggcttccacgtgaagagagtgatcaaggtgcagctgctggacgacaacgacaacgcccccatcttcctgcagcccctgatcgagctgaccatcgaggagaacaacagccccaacgccttcctgaccaagctgtacgccaccgacgccgacagcgaggagagaggccaggtgagctacttcctgggccccgacgcccccagctacttcagcctggacagcgtgaccggcatcctgaccgtgagcacccagctggacagagaggagaaggagaagtacagatacaccgtgagagccgtggactgcggcaagccccccagagagagcgtggccaccgtggccctgaccgtgctggacaagaacgacaacagccccagattcatcaacaaggacttcagcttcttcgtgcccgagaacttccccggctacggcgagatcggcgtgatcagcgtgaccgacgccgacgccggcagaaacggctgggtggccctgagcgtggtgaaccagagcgacatcttcgtgatcgacaccggcaagggcatgctgagagccaaggtgagcctggacagagagcagcagagcagctacaccctgtgggtggaggccgtggacggcggcgagcccgccctgagcagcaccgccaagatcaccatcctgctgctggacatcaacgacaacccccccctggtgctgttcccccagagcaacatgagctacctgctggtgctgcccagcaccctgcccggcagccccgtgaccgaggtgtacgccgtggacaaggacaccggcatgaacgccgtgatcgcctacagcatcatcggcagaagaggccccagacccgagagcttcagaatcgaccccaagaccggcaacatcaccctggaggaggccctgctgcagaccgactacggcctgcacagactgctggtgaaggtgagcgaccacggctaccccgagcccctgcacagcaccgtgatggtgaacctgttcgtgaacgacaccgtgagcaacgagagctacatcgagagcctgctgagaaaggagcccgagatcaacatcgaggagaaggagccccagatcagcatcgagcccacccacagaaaggtggagagcgtgagctgcatgcccaccctggtggccctgagcgtgatcagcctgggcagcatcaccctggtgaccggcatgggcatctacatctgcctgagaaagggcgagaagcaccccagagaggacgagaacctggaggtgcagatccccctgaagggcaagatcgacctgcacatgagagagagaaagcccatggacatcagcaacatctag

SEQ ID NO: 95680 - DNA, 2856 bp, synthetic construct; identical to SEQ ID NO: 95679
  misc_feature 1..2856: note = Description of Artificial Sequence: Synthetic coding sequence
  source 1..2856: mol_type = other DNA

SEQ ID NO: 95681 - DNA, 3603 bp, synthetic construct
  misc_feature 1..3603: note = Description of Artificial Sequence: Synthetic coding sequence
  source 1..3603: mol_type = other DNA
atgctgagaatgagaaccgccggctgggccagaggctggtgcctgggctgctgcctgctgctgcccctgagcctgagcctggccgccgccaagcagctgctgagatacagactggccgaggagggccccgccgacgtgagaatcggcaacgtggccagcgacctgggcatcgtgaccggcagcggcgaggtgaccttcagcctggagagcggcagcgagtacctgaagatcgacaacctgaccggcgagctgagcaccagcgagagaagaatcgacagagagaagctgccccagtgccagatgatcttcgacgagaacgagtgcttcctggacttcgaggtgagcgtgatcggccccagccagagctgggtggacctgttcgagggccaggtgatcgtgctggacatcaacgacaacacccccaccttccccagccccgtgctgaccctgaccgtggaggagaacagacccgtgggcaccctgtacctgctgcccaccgccaccgacagagacttcggcagaaacggcatcgagagatacgagctgctgcaggagcccggcggcggcggcagcggcggcgagagcagaagagccggcgccgccgacagcgccccctaccccggcggcggcggcaacggcgccagcggcggcggcagcggcggcagcaagagaagactggacgccagcgagggcggcggcggcaccaaccccggcggcagaagcagcgtgttcgagctgcaggtggccgacacccccgacggcgagaagcagccccagctgatcgtgaagggcgtgtacgaggccgacctggccgagaacagcgcccccggcacccccatcctgcagctgagagccgccgacctggacgtgggcgtgaacggccagatcgagtacgtgttcggcgccgccaccgagagcgtgagaagactgctgagactggacgagaccagcggctggctgagcgtgctgcacagaatcgacagagaggaggtgaaccagctgagattcaccgtgatggccagagacagaggccagccccccaagaccgacaaggccaccgtggtgctgaacatcaaggacgagaacgacaacgtgcccagcatcgagatcagaaagatcggcagaatccccctgaaggacggcgtggccaacgtggccgaggacgtgctggtggacacccccatcgccctggtgcaggtgagcgacagagaccagggcgagaacggcgtggtgacctgcaccgtggtgggcgacgtgcccttccagctgaagcccgccagcgacaccgagggcgaccagaacaagaagaagtacttcctgcacaccagcacccccctggactacgaggccaccagagagttcaacgtggtgatcgtggccgtggacagcggcagccccagcctgagcagcaacaacagcctgatcgtgaaggtgggcgacaccaacgacaacccccccatgttcggccagagcgtggtggaggtgtacttccccgagaacaacatccccggcgagagagtggccaccgtgctggccaccgacgccgacagcggcaagaacgccgagatcgcctacagcctggacagcagcgtgatgggcatcttcgccatcgaccccgacagcggcgacatcctggtgaacaccgtgctggacagagagcagaccgacagatacgagttcaaggtgaacgccaaggacaagggcatccccgtgctgcagggcagcaccaccgtgatcgtgcaggtggccgacaagaacgacaacgaccccaagttcatgcaggacgtgttcaccttctacgtgaaggagaacctgcagcccaacagccccgtgggcatggtgaccgtgatggacgccgacaagggcagaaacgccgagatgagcctgtacatcgaggagaacaacaacatcttcagcatcgagaacgacaccggcaccatctacagcaccatgagcttcgacagagagcaccagaccacctacaccttcagagtgaaggccgtggacggcggcgacccccccagaagcgccaccgccaccgtgagcctgttcgtgatggacgagaacgacaacgcccccaccgtgaccctgcccaagaacatcagctacaccctgctgccccccagcagcaacgtgagaaccgtggtggccaccgtgctggccaccgacagcgacgacggcatcaacgccgacctgaactacagcatcgtgggcggcaaccccttcaagctgttcgagatcgaccccaccagcggcgtggtgagcctggtgggcaagctgacccagaagcactacggcctgcacagactggtggtgcaggtgaacgacagcggccagcccagccagagcaccaccaccctggtgcacgtgttcgtgaacgagagcgtgagcaacgccaccgccatcgacagccagatcgccagaagcctgcacatccccctgacccaggacatcgccggcgaccccagctacgagatcagcaagcagagactgagcatcgtgatcggcgtggtggccggcatcatgaccgtgatcctgatcatcctgatcgtggtgatggccagatactgcagaagcaagaacaagaacggctacgaggccggcaagaaggaccacgaggacttcttcaccccccagcagcacgacaagagcaagaagcccaagaaggacaagaagaacaagaagagcaagcagcccctgtacagcagcatcgtgaccgtggaggccagcaagcccaacggccagagatacgacagcgtgaacgagaagctgagcgacagccccagcatgggcagatacagaagcgtgaacggcggccccggcagccccgacctggccagacactacaagagcagcagccccctgcccaccgtgcagctgcacccccagagccccaccgccggcaagaagcaccaggccgtgcaggacctgccccccgccaacaccttcgtgggcgccggcgacaacatcagcatcggcagcgaccactgcagcgagtacagctgccagaccaacaacaagtacagcaagcagcccttcagaagagtgaccttcagcgtggtgagccagccccaggacccccaccagggcagcctgcagagctgctacgacagcggcctggaggagagcgagacccccagcagcaagagcagcagcggccccagactgggcgccctgcccctgcccgaggacaactacgagagaaccacccccgacggcagcgtggacagcagacccctgcccgacgtggccctgaccggcaagtgcaccagagagtgcgacgagtacggccacagcgacagctgctggatgcccgtgagaaccagccccgagagaaagaagagccagcccaagctgagcaccttcatgcccgtggacgagagaggcagccaggagaagctggccaacggcgaggccgccatcatgggcgacagaaacagaaacctgctgaacaagaagctgaccagcagctacgagaccttcagcgccgccagcttcagcaagaacgaggaggccaaccccgaggacatccccctgaccaagaccggcgagtacaagcccagccccgtgaacaccctgaccagaagagaggtgtacctgtag

SEQ ID NO: 95682 - DNA, 3210 bp, synthetic construct
  misc_feature 1..3210: note = Description of Artificial Sequence: Synthetic coding sequence
  source 1..3210: mol_type = other DNA
atgctgagaatgagaaccgccggctgggccagaggctggtgcctgggctgctgcctgctgctgcccctgagcctgagcctggccgccgccaagcagctgctgagatacagactggccgaggagggccccgccgacgtgagaatcggcaacgtggccagcgacctgggcatcgtgaccggcagcggcgaggtgaccttcagcctggagagcggcagcgagtacctgaagatcgacaacctgaccggcgagctgagcaccagcgagagaagaatcgacagagagaagctgccccagtgccagatgatcttcgacgagaacgagtgcttcctggacttcgaggtgagcgtgatcggccccagccagagctgggtggacctgttcgagggccaggtgatcgtgctggacatcaacgacaacacccccaccttccccagccccgtgctgaccctgaccgtggaggagaacagacccgtgggcaccctgtacctgctgcccaccgccaccgacagagacttcggcagaaacggcatcgagagatacgagctgctgcaggagcccggcggcggcggcagcggcggcgagagcagaagagccggcgccgccgacagcgccccctaccccggcggcggcggcaacggcgccagcggcggcggcagcggcggcagcaagagaagactggacgccagcgagggcggcggcggcaccaaccccggcggcagaagcagcgtgttcgagctgcaggtggccgacacccccgacggcgagaagcagccccagctgatcgtgaagggcgccctggacagagagcagagagacagctacgagctgaccctgagagtgagagacggcggcgacccccccagaagcagccaggccatcctgagagtgctgatcaccgacgtgaacgacaacagccccagattcgagaagagcgtgtacgaggccgacctggccgagaacagcgcccccggcacccccatcctgcagctgagagccgccgacctggacgtgggcgtgaacggccagatcgagtacgtgttcggcgccgccaccgagagcgtgagaagactgctgagactggacgagaccagcggctggctgagcgtgctgcacagaatcgacagagaggaggtgaaccagctgagattcaccgtgatggccagagacagaggccagccccccaagaccgacaaggccaccgtggtgctgaacatcaaggacgagaacgacaacgtgcccagcatcgagatcagaaagatcggcagaatccccctgaaggacggcgtggccaacgtggccgaggacgtgctggtggacacccccatcgccctggtgcaggtgagcgacagagaccagggcgagaacggcgtggtgacctgcaccgtggtgggcgacgtgcccttccagctgaagcccgccagcgacaccgagggcgaccagaacaagaagaagtacttcctgcacaccagcacccccctggactacgaggccaccagagagttcaacgtggtgatcgtggccgtggacagcggcagccccagcctgagcagcaacaacagcctgatcgtgaaggtgggcgacaccaacgacaacccccccatgttcggccagagcgtggtggaggtgtacttccccgagaacaacatccccggcgagagagtggccaccgtgctggccaccgacgccgacagcggcaagaacgccgagatcgcctacagcctggacagcagcgtgatgggcatcttcgccatcgaccccgacagcggcgacatcctggtgaacaccgtgctggacagagagcagaccgacagatacgagttcaaggtgaacgccaaggacaagggcatccccgtgctgcagggcagcaccaccgtgatcgtgcaggtggccgacaagaacgacaacgaccccaagttcatgcaggacgtgttcaccttctacgtgaaggagaacctgcagcccaacagccccgtgggcatggtgaccgtgatggacgccgacaagggcagaaacgccgagatgagcctgtacatcgaggagaacaacaacatcttcagcatcgagaacgacaccggcaccatctacagcaccatgagcttcgacagagagcaccagaccacctacaccttcagagtgaaggccgtggacggcggcgacccccccagaagcgccaccgccaccgtgagcctgttcgtgatggacgagaacgacaacgcccccaccgtgaccctgcccaagaacatcagctacaccctgctgccccccagcagcaacgtgagaaccgtggtggccaccgtgctggccaccgacagcgacgacggcatcaacgccgacctgaactacagcatcgtgggcggcaaccccttcaagctgttcgagatcgaccccaccagcggcgtggtgagcctggtgggcaagctgacccagaagcactacggcctgcacagactggtggtgcaggtgaacgacagcggccagcccagccagagcaccaccaccctggtgcacgtgttcgtgaacgagagcgtgagcaacgccaccgccatcgacagccagatcgccagaagcctgcacatccccctgacccaggacatcgccggcgaccccagctacgagatcagcaagcagagactgagcatcgtgatcggcgtggtggccggcatcatgaccgtgatcctgatcatcctgatcgtggtgatggccagatactgcagaagcaagaacaagaacggctacgaggccggcaagaaggaccacgaggacttcttcaccccccagcagcacgacaagagcaagaagcccaagaaggacaagaagaacaagaagagcaagcagcccctgtacagcagcatcgtgaccgtggaggccagcaagcccaacggccagagatacgacagcgtgaacgagaagctgagcgacagccccagcatgggcagatacagaagcgtgaacggcggccccggcagccccgacctggccagacactacaagagcagcagccccctgcccaccgtgcagctgcacccccagagccccaccgccggcaagaagcaccaggccgtgcaggacctgccccccgccaacaccttcgtgggcgccggcgacaacatcagcatcggcagcgaccactgcagcgagtacagctgccagaccaacaacaagtacagcaagcagatgagactgcacccctacatcaccgtgttcggctag

SEQ ID NO: 95683 - DNA, 3768 bp, synthetic construct
  misc_feature 1..3768: note = Description of Artificial Sequence: Synthetic coding sequence
  source 1..3768: mol_type = other DNA
atgctgagaatgagaaccgccggctgggccagaggctggtgcctgggctgctgcctgctgctgcccctgagcctgagcctggccgccgccaagcagctgctgagatacagactggccgaggagggccccgccgacgtgagaatcggcaacgtggccagcgacctgggcatcgtgaccggcagcggcgaggtgaccttcagcctggagagcggcagcgagtacctgaagatcgacaacctgaccggcgagctgagcaccagcgagagaagaatcgacagagagaagctgccccagtgccagatgatcttcgacgagaacgagtgcttcctggacttcgaggtgagcgtgatcggccccagccagagctgggtggacctgttcgagggccaggtgatcgtgctggacatcaacgacaacacccccaccttccccagccccgtgctgaccctgaccgtggaggagaacagacccgtgggcaccctgtacctgctgcccaccgccaccgacagagacttcggcagaaacggcatcgagagatacgagctgctgcaggagcccggcggcggcggcagcggcggcgagagcagaagagccggcgccgccgacagcgccccctaccccggcggcggcggcaacggcgccagcggcggcggcagcggcggcagcaagagaagactggacgccagcgagggcggcggcggcaccaaccccggcggcagaagcagcgtgttcgagctgcaggtggccgacacccccgacggcgagaagcagccccagctgatcgtgaagggcgccctggacagagagcagagagacagctacgagctgaccctgagagtgagagacggcggcgacccccccagaagcagccaggccatcctgagagtgctgatcaccgacgtgaacgacaacagccccagattcgagaagagcgtgtacgaggccgacctggccgagaacagcgcccccggcacccccatcctgcagctgagagccgccgacctggacgtgggcgtgaacggccagatcgagtacgtgttcggcgccgccaccgagagcgtgagaagactgctgagactggacgagaccagcggctggctgagcgtgctgcacagaatcgacagagaggaggtgaaccagctgagattcaccgtgatggccagagacagaggccagccccccaagaccgacaaggccaccgtggtgctgaacatcaaggacgagaacgacaacgtgcccagcatcgagatcagaaagatcggcagaatccccctgaaggacggcgtggccaacgtggccgaggacgtgctggtggacacccccatcgccctggtgcaggtgagcgacagagaccagggcgagaacggcgtggtgacctgcaccgtggtgggcgacgtgcccttccagctgaagcccgccagcgacaccgagggcgaccagaacaagaagaagtacttcctgcacaccagcacccccctggactacgaggccaccagagagttcaacgtggtgatcgtggccgtggacagcggcagccccagcctgagcagcaacaacagcctgatcgtgaaggtgggcgacaccaacgacaacccccccatgttcggccagagcgtggtggaggtgtacttccccgagaacaacatccccggcgagagagtggccaccgtgctggccaccgacgccgacagcggcaagaacgccgagatcgcctacagcctggacagcagcgtgatgggcatcttcgccatcgaccccgacagcggcgacatcctggtgaacaccgtgctggacagagagcagaccgacagatacgagttcaaggtgaacgccaaggacaagggcatccccgtgctgcagggcagcaccaccgtgatcgtgcaggtggccgacaagaacgacaacgaccccaagttcatgcaggacgtgttcaccttctacgtgaaggagaacctgcagcccaacagccccgtgggcatggtgaccgtgatggacgccgacaagggcagaaacgccgagatgagcctgtacatcgaggagaacaacaacatcttcagcatcgagaacgacaccggcaccatctacagcaccatgagcttcgacagagagcaccagaccacctacaccttcagagtgaaggccgtggacggcggcgacccccccagaagcgccaccgccaccgtgagcctgttcgtgatggacgagaacgacaacgcccccaccgtgaccctgcccaagaacatcagctacaccctgctgccccccagcagcaacgtgagaaccgtggtggccaccgtgctggccaccgacagcgacgacggcatcaacgccgacctgaactacagcatcgtgggcggcaaccccttcaagctgttcgagatcgaccccaccagcggcgtggtgagcctggtgggcaagctgacccagaagcactacggcctgcacagactggtggtgcaggtgaacgacagcggccagcccagccagagcaccaccaccctggtgcacgtgttcgtgaacgagagcgtgagcaacgccaccgccatcgacagccagatcgccagaagcctgcacatccccctgacccaggacatcgccggcgaccccagctacgagatcagcaagcagagactgagcatcgtgatcggcgtggtggccggcatcatgaccgtgatcctgatcatcctgatcgtggtgatggccagatactgcagaagcaagaacaagaacggctacgaggccggcaagaaggaccacgaggacttcttcaccccccagcagcacgacaagagcaagaagcccaagaaggacaagaagaacaagaagagcaagcagcccctgtacagcagcatcgtgaccgtggaggccagcaagcccaacggccagagatacgacagcgtgaacgagaagctgagcgacagccccagcatgggcagatacagaagcgtgaacggcggccccggcagccccgacctggccagacactacaagagcagcagccccctgcccaccgtgcagctgcacccccagagccccaccgccggcaagaagcaccaggccgtgcaggacctgccccccgccaacaccttcgtgggcgccggcgacaacatcagcatcggcagcgaccactgcagcgagtacagctgccagaccaacaacaagtacagcaagcagcccttcagaagagtgaccttcagcgtggtgagccagccccaggacccccaccagggcagcctgcagagctgctacgacagcggcctggaggagagcgagacccccagcagcaagagcagcagcggccccagactgggcgccctgcccctgcccgaggacaactacgagagaaccacccccgacggcagcgtgggcgaggccgagcacatggagaacgacagcagacccctgcccgacgtggccctgaccggcaagtgcaccagagagtgcgacgagtacggccacagcgacagctgctggatgcccgtgagaaccagccccgagagaaagaagagccagcccaagctgagcaccttcatgcccgtggacgagagaggcagccaggagaagctggccaacggcgaggccgccatcatgggcgacagaaacagaaacctgctgaacaagaagctgaccagcagctacgagaccttcagcgccgccagcttcagcaagaacgaggaggccaaccccgaggacatccccctgaccaagaccggcgagtacaagcccagccccgtgaacaccctgaccagaagagaggtgtacctgtag

SEQ ID NO: 95684 - DNA, 2922 bp, synthetic construct
  misc_feature 1..2922: note = Description of Artificial Sequence: Synthetic coding sequence
  source 1..2922: mol_type = other DNA
atgagccccgtgagaagatggggcagcccctgcctgttccccctgcagctgttcagcctgtgctgggtgctgagcgtggcccagagcaagaccgtgagatacagcaccttcgaggaggacgcccccggcaccgtgatcggcaccctggccgaggacctgcacatgaaggtgagcggcgacaccagcttcagactgatgaagcagttcaacagcagcctgctgagagtgagagagggcgacggccagctgaccgtgggcgacgccggcctggacagagagagactgtgcggccaggccccccagtgcgtgctggccttcgacgtggtgagcttcagccaggagcagttcagactggtgcacgtggaggtggaggtgagagacgtgaacgaccacgcccccagattccccagagcccagatccccgtggaggtgagcgagggcgccgccgtgggcaccagaatccccctggaggtgcccgtggacgaggacgtgggcgccaacggcctgcagaccgtgagactggccgagccccacagccccttcagagtggagctgcagaccagagccgacggcgcccagtgcgccgacctggtgctgctgcaggagctggacagagagagccaggccgcctacagcctggagctggtggcccaggacggcggcagaccccccagaagcgccaccgccgccctgagcgtgagagtgctggacgccaacgaccacagccccgccttcccccagggcgccgtggccgaggtggagctggccgaggacgcccccgtgggcagcctgctgctggacctggacgccgccgaccccgacgagggccccaacggcgacgtggtgttcgccttcggcgccagaaccccccccgaggccagaagactgttcagactggaccccagaagcggcagactgaccctggccggccccgtggactacgagagacaggacacctacgagctggacgtgagagcccaggacagaggccccggccccagagccgccacctgcaaggtgatcgtgagaatcagagacgtgaacgacaacgcccccgacatcgccatcacccccctggccgcccccggcgcccccgccaccagccccttcgccgccgccgccgccgccgccgccctgggcggcgccgacgccagcagccccgccggcgccggcacccccgaggccggcgccaccagcctggtgcccgagggcgccgccagagagagcctggtggccctggtgagcaccagcgacagagacagcggcgccaacggccaggtgagatgcgccctgtacggccacgagcacttcagactgcagcccgcctacgccggcagctacctggtggtgaccgccgccagcctggacagagagagaatcgccgagtacaacctgaccctggtggccgaggacagaggcgccccccccctgagaaccgtgagaccctacaccgtgagagtgggcgacgagaacgacaacgcccccctgttcaccagacccgtgtacgaggtgagcgtgagagagaacaacccccccggcgcctacctggccaccgtggccgccagagacagagacctgggcagaaacggccaggtgacctacagactgctggaggccgaggtgggcagagccggcggcgccgtgagcacctacgtgagcgtggaccccgccaccggcgccatctacgccctgagaagcttcgactacgagaccctgagacagctggacgtgagaatccaggccagcgacggcggcagcccccagctgagcagcagcgccctggtgcaggtgagagtgctggaccagaacgaccacgcccccgtgctggtgcaccccgcccccgccaacggcagcctggaggtggccgtgcccggcagaaccgccaaggacaccgtggtggccagagtgcaggccagagacgccgacgagggcgccaacggcgagctggccttcgagctgcagcagcaggagcccagagaggccttcgccatcggcagaagaaccggcgagatcctgctgaccggcgacctgagccaggagccccccggcagagtgttcagagccctgctggtgatcagcgacggcggcagaccccccctgaccaccaccgccaccgtgagcttcgtggtgaccgccggcggcggcagaggccccgccgcccccgccagcgccggcagccccgagagaagcagaccccccggcagcagactgggcgtgagcggcagcgtgctgcagtgggacacccccctgatcgtgatcatcgtgctggccggcagctgcaccctgctgctggccgccatcatcgccatcgccaccacctgcaacagaagaaagaaggagccctacggcgccagccccggcttcggcaaggagcccgccccccccgtggccgtgtggaagggccacagcttcaacaccatcagcggcagagaggccgagaagttcagcggcaaggacagcggcaagggcgacagcgacttcaacgacagcgacagcgacatcagcggcgacgccctgaagaaggacctgatcaaccacatgcagagcggcctgtgggcctgcaccgccgagtgcaagatcctgggccacagcgacagatgctggagccccagctgcagcggccccaacgcccaccccagcccccacccccccgcccagatgagcaccttctgcaagagcaccagcctgcccagagaccccctgagaagagacaactactaccaggcccagctgcccaagaccgtgggcctgcagagcgtgtacgagaaggtgctgcacagagactacgacagaaccgtgaccctgctgagcccccccagacccggcagactgcccgacctgcaggagatcggcgtgcccctgtaccagagcccccccggcagatacctgagccccaagaagggcgccaacgagaacgtgtag

SEQ ID NO: 95685 - DNA, 3213 bp, synthetic construct
  misc_feature 1..3213: note = Description of Artificial Sequence: Synthetic coding sequence
  source 1..3213: mol_type = other DNA
atgagccccgtgagaagatggggcagcccctgcctgttccccctgcagctgttcagcctgtgctgggtgctgagcgtggcccagagcaagaccgtgagatacagcaccttcgaggaggacgcccccggcaccgtgatcggcaccctggccgaggacctgcacatgaaggtgagcggcgacaccagcttcagactgatgaagcagttcaacagcagcctgctgagagtgagagagggcgacggccagctgaccgtgggcgacgccggcctggacagagagagactgtgcggccaggccccccagtgcgtgctggccttcgacgtggtgagcttcagccaggagcagttcagactggtgcacgtggaggtggaggtgagagacgtgaacgaccacgcccccagattccccagagcccagatccccgtggaggtgagcgagggcgccgccgtgggcaccagaatccccctggaggtgcccgtggacgaggacgtgggcgccaacggcctgcagaccgtgagactggccgagccccacagccccttcagagtggagctgcagaccagagccgacggcgcccagtgcgccgacctggtgctgctgcaggagctggacagagagagccaggccgcctacagcctggagctggtggcccaggacggcggcagaccccccagaagcgccaccgccgccctgagcgtgagagtgctggacgccaacgaccacagccccgccttcccccagggcgccgtggccgaggtggagctggccgaggacgcccccgtgggcagcctgctgctggacctggacgccgccgaccccgacgagggccccaacggcgacgtggtgttcgccttcggcgccagaaccccccccgaggccagaagactgttcagactggaccccagaagcggcagactgaccctggccggccccgtggactacgagagacaggacacctacgagctggacgtgagagcccaggacagaggccccggccccagagccgccacctgcaaggtgatcgtgagaatcagagacgtgaacgacaacgcccccgacatcgccatcacccccctggccgcccccggcgcccccgccaccagccccttcgccgccgccgccgccgccgccgccctgggcggcgccgacgccagcagccccgccggcgccggcacccccgaggccggcgccaccagcctggtgcccgagggcgccgccagagagagcctggtggccctggtgagcaccagcgacagagacagcggcgccaacggccaggtgagatgcgccctgtacggccacgagcacttcagactgcagcccgcctacgccggcagctacctggtggtgaccgccgccagcctggacagagagagaatcgccgagtacaacctgaccctggtggccgaggacagaggcgccccccccctgagaaccgtgagaccctacaccgtgagagtgggcgacgagaacgacaacgcccccctgttcaccagacccgtgtacgaggtgagcgtgagagagaacaacccccccggcgcctacctggccaccgtggccgccagagacagagacctgggcagaaacggccaggtgacctacagactgctggaggccgaggtgggcagagccggcggcgccgtgagcacctacgtgagcgtggaccccgccaccggcgccatctacgccctgagaagcttcgactacgagaccctgagacagctggacgtgagaatccaggccagcgacggcggcagcccccagctgagcagcagcgccctggtgcaggtgagagtgctggaccagaacgaccacgcccccgtgctggtgcaccccgcccccgccaacggcagcctggaggtggccgtgcccggcagaaccgccaaggacaccgtggtggccagagtgcaggccagagacgccgacgagggcgccaacggcgagctggccttcgagctgcagcagcaggagcccagagaggccttcgccatcggcagaagaaccggcgagatcctgctgaccggcgacctgagccaggagccccccggcagagtgttcagagccctgctggtgatcagcgacggcggcagaccccccctgaccaccaccgccaccgtgagcttcgtggtgaccgccggcggcggcagaggccccgccgcccccgccagcgccggcagccccgagagaagcagaccccccggcagcagactgggcgtgagcggcagcgtgctgcagtgggacacccccctgatcgtgatcatcgtgctggccggcagctgcaccctgctgctggccgccatcatcgccatcgccaccacctgcaacagaagaaagaaggaggtgagaaagggcggcgccctgagagaggagagacccggcgccgccggcggcggcgccagcgcccccggcagccccgaggaggccgccagaggcgccggccccagacccaacatgttcgacgtgctgaccttccccggcaccggcaaggcccccttcggcagccccgccgccgacgcccccccccccgccgtggccgccgccgaggtgcccggcagcgagggcggcagcgccaccggcgagagcgcctgccacttcgagggccagcagagactgagaggcgcccacgccgagccctacggcgccagccccggcttcggcaaggagcccgccccccccgtggccgtgtggaagggccacagcttcaacaccatcagcggcagagaggccgagaagttcagcggcaaggacagcggcaagggcgacagcgacttcaacgacagcgacagcgacatcagcggcgacgccctgaagaaggacctgatcaaccacatgcagagcggcctgtgggcctgcaccgccgagtgcaagatcctgggccacagcgacagatgctggagccccagctgcagcggccccaacgcccaccccagcccccacccccccgcccagatgagcaccttctgcaagagcaccagcctgcccagagaccccctgagaagagacaactactaccaggcccagctgcccaagaccgtgggcctgcagagcgtgtacgagaaggtgctgcacagagactacgacagaaccgtgaccctgctgagcccccccagacccggcagactgcccgacctgcaggagatcggcgtgcccctgtaccagagcccccccggcagatacctgagccccaagaagggcgccaacgagaacgtgtag

SEQ ID NO: 95686 - DNA, 1791 bp, synthetic construct
  misc_feature 1..1791: note = Description of Artificial Sequence: Synthetic coding sequence
  source 1..1791: mol_type = other DNA
atgagccccgtgagaagatggggcagcccctgcctgttccccctgcagctgttcagcctgtgctgggtgctgagcgtggcccagagcaagaccgtgagatacagcaccttcgaggaggacgcccccggcaccgtgatcggcaccctggccgaggacctgcacatgaaggtgagcggcgacaccagcttcagactgatgaagcagttcaacagcagcctgctgagagtgagagagggcgacggccagctgaccgtgggcgacgccggcctggacagagagagactgtgcggccaggccccccagtgcgtgctggccttcgacgtggtgagcttcagccaggagcagttcagactggtgcacgtggaggtggaggtgagagacgtgaacgaccacgcccccgtgctggtgcaccccgcccccgccaacggcagcctggaggtggccgtgcccggcagaaccgccaaggacaccgtggtggccagagtgcaggccagagacgccgacgagggcgccaacggcgagctggccttcgagctgcagcagcaggagcccagagaggccttcgccatcggcagaagaaccggcgagatcctgctgaccggcgacctgagccaggagccccccggcagagtgttcagagccctgctggtgatcagcgacggcggcagaccccccctgaccaccaccgccaccgtgagcttcgtggtgaccgccggcggcggcagaggccccgccgcccccgccagcgccggcagccccgagagaagcagaccccccggcagcagactgggcgtgagcggcagcgtgctgcagtgggacacccccctgatcgtgatcatcgtgctggccggcagctgcaccctgctgctggccgccatcatcgccatcgccaccacctgcaacagaagaaagaaggaggtgagaaagggcggcgccctgagagaggagagacccggcgccgccggcggcggcgccagcgcccccggcagccccgaggaggccgccagaggcgccggccccagacccaacatgttcgacgtgctgaccttccccggcaccggcaaggcccccttcggcagccccgccgccgacgcccccccccccgccgtggccgccgccgaggtgcccggcagcgagggcggcagcgccaccggcgagagcgcctgccacttcgagggccagcagagactgagaggcgcccacgccgagccctacggcgccagccccggcttcggcaaggagcccgccccccccgtggccgtgtggaagggccacagcttcaacaccatcagcggcagagaggccgagaagttcagcggcaaggacagcggcaagggcgacagcgacttcaacgacagcgacagcgacatcagcggcgacgccctgaagaaggacctgatcaaccacatgcagagcggcctgtgggcctgcaccgccgagtgcaagatcctgggccacagcgacagatgctggagccccagctgcagcggccccaacgcccaccccagcccccacccccccgcccagatgagcaccttctgcaagagcaccagcctgcccagagaccccctgagaagagacaactactaccaggcccagctgcccaagaccgtgggcctgcagagcgtgtacgagaaggtgctgcacagagactacgacagaaccgtgaccctgctgagcccccccagacccggcagactgcccgacctgcaggagatcggcgtgcccctgtaccagagcccccccggcagatacctgagccccaagaagggcgccaacgagaacgtgtag

SEQ ID NO: 95687 - DNA, 2742 bp, synthetic construct
  misc_feature 1..2742: note = Description of Artificial Sequence: Synthetic coding sequence
  source 1..2742: mol_type = other DNA
atgagccccgtgagaagatggggcagcccctgcctgttccccctgcagctgttcagcctgtgctgggtgctgagcgtggcccagagcaagaccgtgagatacagcaccttcgaggaggacgcccccggcaccgtgatcggcaccctggccgaggacctgcacatgaaggtgagcggcgacaccagcttcagactgatgaagcagttcaacagcagcctgctgagagtgagagagggcgacggccagctgaccgtgggcgacgccggcctggacagagagagactgtgcggccaggccccccagtgcgtgctggccttcgacgtggtgagcttcagccaggagcagttcagactggtgcacgtggaggtggaggtgagagacgtgaacgaccacgcccccagattccccagagcccagatccccgtggaggtgagcgagggcgccgccgtgggcaccagaatccccctggaggtgcccgtggacgaggacgtgggcgccaacggcctgcagaccgtgagactggccgagccccacagccccttcagagtggagctgcagaccagagccgacggcgcccagtgcgccgacctggtgctgctgcaggagctggacagagagagccaggccgcctacagcctggagctggtggcccaggacggcggcagaccccccagaagcgccaccgccgccctgagcgtgagagtgctggacgccaacgaccacagccccgccttcccccagggcgccgtggccgaggtggagctggccgaggacgcccccgtgggcagcctgctgctggacctggacgccgccgaccccgacgagggccccaacggcgacgtggtgttcgccttcggcgccagaaccccccccgaggccagaagactgttcagactggaccccagaagcggcagactgaccctggccggccccgtggactacgagagacaggacacctacgagctggacgtgagagcccaggacagaggccccggccccagagccgccacctgcaaggtgatcgtgagaatcagagacgtgaacgacaacgcccccgacatcgccatcacccccctggccgcccccggcgccggcaacctgaccctgagaagaaacggccaggtgacctacagactgctggaggccgaggtgggcagagccggcggcgccgtgagcacctacgtgagcgtggaccccgccaccggcgccatctacgccctgagaagcttcgactacgagaccctgagacagctggacgtgagaatccaggccagcgacggcggcagcccccagctgagcagcagcgccctggtgcaggtgagagtgctggaccagaacgaccacgcccccgtgctggtgcaccccgcccccgccaacggcagcctggaggtggccgtgcccggcagaaccgccaaggacaccgtggtggccagagtgcaggccagagacgccgacgagggcgccaacggcgagctggccttcgagctgcagcagcaggagcccagagaggccttcgccatcggcagaagaaccggcgagatcctgctgaccggcgacctgagccaggagccccccggcagagtgttcagagccctgctggtgatcagcgacggcggcagaccccccctgaccaccaccgccaccgtgagcttcgtggtgaccgccggcggcggcagaggccccgccgcccccgccagcgccggcagccccgagagaagcagaccccccggcagcagactgggcgtgagcggcagcgtgctgcagtgggacacccccctgatcgtgatcatcgtgctggccggcagctgcaccctgctgctggccgccatcatcgccatcgccaccacctgcaacagaagaaagaaggaggtgagaaagggcggcgccctgagagaggagagacccggcgccgccggcggcggcgccagcgcccccggcagccccgaggaggccgccagaggcgccggccccagacccaacatgttcgacgtgctgaccttccccggcaccggcaaggcccccttcggcagccccgccgccgacgcccccccccccgccgtggccgccgccgaggtgcccggcagcgagggcggcagcgccaccggcgagagcgcctgccacttcgagggccagcagagactgagaggcgcccacgccgagccctacggcgccagccccggcttcggcaaggagcccgccccccccgtggccgtgtggaagggccacagcttcaacaccatcagcggcagagaggccgagaagttcagcggcaaggacagcggcaagggcgacagcgacttcaacgacagcgacagcgacatcagcggcgacgccctgaagaaggacctgatcaaccacatgcagagcggcctgtgggcctgcaccgccgagtgcaagatcctgggccacagcgacagatgctggagccccagctgcagcggccccaacgcccaccccagcccccacccccccgcccagatgagcaccttctgcaagagcaccagcctgcccagagaccccctgagaagagacaactactaccaggcccagctgcccaagaccgtgggcctgcagagcgtgtacgagaaggtgctgcacagagactacgacagaaccgtgaccctgctgagcccccccagacccggcagactgcccgacctgcaggagatcggcgtgcccctgtaccagagcccccccggcagatacctgagccccaagaagggcgccaacgagaacgtgtag

SEQ ID NO: 95688 - DNA, 3612 bp, synthetic construct
  misc_feature 1..3612: note = Description of Artificial Sequence: Synthetic coding sequence
  source 1..3612: mol_type = other DNA
atggacctgagagacttctacctgctggccgccctgatcgcctgcctgagactggacagcgccatcgcccaggagctgatctacaccatcagagaggagctgcccgagaacgtgcccatcggcaacatccccaaggacctgaacatcagccacatcaacgccgccaccggcaccagcgccagcctggtgtacagactggtgagcaaggccggcgacgcccccctggtgaaggtgagcagcagcaccggcgagatcttcaccaccagcaacagaatcgacagagagaagctgtgcgccggcgccagctacgccgaggagaacgagtgcttcttcgagctggaggtggtgatcctgcccaacgacttcttcagactgatcaagatcaagatcatcgtgaaggacaccaacgacaacgcccccatgttccccagccccgtgatcaacatcagcatccccgagaacaccctgatcaacagcagattccccatccccagcgccaccgaccccgacaccggcttcaacggcgtgcagcactacgagctgctgaacggccagagcgtgttcggcctggacatcgtggagacccccgagggcgagaagtggccccagctgatcgtgcagcagaacctggacagagagcagaaggacacctacgtgatgaagatcaaggtggaggacggcggcaccccccagaagagcagcaccgccatcctgcaggtgaccgtgagcgacgtgaacgacaacagacccgtgttcaaggagggccaggtggaggtgcacatccccgagaacgcccccgtgggcaccagcgtgatccagctgcacgccaccgacgccgacatcggcagcaacgccgagatcagatacatcttcggcgcccaggtggcccccgccaccaagagactgttcgccctgaacaacaccaccggcctgatcaccgtgcagagaagcctggacagagaggagaccgccatccacaaggtgaccgtgctggccagcgacggcagcagcacccccgccagagccaccgtgaccatcaacgtgaccgacgtgaacgacaacccccccaacatcgacctgagatacatcatcagccccatcaacggcaccgtgtacctgagcgagaaggaccccgtgaacaccaagatcgccctgatcaccgtgagcgacaaggacaccgacgtgaacggcaaggtgatctgcttcatcgagagagaggtgcccttccacctgaaggccgtgtacgacaaccagtacctgctggagaccagcagcctgctggactacgagggcaccaaggagttcagcttcaagatcgtggccagcgacagcggcaagcccagcctgaaccagaccgccctggtgagagtgaagctggaggacgagaacgacaacccccccatcttcaaccagcccgtgatcgagctgagcgtgagcgagaacaacagaagaggcctgtacctgaccaccatcagcgccaccgacgaggacagcggcaagaacgccgacatcgtgtaccagctgggccccaacgccagcttcttcgacctggacagaaagaccggcgtgctgaccgccagcagagtgttcgacagagaggagcaggagagattcatcttcaccgtgaccgccagagacaacggcaccccccccctgcagagccaggccgccgtgatcgtgaccgtgctggacgagaacgacaacagccccaagttcacccacaaccacttccagttcttcgtgagcgagaacctgcccaagtacagcaccgtgggcgtgatcaccgtgaccgacgccgacgccggcgagaacaaggccgtgaccctgagcatcctgaacgacaacgacaacttcgtgctggacccctacagcggcgtgatcaagagcaacgtgagcttcgacagagagcagcagagcagctacaccttcgacgtgaaggccaccgacggcggccagccccccagaagcagcaccgccaaggtgaccatcaacgtgatggacgtgaacgacaacagccccgtggtgatcagcccccccagcaacaccagcttcaagctggtgcccctgagcgccatccccggcagcgtggtggccgaggtgttcgccgtggacgtggacaccggcatgaacgccgagctgaagtacaccatcgtgagcggcaacaacaagggcctgttcagaatcgaccccgtgaccggcaacatcaccctggaggagaagcccgcccccaccgacgtgggcctgcacagactggtggtgaacatcagcgacctgggctaccccaagagcctgcacaccctggtgctggtgttcctgtacgtgaacgacaccgccggcaacgccagctacatctacgacctgatcagaagaaccatggagacccccctggacagaaacatcggcgacagcagccagccctaccagaacgaggactacctgaccatcatgatcgccatcatcgccggcgccatggtggtgatcgtggtgatcttcgtgaccgtgctggtgagatgcagacacgccagcagattcaaggccgcccagagaagcaagcagggcgccgagtggatgagccccaaccaggagaacaagcagaacaagaagaagaagagaaagaagagaaagagccccaagagcagcctgctgaacttcgtgaccatcgaggagagcaagcccgacgacgccgtgcacgagcccatcaacggcaccatcagcctgcccgccgagctggaggagcagagcatcggcagattcgactggggccccgccccccccaccaccttcaagcccaacagccccgacctggccaagcactacaagagcgccagcccccagcccgccttccacctgaagcccgacacccccgtgagcgtgaagaagcaccacgtgatccaggagctgcccctggacaacaccttcgtgggcggctgcgacaccctgagcaagagaagcagcaccagcagcgaccacttcagcgccagcgagtgcagcagccagggcggcttcaagaccaagggccccctgcacaccagacagagccagagaagagtgaccttccacctgcccgacggcagccaggagagctgcagcgacagcggcctgggcgaccacgagcccgtgggcagcggcaccctgatcagccaccccctgcccctggtgcagccccaggacgagttctacgaccaggccagccccgacaagagaaccgaggccgacggcaacagcgaccccaacagcgacggccccctgggccccagaggcctggccgaggccaccgagatgtgcacccaggagtgcctggtgctgggccacagcgacaactgctggatgccccccggcctgggcccctaccagcaccccaagagccccctgagcaccttcgccccccagaaggagtgggtgaagaaggacaagctggtgaacggccacaccctgaccagagcctggaaggaggacagcaacagaaaccagttcaacgacagaaagcagtacggcagcaacgagggccacttcaacaacggcagccacatgaccgacatccccctggccaacctgaagagctacaagcaggccggcggcgccaccgagagccccaaggagcaccagctgtag

SEQ ID NO: 95689 - DNA, 3099 bp, synthetic construct
  misc_feature 1..3099: note = Description of Artificial Sequence: Synthetic coding sequence
  source 1..3099: mol_type = other DNA
atggacctgagagacttctacctgctggccgccctgatcgcctgcctgagactggacagcgccatcgcccaggagctgatctacaccatcagagaggagctgcccgagaacgtgcccatcggcaacatccccaaggacctgaacatcagccacatcaacgccgccaccggcaccagcgccagcctggtgtacagactggtgagcaaggccggcgacgcccccctggtgaaggtgagcagcagcaccggcgagatcttcaccaccagcaacagaatcgacagagagaagctgtgcgccggcgccagctacgccgaggagaacgagtgcttcttcgagctggaggtggtgatcctgcccaacgacttcttcagactgatcaagatcaagatcatcgtgaaggacaccaacgacaacgcccccatgttccccagccccgtgatcaacatcagcatccccgagaacaccctgatcaacagcagattccccatccccagcgccaccgaccccgacaccggcttcaacggcgtgcagcactacgagctgctgaacggccagagcgtgttcggcctggacatcgtggagacccccgagggcgagaagtggccccagctgatcgtgcagcagaacctggacagagagcagaaggacacctacgtgatgaagatcaaggtggaggacggcggcaccccccagaagagcagcaccgccatcctgcaggtgaccgtgagcgacgtgaacgacaacagacccgtgttcaaggagggccaggtggaggtgcacatccccgagaacgcccccgtgggcaccagcgtgatccagctgcacgccaccgacgccgacatcggcagcaacgccgagatcagatacatcttcggcgcccaggtggcccccgccaccaagagactgttcgccctgaacaacaccaccggcctgatcaccgtgcagagaagcctggacagagaggagaccgccatccacaaggtgaccgtgctggccagcgacggcagcagcacccccgccagagccaccgtgaccatcaacgtgaccgacgtgaacgacaacccccccaacatcgacctgagatacatcatcagccccatcaacggcaccgtgtacctgagcgagaaggaccccgtgaacaccaagatcgccctgatcaccgtgagcgacaaggacaccgacgtgaacggcaaggtgatctgcttcatcgagagagaggtgcccttccacctgaaggccgtgtacgacaaccagtacctgctggagaccagcagcctgctggactacgagggcaccaaggagttcagcttcaagatcgtggccagcgacagcggcaagcccagcctgaaccagaccgccctggtgagagtgaagctggaggacgagaacgacaacccccccatcttcaaccagcccgtgatcgagctgagcgtgagcgagaacaacagaagaggcctgtacctgaccaccatcagcgccaccgacgaggacagcggcaagaacgccgacatcgtgtaccagctgggccccaacgccagcttcttcgacctggacagaaagaccggcgtgctgaccgccagcagagtgttcgacagagaggagcaggagagattcatcttcaccgtgaccgccagagacaacggcaccccccccctgcagagccaggccgccgtgatcgtgaccgtgctggacgagaacgacaacagccccaagttcacccacaaccacttccagttcttcgtgagcgagaacctgcccaagtacagcaccgtgggcgtgatcaccgtgaccgacgccgacgccggcgagaacaaggccgtgaccctgagcatcctgaacgacaacgacaacttcgtgctggacccctacagcggcgtgatcaagagcaacgtgagcttcgacagagagcagcagagcagctacaccttcgacgtgaaggccaccgacggcggccagccccccagaagcagcaccgccaaggtgaccatcaacgtgatggacgtgaacgacaacagccccgtggtgatcagcccccccagcaacaccagcttcaagctggtgcccctgagcgccatccccggcagcgtggtggccgaggtgttcgccgtggacgtggacaccggcatgaacgccgagctgaagtacaccatcgtgagcggcaacaacaagggcctgttcagaatcgaccccgtgaccggcaacatcaccctggaggagaagcccgcccccaccgacgtgggcctgcacagactggtggtgaacatcagcgacctgggctaccccaagagcctgcacaccctggtgctggtgttcctgtacgtgaacgacaccgccggcaacgccagctacatctacgacctgatcagaagaaccatggagacccccctggacagaaacatcggcgacagcagccagccctaccagaacgaggactacctgaccatcatgatcgccatcatcgccggcgccatggtggtgatcgtggtgatcttcgtgaccgtgctggtgagatgcagacacgccagcagattcaaggccgcccagagaagcaagcagggcgccgagtggatgagccccaaccaggagaacaagcagaacaagaagaagaagagaaagaagagaaagagccccaagagcagcctgctgaacttcgtgaccatcgaggagagcaagcccgacgacgccgtgcacgagcccatcaacggcaccatcagcctgcccgccgagctggaggagcagagcatcggcagattcgactggggccccgccccccccaccaccttcaagcccaacagccccgacctggccaagcactacaagagcgccagcccccagcccgccttccacctgaagcccgacacccccgtgagcgtgaagaagcaccacgtgatccaggagctgcccctggacaacaccttcgtgggcggctgcgacaccctgagcaagagaagcagcaccagcagcgaccacttcagcgccagcgagtgcagcagccagggcggcttcaagaccaagggccccctgcacaccagacaggtgaacgagcacttctactggagcatcagcaccgcctacaagtgccccgtgaaccagtactag

SEQ ID NO: 95690 - DNA, 3714 bp, synthetic construct
  misc_feature 1..3714: note = Description of Artificial Sequence: Synthetic coding sequence
  source 1..3714: mol_type = other DNA
atggacctgagagacttctacctgctggccgccctgatcgcctgcctgagactggacagcgccatcgcccaggagctgatctacaccatcagagaggagctgcccgagaacgtgcccatcggcaacatccccaaggacctgaacatcagccacatcaacgccgccaccggcaccagcgccagcctggtgtacagactggtgagcaaggccggcgacgcccccctggtgaaggtgagcagcagcaccggcgagatcttcaccaccagcaacagaatcgacagagagaagctgtgcgccggcgccagctacgccgaggagaacgagtgcttcttcgagctggaggtggtgatcctgcccaacgacttcttcagactgatcaagatcaagatcatcgtgaaggacaccaacgacaacgcccccatgttccccagccccgtgatcaacatcagcatccccgagaacaccctgatcaacagcagattccccatccccagcgccaccgaccccgacaccggcttcaacggcgtgcagcactacgagctgctgaacggccagagcgtgttcggcctggacatcgtggagacccccgagggcgagaagtggccccagctgatcgtgcagcagaacctggacagagagcagaaggacacctacgtgatgaagatcaaggtggaggacggcggcaccccccagaagagcagcaccgccatcctgcaggtgaccgtgagcgacgtgaacgacaacagacccgtgttcaaggagggccaggtggaggtgcacatccccgagaacgcccccgtgggcaccagcgtgatccagctgcacgccaccgacgccgacatcggcagcaacgccgagatcagatacatcttcggcgcccaggtggcccccgccaccaagagactgttcgccctgaacaacaccaccggcctgatcaccgtgcagagaagcctggacagagaggagaccgccatccacaaggtgaccgtgctggccagcgacggcagcagcacccccgccagagccaccgtgaccatcaacgtgaccgacgtgaacgacaacccccccaacatcgacctgagatacatcatcagccccatcaacggcaccgtgtacctgagcgagaaggaccccgtgaacaccaagatcgccctgatcaccgtgagcgacaaggacaccgacgtgaacggcaaggtgatctgcttcatcgagagagaggtgcccttccacctgaaggccgtgtacgacaaccagtacctgctggagaccagcagcctgctggactacgagggcaccaaggagttcagcttcaagatcgtggccagcgacagcggcaagcccagcctgaaccagaccgccctggtgagagtgaagctggaggacgagaacgacaacccccccatcttcaaccagcccgtgatcgagctgagcgtgagcgagaacaacagaagaggcctgtacctgaccaccatcagcgccaccgacgaggacagcggcaagaacgccgacatcgtgtaccagctgggccccaacgccagcttcttcgacctggacagaaagaccggcgtgctgaccgccagcagagtgttcgacagagaggagcaggagagattcatcttcaccgtgaccgccagagacaacggcaccccccccctgcagagccaggccgccgtgatcgtgaccgtgctggacgagaacgacaacagccccaagttcacccacaaccacttccagttcttcgtgagcgagaacctgcccaagtacagcaccgtgggcgtgatcaccgtgaccgacgccgacgccggcgagaacaaggccgtgaccctgagcatcctgaacgacaacgacaacttcgtgctggacccctacagcggcgtgatcaagagcaacgtgagcttcgacagagagcagcagagcagctacaccttcgacgtgaaggccaccgacggcggccagccccccagaagcagcaccgccaaggtgaccatcaacgtgatggacgtgaacgacaacagccccgtggtgatcagcccccccagcaacaccagcttcaagctggtgcccctgagcgccatccccggcagcgtggtggccgaggtgttcgccgtggacgtggacaccggcatgaacgccgagctgaagtacaccatcgtgagcggcaacaacaagggcctgttcagaatcgaccccgtgaccggcaacatcaccctggaggagaagcccgcccccaccgacgtgggcctgcacagactggtggtgaacatcagcgacctgggctaccccaagagcctgcacaccctggtgctggtgttcctgtacgtgaacgacaccgccggcaacgccagctacatctacgacctgatcagaagaaccatggagacccccctggacagaaacatcggcgacagcagccagccctaccagaacgaggactacctgaccatcatgatcgccatcatcgccggcgccatggtggtgatcgtggtgatcttcgtgaccgtgctggtgagatgcagacacgccagcagattcaaggccgcccagagaagcaagcagggcgccgagtggatgagccccaaccaggagaacaagcagaacaagaagaagaagagaaagaagagaaagagccccaagagcagcctgctgaacttcgtgaccatcgaggagagcaagcccgacgacgccgtgcacgagcccatcaacggcaccatcagcctgcccgccgagctggaggagcagagcatcggcagattcgactggggccccgccccccccaccaccttcaagcccaacagccccgacctggccaagcactacaagagcgccagcccccagcccgccttccacctgaagcccgacacccccgtgagcgtgaagaagcaccacgtgatccaggagctgcccctggacaacaccttcgtgggcggctgcgacaccctgagcaagagaagcagcaccagcagcgaccacttcagcgccagcgagtgcagcagccagggcggcttcaagaccaagggccccctgcacaccagacagtgcaacagccacagcaagagcgacaacatccccgtgaccccccagaagtgccccagcagcaccggcttccacatccaggagaacgaggagagccactacgagagccagagaagagtgaccttccacctgcccgacggcagccaggagagctgcagcgacagcggcctgggcgaccacgagcccgtgggcagcggcaccctgatcagccaccccctgcccctggtgcagccccaggacgagttctacgaccaggccagccccgacaagagaaccgaggccgacggcaacagcgaccccaacagcgacggccccctgggccccagaggcctggccgaggccaccgagatgtgcacccaggagtgcctggtgctgggccacagcgacaactgctggatgccccccggcctgggcccctaccagcaccccaagagccccctgagcaccttcgccccccagaaggagtgggtgaagaaggacaagctggtgaacggccacaccctgaccagagcctggaaggaggacagcaacagaaaccagttcaacgacagaaagcagtacggcagcaacgagggccacttcaacaacggcagccacatgaccgacatccccctggccaacctgaagagctacaagcaggccggcggcgccaccgagagccccaaggagcaccagctgtag

SEQ ID NO: 95691 - DNA, 3612 bp, synthetic construct; identical to SEQ ID NO: 95688
  misc_feature 1..3612: note = Description of Artificial Sequence: Synthetic coding sequence
  source 1..3612: mol_type = other DNA

SEQ ID NO: 95692 - DNA, 3714 bp, synthetic construct; identical to SEQ ID NO: 95690
  misc_feature 1..3714: note = Description of Artificial Sequence: Synthetic coding sequence
  source 1..3714: mol_type = other DNA

SEQ ID NO: 95693 - DNA, 2424 bp, synthetic construct
  misc_feature 1..2424: note = Description of Artificial Sequence: Synthetic coding sequence
  source 1..2424: mol_type = other DNA
atggtgttcagcagaagaggcggcctgggcgccagagacctgctgctgtggctgctgctgctggccgcctgggaggtgggcagcggccagctgcactacagcatccccgaggaggccaagcacggcaccttcgtgggcagagtggcccaggacctgggcctggagctggccgagctggtgcccagactgttcagagtggccagcaagacccacagagacctgctggaggtgaacctgcagaacggcatcctgttcgtgaacagcagaatcgacagagaggagctgtgccagtggagcgccgagtgcagcatccacctggagctgatcgccgacagacccctgcaggtgttccacgtggaggtgaaggtgaaggacatcaacgacaacccccccgtgttcagaggcagagagcagatcatcttcatccccgagagcagactgctgaacagcagattccccatcgagggcgccgccgacgccgacatcggcgccaacgccctgctgacctacaccctgagccccagcgactacttcagcctggacgtggaggccagcgacgagctgagcaagagcctgtggctggagctgagaaagtacctggacagagaggagacccccgagctgcacctgctgctgaccgccaccgacggcggcaagcccgagctgcagggcaccgtggagctgctgatcaccgtgctggacgtgaacgacaacgcccccctgttcgaccaggccgtgtacagagtgcacctgctggagaccaccgccaacggcaccctggtgaccaccctgaacgccagcgacgccgacgagggcgtgaacggcgaggtggtgttcagcttcgacagcggcatcagcagagacatccaggagaagttcaaggtggacagcagcagcggcgagatcagactgatcgacaagctggactacgaggagaccaagagctacgagatccaggtgaaggccgtggacaagggcagcccccccatgagcaaccactgcaaggtgctggtgaaggtgctggacgtgaacgacaacgcccccgagctggccgtgaccagcctgtacctgcccatcagagaggacgcccccctgagcaccgtgatcgccctgatcaccgtgagcgacagagacagcggcgccaacggccaggtgacctgcagcctgatgccccacgtgcccttcaagctggtgagcaccttcaagaactactacagcctggtgctggacagcgccctggacagagagagcctgagcgtgtacgagctggtggtgaccgccagagacggcggcagccccagcctgtgggccaccgccagagtgagcgtggaggtggccgacgtgaacgacaacgcccccgccttcgcccagcccgagtacaccgtgttcgtgaaggagaacaacccccccggctgccacatcttcaccgtgagcgccagagacgccgacgcccaggagaacgccctggtgagctacagcctggtggagagaagagtgggcgagagagccctgagcaactacgtgagcgtgcacgccgagagcggcaaggtgtacgccctgcagcccctggaccacgaggagctggagctgctgcagttccaggtgagcgccagagacgccggcgtgccccccctgggcagcaacgtgaccctgcaggtgttcgtgctggacgagaacgacaacgcccccgccctgctggcccccagagtgggcggcaccatcggcgccgtgagcgagctggtgcccagactggtgggcgccggccacgtggtggccaaggtgagagccgtggacgccgacagcggctacaacgcctggctgagctacgagctgcagcccgccgccggcggcgccagaatccccttcagagtgggcctgtacaccggcgagatcagcaccaccagagtgctggacgaggccgacctgagcagatacagactgctggtgctggtgaaggaccacggcgagcccgccctgaccgccaccgccaccgtgctggtgagcctggtggagagcggccaggcccccaaggccagcagcagagccagcgtgggcgtggccggccccgaggccgccctggtggacgtgaacgtgtacctgatcatcgccatctgcgccgtgagcagcctgctggtgctgaccctgctgctgtacaccgccctgagatgcagcgtgccccccaccgagggcgcctacgtgcccggcaagcccaccctggtgtgcagcagcgccctgggcagctggagcaacagccagcagagaagacagagagtgtgcagcagcgagggcccccccaagaccgacctgatggccttcagccccggcctgagccccagcctgaacaccagcgagagaaacgagcagcccgaggccaacctggacctgagcggcaacgtgagccccaccttcgagttctggctgtag

SEQ ID NO: 95694 - DNA, 2061 bp, synthetic construct
  misc_feature 1..2061: note = Description of Artificial Sequence: Synthetic coding sequence
  source 1..2061: mol_type = other DNA
atggtgttcagcagaagaggcggcctgggcgccagagacctgctgctgtggctgctgctgctggccgcctgggaggtgggcagcggccagctgcactacagcatccccgaggaggccaagcacggcaccttcgtgggcagagtggcccaggacctgggcctggagctggccgagctggtgcccagactgttcagagtggccagcaagacccacagagacctgctggaggtgaacctgcagaacggcatcctgttcgtgaacagcagaatcgacagagaggagctgtgccagtggagcgccgagtgcagcatccacctggagctgatcgccgacagacccctgcaggtgttccacgtggaggtgaaggtgaaggacatcaacgacaacccccccgtgttcagaggcagagagcagatcatcttcatccccgagagcagactgctgaacagcagattccccatcgagggcgccgccgacgccgacatcggcgccaacgccctgctgacctacaccctgagccccagcgactacttcagcctggacgtggaggccagcgacgagctgagcaagagcctgtggctggagctgagaaagtacctggacagagaggagacccccgagctgcacctgctgctgaccgccaccgacggcggcaagcccgagctgcagggcaccgtggagctgctgatcaccgtgctggacgtgaacgacaacgcccccctgttcgaccaggccgtgtacagagtgcacctgctggagaccaccgccaacggcaccctggtgaccaccctgaacgccagcgacgccgacgagggcgtgaacggcgaggtggtgttcagcttcgacagcggcatcagcagagacatccaggagaagttcaaggtggacagcagcagcggcgagatcagactgatcgacaagctggactacgaggagaccaagagctacgagatccaggtgaaggccgtggacaagggcagcccccccatgagcaaccactgcaaggtgctggtgaaggtgctggacgtgaacgacaacgcccccgagctggccgtgaccagcctgtacctgcccatcagagaggacgcccccctgagcaccgtgatcgccctgatcaccgtgagcgacagagacagcggcgccaacggccaggtgacctgcagcctgatgccccacgtgcccttcaagctggtgagcaccttcaagaactactacagcctggtgctggacagcgccctggacagagagagcctgagcgtgtacgagctggtggtgaccgccagagacggcggcagccccagcctgtgggccaccgccagagtgagcgtggaggtggccgacgtgaacgacaacgcccccgccttcgcccagcccgagtacaccgtgttcgtgaaggagaacaacccccccggctgccacatcttcaccgtgagcgccagagacgccgacgcccaggagaacgccctggtgagctacagcctggtggagagaagagtgggcgagagagccctgagcaactacgtgagcgtgcacgccgagagcggcaaggtgtacgccctgcagcccctggaccacgaggagctggagctgctgcagttccagcccagacagcccaaccccgactggagatacagcgccagcctgagagccggcatgcacagcagcgtgcacctggaggaggccggcatcctgagagccggccccggcggccccgaccagcagtggcccaccgtgagcagcgccacccccgagcccgaggccggcgaggtgagcccccccgtgggcgccggcgtgaacagcaacagctggaccttcaagtacggccccggcaaccccaagcagagcggccccggcgagctgcccgacaagttcatcatccccggcagccccgccatcatcagcatcagacaggagcccaccaacagccagatcgacaagagcgacttcatcaccttcggcaagaaggaggagaccaagaagaagaagaagaagaagaagggcaacaagacccaggagaagaaggagaagggcaacagcaccaccgacaacagcgaccagtag

SEQ ID NO: 95695 - DNA, 2853 bp, synthetic construct
  misc_feature 1..2853: note = Description of Artificial Sequence: Synthetic coding sequence
  source 1..2853: mol_type = other DNA
atggtgttcagcagaagaggcggcctgggcgccagagacctgctgctgtggctgctgctgctggccgcctgggaggtgggcagcggccagctgcactacagcatccccgaggaggccaagcacggcaccttcgtgggcagagtggcccaggacctgggcctggagctggccgagctggtgcccagactgttcagagtggccagcaagacccacagagacctgctggaggtgaacctgcagaacggcatcctgttcgtgaacagcagaatcgacagagaggagctgtgccagtggagcgccgagtgcagcatccacctggagctgatcgccgacagacccctgcaggtgttccacgtggaggtgaaggtgaaggacatcaacgacaacccccccgtgttcagaggcagagagcagatcatcttcatccccgagagcagactgctgaacagcagattccccatcgagggcgccgccgacgccgacatcggcgccaacgccctgctgacctacaccctgagccccagcgactacttcagcctggacgtggaggccagcgacgagctgagcaagagcctgtggctggagctgagaaagtacctggacagagaggagacccccgagctgcacctgctgctgaccgccaccgacggcggcaagcccgagctgcagggcaccgtggagctgctgatcaccgtgctggacgtgaacgacaacgcccccctgttcgaccaggccgtgtacagagtgcacctgctggagaccaccgccaacggcaccctggtgaccaccctgaacgccagcgacgccgacgagggcgtgaacggcgaggtggtgttcagcttcgacagcggcatcagcagagacatccaggagaagttcaaggtggacagcagcagcggcgagatcagactgatcgacaagctggactacgaggagaccaagagctacgagatccaggtgaaggccgtggacaagggcagcccccccatgagcaaccactgcaaggtgctggtgaaggtgctggacgtgaacgacaacgcccccgagctggccgtgaccagcctgtacctgcccatcagagaggacgcccccctgagcaccgtgatcgccctgatcaccgtgagcgacagagacagcggcgccaacggccaggtgacctgcagcctgatgccccacgtgcccttcaagctggtgagcaccttcaagaactactacagcctggtgctggacagcgccctggacagagagagcctgagcgtgtacgagctggtggtgaccgccagagacggcggcagccccagcctgtgggccaccgccagagtgagcgtggaggtggccgacgtgaacgacaacgcccccgccttcgcccagcccgagtacaccgtgttcgtgaaggagaacaacccccccggctgccacatcttcaccgtgagcgccagagacgccgacgcccaggagaacgccctggtgagctacagcctggtggagagaagagtgggcgagagagccctgagcaactacgtgagcgtgcacgccgagagcggcaaggtgtacgccctgcagcccctggaccacgaggagctggagctgctgcagttccaggtgagcgccagagacgccggcgtgccccccctgggcagcaacgtgaccctgcaggtgttcgtgctggacgagaacgacaacgcccccgccctgctggcccccagagtgggcggcaccatcggcgccgtgagcgagctggtgcccagactggtgggcgccggccacgtggtggccaaggtgagagccgtggacgccgacagcggctacaacgcctggctgagctacgagctgcagcccgccgccggcggcgccagaatccccttcagagtgggcctgtacaccggcgagatcagcaccaccagagtgctggacgaggccgacctgagcagatacagactgctggtgctggtgaaggaccacggcgagcccgccctgaccgccaccgccaccgtgctggtgagcctggtggagagcggccaggcccccaaggccagcagcagagccagcgtgggcgtggccggccccgaggccgccctggtggacgtgaacgtgtacctgatcatcgccatctgcgccgtgagcagcctgctggtgctgaccctgctgctgtacaccgccctgagatgcagcgtgccccccaccgagggcgcctacgtgcccggcaagcccaccctggtgtgcagcagcgccctgggcagctggagcaacagccagcagagaagacagagagtgtgcagcagcgagggcccccccaagaccgacctgatggccttcagccccggcctgagccccagcctgaacaccagcgagagaaacgagcagcccgaggccaacctggacctgagcggcaaccccagacagcccaaccccgactggagatacagcgccagcctgagagccggcatgcacagcagcgtgcacctggaggaggccggcatcctgagagccggccccggcggccccgaccagcagtggcccaccgtgagcagcgccacccccgagcccgaggccggcgaggtgagcccccccgtgggcgccggcgtgaacagcaacagctggaccttcaagtacggccccggcaaccccaagcagagcggccccggcgagctgcccgacaagttcatcatccccggcagccccgccatcatcagcatcagacaggagcccaccaacagccagatcgacaagagcgacttcatcaccttcggcaagaaggaggagaccaagaagaagaagaagaagaagaagggcaacaagacccaggagaagaaggagaagggcaacagcaccaccgacaacagcgaccagtag

SEQ ID NO: 95696 - DNA, 2847 bp, synthetic construct
  misc_feature 1..2847: note = Description of Artificial Sequence: Synthetic coding sequence
  source 1..2847: mol_type = other DNA
atggtgagcagatgcagctgcctgggcgtgcagtgcctgctgctgagcctgctgctgctggccgcctgggaggtgggcagcggccagctgcactacagcgtgtacgaggaggccagacacggcaccttcgtgggcagaatcgcccaggacctgggcctggagctggccgagctggtgcagagactgttcagagtggccagcaagagacacggcgacctgctggaggtgaacctgcagaacggcatcctgttcgtgaacagcagaatcgacagagaggagctgtgcggcagaagcgtggagtgcagcatccacctggaggtgatcgtggacagacccctgcaggtgttccacgtggacgtggaggtgaaggacatcaacgacaacccccccagattcagcgtgaccgagcagaagctgagcatccccgagagcagactgctggacagcagattccccctggagggcgccagcgacgccgacgtgggcgagaacgccctgctgacctacaagctgagccccaacgagtacttcgtgctggacatcatcaacaagaaggacaaggacaagttccccgtgctggtgctgagaaagctgctggacagagaggagaacccccagctgaagctgctgctgaccgccaccgacggcggcaagcccgagttcaccggcagcgtgagcctgctgatcctggtgctggacgccaacgacaacgcccccatcttcgacagacccgtgtacgaggtgaagatgtacgagaaccaggtgaaccagaccctggtgatcagactgaacgccagcgacagcgacgagggcatcaacaaggagatgatgtacagcttcagcagcctggtgccccccaccatcagaagaaagttctggatcaacgagagaaccggcgagatcaaggtgaacgacgccatcgacttcgaggacagcaacacctacgagatccacgtggacgtgaccgacaagggcaacccccccatggtgggccactgcaccgtgctggtggagctgctggacgagaacgacaacagccccgaggtgatcgtgaccagcctgagcctgcccgtgaaggaggacgcccaggtgggcaccgtgatcgccctgatcagcgtgagcgaccacgacagcggcgccaacggccaggtgacctgcagcctgaccccccacgtgcccttcaagctggtgagcacctacaagaactactacagcctggtgctggacagcgccctggacagagagagagtgagcgcctacgagctggtggtgaccgccagagacggcggcagcccccccctgtgggccaccgccagcgtgagcgtggaggtggccgacgtgaacgacaacgcccccgccttcgcccagagcgagtacaccgtgttcgtgaaggagaacaacccccccggctgccacatcttcaccgtgagcgcctgggacgccgacgcccaggagaacgccctggtgagctacagcctggtggagagaagactgggcgagagaagcctgagcagctacgtgagcgtgcacgccgagagcggcaaggtgtacgccctgcagcccctggaccacgaggagctggagctgctgcagttccaggtgagcgccagagacggcggcgtgccccccctgggcagcaacctgaccctgcaggtgttcgtgctggacgagaacgacaacgcccccgccctgctggccagccccgccggcagcgccggcggcgccgtgagcgagctggtgctgagaagcgtggtggccggccacgtggtggccaaggtgagagccgtggacgccgacagcggctacaacgcctggctgagctacgagctgcagagcgccgccgtgggcgccagaatccccttcagagtgggcctgtacaccggcgagatcagcaccaccagagccctggacgagaccgacagccccagacagagactgctggtgctggtgaaggaccacggcgagcccagcctgaccgccaccgccaccgtgctggtgagcctggtggagggcagccaggcccccaaggccagcagcagagccagcgtgggcgtggcccccgaggtggccctggtggacgtgaacgtgtacctgatcatcgccatctgcgccgtgagcagcctgctggtgctgaccctgctgctgtacaccgccctgagatgcagcgccgcccccaccgagggcgcctgcggccccgtgaagcccaccctggtgtgcagcagcgccgtgggcagctggagctacagccagcagagaagacagagagtgtgcagcggcgagggcctgcccaaggccgacctgatggccttcagccccagcctgcccccctgccccatggtggacgtggacggcgaggaccagagcatcggcggcgaccacagcagaaagcccagacagcccaaccccgactggagatacagcgccagcctgagagccggcatgcacagcagcgtgcacctggaggaggccggcatcctgagagccggccccggcggccccgaccagcagtggcccaccgtgagcagcgccacccccgagcccgaggccggcgaggtgagcccccccgtgggcgccggcgtgaacagcaacagctggaccttcaagtacggccccggcaaccccaagcagagcggccccggcgagctgcccgacaagttcatcatccccggcagccccgccatcatcagcatcagacaggagcccaccaacagccagatcgacaagagcgacttcatcaccttcggcaagaaggaggagaccaagaagaagaagaagaagaagaagggcaacaagacccaggagaagaaggagaagggcaacagcaccaccgacaacagcgaccagtag

SEQ ID NO: 95697 - DNA, 2058 bp, synthetic construct
  misc_feature 1..2058: note = Description of Artificial Sequence: Synthetic coding sequence
  source 1..2058: mol_type = other DNA
atggtgagcagatgcagctgcctgggcgtgcagtgcctgctgctgagcctgctgctgctggccgcctgggaggtgggcagcggccagctgcactacagcgtgtacgaggaggccagacacggcaccttcgtgggcagaatcgcccaggacctgggcctggagctggccgagctggtgcagagactgttcagagtggccagcaagagacacggcgacctgctggaggtgaacctgcagaacggcatcctgttcgtgaacagcagaatcgacagagaggagctgtgcggcagaagcgtggagtgcagcatccacctggaggtgatcgtggacagacccctgcaggtgttccacgtggacgtggaggtgaaggacatcaacgacaacccccccagattcagcgtgaccgagcagaagctgagcatccccgagagcagactgctggacagcagattccccctggagggcgccagcgacgccgacgtgggcgagaacgccctgctgacctacaagctgagccccaacgagtacttcgtgctggacatcatcaacaagaaggacaaggacaagttccccgtgctggtgctgagaaagctgctggacagagaggagaacccccagctgaagctgctgctgaccgccaccgacggcggcaagcccgagttcaccggcagcgtgagcctgctgatcctggtgctggacgccaacgacaacgcccccatcttcgacagacccgtgtacgaggtgaagatgtacgagaaccaggtgaaccagaccctggtgatcagactgaacgccagcgacagcgacgagggcatcaacaaggagatgatgtacagcttcagcagcctggtgccccccaccatcagaagaaagttctggatcaacgagagaaccggcgagatcaaggtgaacgacgccatcgacttcgaggacagcaacacctacgagatccacgtggacgtgaccgacaagggcaacccccccatggtgggccactgcaccgtgctggtggagctgctggacgagaacgacaacagccccgaggtgatcgtgaccagcctgagcctgcccgtgaaggaggacgcccaggtgggcaccgtgatcgccctgatcagcgtgagcgaccacgacagcggcgccaacggccaggtgacctgcagcctgaccccccacgtgcccttcaagctggtgagcacctacaagaactactacagcctggtgctggacagcgccctggacagagagagagtgagcgcctacgagctggtggtgaccgccagagacggcggcagcccccccctgtgggccaccgccagcgtgagcgtggaggtggccgacgtgaacgacaacgcccccgccttcgcccagagcgagtacaccgtgttcgtgaaggagaacaacccccccggctgccacatcttcaccgtgagcgcctgggacgccgacgcccaggagaacgccctggtgagctacagcctggtggagagaagactgggcgagagaagcctgagcagctacgtgagcgtgcacgccgagagcggcaaggtgtacgccctgcagcccctggaccacgaggagctggagctgctgcagttccagcccagacagcccaaccccgactggagatacagcgccagcctgagagccggcatgcacagcagcgtgcacctggaggaggccggcatcctgagagccggccccggcggccccgaccagcagtggcccaccgtgagcagcgccacccccgagcccgaggccggcgaggtgagcccccccgtgggcgccggcgtgaacagcaacagctggaccttcaagtacggccccggcaaccccaagcagagcggccccggcgagctgcccgacaagttcatcatccccggcagccccgccatcatcagcatcagacaggagcccaccaacagccagatcgacaagagcgacttcatcaccttcggcaagaaggaggagaccaagaagaagaagaagaagaagaagggcaacaagacccaggagaagaaggagaagggcaacagcaccaccgacaacagcgaccagtag

SEQ ID NO: 95698 - DNA, 2850 bp, synthetic construct
  misc_feature 1..2850: note = Description of Artificial Sequence: Synthetic coding sequence
  source 1..2850: mol_type = other DNA
atgttcggcttccagagaagaggcctgggcacccccagactgcagctgtggctgctgctgctggagttctgggaggtgggcagcggccagctgcactacagcgtgagcgaggaggccaagcacggcaccttcgtgggcagaatcgcccaggacctgggcctggagctggccgagctggtgcagagactgttcagagtggccagcaagacccacggcgacctgctggaggtgaacctgcagaacggcatcctgttcgtgaacagcagaatcgacagagaggagctgtgcggccagagcgccgagtgcagcatccacctggaggtgatcgtggacagacccctgcaggtgttccacgtgaacgtggaggtgaaggacatcaacgacaacccccccgtgttcagcctgagagagcagaagctgctgatcgccgagagcaagcagagcgacagcagattccccctggagggcgccagcgacgccgacatcgaggagaacgccctgctgacctacagactgagcaagaacgagtacttcagcctggacagccccaccaacggcaagcagatcaagagactgagcctgatcctgaagaagagcctggacagagagaagacccccgagctgaacctgctgctgaccgccaccgacggcggcaagcccgagctgaccggcaccgtgagactgctggtgcaggtgctggacgtgaacgacaacgaccccgagttcgacaagagcgagtacaaggtgagcctgatggagaacgccgccaaggagaccctggtgctgaagctgaacgccaccgacagagacgagggcgtgaacggcgaggtgacctacagcctgatgagcatcaagcccaacggcagacacctgttcaccctggaccagaacaacggcgaggtgagagtgaacggcaccctggactacgaggagaacaagttctacaagatcgaggtgcaggccaccgacaagggcaccccccccatggccggccactgcaccgtgtgggtggagatcctggacaccaacgacaacagccccgaggtggccgtgaccagcctgagcctgcccgtgagagaggacgcccagcccagcaccgtgatcgccctgatcagcgtgagcgacagagacagcggcgtgaacggccaggtgacctgcagcctgaccccccacgtgcccttcaagctggtgagcaccttcaagaactactacagcctggtgctggacagcgccctggacagagagaacgtgtgggcctacgagctggtggtgaccgccagagacggcggcagccccagcctgtgggccaccgccagagtgagcgtggaggtggccgacgtgaacgacaacgcccccgccttcgcccagcccgagtacaccgtgttcgtgaaggagaacaacccccccggctgccacatcttcaccgtgagcgccagagacgccgacgcccaggagaacgccctggtgagctacagcctggtggagagaagactgggcgacagagccctgagcagctacgtgagcgtgcacgccgagagcggcaaggtgtacgccctgcagcccctggaccacgaggagctggagctgctgcagttccaggtgagcgccagagacgccggcgtgccccccctgagcagcaacgtgaccctgcaggtgttcgtgctggacgagaacgacaacgcccccgccctgctggccacccaggccggcagcgccggcggcgccgtgaacaagctggtgcccagaagcgtgggcgccggccacgtggtggccaaggtgagagccgtggacgccgacagcggctacaacgcctggctgagctacgagctgcagcccgccgccggcggcagcagaatccccttcagagtgggcctgtacaccggcgagatcagcaccaccagagccctggacgaggccgacagccccagacacagactgctggtgctggtgaaggaccacggcgagcccgccctgaccgccaccgccaccgtgctggtgagcctggtggagagcggccaggcccccaaggccagcagcagaaccctggccggcgccgccagccccgaggccgccctggtggacgtgaacgtgtacctgatcatcgccatctgcgtggtgagcagcctgctggtgctgaccctgctgctgtacaccgccctgtggtggagcgccacccccaccgagggcgcctgcgcccccggcaagcccaccctggtgtgcagcagagccgtgggcagctggagctacagccagcagagaagacagagagtgtgcagcgaggagggcccccccaagaccgacctgatggccttcagccccagcctgcccctgggcctgaacaaggaggaggagggcgagagacaggagcccggcagcaaccaccccggccagcccagacagcccaaccccgactggagatacagcgccagcctgagagccggcatgcacagcagcgtgcacctggaggaggccggcatcctgagagccggccccggcggccccgaccagcagtggcccaccgtgagcagcgccacccccgagcccgaggccggcgaggtgagcccccccgtgggcgccggcgtgaacagcaacagctggaccttcaagtacggccccggcaaccccaagcagagcggccccggcgagctgcccgacaagttcatcatccccggcagccccgccatcatcagcatcagacaggagcccaccaacagccagatcgacaagagcgacttcatcaccttcggcaagaaggaggagaccaagaagaagaagaagaagaagaagggcaacaagacccaggagaagaaggagaagggcaacagcaccaccgacaacagcgaccagtag

SEQ ID NO: 95699 - DNA, 2826 bp, synthetic construct
  misc_feature 1..2826: note = Description of Artificial Sequence: Synthetic coding sequence
  source 1..2826: mol_type = other DNA
atggtgatcatcggccccagaggccccggcagccagagactgctgctgagcctgctgctgctggccgcctgggaggtgggcagcggccagctgcactacagcgtgtacgaggaggccaagcacggcaccttcgtgggcagaatcgcccaggacctgggcctggagctggccgagctggtgcccagactgttcagagtggccagcaagagacacggcgacctgctggaggtgaacctgcagaacggcatcctgttcgtgaacagcagaatcgacagagagaagctgtgcggcagaagcgccgagtgcagcatccacctggaggtgatcgtggacagacccctgcaggtgttccacgtggacgtggaggtgaaggacatcaacgacaacccccccgtgttcagagagagagagcagaaggtgcccgtgagcgagagcgcccccctggacagccacttccccctggagggcgccagcgacgccgacatcggcgtgaacagcctgctgacctacgccctgagcctgaacgagaacttcgagctgaagatcaagaccaagaaggacaagagcatcctgcccgagctggtgctgagaaagctgctggacagagagcagacccccaagctgaacctgctgctgatggtgatcgacggcggcaagcccgagctgaccggcagcgtgcagatccagatcaccgtgctggacgtgaacgacaacggccccgccttcgacaagcccagctacaaggtggtgctgagcgagaacgtgcagaacgacaccagagtgatccagctgaacgccagcgaccccgacgagggcctgaacggcgagatcagctacggcatcaagatgatcctgcccgtgagcgagaagtgcatgttcagcatcaaccccgacaccggcgagatcagaatctacggcgagctggacttcgaggagaacaacgcctacgagatccaggtgaacgccatcgacaagggcatccccagcatggccggccacagcatggtgctggtggaggtgctggacgtgaacgacaacgtgcccgaggtgatggtgaccagcctgagcctgcccgtgcaggaggacgcccaggtgggcaccgtgatcgccctgatcagcgtgagcgacagagacagcggcgccaacggccaggtgatctgcagcctgaccccccacgtgcccttcaagctggtgagcacctacaagaactactacagcctggtgctggacagcgccctggacagagagagcgtgagcgcctacgagctggtggtgaccgccagagacggcggcagccccagcctgtgggccaccgccagagtgagcgtggaggtggccgacgtgaacgacaacgcccccgccttcgcccagcccgagtacaccgtgttcgtgaaggagaacaacccccccggctgccacatcttcaccgtgagcgcctgggacgccgacgcccagaagaacgccctggtgagctacagcctggtggagagaagagtgggcgagcacgccctgagcagctacgtgagcgtgcacgccgagagcggcaaggtgtacgccctgcagcccctggaccacgaggagctggagctgctgcagttccaggtgagcgccagagacgccggcgtgccccccctgggcagcaacgtgaccctgcaggtgttcgtgctggacgagaacgacaacgcccccgccctgctggccacccccgccggcagcgccggcggcgccgtgagcgagctggtgcccagaagcgtgggcgccggccacgtggtggccaaggtgagagccgtggacgccgacagcggctacaacgcctggctgagctacgagctgcagcccgccgccgtgggcgcccacatccccttccacgtgggcctgtacaccggcgagatcagcaccaccagaatcctggacgaggccgacgcccccagacacagactgctggtgctggtgaaggaccacggcgagcccgccctgaccagcaccgccaccgtgctggtgagcctggtggagaacggccaggcccccaagaccagcagcagagccagcgtgggcgccgtggaccccgaggccgccctggtggacatcaacgtgtacctgatcatcgccatctgcgccgtgagcagcctgctggtgctgaccctgctgctgtacaccgccctgagatgcagcgccccccccaccgtgagcagatgcgcccccggcaagcccaccctggtgtgcagcagcgccgtgggcagctggagctacagccagcagagaagacagagagtgtgcagcgccgagagcccccccaagaccgacctgatggccttcagccccagcctgcagctgagcagagaggactgcctgaacccccccagcgagcccagacagcccaaccccgactggagatacagcgccagcctgagagccggcatgcacagcagcgtgcacctggaggaggccggcatcctgagagccggccccggcggccccgaccagcagtggcccaccgtgagcagcgccacccccgagcccgaggccggcgaggtgagcccccccgtgggcgccggcgtgaacagcaacagctggaccttcaagtacggccccggcaaccccaagcagagcggccccggcgagctgcccgacaagttcatcatccccggcagccccgccatcatcagcatcagacaggagcccaccaacagccagatcgacaagagcgacttcatcaccttcggcaagaaggaggagaccaagaagaagaagaagaagaagaagggcaacaagacccaggagaagaaggagaagggcaacagcaccaccgacaacagcgaccagtag

SEQ ID NO: 95700 - DNA, 2853 bp, synthetic construct
  misc_feature 1..2853: note = Description of Artificial Sequence: Synthetic coding sequence
  source 1..2853: mol_type = other DNA
atgctgagcagctggcagggcggccccagacccagacagctgctgctgtggctgctgatcctggccgcctgggagaccggcagcggccagctgcactacagcgtgcccgaggaggccaagcacggcaccttcgtgggcagaatcgcccaggacctgggcctggagctggccgagctggtgcccagactgttcagagtggccagcaagagacacggcgacctgctggaggtgaacctgcagaacggcatcctgttcgtgaacagcagaatcgacagagaggagctgtgcggcagaagcgccgagtgcagcatccacctggaggtgatcgtggacagacccctgcaggtgttccacgtggaggtgaaggtgagagacatcaacgacaacccccccatcttccccgagagcaagaagagaatcatcatcgccgagagcagaccccccgagaccagattccccctggacggcgccagcgacgccgacatcggcgtgaacagcgccctgacctacagactggaccccaacgactacttcaccctggacgcccagaacagcctggagcagatgagcagcctgagcctggtgctgagaaagaccctggacagagaggagatccaggagcacagcctgctgctgaccgccagcgacggcggcaagcccgagctgaccggcaccgtgcagctgctgatcaccatcctggacgtgaacgacaacgcccccgagttctaccagagcgtgtacaaggtgaccgtgctggagaacgccttcaacggcaccctggtgatcaagctgaacgccaccgaccccgacgacggcaccaacggcgacatcgtgtacagcttcagaagacccgtgtggcccgccgtggtgtacgccttcaccatcaaccccaacaacggcgagatcagaaccaagggcaagctggacttcgaggagaagaagctgtacgagatcagcgtggaggccgtggacaagggcaacatccccatggccggccactgcaccctgctggtggaggtgctggacgtgaacgacaacgcccccgaggtgaccatcaccagcctgagcctgcccatcagagaggacacccagcccagcgccatcatcgccctgatcagcgtgagcgacagagacagcggcagcaacggccaggtgacctgcaccctgaccccccacgtgcccttcaagctggtgagcacctacaagaactactacagcctggtgctggacagcgccctggacagagagagcgtgagcgcctacgagctggtggtgaccgccagagacggcggcagccccagcctgtgggccaccgccagcgtgagcgtgggcgtggccgacgtgaacgacaacgcccccgccttcgcccagcccgagtacaccgtgttcgtgaaggagaacaacccccccggctgccacatcttcaccgtgagcgcccaggacgccgacgcccaggagaacgccctggtgagctacagcctggtggagagaagagtgggcgagagagccctgagcagctacgtgagcgtgcacgccgagagcggcaaggtgtacgccctgcagcccctggaccacgaggagctggagctgctgcagttccaggtgagcgccagagacagcggcgtgccccccctgggcagcaacgtgaccctgcaggtgttcgtgctggacgagaacgacaacgcccccgccctgctgacccccggcgccggcagcgccggcggcaccgtgagcgagctgatgcccagaagcgtgggcgccggccacgtggtggccaaggtgagagccgtggacgccgacagcggctacaacgcctggctgagctacgagctgcagctggccgccgtgggcgccagaatccccttcagagtgggcctgtacaccggcgagatcagcaccaccagacccctggacgaggtggacgccccccaccacagactgctggtgctggtgaaggaccacggcgagcccgccctgaccgccaccgccaccgtgctgctgagcctggtggagagcggccaggccccccaggccagcagcagagccagcgccggcgccgtgggccccgaggccgccctggtggacgtgaacgtgtacctgatcatcgccatctgcgccgtgagcagcctgctggtgctgaccctgctgctgtacaccgccctgagatgcagcgccccccccaccgagggcgcctgcgcccccggcaagcccaccctggtgtgcagcagcgccgccggcagctggagctacagccagcagagaagacccagagtgtgcagcggcgagggcccccacaagaccgacctgatggccttcagccccagcctgcccccctgcctgggcagcgccgagggcaccggccagagagaggaggacagcgagtgcctgaaggagcccagacagcccaaccccgactggagatacagcgccagcctgagagccggcatgcacagcagcgtgcacctggaggaggccggcatcctgagagccggccccggcggccccgaccagcagtggcccaccgtgagcagcgccacccccgagcccgaggccggcgaggtgagcccccccgtgggcgccggcgtgaacagcaacagctggaccttcaagtacggccccggcaaccccaagcagagcggccccggcgagctgcccgacaagttcatcatccccggcagccccgccatcatcagcatcagacaggagcccaccaacagccagatcgacaagagcgacttcatcaccttcggcaagaaggaggagaccaagaagaagaagaagaagaagaagggcaacaagacccaggagaagaaggagaagggcaacagcaccaccgacaacagcgaccagtag

SEQ ID NO: 95701 - DNA, 2715 bp, synthetic construct
  misc_feature 1..2715: note = Description of Artificial Sequence: Synthetic coding sequence
  source 1..2715: mol_type = other DNA
atgctgagcagctggcagggcggccccagacccagacagctgctgctgtggctgctgatcctggccgcctgggagaccggcagcggccagctgcactacagcgtgcccgaggaggccaagcacggcaccttcgtgggcagaatcgcccaggacctgggcctggagctggccgagctggtgcccagactgttcagagtggccagcaagagacacggcgacctgctggaggtgaacctgcagaacggcatcctgttcgtgaacagcagaatcgacagagaggagctgtgcggcagaagcgccgagtgcagcatccacctggaggtgatcgtggacagacccctgcaggtgttccacgtggaggtgaaggtgagagacatcaacgacaacccccccatcttccccgagagcaagaagagaatcatcatcgccgagagcagaccccccgagaccagattccccctggacggcgccagcgacgccgacatcggcgtgaacagcgccctgacctacagactggaccccaacgactacttcaccctggacgcccagaacagcctggagcagatgagcagcctgagcctggtgctgagaaagaccctggacagagaggagatccaggagcacagcctgctgctgaccgccagcgacggcggcaagcccgagctgaccggcaccgtgcagctgctgatcaccatcctggacgtgaacgacaacgcccccgagttctaccagagcgtgtacaaggtgaccgtgctggagaacgccttcaacggcaccctggtgatcaagctgaacgccaccgaccccgacgacggcaccaacggcgacatcgtgtacagcttcagaagacccgtgtggcccgccgtggtgtacgccttcaccatcaaccccaacaacggcgagatcagaaccaagggcaagctggacttcgaggagaagaagctgtacgagatcagcgtggaggccgtggacaagggcaacatccccatggccggccactgcaccctgctggtggaggtgctggacgtgaacgacaacgcccccgaggtgaccatcaccagcctgagcctgcccatcagagaggacacccagcccagcgccatcatcgccctgatcagcgtgagcgacagagacagcggcagcaacggccaggtgacctgcaccctgaccccccacgtgcccttcaagctggtgagcacctacaagaactactacagcctggtgctggacagcgccctggacagagagagcgtgagcgcctacgagctggtggtgaccgccagagacggcggcagccccagcctgtgggccaccgccagcgtgagcgtgggcgtggccgacgtgaacgacaacgcccccgccttcgcccagcccgagtacaccgtgttcgtgaaggagaacaacccccccggctgccacatcttcaccgtgagcgcccaggacgccgacgcccaggagaacgccctggtgagctacagcctggtggagagaagagtgggcgagagagccctgagcagctacgtgagcgtgcacgccgagagcggcaaggtgtacgccctgcagcccctggaccacgaggagctggagctgctgcagttccaggtgagcgccagagacagcggcgtgccccccctgggcagcaacgtgaccctgcaggtgttcgtgctggacgagaacgacaacgcccccgccctgctgacccccggcgccggcagcgccggcggcaccgtgagcgagctgatgcccagaagcgtgggcgccggccacgtggtggccaaggtgagagccgtggacgccgacagcggctacaacgcctggctgagctacgagctgcagctggccgccgtgggcgccagaatccccttcagagtgggcctgtacaccggcgagatcagcaccaccagacccctggacgaggtggacgccccccaccacagactgctggtgctggtgaaggaccacggcgagcccgccctgaccgccaccgccaccgtgctgctgagcctggtggagagcggccaggccccccaggccagcagcagagccagcgccggcgccgtgggccccgaggccgccctggtggacgtgaacgtgtacctgatcatcgccatctgcgccgtgagcagcctgctggtgctgaccctgctgctgtacaccgccctgagatgcagcgccccccccaccgagggcgcctgcgcccccggcaagcccaccctggtgtgcagcagcgccgccggcagctggagctacagccagcagagaagacccagagtgtgcagcggcgagggcccccacaagaccgacctgatggccttcagccccagcctgcccccctgcctgggcagcgccgagggcaccggccagagagaggaggacagcgagtgcctgaaggagcccagacagcccaaccccgactggagatacagcgccagcctgagagccggcatgcacagcagcgtgcacctggaggaggccggcatcctgagagccggccccggcggccccgaccagcagtggcccaccgtgagcagcgccacccccgagcccgaggccggcgaggtgagcccccccgtgggcgccggcgtgaacagcaacagctggaccttcaagtacggccccggcaaccccaagcagagcggccccgagcccaagaagcagacccaggtgagcttcctgctgagaagaaagggcgaggccagccagcccagacagtag

SEQ ID NO: 95702 - DNA, 2475 bp, synthetic construct
  misc_feature 1..2475: note = Description of Artificial Sequence: Synthetic coding sequence
  source 1..2475: mol_type = other DNA
atggccagcagcatcagaagaggcagaggcgcctggaccagactgctgagcctgctgctgctggccgcctgggaggtgggcagcggccagctgagatacagcgtgcccgaggaggccaagcacggcaccttcgtgggcagaatcgcccaggacctgggcctggagctggaggagctggtgcccagactgttcagagtggccagcaagagacacggcgacctgctggaggtgaacctgcagaacggcatcctgttcgtgaacagcagaatcgacagagaggagctgtgcggcagaagcgccgagtgcagcatccacgtggaggtgatcgtggacagacccctgcaggtgttccacgtggaggtggaggtgaaggacatcaacgacaacccccccatcttccccatgaccgtgaagaccatcagattccccgagagcagactgctggacagcagattccccctggagggcgccagcgacgccgacatcggcgtgaacgccctgctgagctacaagctgagcagcagcgagttcttcttcctggacatccaggccaacgacgagctgagcgagagcctgagcctggtgctgggcaagagcctggacagagaggagaccgccgaggtgaacctgctgctggtggccaccgacggcggcaagcccgagctgaccggcaccgtgcagatcctgatcaaggtgctggacgtgaacgacaacgagcccaccttcgcccagagcgtgtacaaggtgaagctgctggagaacaccgccaacggcaccctggtggtgaagctgaacgccagcgacgccgacgagggccccaacagcgagatcgtgtacagcctgggcagcgacgtgagcagcaccatccagaccaagttcaccatcgaccccatcagcggcgagatcagaaccaagggcaagctggactacgaggaggccaagagctacgagatccaggtgaccgccaccgacaagggcacccccagcatgagcggccactgcaagatcagcctgaagctggtggacatcaacgacaacacccccgaggtgagcatcaccagcctgagcctgcccatcagcgagaacgccagcctgggcaccgtgatcgccctgatcaccgtgagcgacagagacagcggcaccaacggccacgtgacctgcagcctgaccccccacgtgcccttcaagctggtgagcaccttcaagaactactacagcctggtgctggacagcgccctggacagagagagcgtgagcgcctacgagctggtggtgaccgccagagacggcggcagccccagcctgtgggccaccaccagcgtgagcatcgaggtggccgacgtgaacgacaacgcccccgccttcgcccagcccgagtacaccgtgttcgtgaaggagaacaacccccccggctgccacatcttcaccgtgagcgcctgggacgccgacgcccaggagaacgccctggtgagctacagcctggtggagagaagagtgggcgagagagccctgagcagctacgtgagcgtgcacgccgagagcggcaaggtgtacgccctgcagcccctggaccacgaggaggtggagctgctgcagttccaggtgagcgccagagacgccggcgtgccccccctgggcagcaacgtgaccctgcaggtgttcgtgctggacgagaacgacaacgcccccgccctgctggcccccagagccggcaccgccgccggcgccgtgagcgagctggtgccctggagcgtgggcgccggccacgtggtggccaaggtgagagccgtggacgccgacagcggctacaacgcctggctgagctacgagctgcagctgggcaccggcagcgccagaatccccttcagagtgggcctgtacaccggcgagatcagcaccaccagagccctggacgaggccgacagccccagacacagactgctggtgctggtgaaggaccacggcgagcccgccctgaccgccaccgccaccgtgctggtgagcctggtggagagcggccaggcccccaaggccagcagcagagcctgggtgggcgccgccggcagcgaggccaccctggtggacgtgaacgtgtacctgatcatcgccatctgcgccgtgagcagcctgctggtgctgaccgtgctgctgtacaccgccctgagatgcagcgtgccccccaccgagggcgccagagcccccggcaagcccaccctggtgtgcagcagcgccgtgggcagctggagctacagccagcagagaagacagagagtgtgcagcggcgaggacccccccaagaccgacctgatggccttcagccccagcctgagccagggccccgacagcgccgaggagaagcagctgagcgagagcgagtacgtgggcaaggtgagcctgctgctgttcctggccaacagcaagatcgtgctgttcaagaagttctacatgatcagcaccagctacctggacagctag

SEQ ID NO: 95703 - DNA, 2847 bp, synthetic construct
  misc_feature 1..2847: note = Description of Artificial Sequence: Synthetic coding sequence
  source 1..2847: mol_type = other DNA
atggccagcagcatcagaagaggcagaggcgcctggaccagactgctgagcctgctgctgctggccgcctgggaggtgggcagcggccagctgagatacagcgtgcccgaggaggccaagcacggcaccttcgtgggcagaatcgcccaggacctgggcctggagctggaggagctggtgcccagactgttcagagtggccagcaagagacacggcgacctgctggaggtgaacctgcagaacggcatcctgttcgtgaacagcagaatcgacagagaggagctgtgcggcagaagcgccgagtgcagcatccacgtggaggtgatcgtggacagacccctgcaggtgttccacgtggaggtggaggtgaaggacatcaacgacaacccccccatcttccccatgaccgtgaagaccatcagattccccgagagcagactgctggacagcagattccccctggagggcgccagcgacgccgacatcggcgtgaacgccctgctgagctacaagctgagcagcagcgagttcttcttcctggacatccaggccaacgacgagctgagcgagagcctgagcctggtgctgggcaagagcctggacagagaggagaccgccgaggtgaacctgctgctggtggccaccgacggcggcaagcccgagctgaccggcaccgtgcagatcctgatcaaggtgctggacgtgaacgacaacgagcccaccttcgcccagagcgtgtacaaggtgaagctgctggagaacaccgccaacggcaccctggtggtgaagctgaacgccagcgacgccgacgagggccccaacagcgagatcgtgtacagcctgggcagcgacgtgagcagcaccatccagaccaagttcaccatcgaccccatcagcggcgagatcagaaccaagggcaagctggactacgaggaggccaagagctacgagatccaggtgaccgccaccgacaagggcacccccagcatgagcggccactgcaagatcagcctgaagctggtggacatcaacgacaacacccccgaggtgagcatcaccagcctgagcctgcccatcagcgagaacgccagcctgggcaccgtgatcgccctgatcaccgtgagcgacagagacagcggcaccaacggccacgtgacctgcagcctgaccccccacgtgcccttcaagctggtgagcaccttcaagaactactacagcctggtgctggacagcgccctggacagagagagcgtgagcgcctacgagctggtggtgaccgccagagacggcggcagccccagcctgtgggccaccaccagcgtgagcatcgaggtggccgacgtgaacgacaacgcccccgccttcgcccagcccgagtacaccgtgttcgtgaaggagaacaacccccccggctgccacatcttcaccgtgagcgcctgggacgccgacgcccaggagaacgccctggtgagctacagcctggtggagagaagagtgggcgagagagccctgagcagctacgtgagcgtgcacgccgagagcggcaaggtgtacgccctgcagcccctggaccacgaggaggtggagctgctgcagttccaggtgagcgccagagacgccggcgtgccccccctgggcagcaacgtgaccctgcaggtgttcgtgctggacgagaacgacaacgcccccgccctgctggcccccagagccggcaccgccgccggcgccgtgagcgagctggtgccctggagcgtgggcgccggccacgtggtggccaaggtgagagccgtggacgccgacagcggctacaacgcctggctgagctacgagctgcagctgggcaccggcagcgccagaatccccttcagagtgggcctgtacaccggcgagatcagcaccaccagagccctggacgaggccgacagccccagacacagactgctggtgctggtgaaggaccacggcgagcccgccctgaccgccaccgccaccgtgctggtgagcctggtggagagcggccaggcccccaaggccagcagcagagcctgggtgggcgccgccggcagcgaggccaccctggtggacgtgaacgtgtacctgatcatcgccatctgcgccgtgagcagcctgctggtgctgaccgtgctgctgtacaccgccctgagatgcagcgtgccccccaccgagggcgccagagcccccggcaagcccaccctggtgtgcagcagcgccgtgggcagctggagctacagccagcagagaagacagagagtgtgcagcggcgaggacccccccaagaccgacctgatggccttcagccccagcctgagccagggccccgacagcgccgaggagaagcagctgagcgagagcgagtacgtgggcaagcccagacagcccaaccccgactggagatacagcgccagcctgagagccggcatgcacagcagcgtgcacctggaggaggccggcatcctgagagccggccccggcggccccgaccagcagtggcccaccgtgagcagcgccacccccgagcccgaggccggcgaggtgagcccccccgtgggcgccggcgtgaacagcaacagctggaccttcaagtacggccccggcaaccccaagcagagcggccccggcgagctgcccgacaagttcatcatccccggcagccccgccatcatcagcatcagacaggagcccaccaacagccagatcgacaagagcgacttcatcaccttcggcaagaaggaggagaccaagaagaagaagaagaagaagaagggcaacaagacccaggagaagaaggagaagggcaacagcaccaccgacaacagcgaccagtag

SEQ ID NO: 95704 - DNA, 2853 bp, synthetic construct
  misc_feature 1..2853: note = Description of Artificial Sequence: Synthetic coding sequence
  source 1..2853: mol_type = other DNA
atgctgttcagctggagagaggaccccggcgcccagtgcctgctgctgagcctgctgctgctggccgccagcgaggtgggcagcggccagctgcactacagcgtgagcgaggaggccaagcacggcaccttcgtgggcagaatcgcccaggacctgggcctggagctggccgagctggtgcccagactgttcagagtggccagcaagagacacggcgacctgctggaggtgaacctgcagaacggcatcctgttcgtgaacagcagaatcgacagagaggagctgtgcggcagaagcgccgagtgcagcatccacctggaggtgatcgtggacagacccctgcaggtgttccacgtggaggtggaggtgaaggacatcaacgacaacgcccccgtgttccccatggccgtgaagaacctgttcatcagcgagagcagacagcccggcagcagattcagcctggagggcgccagcgacgccgacatcggcaccaacagcctgctgacctacagcctggacagcaccgagtacttcaccctggacgtgaagagaaacgacgaggagatcaagagcctgggcctggtgctgaagaagaacctgaacagagaggacacccccaagcactacctgctgatcaccgccatcgacggcggcaagcccgagctgaccggcaccacccagctgaagatcaccgtgctggacgtgaacgacaacgcccccgccttcgagagaaccatctacaaggtgagactgctggagaacgcccccaacggcaccctggtggtgaccgtgaacgccaccgacctggacgagggcgtgaacaaggacatcgcctacagcttcaacaccgacatgagcgccgacatcctgagcaagttccacctggaccccgtgaacggccagatcagcgtgaagggcaacatcgacttcgaggagagcaagagctacgagatccaggtggaggccaccgacaagggcaacccccccatgagcgaccactgcaccgtgctgctggagatcgtggacatcaacgacaacgtgcccgagctggtgatccagagcctgagcctgcccgtgctggaggacagccccctgagcaccgtgatcgccctgatcagcgtgagcgacagagacagcggcgtgaacggccaggtgacctgcagcctgaccccccacgtgcccttcaagctggtgagcaccttcaagaactactacagcctggtgctggacagccccctggacagagagagcgtgagcgcctacgagctggtggtgaccgccagagacggcggcagccccagcctgtgggccaccgccagcgtgagcgtggaggtggccgacgtgaacgacaacgcccccgccttcagccagagcgagtacaccgtgttcgtgaaggagaacaacccccccggctgccacatcttcaccgtgagcgccagagacgccgacgcccaggagaacgccctggtgagctacagcctggtggagagaagagtgggcgagagagccctgagcagctacgtgagcgtgcacgccgagagcggcaaggtgtacgccctgcagcccctggaccacgaggagctggagctgctgcagttccaggtgagcgccagagacgccggcgtgccccccctgggcagcaacgtgaccctgcaggtgttcgtgctggacgagaacgacaacgcccccgccctgctgatgcccagagtgggcggcatcggcggcgccgtgagcgagctggtgcccagaagcgtgggcgccggccacgtggtggccaaggtgagagccgtggacgccgacagcggctacaacgcctggctgagctacgagctgcagcccggcaccggcggcgccagaatccccttcagagtgggcctgtacaccggcgagatcagcaccaccagagccctggacgaggtggacgcccccagacacagactgctggtgctggtgaaggaccacggcgagcccagcctgaccgccaccgccaccgtgctggtgagcctggtggagagcggccaggcccccaaggccagcagccaggccagcgccggcgccaccggccccgaggccgccctggtggacgtgaacgtgtacctgatcgtggccatctgcgccgtgagcagcctgctggtgctgaccctgctgctgtacaccgccctgagatgcagcgccccccccaccgagggcgactgcggccccggcaagcccaccctggtgtgcagcagcgccgtgggcagctggagctacagccagcagagacagcagagagtgtgcagcggcgagggcctgcccaagaccgacctgatggccttcagccccagcctgcccccctgccccatcagcagagacagagaggagaagcaggacgtggacgtggacctgagcgccaagcccagacagcccaaccccgactggagatacagcgccagcctgagagccggcatgcacagcagcgtgcacctggaggaggccggcatcctgagagccggccccggcggccccgaccagcagtggcccaccgtgagcagcgccacccccgagcccgaggccggcgaggtgagcccccccgtgggcgccggcgtgaacagcaacagctggaccttcaagtacggccccggcaaccccaagcagagcggccccggcgagctgcccgacaagttcatcatccccggcagccccgccatcatcagcatcagacaggagcccaccaacagccagatcgacaagagcgacttcatcaccttcggcaagaaggaggagaccaagaagaagaagaagaagaagaagggcaacaagacccaggagaagaaggagaagggcaacagcaccaccgacaacagcgaccagtag

SEQ ID NO: 95705 - DNA, 2475 bp, synthetic construct
  misc_feature 1..2475: note = Description of Artificial Sequence: Synthetic coding sequence
  source 1..2475: mol_type = other DNA
atgctgttcagctggagagaggaccccggcgcccagtgcctgctgctgagcctgctgctgctggccgccagcgaggtgggcagcggccagctgcactacagcgtgagcgaggaggccaagcacggcaccttcgtgggcagaatcgcccaggacctgggcctggagctggccgagctggtgcccagactgttcagagtggccagcaagagacacggcgacctgctggaggtgaacctgcagaacggcatcctgttcgtgaacagcagaatcgacagagaggagctgtgcggcagaagcgccgagtgcagcatccacctggaggtgatcgtggacagacccctgcaggtgttccacgtggaggtggaggtgaaggacatcaacgacaacgcccccgtgttccccatggccgtgaagaacctgttcatcagcgagagcagacagcccggcagcagattcagcctggagggcgccagcgacgccgacatcggcaccaacagcctgctgacctacagcctggacagcaccgagtacttcaccctggacgtgaagagaaacgacgaggagatcaagagcctgggcctggtgctgaagaagaacctgaacagagaggacacccccaagcactacctgctgatcaccgccatcgacggcggcaagcccgagctgaccggcaccacccagctgaagatcaccgtgctggacgtgaacgacaacgcccccgccttcgagagaaccatctacaaggtgagactgctggagaacgcccccaacggcaccctggtggtgaccgtgaacgccaccgacctggacgagggcgtgaacaaggacatcgcctacagcttcaacaccgacatgagcgccgacatcctgagcaagttccacctggaccccgtgaacggccagatcagcgtgaagggcaacatcgacttcgaggagagcaagagctacgagatccaggtggaggccaccgacaagggcaacccccccatgagcgaccactgcaccgtgctgctggagatcgtggacatcaacgacaacgtgcccgagctggtgatccagagcctgagcctgcccgtgctggaggacagccccctgagcaccgtgatcgccctgatcagcgtgagcgacagagacagcggcgtgaacggccaggtgacctgcagcctgaccccccacgtgcccttcaagctggtgagcaccttcaagaactactacagcctggtgctggacagccccctggacagagagagcgtgagcgcctacgagctggtggtgaccgccagagacggcggcagccccagcctgtgggccaccgccagcgtgagcgtggaggtggccgacgtgaacgacaacgcccccgccttcagccagagcgagtacaccgtgttcgtgaaggagaacaacccccccggctgccacatcttcaccgtgagcgccagagacgccgacgcccaggagaacgccctggtgagctacagcctggtggagagaagagtgggcgagagagccctgagcagctacgtgagcgtgcacgccgagagcggcaaggtgtacgccctgcagcccctggaccacgaggagctggagctgctgcagttccaggtgagcgccagagacgccggcgtgccccccctgggcagcaacgtgaccctgcaggtgttcgtgctggacgagaacgacaacgcccccgccctgctgatgcccagagtgggcggcatcggcggcgccgtgagcgagctggtgcccagaagcgtgggcgccggccacgtggtggccaaggtgagagccgtggacgccgacagcggctacaacgcctggctgagctacgagctgcagcccggcaccggcggcgccagaatccccttcagagtgggcctgtacaccggcgagatcagcaccaccagagccctggacgaggtggacgcccccagacacagactgctggtgctggtgaaggaccacggcgagcccagcctgaccgccaccgccaccgtgctggtgagcctggtggagagcggccaggcccccaaggccagcagccaggccagcgccggcgccaccggccccgaggccgccctggtggacgtgaacgtgtacctgatcgtggccatctgcgccgtgagcagcctgctggtgctgaccctgctgctgtacaccgccctgagatgcagcgccccccccaccgagggcgactgcggccccggcaagcccaccctggtgtgcagcagcgccgtgggcagctggagctacagccagcagagacagcagagagtgtgcagcggcgagggcctgcccaagaccgacctgatggccttcagccccagcctgcccccctgccccatcagcagagacagagaggagaagcaggacgtggacgtggacctgagcgccaaggtgagcaacttctacctgttcttccccaagtgcctgtgcttcagcttcctgaacgtgagcacccccctggagatccactag

SEQ ID NO: 95706 - DNA, 2451 bp, synthetic construct
  misc_feature 1..2451: note = Description of Artificial Sequence: Synthetic coding sequence
  source 1..2451: mol_type = other DNA
atggtgtacagcagaagaggcagcctgggcagcagactgctgctgctgtggctgctgctggcctactggaaggccggcagcggccagctgcactacagcatccccgaggaggccaagcacggcaccttcgtgggcagaatcgcccaggacctgggcctggagctggccgagctggtgcccagactgttcagagtggccagcaagggcagaggcgacctgctggaggtgaacctgcagaacggcatcctgttcgtgaacagcagaatcgacagagaggagctgtgcagaagaagagccgagtgcagcatccacctggaggtgatcgtggacagacccctgcaggtgttccacgtggaggtggccgtgaaggacatcaacgacaacccccccagattcagcagacaggagcagagactgttcatcctggagagcagaatgcccgacagcagattccccctggagggcgccagcgacctggacatcggcgccaacgcccagctgagatacagactgaaccccaacgagtacttcgacctggacgtgaagaccaacgaggaggagaccaacttcctggagctggtgctgagaaagagcctggacagagaggagacccaggagcacagactgctggtgatcgccaccgacggcggcaagcccgagctgaccggcaccgtgcagctgctgatcaacgtgctggacgccaacgacaacgcccccgagttcgacaagagcatctacaacgtgagactgctggagaacgcccccagcggcaccctggtgatcaagctgaacgccagcgacgccgacgagggcatcaacaaggagatcgtgtacttcttcagcaacctggtgctggacgacgtgaagagcaagttcatcatcaacagcaacaccggcgagatcaaggtgaacggcgagctggactacgaggactacaacagctacgagatcaacatcgacgccatggacaagagcaccttccccctgagcggccactgcaaggtggtggtgaagctgctggacgtgaacgacaacacccccgagatggccatcaccaccctgttcctgcccgtgaaggaggacgcccccctgagcaccgtgatcgccctgatcagcgtgagcgacagagacagcggcgccaacggccaggtgacctgcagcctgatgccccacgtgcccttcaagctggtgagcaccttcaagaactactacagcctggtgctggacagcgccctggacagagagagcgtgagcgtgtacgagctggtggtgaccgccagagacggcggcagccccagcctgtgggccaccgccagcgtgagcgtggaggtggccgacgtgaacgacaacgcccccgccttcgcccagccccagtacaccgtgttcgtgaaggagaacaacccccccggctgccacatcttcaccgtgagcgccagagacgccgacgcccaggagaacgccctggtgagctacagcctggtggagagaagagtgggcgagagacccctgagcagctacgtgagcgtgcacgccgagagcggcaaggtgtacgccctgcagcccctggaccacgaggaggtggagctgctgcagttccaggtgagcgccagagacgccggcgtgccccccctgggcagcaacgtgaccctgcaggtgttcgtgctggacgagaacgacaacgcccccgccctgctggtgcccagagtgggcggcaccggcggcgccgtgagcgagctggtgcccagaagcgtgggcgccggccacgtggtggccaaggtgagagccgtggaccccgacagcggctacaacgcctggctgagctacgagctgcagcccgcccccggcagcgccagaatccccttcagagtgggcctgtacaccggcgagatcagcaccaccagaagcctggacgagaccgaggcccccagacacagactgctggtgctggtgaaggaccacggcgagccccccctgaccgccaccgccaccgtgctggtgagcctggtggagagcggccaggcccccaaggccagcagcagagccagcgccggcgccgtgggccccgaggccgccctggtggacgtgaacgtgtacctgatcatcgccatctgcgccgtgagcagcctgctggtgctgaccctgctgctgtacaccgccctgagatgcagcgcccagcccaccgaggccgtgtgcaccagaggcaagcccaccctgctgtgcagcagcgccgtgggcagctggagctacagccagcagagaagacagagagtgtgcagcggcgaggccccccccaagaccgacctgatggccttcagccccagcctgccccagggccccaccagcaccgacaacgtgagcttcctgatcctgaccagcatcttccccagccagttcagcaacatcaagtgccacatccaccccctgttcctgtacctgaagatcatgagctag

SEQ ID NO: 95707 - DNA, 2673 bp, synthetic construct
  misc_feature 1..2673: note = Description of Artificial Sequence: Synthetic coding sequence
  source 1..2673: mol_type = other DNA
atggtgtacagcagaagaggcagcctgggcagcagactgctgctgctgtggctgctgctggcctactggaaggccggcagcggccagctgcactacagcatccccgaggaggccaagcacggcaccttcgtgggcagaatcgcccaggacctgggcctggagctggccgagctggtgcccagactgttcagagtggccagcaagggcagaggcgacctgctggaggtgaacctgcagaacggcatcctgttcgtgaacagcagaatcgacagagaggagctgtgcagaagaagagccgagtgcagcatccacctggaggtgatcgtggacagacccctgcaggtgttccacgtggaggtggccgtgaaggacatcaacgacaacccccccagattcagcagacaggagcagagactgttcatcctggagagcagaatgcccgacagcagattccccctggagggcgccagcgacctggacatcggcgccaacgcccagctgagatacagactgaaccccaacgagtacttcgacctggacgtgaagaccaacgaggaggagaccaacttcctggagctggtgctgagaaagagcctggacagagaggagacccaggagcacagactgctggtgatcgccaccgacggcggcaagcccgagctgaccggcaccgtgcagctgctgatcaacgtgctggacgccaacgacaacgcccccgagttcgacaagagcatctacaacgtgagactgctggagaacgcccccagcggcaccctggtgatcaagctgaacgccagcgacgccgacgagggcatcaacaaggagatcgtgtacttcttcagcaacctggtgctggacgacgtgaagagcaagttcatcatcaacagcaacaccggcgagatcaaggtgaacggcgagctggactacgaggactacaacagctacgagatcaacatcgacgccatggacaagagcaccttccccctgagcggccactgcaaggtggtggtgaagctgctggacgtgaacgacaacacccccgagatggccatcaccaccctgttcctgcccgtgaaggaggacgcccccctgagcaccgtgatcgccctgatcagcgtgagcgacagagacagcggcgccaacggccaggtgacctgcagcctgatgccccacgtgcccttcaagctggtgagcaccttcaagaactactacagcctggtgctggacagcgccctggacagagagagcgtgagcgtgtacgagctggtggtgaccgccagagacggcggcagccccagcctgtgggccaccgccagcgtgagcgtggaggtggccgacgtgaacgacaacgcccccgccttcgcccagccccagtacaccgtgttcgtgaaggagaacaacccccccggctgccacatcttcaccgtgagcgccagagacgccgacgcccaggagaacgccctggtgagctacagcctggtggagagaagagtgggcgagagacccctgagcagctacgtgagcgtgcacgccgagagcggcaaggtgtacgccctgcagcccctggaccacgaggaggtggagctgctgcagttccaggtgagcgccagagacgccggcgtgccccccctgggcagcaacgtgaccctgcaggtgttcgtgctggacgagaacgacaacgcccccgccctgctggtgcccagagtgggcggcaccggcggcgccgtgagcgagctggtgcccagaagcgtgggcgccggccacgtggtggccaaggtgagagccgtggaccccgacagcggctacaacgcctggctgagctacgagctgcagcccgcccccggcagcgccagaatccccttcagagtgggcctgtacaccggcgagatcagcaccaccagaagcctggacgagaccgaggcccccagacacagactgctggtgctggtgaaggaccacggcgagccccccctgaccgccaccgccaccgtgctggtgagcctggtggagagcggccaggcccccaaggccagcagcagagccagcgccggcgccgtgggccccgaggccgccctggtggacgtgaacgtgtacctgatcatcgccatctgcgccgtgagcagcctgctggtgctgaccctgctgctgtacaccgccctgagatgcagcgcccagcccaccgaggccgtgtgcaccagaggcaagcccaccctgctgtgcagcagcgccgtgggcagctggagctacagccagcagagaagacagagagtgtgcagcggcgaggccccccccaagaccgacctgatggccttcagccccagcctgccccagggccccaccagcaccgacaaccccagacagcccaaccccgactggagatacagcgccagcctgagagccggcatgcacagcagcgtgcacctggaggaggccggcatcctgagagccggccccggcggccccgaccagcagtggcccaccgtgagcagcgccacccccgagcccgaggccggcgaggtgagcccccccgtgggcgccggcgtgaacagcaacagctggaccttcaagtacggccccggcaaccccaagcagagcggccccgagcccaagaagcagacccaggtgagcttcctgctgagaagaaagggcgaggccagccagcccagacagtag

SEQ ID NO: 95708 - DNA, 2811 bp, synthetic construct
  misc_feature 1..2811: note = Description of Artificial Sequence: Synthetic coding sequence
  source 1..2811: mol_type = other DNA
atggtgtacagcagaagaggcagcctgggcagcagactgctgctgctgtggctgctgctggcctactggaaggccggcagcggccagctgcactacagcatccccgaggaggccaagcacggcaccttcgtgggcagaatcgcccaggacctgggcctggagctggccgagctggtgcccagactgttcagagtggccagcaagggcagaggcgacctgctggaggtgaacctgcagaacggcatcctgttcgtgaacagcagaatcgacagagaggagctgtgcagaagaagagccgagtgcagcatccacctggaggtgatcgtggacagacccctgcaggtgttccacgtggaggtggccgtgaaggacatcaacgacaacccccccagattcagcagacaggagcagagactgttcatcctggagagcagaatgcccgacagcagattccccctggagggcgccagcgacctggacatcggcgccaacgcccagctgagatacagactgaaccccaacgagtacttcgacctggacgtgaagaccaacgaggaggagaccaacttcctggagctggtgctgagaaagagcctggacagagaggagacccaggagcacagactgctggtgatcgccaccgacggcggcaagcccgagctgaccggcaccgtgcagctgctgatcaacgtgctggacgccaacgacaacgcccccgagttcgacaagagcatctacaacgtgagactgctggagaacgcccccagcggcaccctggtgatcaagctgaacgccagcgacgccgacgagggcatcaacaaggagatcgtgtacttcttcagcaacctggtgctggacgacgtgaagagcaagttcatcatcaacagcaacaccggcgagatcaaggtgaacggcgagctggactacgaggactacaacagctacgagatcaacatcgacgccatggacaagagcaccttccccctgagcggccactgcaaggtggtggtgaagctgctggacgtgaacgacaacacccccgagatggccatcaccaccctgttcctgcccgtgaaggaggacgcccccctgagcaccgtgatcgccctgatcagcgtgagcgacagagacagcggcgccaacggccaggtgacctgcagcctgatgccccacgtgcccttcaagctggtgagcaccttcaagaactactacagcctggtgctggacagcgccctggacagagagagcgtgagcgtgtacgagctggtggtgaccgccagagacggcggcagccccagcctgtgggccaccgccagcgtgagcgtggaggtggccgacgtgaacgacaacgcccccgccttcgcccagccccagtacaccgtgttcgtgaaggagaacaacccccccggctgccacatcttcaccgtgagcgccagagacgccgacgcccaggagaacgccctggtgagctacagcctggtggagagaagagtgggcgagagacccctgagcagctacgtgagcgtgcacgccgagagcggcaaggtgtacgccctgcagcccctggaccacgaggaggtggagctgctgcagttccaggtgagcgccagagacgccggcgtgccccccctgggcagcaacgtgaccctgcaggtgttcgtgctggacgagaacgacaacgcccccgccctgctggtgcccagagtgggcggcaccggcggcgccgtgagcgagctggtgcccagaagcgtgggcgccggccacgtggtggccaaggtgagagccgtggaccccgacagcggctacaacgcctggctgagctacgagctgcagcccgcccccggcagcgccagaatccccttcagagtgggcctgtacaccggcgagatcagcaccaccagaagcctggacgagaccgaggcccccagacacagactgctggtgctggtgaaggaccacggcgagccccccctgaccgccaccgccaccgtgctggtgagcctggtggagagcggccaggcccccaaggccagcagcagagccagcgccggcgccgtgggccccgaggccgccctggtggacgtgaacgtgtacctgatcatcgccatctgcgccgtgagcagcctgctggtgctgaccctgctgctgtacaccgccctgagatgcagcgcccagcccaccgaggccgtgtgcaccagaggcaagcccaccctgctgtgcagcagcgccgtgggcagctggagctacagccagcagagaagacagagagtgtgcagcggcgaggccccccccaagaccgacctgatggccttcagccccagcctgccccagggccccaccagcaccgacaaccccagacagcccaaccccgactggagatacagcgccagcctgagagccggcatgcacagcagcgtgcacctggaggaggccggcatcctgagagccggccccggcggccccgaccagcagtggcccaccgtgagcagcgccacccccgagcccgaggccggcgaggtgagcccccccgtgggcgccggcgtgaacagcaacagctggaccttcaagtacggccccggcaaccccaagcagagcggccccggcgagctgcccgacaagttcatcatccccggcagccccgccatcatcagcatcagacaggagcccaccaacagccagatcgacaagagcgacttcatcaccttcggcaagaaggaggagaccaagaagaagaagaagaagaagaagggcaacaagacccaggagaagaaggagaagggcaacagcaccaccgacaacagcgaccagtag

SEQ ID NO: 95709 - DNA, 2061 bp, synthetic construct
  misc_feature 1..2061: note = Description of Artificial Sequence: Synthetic coding sequence
  source 1..2061: mol_type = other DNA
atggtgttcacccccgaggacagactgggcaagcagtgcctgctgctgcccctgctgctgctggccgcctggaaggtgggcagcggccagctgcactacagcgtgcccgaggaggccaagcacggcaccttcgtgggcagaatcgcccaggacctgggcctggagctggccgagctggtgcccagactgttcagaatggccagcaaggacagagaggacctgctggaggtgaacctgcagaacggcatcctgttcgtgaacagcagaatcgacagagaggagctgtgcggcagaagcgccgagtgcagcatccacctggaggtgatcgtggacagacccctgcaggtgttccacgtggacgtggaggtgagagacatcaacgacaacccccccctgttccccgtggaggagcagagagtgctgatctacgagagcagactgcccgacagcgtgttccccctggagggcgccagcgacgccgacgtgggcagcaacagcatcctgacctacaagctgagcagcagcgagtacttcggcctggacgtgaagatcaacagcgacgacaacaagcagatcggcctgctgctgaagaagagcctggacagagaggaggcccccgcccacaacctgttcctgaccgccaccgacggcggcaagcccgagctgaccggcaccgtgcagctgctggtgaccgtgctggacgtgaacgacaacgcccccaccttcgagcagagcgagtacgaggtgagaatcttcgagaacgccgacaacggcaccaccgtgatcagactgaacgccagcgacagagacgagggcgccaacggcgccatcagctacagcttcaacagcctggtggccgccatggtgatcgaccacttcagcatcgacagaaacaccggcgagatcgtgatcagaggcaacctggacttcgagcaggagaacctgtacaagatcctgatcgacgccaccgacaagggccacccccccatggccggccactgcaccgtgctggtgagaatcctggacaagaacgacaacgtgcccgagatcgccctgaccagcctgagcctgcccgtgagagaggacgcccagttcggcaccgtgatcgccctgatcagcgtgaacgacctggacagcggcgccaacggccaggtgaactgcagcctgaccccccacgtgcccttcaagctggtgagcaccttcaagaactactacagcctggtgctggacagcgccctggacagagagagcgtgagcgcctacgagctggtggtgaccgccagagacggcggcagccccagcctgtgggccaccgccagcctgagcgtggaggtggccgacatgaacgacaacgcccccgccttcgcccagcccgagtacaccgtgttcgtgaaggagaacaacccccccggctgccacatcttcaccgtgagcgccagagacgccgacgcccaggagaacgccctggtgagctacagcctggtggagagaagagtgggcgagagagccctgagcagctacatcagcgtgcacgccgagagcggcaaggtgtacgccctgcagcccctggaccacgaggagctggagctgctgcagttccagcccagacagcccaaccccgactggagatacagcgccagcctgagagccggcatgcacagcagcgtgcacctggaggaggccggcatcctgagagccggccccggcggccccgaccagcagtggcccaccgtgagcagcgccacccccgagcccgaggccggcgaggtgagcccccccgtgggcgccggcgtgaacagcaacagctggaccttcaagtacggccccggcaaccccaagcagagcggccccggcgagctgcccgacaagttcatcatccccggcagccccgccatcatcagcatcagacaggagcccaccaacagccagatcgacaagagcgacttcatcaccttcggcaagaaggaggagaccaagaagaagaagaagaagaagaagggcaacaagacccaggagaagaaggagaagggcaacagcaccaccgacaacagcgaccagtag

SEQ ID NO: 95710 - DNA, 2853 bp, synthetic construct
  misc_feature 1..2853: note = Description of Artificial Sequence: Synthetic coding sequence
  source 1..2853: mol_type = other DNA
atggtgttcacccccgaggacagactgggcaagcagtgcctgctgctgcccctgctgctgctggccgcctggaaggtgggcagcggccagctgcactacagcgtgcccgaggaggccaagcacggcaccttcgtgggcagaatcgcccaggacctgggcctggagctggccgagctggtgcccagactgttcagaatggccagcaaggacagagaggacctgctggaggtgaacctgcagaacggcatcctgttcgtgaacagcagaatcgacagagaggagctgtgcggcagaagcgccgagtgcagcatccacctggaggtgatcgtggacagacccctgcaggtgttccacgtggacgtggaggtgagagacatcaacgacaacccccccctgttccccgtggaggagcagagagtgctgatctacgagagcagactgcccgacagcgtgttccccctggagggcgccagcgacgccgacgtgggcagcaacagcatcctgacctacaagctgagcagcagcgagtacttcggcctggacgtgaagatcaacagcgacgacaacaagcagatcggcctgctgctgaagaagagcctggacagagaggaggcccccgcccacaacctgttcctgaccgccaccgacggcggcaagcccgagctgaccggcaccgtgcagctgctggtgaccgtgctggacgtgaacgacaacgcccccaccttcgagcagagcgagtacgaggtgagaatcttcgagaacgccgacaacggcaccaccgtgatcagactgaacgccagcgacagagacgagggcgccaacggcgccatcagctacagcttcaacagcctggtggccgccatggtgatcgaccacttcagcatcgacagaaacaccggcgagatcgtgatcagaggcaacctggacttcgagcaggagaacctgtacaagatcctgatcgacgccaccgacaagggccacccccccatggccggccactgcaccgtgctggtgagaatcctggacaagaacgacaacgtgcccgagatcgccctgaccagcctgagcctgcccgtgagagaggacgcccagttcggcaccgtgatcgccctgatcagcgtgaacgacctggacagcggcgccaacggccaggtgaactgcagcctgaccccccacgtgcccttcaagctggtgagcaccttcaagaactactacagcctggtgctggacagcgccctggacagagagagcgtgagcgcctacgagctggtggtgaccgccagagacggcggcagccccagcctgtgggccaccgccagcctgagcgtggaggtggccgacatgaacgacaacgcccccgccttcgcccagcccgagtacaccgtgttcgtgaaggagaacaacccccccggctgccacatcttcaccgtgagcgccagagacgccgacgcccaggagaacgccctggtgagctacagcctggtggagagaagagtgggcgagagagccctgagcagctacatcagcgtgcacgccgagagcggcaaggtgtacgccctgcagcccctggaccacgaggagctggagctgctgcagttccaggtgagcgccagagacgccggcgtgccccccctgggcagcaacgtgaccctgcaggtgttcgtgctggacgagaacgacaacgcccccgccctgctggcccccagagtgggcggcaccggcggcgccgtgagcgagctggtgcccagaagcctgggcgccggccaggtggtggccaaggtgagagccgtggacgccgacagcggctacaacgcctggctgagctacgagctgcagccccccgccagcagcgccagattccccttcagagtgggcctgtacaccggcgagatcagcaccaccagagtgctggacgaggccgacagccccagacacagactgctggtgctggtgaaggaccacggcgagcccgccctgaccgccaccgccaccgtgctggtgagcctggtggagagcggccaggcccccaaggccagcagcagagccagcgtgggcgccgccggccccgaggccgccctggtggacgtgaacgtgtacctgatcatcgccatctgcgccgtgagcagcctgctggtgctgaccctgctgctgtacaccgccctgagatgcagcgccccccccaccgagggcgcctgcaccgccgacaagcccaccctggtgtgcagcagcgccgtgggcagctggagctacagccagcagagaagacagagagtgtgcagcggcgagggcccccccaagatggacctgatggccttcagccccagcctgagcccctgccccatcatgatgggcaaggccgagaaccaggacctgaacgaggaccacgacgccaagcccagacagcccaaccccgactggagatacagcgccagcctgagagccggcatgcacagcagcgtgcacctggaggaggccggcatcctgagagccggccccggcggccccgaccagcagtggcccaccgtgagcagcgccacccccgagcccgaggccggcgaggtgagcccccccgtgggcgccggcgtgaacagcaacagctggaccttcaagtacggccccggcaaccccaagcagagcggccccggcgagctgcccgacaagttcatcatccccggcagccccgccatcatcagcatcagacaggagcccaccaacagccagatcgacaagagcgacttcatcaccttcggcaagaaggaggagaccaagaagaagaagaagaagaagaagggcaacaagacccaggagaagaaggagaagggcaacagcaccaccgacaacagcgaccagtag

SEQ ID NO: 95711 - DNA, 2370 bp, synthetic construct
  misc_feature 1..2370: note = Description of Artificial Sequence: Synthetic coding sequence
  source 1..2370: mol_type = other DNA
atggtgtgccccaacggctacgaccccggcggcagacacctgctgctgttcatcatcatcctggccgcctgggaggccggcagaggccagctgcactacagcgtgcccgaggaggccaagcacggcaacttcgtgggcagaatcgcccaggacctgggcctggagctggccgagctggtgcccagactgttcagagccgtgtgcaagttcagaggcgacctgctggaggtgaacctgcagaacggcatcctgttcgtgaacagcagaatcgacagagaggagctgtgcggcagaagcgccgagtgcagcatccacctggaggtgatcgtggagagacccctgcaggtgttccacgtggacgtggaggtgaaggacatcaacgacaacccccccgtgttccccgccacccagagaaacctgttcatcgccgagagcagacccctggacagcagattccccctggagggcgccagcgacgccgacatcggcgagaacgccctgctgacctacagactgagccccaacgagtacttcttcctggacgtgcccaccagcaaccagcaggtgaagcccctgggcctggtgctgagaaagctgctggacagagaggagacccccgagctgcacctgctgctgaccgccaccgacggcggcaagcccgagctgaccggcaccgtgcagctgctgatcaccgtgctggacaacaacgacaacgcccccgtgttcgacagaaccctgtacaccgtgaagctgcccgagaacgtgagcatcggcaccctggtgatccaccccaacgccagcgacctggacgagggcctgaacggcgacatcatctacagcttcagcagcgacgtgagccccgacatcaagagcaagttccacatggaccccctgagcggcgccatcaccgtgatcggccacatggacttcgaggagagcagagcccacaagatccccgtggaggccgtggacaagggcttcccccccctggccggccactgcaccgtgctggtggaggtggtggacgtgaacgacaacgccccccagctgaccctgaccagcctgagcctgcccatccccgaggacgcccagcccggcaccgtgatcaccctgatcagcgtgttcgacagagacttcggcgtgaacggccaggtgacctgcagcctgacccccagagtgcccttcaagctggtgagcaccttcaagaactactacagcctggtgctggacagcgccctggacagagagagcgtgagcgcctacgagctggtggtgaccgccagagacggcggcagccccagcctgtgggccaccgccagcgtgagcgtggaggtggccgacgtgaacgacaacgcccccgccttcgcccagcccgagtacaccgtgttcgtgaaggagaacaacccccccggctgccacatcttcaccgtgagcgccggcgacgccgacgcccagaagaacgccctggtgagctacagcctggtggagctgagagtgggcgagagagccctgagcagctacgtgagcgtgcacgccgagagcggcaaggtgtacgccctgcagcccctggaccacgaggagctggagctgctgcagttccaggtgagcgccagagacgccggcgtgccccccctgggcagcaacgtgaccctgcaggtgttcgtgctggacgagaacgacaacgcccccgccctgctggcccccagagtgggcggcaccggcggcgccgtgagagagctggtgcccagaagcgtgggcgccggccacgtggtggccaaggtgagagccgtggacgccgacagcggctacaacgcctggctgagctacgagctgcagcccgtggccgccggcgccagcatccccttcagagtgggcctgtacaccggcgagatcagcaccaccagagccctggacgagaccgacgcccccagacacagactgctggtgctggtgaaggaccacggcgagcccagcctgaccgccaccgccaccgtgctggtgagcctggtggagagcggccaggcccccaaggccagcagcagagccagcctgggcatcgccggccccgagaccgagctggtggacgtgaacgtgtacctgatcatcgccatctgcgccgtgagcagcctgctggtgctgaccctgctgctgtacaccgccctgagatgcagcgcccccagcagcgagggcgcctgcagcctggtgaagcccaccctggtgtgcagcagcgccgtgggcagctggagcttcagccagcagagaagacagagagtgtgcagcggcgagggcccccccaagaccgacctgatggccttcagccccagcctgccccagggccccagcagcaccgacaacgtgagccacaagtag

SEQ ID NO: 95712 - DNA, 2814 bp, synthetic construct
  misc_feature 1..2814: note = Description of Artificial Sequence: Synthetic coding sequence
  source 1..2814: mol_type = other DNA
atggtgtgccccaacggctacgaccccggcggcagacacctgctgctgttcatcatcatcctggccgcctgggaggccggcagaggccagctgcactacagcgtgcccgaggaggccaagcacggcaacttcgtgggcagaatcgcccaggacctgggcctggagctggccgagctggtgcccagactgttcagagccgtgtgcaagttcagaggcgacctgctggaggtgaacctgcagaacggcatcctgttcgtgaacagcagaatcgacagagaggagctgtgcggcagaagcgccgagtgcagcatccacctggaggtgatcgtggagagacccctgcaggtgttccacgtggacgtggaggtgaaggacatcaacgacaacccccccgtgttccccgccacccagagaaacctgttcatcgccgagagcagacccctggacagcagattccccctggagggcgccagcgacgccgacatcggcgagaacgccctgctgacctacagactgagccccaacgagtacttcttcctggacgtgcccaccagcaaccagcaggtgaagcccctgggcctggtgctgagaaagctgctggacagagaggagacccccgagctgcacctgctgctgaccgccaccgacggcggcaagcccgagctgaccggcaccgtgcagctgctgatcaccgtgctggacaacaacgacaacgcccccgtgttcgacagaaccctgtacaccgtgaagctgcccgagaacgtgagcatcggcaccctggtgatccaccccaacgccagcgacctggacgagggcctgaacggcgacatcatctacagcttcagcagcgacgtgagccccgacatcaagagcaagttccacatggaccccctgagcggcgccatcaccgtgatcggccacatggacttcgaggagagcagagcccacaagatccccgtggaggccgtggacaagggcttcccccccctggccggccactgcaccgtgctggtggaggtggtggacgtgaacgacaacgccccccagctgaccctgaccagcctgagcctgcccatccccgaggacgcccagcccggcaccgtgatcaccctgatcagcgtgttcgacagagacttcggcgtgaacggccaggtgacctgcagcctgacccccagagtgcccttcaagctggtgagcaccttcaagaactactacagcctggtgctggacagcgccctggacagagagagcgtgagcgcctacgagctggtggtgaccgccagagacggcggcagccccagcctgtgggccaccgccagcgtgagcgtggaggtggccgacgtgaacgacaacgcccccgccttcgcccagcccgagtacaccgtgttcgtgaaggagaacaacccccccggctgccacatcttcaccgtgagcgccggcgacgccgacgcccagaagaacgccctggtgagctacagcctggtggagctgagagtgggcgagagagccctgagcagctacgtgagcgtgcacgccgagagcggcaaggtgtacgccctgcagcccctggaccacgaggagctggagctgctgcagttccaggtgagcgccagagacgccggcgtgccccccctgggcagcaacgtgaccctgcaggtgttcgtgctggacgagaacgacaacgcccccgccctgctggcccccagagtgggcggcaccggcggcgccgtgagagagctggtgcccagaagcgtgggcgccggccacgtggtggccaaggtgagagccgtggacgccgacagcggctacaacgcctggctgagctacgagctgcagcccgtggccgccggcgccagcatccccttcagagtgggcctgtacaccggcgagatcagcaccaccagagccctggacgagaccgacgcccccagacacagactgctggtgctggtgaaggaccacggcgagcccagcctgaccgccaccgccaccgtgctggtgagcctggtggagagcggccaggcccccaaggccagcagcagagccagcctgggcatcgccggccccgagaccgagctggtggacgtgaacgtgtacctgatcatcgccatctgcgccgtgagcagcctgctggtgctgaccctgctgctgtacaccgccctgagatgcagcgcccccagcagcgagggcgcctgcagcctggtgaagcccaccctggtgtgcagcagcgccgtgggcagctggagcttcagccagcagagaagacagagagtgtgcagcggcgagggcccccccaagaccgacctgatggccttcagccccagcctgccccagggccccagcagcaccgacaaccccagacagcccaaccccgactggagatacagcgccagcctgagagccggcatgcacagcagcgtgcacctggaggaggccggcatcctgagagccggccccggcggccccgaccagcagtggcccaccgtgagcagcgccacccccgagcccgaggccggcgaggtgagcccccccgtgggcgccggcgtgaacagcaacagctggaccttcaagtacggccccggcaaccccaagcagagcggccccggcgagctgcccgacaagttcatcatccccggcagccccgccatcatcagcatcagacaggagcccaccaacagccagatcgacaagagcgacttcatcaccttcggcaagaaggaggagaccaagaagaagaagaagaagaagaagggcaacaagacccaggagaagaaggagaagggcaacagcaccaccgacaacagcgaccagtag

SEQ ID NO: 95713 - DNA, 2445 bp, synthetic construct
  misc_feature 1..2445: note = Description of Artificial Sequence: Synthetic coding sequence
  source 1..2445: mol_type = other DNA
atggactaccactggagaggcgagctgggcagctggagactgctgctgctgctgctgctgctggccgcctggaaggtgggcagcggccagctgcactacagcgtgcccgaggaggccaagcacggcaccttcgtgggcagaatcgcccaggacctgggcctggagctggccgagctggtgcccagactgttcagagtggccagcaagagacacagagacctgctggaggtgagcctgcagaacggcatcctgttcgtgaacagcagaatcgacagagaggagctgtgcggcagaagcgccgagtgcagcatccacctggaggtgatcgtggacagacccctgcaggtgttccacgtggacgtggaggtgaaggacgtgaacgacaacccccccgtgttcagagtgaaggaccagaagctgttcgtgagcgagagcagaatgcccgacagcagattccccctggagggcgccagcgacgccgacgtgggcgccaacagcgtgctgacctacagactgagcagccacgactacttcatgctggacgtgaacagcaagaacgacgagaacaagctggtggagctggtgctgagaaagagcctggacagagaggacgcccccgcccaccacctgttcctgaccgccaccgacggcggcaagcccgagctgaccggcaccgtgcagctgctggtgaccgtgctggacgtgaacgacaacgcccccaccttcgagcagagcgagtacgaggtgagaatcttcgagaacgccgacaacggcaccaccgtgatcaagctgaacgccagcgaccccgacgagggcgccaacggcgccatcagctacagcttcaacagcctggtggagaccatggtgatcgaccacttcagcatcgacagaaacaccggcgagatcgtgatcagaggcaacctggacttcgagcaggagaacctgtacaagatcctgatcgacgccaccgacaagggccacccccccatggccggccactgcaccgtgctggtgagaatcctggacaagaacgacaacgtgcccgagatcgccctgaccagcctgagcctgcccgtgagagaggacgcccagttcggcaccgtgatcgccctgatcagcgtgaacgacctggacagcggcgccaacggccaggtgacctgcagcctgatgccccacgtgcccttcaagctggtgagcaccttcaagaactactacagcctggtgctggacagcgccctggacagagagagagtgagcgcctacgagctggtggtgaccgccagagacggcggcagccccagcctgtgggccaccgccagcctgagcgtggaggtggccgacgtgaacgacaacgcccccgccttcgcccagcccgagtacaccgtgttcgtgaaggagaacaacccccccggctgccacatcttcaccgtgagcgccagagacgccgacgcccaggagaacgccctggtgagctacagcctggtggagagaagagtgggcgagagaagcctgagcagctacatcagcgtgcacaccgagagcggcaaggtgtacgccctgcagcccctggaccacgaggagctggagctgctgcagttccaggtgagcgccagagacgccggcgtgccccccctgggcagcaacgtgaccctgcaggtgttcgtgctggacgagaacgacaacgcccccgccctgctggagcccagagtgggcggcaccggcggcgccgccagcaagctggtgcccagaagcgtgggcgccggccacgtggtggccaaggtgagagccgtggacgccgacagcggctacaacgcctggctgagctacgagctgcagcccgccgccagcagccccagaatccccttcagagtgggcctgtacaccggcgagatcagcaccaccagagtgctggacgaggccgacagccccagacacagactgctggtgctggtgaaggaccacggcgagcccgccctgaccgccaccgccaccgtgctggtgagcctggtggagagcggccaggcccccaaggccagcagcagacagagcgccggcgtgctgggccccgaggccgccctggtggacgtgaacgtgtacctgatcatcgccatctgcgccgtgagcagcctgctggtgctgaccctgctgctgtacaccgccctgagatgcagcgccctgcccaccgagggcggctgcagagccggcaagcccaccctggtgtgcagcagcgccgtgggcagctggagctacagccagcagcagccccagagagtgtgcagcggcgagggcccccccaagaccgacctgatggccttcagcccctgcctgccccccgacctgggcagcgtggacgtgggcgaggagcaggacctgaacgtggaccacggcctgaaggtgagccccttcaagttcagaacccacaagttctacctgtggaagctgtag

SEQ ID NO: 95714 - DNA, 2853 bp, synthetic construct
  misc_feature 1..2853: note = Description of Artificial Sequence: Synthetic coding sequence
  source 1..2853: mol_type = other DNA
atggactaccactggagaggcgagctgggcagctggagactgctgctgctgctgctgctgctggccgcctggaaggtgggcagcggccagctgcactacagcgtgcccgaggaggccaagcacggcaccttcgtgggcagaatcgcccaggacctgggcctggagctggccgagctggtgcccagactgttcagagtggccagcaagagacacagagacctgctggaggtgagcctgcagaacggcatcctgttcgtgaacagcagaatcgacagagaggagctgtgcggcagaagcgccgagtgcagcatccacctggaggtgatcgtggacagacccctgcaggtgttccacgtggacgtggaggtgaaggacgtgaacgacaacccccccgtgttcagagtgaaggaccagaagctgttcgtgagcgagagcagaatgcccgacagcagattccccctggagggcgccagcgacgccgacgtgggcgccaacagcgtgctgacctacagactgagcagccacgactacttcatgctggacgtgaacagcaagaacgacgagaacaagctggtggagctggtgctgagaaagagcctggacagagaggacgcccccgcccaccacctgttcctgaccgccaccgacggcggcaagcccgagctgaccggcaccgtgcagctgctggtgaccgtgctggacgtgaacgacaacgcccccaccttcgagcagagcgagtacgaggtgagaatcttcgagaacgccgacaacggcaccaccgtgatcaagctgaacgccagcgaccccgacgagggcgccaacggcgccatcagctacagcttcaacagcctggtggagaccatggtgatcgaccacttcagcatcgacagaaacaccggcgagatcgtgatcagaggcaacctggacttcgagcaggagaacctgtacaagatcctgatcgacgccaccgacaagggccacccccccatggccggccactgcaccgtgctggtgagaatcctggacaagaacgacaacgtgcccgagatcgccctgaccagcctgagcctgcccgtgagagaggacgcccagttcggcaccgtgatcgccctgatcagcgtgaacgacctggacagcggcgccaacggccaggtgacctgcagcctgatgccccacgtgcccttcaagctggtgagcaccttcaagaactactacagcctggtgctggacagcgccctggacagagagagagtgagcgcctacgagctggtggtgaccgccagagacggcggcagccccagcctgtgggccaccgccagcctgagcgtggaggtggccgacgtgaacgacaacgcccccgccttcgcccagcccgagtacaccgtgttcgtgaaggagaacaacccccccggctgccacatcttcaccgtgagcgccagagacgccgacgcccaggagaacgccctggtgagctacagcctggtggagagaagagtgggcgagagaagcctgagcagctacatcagcgtgcacaccgagagcggcaaggtgtacgccctgcagcccctggaccacgaggagctggagctgctgcagttccaggtgagcgccagagacgccggcgtgccccccctgggcagcaacgtgaccctgcaggtgttcgtgctggacgagaacgacaacgcccccgccctgctggagcccagagtgggcggcaccggcggcgccgccagcaagctggtgcccagaagcgtgggcgccggccacgtggtggccaaggtgagagccgtggacgccgacagcggctacaacgcctggctgagctacgagctgcagcccgccgccagcagccccagaatccccttcagagtgggcctgtacaccggcgagatcagcaccaccagagtgctggacgaggccgacagccccagacacagactgctggtgctggtgaaggaccacggcgagcccgccctgaccgccaccgccaccgtgctggtgagcctggtggagagcggccaggcccccaaggccagcagcagacagagcgccggcgtgctgggccccgaggccgccctggtggacgtgaacgtgtacctgatcatcgccatctgcgccgtgagcagcctgctggtgctgaccctgctgctgtacaccgccctgagatgcagcgccctgcccaccgagggcggctgcagagccggcaagcccaccctggtgtgcagcagcgccgtgggcagctggagctacagccagcagcagccccagagagtgtgcagcggcgagggcccccccaagaccgacctgatggccttcagcccctgcctgccccccgacctgggcagcgtggacgtgggcgaggagcaggacctgaacgtggaccacggcctgaagcccagacagcccaaccccgactggagatacagcgccagcctgagagccggcatgcacagcagcgtgcacctggaggaggccggcatcctgagagccggccccggcggccccgaccagcagtggcccaccgtgagcagcgccacccccgagcccgaggccggcgaggtgagcccccccgtgggcgccggcgtgaacagcaacagctggaccttcaagtacggccccggcaaccccaagcagagcggccccggcgagctgcccgacaagttcatcatccccggcagccccgccatcatcagcatcagacaggagcccaccaacagccagatcgacaagagcgacttcatcaccttcggcaagaaggaggagaccaagaagaagaagaagaagaagaagggcaacaagacccaggagaagaaggagaagggcaacagcaccaccgacaacagcgaccagtag

SEQ ID NO: 95715 - DNA, 2529 bp, synthetic construct
  misc_feature 1..2529: note = Description of Artificial Sequence: Synthetic coding sequence
  source 1..2529: mol_type = other DNA
atgctgtacagcagcagaggcgaccccgagggccagcccctgctgctgagcctgctgatcctggccatgtgggtggtgggcagcggccagctgcactacagcgtgcccgaggaggccgagcacggcaccttcgtgggcagaatcgcccaggacctgggcctggagctggccgagctggtgcccagactgttccagctggacagcaagggcagaggcgacctgctggaggtgaacctgcagaacggcatcctgttcgtgaacagcagaatcgacagagaggagctgtgcggcagaagcgccgagtgcagcatccacctggaggtgatcgtggacagacccctgcaggtgttccacgtggacgtggaggtgaaggacatcaacgacaacccccccgtgttccccgccacccagaagaacctgttcatcgccgagagcagacccctggacagcagattccccctggagggcgccagcgacgccgacatcggcgagaacgccctgctgacctacagactgagccccaacgagtacttcttcctggacgtgcccaccagcaaccagcaggtgaagcccctgggcctggtgctgagaaagctgctggacagagaggagacccccgagctgcacctgctgctgaccgccaccgacggcggcaagcccgagctgaccggcaccgtgcagctgctgatcaccgtgctggacaacaacgacaacgcccccgtgttcgacagaaccctgtacaccgtgaagctgcccgagaacgtgagcatcggcaccctggtgatccaccccaacgccagcgacctggacgagggcctgaacggcgacatcatctacagcttcagcagcgacgtgagccccgacatcaagagcaagttccacatggaccccctgagcggcgccatcaccgtgatcggccacatggacttcgaggagagcagagcccacaagatccccgtggaggccgtggacaagggcttcccccccctggccggccactgcaccctgctggtggaggtggtggacgtgaacgacaacgccccccagctgaccatcaagaccctgagcgtgcccgtgaaggaggacgcccagctgggcaccgtgatcgccctgatcagcgtgatcgacctggacgccgacgccaacggccaggtgacctgcagcctgaccccccacgtgcccttcaagctggtgagcacctacaagaactactacagcctggtgctggacagagccctggacagagagagcgtgagcgcctacgagctggtggtgaccgccagagacggcggcagccccagcctgtgggccaccgccagagtgagcgtggaggtggccgacgtgaacgacaacgcccccgccttcgcccagagcgagtacaccgtgttcgtgaaggagaacaacccccccggctgccacatcttcaccgtgagcgccagagacgccgacgcccaggagaacgccctggtgagctacagcctggtggagagaagactgggcgagagaagcctgagcagctacgtgagcgtgcacgccgagagcggcaaggtgtacgccctgcagcccctggaccacgaggagctggagctgctgcagttccaggtgagcgccagagacgccggcgtgccccccctgggcagcaacgtgaccctgcaggtgttcgtgctggacgagaacgacaacgcccccgccctgctgacccccagaatgagaggcaccgacggcgccgtgagcgagatggtgctgagaagcgtgggcgccggcgtggtggtgggcaaggtgagagccgtggacgccgacagcggctacaacgcctggctgagctacgagctgcagcccgagaccgccagcgccagcatccccttcagagtgggcctgtacaccggcgagatcagcaccaccagagccctggacgagaccgacgcccccagacagagactgctggtgctggtgaaggaccacggcgagcccgccctgaccgccaccgccaccgtgctggtgagcctggtggagagcggccaggcccccaagagcagcagcagagccagcgtgggcgccaccggccccgaggtgaccctggtggacgtgaacgtgtacctgatcatcgccatctgcgccgtgagcagcctgctggtgctgaccctgctgctgtacaccgtgctgagatgcagcgccatgcccaccgagggcgagtgcgcccccggcaagcccaccctggtgtgcagcagcgccgtgggcagctggagctacagccagcagagaagacagagagtgtgcagcggcgagggcaagcagaagaccgacctgatggccttcagccccggcctgagcccctgcgccggcagcaccgagagaaccggcgagcccagcgccagcagcgacagcaccggcaaggtgggcttcagcagcatcctgttcatctacatcatcttcttcctggagagatactacagactgctgcccggcgccgtgcagatcgtgctgttcatcttcctggagatccagcagatcttcttcctgatcaagtag

SEQ ID NO: 95716 - DNA, 2853 bp, synthetic construct
  misc_feature 1..2853: note = Description of Artificial Sequence: Synthetic coding sequence
  source 1..2853: mol_type = other DNA
atgctgtacagcagcagaggcgaccccgagggccagcccctgctgctgagcctgctgatcctggccatgtgggtggtgggcagcggccagctgcactacagcgtgcccgaggaggccgagcacggcaccttcgtgggcagaatcgcccaggacctgggcctggagctggccgagctggtgcccagactgttccagctggacagcaagggcagaggcgacctgctggaggtgaacctgcagaacggcatcctgttcgtgaacagcagaatcgacagagaggagctgtgcggcagaagcgccgagtgcagcatccacctggaggtgatcgtggacagacccctgcaggtgttccacgtggacgtggaggtgaaggacatcaacgacaacccccccgtgttccccgccacccagaagaacctgttcatcgccgagagcagacccctggacagcagattccccctggagggcgccagcgacgccgacatcggcgagaacgccctgctgacctacagactgagccccaacgagtacttcttcctggacgtgcccaccagcaaccagcaggtgaagcccctgggcctggtgctgagaaagctgctggacagagaggagacccccgagctgcacctgctgctgaccgccaccgacggcggcaagcccgagctgaccggcaccgtgcagctgctgatcaccgtgctggacaacaacgacaacgcccccgtgttcgacagaaccctgtacaccgtgaagctgcccgagaacgtgagcatcggcaccctggtgatccaccccaacgccagcgacctggacgagggcctgaacggcgacatcatctacagcttcagcagcgacgtgagccccgacatcaagagcaagttccacatggaccccctgagcggcgccatcaccgtgatcggccacatggacttcgaggagagcagagcccacaagatccccgtggaggccgtggacaagggcttcccccccctggccggccactgcaccctgctggtggaggtggtggacgtgaacgacaacgccccccagctgaccatcaagaccctgagcgtgcccgtgaaggaggacgcccagctgggcaccgtgatcgccctgatcagcgtgatcgacctggacgccgacgccaacggccaggtgacctgcagcctgaccccccacgtgcccttcaagctggtgagcacctacaagaactactacagcctggtgctggacagagccctggacagagagagcgtgagcgcctacgagctggtggtgaccgccagagacggcggcagccccagcctgtgggccaccgccagagtgagcgtggaggtggccgacgtgaacgacaacgcccccgccttcgcccagagcgagtacaccgtgttcgtgaaggagaacaacccccccggctgccacatcttcaccgtgagcgccagagacgccgacgcccaggagaacgccctggtgagctacagcctggtggagagaagactgggcgagagaagcctgagcagctacgtgagcgtgcacgccgagagcggcaaggtgtacgccctgcagcccctggaccacgaggagctggagctgctgcagttccaggtgagcgccagagacgccggcgtgccccccctgggcagcaacgtgaccctgcaggtgttcgtgctggacgagaacgacaacgcccccgccctgctgacccccagaatgagaggcaccgacggcgccgtgagcgagatggtgctgagaagcgtgggcgccggcgtggtggtgggcaaggtgagagccgtggacgccgacagcggctacaacgcctggctgagctacgagctgcagcccgagaccgccagcgccagcatccccttcagagtgggcctgtacaccggcgagatcagcaccaccagagccctggacgagaccgacgcccccagacagagactgctggtgctggtgaaggaccacggcgagcccgccctgaccgccaccgccaccgtgctggtgagcctggtggagagcggccaggcccccaagagcagcagcagagccagcgtgggcgccaccggccccgaggtgaccctggtggacgtgaacgtgtacctgatcatcgccatctgcgccgtgagcagcctgctggtgctgaccctgctgctgtacaccgtgctgagatgcagcgccatgcccaccgagggcgagtgcgcccccggcaagcccaccctggtgtgcagcagcgccgtgggcagctggagctacagccagcagagaagacagagagtgtgcagcggcgagggcaagcagaagaccgacctgatggccttcagccccggcctgagcccctgcgccggcagcaccgagagaaccggcgagcccagcgccagcagcgacagcaccggcaagcccagacagcccaaccccgactggagatacagcgccagcctgagagccggcatgcacagcagcgtgcacctggaggaggccggcatcctgagagccggccccggcggccccgaccagcagtggcccaccgtgagcagcgccacccccgagcccgaggccggcgaggtgagcccccccgtgggcgccggcgtgaacagcaacagctggaccttcaagtacggccccggcaaccccaagcagagcggccccggcgagctgcccgacaagttcatcatccccggcagccccgccatcatcagcatcagacaggagcccaccaacagccagatcgacaagagcgacttcatcaccttcggcaagaaggaggagaccaagaagaagaagaagaagaagaagggcaacaagacccaggagaagaaggagaagggcaacagcaccaccgacaacagcgaccagtag

SEQ ID NO: 95717 - DNA, 2892 bp, synthetic construct
  misc_feature 1..2892: note = Description of Artificial Sequence: Synthetic coding sequence
  source 1..2892: mol_type = other DNA
atggtgggctgcggcgtggccgtgctgtgcctgtgggtgagctgcggcgccgccgccggccagctggagtacagcgtgcccgaggagaccgagagaggcgtggccgtgggcaacctgagcgccgacctgagactgcccgccgccgccatgagcagcagaaacttcagattcctgagcagccacagagagctgtacttcggcgtggacctgcccagcggcaacctggtggtgagagagcccgccgacagagagcagctgtgcagagccaaggccgcctgcgtgctgacctacgacctggtgctggaggaccccctggagctgcacaagatcagaatccacgtgctggacaccaacgacaacagccccctgttccccgccggcgacgtgcagctgcacatccccgagttcctgacccccggcgccagattcaccctgcccaacgcccaggacgacgacgagggcagcaacggcatcctgagctacagcctgagccccagccagcacttcagactggacatgggcagcagagtggacggcagcgagtaccccgagctggtgctggagaaggccctggacagagagcagagagccacccacctgctggtgctgaccgccagagacggcggcctgcccgccagaagcggcgacgcccaggtgaccatcatcgtggtggacaccaacgacaacgcccccgtgttcgagagaagcgtgtacagaaccaaggtgcccgagaccgcccccaacggcaccgtgctgttcagagtgcaggccctggaccccgacgagggcagcaacggcgaggtgcagtacagcctgagcaacagcacccaggccgagctgagacacagattccacgtgcaccccaagagcggcgaggtgcaggtggccgccagcctgggcccccccgagaccctgctggaggcctacatcgaggccagagacgagggcgtgttcggcctggccagcaccgccaagctgctggtggaggtgaccgacgtgaacgaccacgcccccgagctggacttcctgaccctgagcaaccccgtgcccgaggacgccgcccccggcaccgtgatcgccctgttcagcgtgaaggacgaggacctggacagcaacggcagagtgatctgcggcatgagcagcgccggccccttccagctgaccgccagcttcgacaactactacagcctgctgatcgacggccccctggacagagagcagatcagcgagtaccaggtgctgatcaccgccagcgacagcggcagcccccccctgagcaccagaagaaccatcaccgtgagcgtggccgacgtgaacgacaacacccccaacttcccccagccccagcaggagctgttcgtggccgagaacaacggccccggcgccagcctgggcagagtgttcgcccaggaccccgacctgggcaagaacggcctggtgagctacgagctgctggacgtgatcagcgagggccccagcgccagcagcctgctggccgtggagagcagcagcggcgccatcaccgccaagaccagcttcgacttcgagcagctgagaggcttccacttccaggtggagggcagagacggcggcatcccccccagaagcgccaccgtgaccatcaacctgttcgtggtggacagaaacgacaactaccccgtgatcctgttccccctgcccagaaacggcagcgtgcccgtggagatcgtgcccagaagcgccagaaccggccacctggtgaccaaggtggtggccgaggacgccgacagcggcagcaacgcctggctgagctaccacatcagcagagccagcgacagcagcctgttcagaatcagcgccaacatcggcgagctgagaaccgccagactggtgctgcccaccgacgccgtgaagcagagagtggtggtggtggtgagagaccacggcgacccccccctgagcagcagcgtgaccctgggcgtgctgctgagcaacagcgtgccccagctgctgcccgacttcgaggacgtgtgggagcccggcggccagctgagcgcccagaacctgtacctggtgatcgccctggcctgcatcagcttcctgttcctgggctgcctgctgttcttcgtgtgcaccaagctgcaccagagccccggctgctgcgcccagagctgctgcagaagcaccgaggacctgagatacggcagcaagatggtgagcaacccctgcatgaccagcgccaccatcgacgtgaccaccgtggagagactgagccagacctacctgtacagagccagcctgggcctgggcagcgacaacaacagcctgctgctgagaggcgagtacaacgccgccgacctgagaaacctggccaccggcgtgggcctgaacctgcccatcagctgcatccagatcagaaacagaaagggcgaccacgccaacgtgaacgccatgcccagacagcccaaccccgactggagatacagcgccagcctgagagccggcatgcacagcagcgtgcacctggaggaggccggcatcctgagagccggccccggcggccccgaccagcagtggcccaccgtgagcagcgccacccccgagcccgaggccggcgaggtgagcccccccgtgggcgccggcgtgaacagcaacagctggaccttcaagtacggccccggcaaccccaagcagagcggccccggcgagctgcccgacaagttcatcatccccggcagccccgccatcatcagcatcagacaggagcccaccaacagccagatcgacaagagcgacttcatcaccttcggcaagaaggaggagaccaagaagaagaagaagaagaagaagggcaacaagacccaggagaagaaggagaagggcaacagcaccaccgacaacagcgaccagtag

SEQ ID NO: 95718 - DNA, 2457 bp, synthetic construct
  misc_feature 1..2457: note = Description of Artificial Sequence: Synthetic coding sequence
  source 1..2457: mol_type = other DNA
atggtgggctgcggcgtggccgtgctgtgcctgtgggtgagctgcggcgccgccgccggccagctggagtacagcgtgcccgaggagaccgagagaggcgtggccgtgggcaacctgagcgccgacctgagactgcccgccgccgccatgagcagcagaaacttcagattcctgagcagccacagagagctgtacttcggcgtggacctgcccagcggcaacctggtggtgagagagcccgccgacagagagcagctgtgcagagccaaggccgcctgcgtgctgacctacgacctggtgctggaggaccccctggagctgcacaagatcagaatccacgtgctggacaccaacgacaacagccccctgttccccgccggcgacgtgcagctgcacatccccgagttcctgacccccggcgccagattcaccctgcccaacgcccaggacgacgacgagggcagcaacggcatcctgagctacagcctgagccccagccagcacttcagactggacatgggcagcagagtggacggcagcgagtaccccgagctggtgctggagaaggccctggacagagagcagagagccacccacctgctggtgctgaccgccagagacggcggcctgcccgccagaagcggcgacgcccaggtgaccatcatcgtggtggacaccaacgacaacgcccccgtgttcgagagaagcgtgtacagaaccaaggtgcccgagaccgcccccaacggcaccgtgctgttcagagtgcaggccctggaccccgacgagggcagcaacggcgaggtgcagtacagcctgagcaacagcacccaggccgagctgagacacagattccacgtgcaccccaagagcggcgaggtgcaggtggccgccagcctgggcccccccgagaccctgctggaggcctacatcgaggccagagacgagggcgtgttcggcctggccagcaccgccaagctgctggtggaggtgaccgacgtgaacgaccacgcccccgagctggacttcctgaccctgagcaaccccgtgcccgaggacgccgcccccggcaccgtgatcgccctgttcagcgtgaaggacgaggacctggacagcaacggcagagtgatctgcggcatgagcagcgccggccccttccagctgaccgccagcttcgacaactactacagcctgctgatcgacggccccctggacagagagcagatcagcgagtaccaggtgctgatcaccgccagcgacagcggcagcccccccctgagcaccagaagaaccatcaccgtgagcgtggccgacgtgaacgacaacacccccaacttcccccagccccagcaggagctgttcgtggccgagaacaacggccccggcgccagcctgggcagagtgttcgcccaggaccccgacctgggcaagaacggcctggtgagctacgagctgctggacgtgatcagcgagggccccagcgccagcagcctgctggccgtggagagcagcagcggcgccatcaccgccaagaccagcttcgacttcgagcagctgagaggcttccacttccaggtggagggcagagacggcggcatcccccccagaagcgccaccgtgaccatcaacctgttcgtggtggacagaaacgacaactaccccgtgatcctgttccccctgcccagaaacggcagcgtgcccgtggagatcgtgcccagaagcgccagaaccggccacctggtgaccaaggtggtggccgaggacgccgacagcggcagcaacgcctggctgagctaccacatcagcagagccagcgacagcagcctgttcagaatcagcgccaacatcggcgagctgagaaccgccagactggtgctgcccaccgacgccgtgaagcagagagtggtggtggtggtgagagaccacggcgacccccccctgagcagcagcgtgaccctgggcgtgctgctgagcaacagcgtgccccagctgctgcccgacttcgaggacgtgtgggagcccggcggccagctgagcgcccagaacctgtacctggtgatcgccctggcctgcatcagcttcctgttcctgggctgcctgctgttcttcgtgtgcaccaagctgcaccagagccccggctgctgcgcccagagctgctgcagaagcaccgaggacctgagatacggcagcaagatggtgagcaacccctgcatgaccagcgccaccatcgacgtgaccaccgtggagagactgagccagacctacctgtacagagccagcctgggcctgggcagcgacaacaacagcctgctgctgagaggcgagtacaacgccgccgacctgagaaacctggccaccggcgtgggcctgaacctgcccatcagctgcatccagatcagaaacagaaagggcgaccacgccaacgtgaacgccatggtgagcaagttctacggcatctag

SEQ ID NO: 95719 - DNA, 3024 bp, synthetic construct
  misc_feature 1..3024: note = Description of Artificial Sequence: Synthetic coding sequence
  source 1..3024: mol_type = other DNA
atggagcaggccggcaccagacccgccgccaccgagcaccccagactgagaagacccatgccctggctgctgctgctgcccctgctgctgctgctgctgctgctgctgcccggccccgccgccagccagctgagatacagcgtgcccgaggagcaggcccccggcgccctggtgggcaacgtggccagagccctgggcctggagctgagaagactgggccccggctgcctgagaatcaaccacctgggcgcccccagccccagatacctggagctggacctgaccagcggcgccctgttcgtgaacgagagaatcgacagagaggccctgtgcgagcagagacccagatgcctgctgagcctggaggtgctggcccacaaccccgtggccgtgagcgccgtggaggtggagatcctggacatcaacgacaacagccccagattccccagacccaactaccagctgcaggtgagcgagagcgtggcccccggcgccagattccacatcgagagcgcccaggaccccgacgtgggcgccaacagcgtgcagacctacgagctgagccccagcgagcacttcgagctggacctgaagcccctgcaggagaacagcaaggtgctggagctggtgctgagaaagggcctggacagagagcaggccgccctgcaccacctggtgctgaccgccgtggacggcggcatccccgccagaagcggcaccgcccagatcagcgtgagagtgctggacaccaacgacaacagccccgccttcgaccagagcacctacagagtgcagctgagagaggacagcccccccggcaccctggtggtgaagctgaacgccagcgaccccgacgagggcagcaacggcgagctgagatacagcctgagcagctacaccagcgacagagagagacagctgttcagcatcgacgccagcaccggcgaggtgagagtgatcggcggcctggactacgaggaggccagcagctaccagatctacgtgcaggccaccgacagaggccccgtgcccatggccggccactgcaaggtgctggtggacatcgtggacgtgaacgacaacgcccccgaggtggtgctgaccgacctgtacagccccgtgcccgagaacgccacccccaacaccatcgtggccgtgctgagcgtgaacgaccaggacagcggccccaacagaaaggtgagcctgggcctggaggccaccctgcccttcagactgaacggcttcggcaacagctacaccctggtggtgagcggccccctggacagagagagagtggccgtgtacaacatcaccgtgaccgccaccgacggcggcatcccccagctgaccagcctgagaaccctgaaggtggagatcagcgacatcaacgacaacccccccagcttcctggaggacagctacagcatctacatccaggagaacaacctgcccggcgtgctgctgtgcaccgtgcaggccaccgaccccgacgagaaggagaacgccgaggtgacctacagcctgctggagagagagatccagggcctgcccgtgaccagctacgtgagcatcaacagcgccagcggcagcctgtacgccgtgaacagcttcgactacgagaagttcagagagttcttcgtgaccgtggaggcccaggacaagggcagcccccccctgagcagcaccgtgaccgccaacgtgtacgtggtggacatgaacgaccacgccccccacatcctgtaccccaccagcaccaacagcagcgccgccttcgagatggtgcccagaaccgcccccgccggctacctggtgaccaaggtgatcgccatggacagcgacagcggccagaacgcctggctgttctaccacctggcccagaccagcgacctggacctgttcaaggtggagctgcacaccggcgagatcagaaccaccagaaagatgggcgacgagagcggcagcaccttcaacctgaccgtggtggtgagagacaacggcgagcccagcctgagcgccagcgtggccatcaccgtggccgtggtggacagagtgagcaagatcctgcccgacacccagagacacgtgaagagccccagaacctacagcgagatcaccctgtacctgatcatcgccctgagcaccgtgagcttcatcttcctgctgaccatcatcatcctgagcatcatcaagtgctacagatacaccgcctacggcaccgcctgctgcggcggcttctgcggcgtgagagagagaagccccgccgagctgtacaagcaggccaacaacaacatcgacgccagaatcccccacggcctgaaggtgcagccccacttcatcgaggtgagaggcaacggcagcctgaccaagacctactgctacaaggcctgcctgaccgccggcagcggcagcgacaccttcatgttctacaacaccggcgcccagaccggccccggccccagcggcgcccaggccgccgtgaccgacagcagaaacctgaccggccagagcggccagaacgccggcaacctgatcatcctgaagaacgaggccgtgagccagaacgagcccagacagcccaaccccgactggagatacagcgccagcctgagagccggcatgcacagcagcgtgcacctggaggaggccggcatcctgagagccggccccggcggccccgaccagcagtggcccaccgtgagcagcgccacccccgagcccgaggccggcgaggtgagcccccccgtgggcgccggcgtgaacagcaacagctggaccttcaagtacggccccggcaaccccaagcagagcggccccggcgagctgcccgacaagttcatcatccccggcagccccgccatcatcagcatcagacaggagcccaccaacagccagatcgacaagagcgacttcatcaccttcggcaagaaggaggagaccaagaagaagaagaagaagaagaagggcaacaagacccaggagaagaaggagaagggcaacagcaccaccgacaacagcgaccagtag

SEQ ID NO: 95720 - DNA, 2457 bp, synthetic construct
  misc_feature 1..2457: note = Description of Artificial Sequence: Synthetic coding sequence
  source 1..2457: mol_type = other DNA
atggccggcaccagaagaaagagcctgcagaacagacaggtgggcagcctgctgatcttcctgtgcatcagcgtgggcgacgccaccaccatcagatacagcgtggccgaggagatggagagcggcagcttcgtggccaacgtggccaaggacctgggcctggaggtgggcaagctggccgccagaggcgccagactggtgagcgagggcaacaagatgcacttcagactgcacagaaagaccggcgacctgttcgtgaaggagaagctggacagagagagcctgtgcggcaaggccgacccctgcgtgctgcacttcgaggtggtgctggtggagcccctgcagagcttcagagccgaggtgagagtgttcgacatcaacgacaacgcccccgtgttcctgaacaaggagcccctgctgaagatccccgagagcacccccctgggcagcagattccccctgcagagcgcccaggacctggacgtgggcctgaacggcctgcagaactacaccctgagcgccaacggctacttccacctgcacaccagattctgcagccacggccccaagtacgccgagctggtgctgaacaagcccctggacagagaggagcagcccgaggtgaacctgaccatcaccgccgtggacggcggcagcccccccaagagcggcaccgcccacatccacgtggtggtgctggacgtgaacgaccacgtgccccagttcagcagactggtgtacagagcccaggtgagcgagaacagccccaacggcagcctggtggccaccgtgaccgccgtggacctggacgagggcaccaacaaggccatcacctacagcctggcccagaaccccgaggccatcctgaagaccttccagatcgacccccagaacggcgaggtgagactgagaggccccctggacttcgaggccatcgagacctacgacatcgacatccaggccaccgacggcggcggcctgagcgcccacagcaaggtgctggtggaggtggtggacgtgaacgacaacccccccgaggtgatggtgagcagcgtgagcagccccctgcccgaggacagccccccccagaccgtggtggccctgttcaccatcagagacagagacatcagagtgggcggcaaggtgacctgcttcctgagagaggacctgcccttcgtgatcaagcccaccttcggcaacagctacagcctggtgaccgacagaagcctggacagagaggaggtgagcggctacaacatcaccatcgtggccatggacaccggcccccccagcctgagcgccgagaccatgatcgaggtgctgatcagcgacgtgaacgacaacccccccatcttcagagaggacagctacatcctgaccgtgagagagaacaacagccccgccgtgttcatcggcaaggtgcacgccgaggacctggacctgggcgagaacgcccagatcacctacagcctgctgccccccaagaacggcgacctgagcgtgttcgcctacatcagcatcaacagcggcaacggcaagctgtacgccctgagaaccatggactacgaggccatccaggacttccagttcgtggtgaaggccaccgacggcggcttcctgagcctgagcagccaggtgaccgtgagagtggtggtgctggacgacaacgacaacagacccatgatcctgtaccccctgcagaacggcaccctgccctgcaacgacctggtgcccagaagcgccgaggccggctacctggtgaccaaggtggtggccgtggacggcgacagcggccagaacagctggctgagctaccacctgctgaaggccaccgacctgggcctgttcagcgtgcagagacagaacggcgagatccacaccctgagacagatcagcgagagagaccccatgatgcagaagctgatcatcctggtgcaggaccacggccagcccgccctgagcaccaccgtgagcctgaacatcctgctggtggacggcttcagcgagccctacctgcagttccaggaccccaccaagcacagcagaaaggtgaaccccagcaccaagtacctggtgatcagcctggtgatcctgagcttcctgttcctgctgagcgtgatcgtgatcttcatcatccacgtgtaccagaagatcaagtacagagagaagttcaccatccaggagcacttctacgacgactgcaacttcagcaacaacctggtgcagggccagggcaacggcagcctgagcagaccctgcccctacgagatgtgcagcgccaccggcaccggcaacagcgagttcagattcctgaagagattcatgcccaacttccccttcccccacgccaccggcgagatcaagatggaggccggcagcagcctgccccccaacagcgacagaaacaagagccagagactggagggccacgaccaggtgagcgacgactacatgtag

SEQ ID NO: 95721 - DNA, 2394 bp, synthetic construct
  misc_feature 1..2394: note = Description of Artificial Sequence: Synthetic coding sequence
  source 1..2394: mol_type = other DNA
atggagaaccagggcaccagaacccagcagatcagacaggtgctgctgctgttcgtgctgctgggcatgagccaggccggcagcgagacctggagcttcagcgtggccgaggagatgcagagcggcagcttcgtgggcaacctggccaaggacctgggcctgaaggtgagagagctgagcagcagaggcgccagagtggtgagcaacgacaagaagcagagactgcagctggacatcaacaccggcgacctgctgctgagcgagaccctggacagagaggagctgtgcggcagcatcgagccctgcgtgctgcacctgcaggtgctgatgcagaaccccacccagttcctgcagatcgagctgcaggtgagagacatcaacgaccacagccccatcttcagcgagaagcagatgctgctggagatccccgagaacagccccgtgggcgccgtgttcctgctggagagcgccaaggacctggacgtgggcatcaacgccgtgaagagctacaccatcagccccaacagccacttccacatcaagatgagagtgatccccgacaacagaaagtaccccgagctggtgctggacaaggccctggactacgaggagctgcccgagctgagcttcatcctgagcgccctggacggcggcagcccccccagaagcggcaccgccctggtgagagtggtggtggtggacatcaacgacaacagccccgagttcgagcaggccttctacgaggtgaagatcagagagaacagcatcctgggcagcctgatcctgatcgtgagcgcctgggacctggacagcggcaccaacggcgagatctgctacaccttcagccacgccagcgaggacatcagaaagaccttcgagatcaaccagaagagcggcgagatcaccctgagagcccccctggacttcgagaccatcgagagctacagcatcatcatccaggccaccgacggcggcggcctgttcggcaagagcaccgtgatcatccacgtgatcgacgtgaacgacaacgcccccgagatcaccgtgagcagcatcaccagccccatccccgagaacacccccgagaccgtggtgatggtgttcagcatccaggacatcgacagcggcgacaacggcagaatcgtgtgcagcatccccgaggacctgcccttcgtgctgaagagcagcgtggagaactactacaccctggagaccgagagacccctggacagagagagcaccgccgagtacaacatcaccatcaccgtgaccgacctgggcatccccagactgaagaccgagcacaacaccaccgtgctggtgagcgacgtgaacgacaacgcccccaccttcacccagaccagctacaccctgttcgtgagagagaacaacagccccgccctgcacatcggcagcgtgagcgccaccgacagagacagcggcaccaacgcccaggtgaactacagcctgctgcccccccaggacctgcacctgcccctggccagcctggtgagcatcaacaccgacaacggccacctgttcgccctgagaagcctggactacgaggccctgcaggccttcgacttcagagtgggcgccaccgacagaggcagccccgccctgagcagcgaggccctggtgagagtgctggtgctggacgccaacgacaacagccccttcgtgctgtaccccctgcagaacggcagcgccccctgcaccgagctggtgcccagagccgccgagcccggctacctggtgaccaaggtggtggccgtggacggcgacagcggccagaacgcctggctgagctaccagctgctgaaggccaccgagcccggcctgttcggcgtgtgggcccacaacggcgaggtgagaaccgccagactgctgagcgagagagacgccgccaagcacagactggtggtgctggtgaaggacaacggcgagccccccagaagcgccaccgccaccctgcaggtgctgctggtggacggcttcagccagccctacctgcccctgcccgaggccgcccccgcccaggcccaggccgacagcctgaccgtgtacctggtggtggccctggccagcgtgagcagcctgttcctgttcagcgtgctgctgttcgtggccgtgagactgtgcagaagaagcagagccgccagcgtgggcagctgcagcgtgcccaagggccccttccccggccacctggtggacgtgagcggcaccggcaccctgagccagagctaccagtacgaggtgtgcctgaccggcggcagcgagaccaacgagttcaagttcctgaagcccgtgatccccaacatccaggccaagggcctgggcaagaacagcgaggagaacagcaccttcagaaacagcttcggcttcaacttctag

SEQ ID NO: 95722 - DNA, 1299 bp, synthetic construct
  misc_feature 1..1299: note = Description of Artificial Sequence: Synthetic coding sequence
  source 1..1299: mol_type = other DNA
atggtgttcagcatccaggacatcgacagcggcgacaacggcagaatcgtgtgcagcatccccgaggacctgcccttcgtgctgaagagcagcgtggagaactactacaccctggagaccgagagacccctggacagagagagcaccgccgagtacaacatcaccatcaccgtgaccgacctgggcatccccagactgaagaccgagcacaacaccaccgtgctggtgagcgacgtgaacgacaacgcccccaccttcacccagaccagctacaccctgttcgtgagagagaacaacagccccgccctgcacatcggcagcgtgagcgccaccgacagagacagcggcaccaacgcccaggtgaactacagcctgctgcccccccaggacctgcacctgcccctggccagcctggtgagcatcaacaccgacaacggccacctgttcgccctgagaagcctggactacgaggccctgcaggccttcgacttcagagtgggcgccaccgacagaggcagccccgccctgagcagcgaggccctggtgagagtgctggtgctggacgccaacgacaacagccccttcgtgctgtaccccctgcagaacggcagcgccccctgcaccgagctggtgcccagagccgccgagcccggctacctggtgaccaaggtggtggccgtggacggcgacagcggccagaacgcctggctgagctaccagctgctgaaggccaccgagcccggcctgttcggcgtgtgggcccacaacggcgaggtgagaaccgccagactgctgagcgagagagacgccgccaagcacagactggtggtgctggtgaaggacaacggcgagccccccagaagcgccaccgccaccctgcaggtgctgctggtggacggcttcagccagccctacctgcccctgcccgaggccgcccccgcccaggcccaggccgacagcctgaccgtgtacctggtggtggccctggccagcgtgagcagcctgttcctgttcagcgtgctgctgttcgtggccgtgagactgtgcagaagaagcagagccgccagcgtgggcagctgcagcgtgcccaagggccccttccccggccacctggtggacgtgagcggcaccggcaccctgagccagagctaccagtacgaggtgtgcctgaccggcggcagcgagaccaacgagttcaagttcctgaagcccgtgatccccaacatccaggccaagggcctgggcaagaacagcgaggagaacagcaccttcagaaacagcttcggcttcaacttctag

SEQ ID NO: 95723 - DNA, 399 bp, synthetic construct
  misc_feature 1..399: note = Description of Artificial Sequence: Synthetic coding sequence
  source 1..399: mol_type = other DNA
accatcgagagctacagcatcatcatccaggccaccgacggcggcggcctgttcggcaagagcaccgtgatcatccacgtgatcgacgtgaacgacaacgcccccgagatcaccgtgagcagcatcaccagccccatccccgagaacacccccgagaccgtggtgatggtgttcagcatccaggacatcgacggcaccaccgaggagctgttcgtgcccttcagaaagaccagccacgtgctgaagagcagcgtggagaactactacaccctggagaccgagagacccctggacagagagagcaccgccgagtacaacatcaccatcaccgtgaccgacctgggcatccccagactgaagaccgagcacaacaccaccgtgctggtgagcgacgtgtag

SEQ ID NO: 95724 - DNA, 2388 bp, synthetic construct
  misc_feature 1..2388: note = Description of Artificial Sequence: Synthetic coding sequence
  source 1..2388: mol_type = other DNA
atggagaacggcggcgccggcaccctgcagatcagacaggtgctgctgttcttcgtgctgctgggcatgagccaggccggcagcgagaccggcaacttcctggtgatggaggagctgcagagcggcagcttcgtgggcaacctggccaagaccctgggcctggaggtgagcgagctgagcagcagaggcgccagagtggtgagcaacgacaacaaggagtgcctgcagctggacaccaacaccggcgacctgctgctgagagagatgctggacagagaggagctgtgcggcagcaacgagccctgcgtgctgtacttccaggtgctgatgaagaaccccacccagttcctgcagatcgagctgcaggtgagagacatcaacgaccacagccccgtgttcctggagaaggagatgctgctggagatccccgagaacagccccgtgggcgccgtgttcctgctggagagcgccaaggacctggacgtgggcatcaacgccgtgaagagctacaccatcaaccccaacagccacttccacgtgaagatcagagtgaaccccgacaacagaaagtaccccgagctggtgctggacaaggccctggactacgaggagagacccgagctgagcttcatcctgaccgccctggacggcggcagcccccccagaagcggcaccgccctggtgagagtggtggtggtggacatcaacgacaacagccccgagttcgagcaggccttctacgaggtgaagatcctggagaacagcatcctgggcagcctggtggtgaccgtgagcgcctgggacctggacagcggcaccaacagcgagctgagctacaccttcagccacgccagcgaggacatcagaaagaccttcgagatcaaccagaagagcggcgacatcaccctgaccgcccccctggacttcgaggccatcgagagctacagcatcatcatccaggccaccgacggcggcggcctgttcggcaagagcaccgtgagaatccaggtgatggacgtgaacgacaacgcccccgagatcaccgtgagcagcatcaccagccccatccccgagaacacccccgagaccgtggtgatggtgttcagaatcagagacagagacagcggcgacaacggcaagatggtgtgcagcatccccgaggacatccccttcgtgctgaagagcagcgtgaacaactactacaccctggagaccgagagacccctggacagagagagcagagccgagtacaacatcaccatcaccgtgaccgacctgggcacccccagactgaagaccgagcacaacatcaccgtgctggtgagcgacgtgaacgacaacgcccccgccttcacccagaccagctacgccctgttcgtgagagagaacaacagccccgccctgcacatcggcagcatcagcgccaccgacagagacagcggcaccaacgcccaggtgaactacagcctgctgcccagccaggacccccacctgcccctggccagcctggtgagcatcaacgccgacaacggccacctgttcgccctgagaagcctggactacgaggccctgcagggcttccagttcagagtgggcgccaccgaccacggcagccccgccctgagcagcgaggccctggtgagagtgctggtgctggacgccaacgacaacagccccttcgtgctgtaccccctgcagaacggcagcgccccctgcaccgagctggtgccctgggccgccgagcccggctacctggtgaccaaggtggtggccgtggacggcgacagcggccagaacgcctggctgagctaccagctgctgaaggccaccgagcccggcctgttcggcgtgtgggcccacaacggcgaggtgagaaccgccagactgctgagcgagagagacgccgccaagcacagactggtggtgctggtgaaggacaacggcgagccccccagaagcgccaccgccaccctgcacgtgctgctggtggacggcttcagccagccctacctgcccctgcccgaggccgcccccgcccaggcccaggccgacagcctgaccgtgtacctggtggtggccctggccagcgtgagcagcctgttcctgttcagcgtgctgctgttcgtggccgtgagactgtgcagaagaagcagagccgcccccgtgggcagatgcagcgtgcccgagggccccttccccggccacctggtggacgtgagcggcaccggcaccctgagccagagctaccactacgaggtgtgcgtgaccggcggcagcagaagcaacaagttcaagttcctgaagcccatcatccccaacttcctgccccagagcaccggcagcgaggtggaggagaacccccccttccagaacaacctgggcttctag

SEQ ID NO: 95725 - DNA, 1257 bp, synthetic construct
  misc_feature 1..1257: note = Description of Artificial Sequence: Synthetic coding sequence
  source 1..1257: mol_type = other DNA
atggtgtgcagcatccccgaggacatccccttcgtgctgaagagcagcgtgaacaactactacaccctggagaccgagagacccctggacagagagagcagagccgagtacaacatcaccatcaccgtgaccgacctgggcacccccagactgaagaccgagcacaacatcaccgtgctggtgagcgacgtgaacgacaacgcccccgccttcacccagaccagctacgccctgttcgtgagagagaacaacagccccgccctgcacatcggcagcatcagcgccaccgacagagacagcggcaccaacgcccaggtgaactacagcctgctgcccagccaggacccccacctgcccctggccagcctggtgagcatcaacgccgacaacggccacctgttcgccctgagaagcctggactacgaggccctgcagggcttccagttcagagtgggcgccaccgaccacggcagccccgccctgagcagcgaggccctggtgagagtgctggtgctggacgccaacgacaacagccccttcgtgctgtaccccctgcagaacggcagcgccccctgcaccgagctggtgccctgggccgccgagcccggctacctggtgaccaaggtggtggccgtggacggcgacagcggccagaacgcctggctgagctaccagctgctgaaggccaccgagcccggcctgttcggcgtgtgggcccacaacggcgaggtgagaaccgccagactgctgagcgagagagacgccgccaagcacagactggtggtgctggtgaaggacaacggcgagccccccagaagcgccaccgccaccctgcacgtgctgctggtggacggcttcagccagccctacctgcccctgcccgaggccgcccccgcccaggcccaggccgacagcctgaccgtgtacctggtggtggccctggccagcgtgagcagcctgttcctgttcagcgtgctgctgttcgtggccgtgagactgtgcagaagaagcagagccgcccccgtgggcagatgcagcgtgcccgagggccccttccccggccacctggtggacgtgagcggcaccggcaccctgagccagagctaccactacgaggtgtgcgtgaccggcggcagcagaagcaacaagttcaagttcctgaagcccatcatccccaacttcctgccccagagcaccggcagcgaggtggaggagaacccccccttccagaacaacctgggcttctggatccagtag

SEQ ID NO: 95726 - DNA, 1377 bp, synthetic construct
  misc_feature 1..1377: note = Description of Artificial Sequence: Synthetic coding sequence
  source 1..1377: mol_type = other DNA
atggacgtgaacgacaacgcccccgagatcaccgtgagcagcatcaccagccccatccccgagaacacccccgagaccgtggtgatggtgttcagaatcagagacagagacagcggcgacaacggcaagatggtgtgcagcatccccgaggacatccccttcgtgctgaagagcagcgtgaacaactactacaccctggagaccgagagacccctggacagagagagcagagccgagtacaacatcaccatcaccgtgaccgacctgggcacccccagactgaagaccgagcacaacatcaccgtgctggtgagcgacgtgaacgacaacgcccccgccttcacccagaccagctacgccctgttcgtgagagagaacaacagccccgccctgcacatcggcagcatcagcgccaccgacagagacagcggcaccaacgcccaggtgaactacagcctgctgcccagccaggacccccacctgcccctggccagcctggtgagcatcaacgccgacaacggccacctgttcgccctgagaagcctggactacgaggccctgcagggcttccagttcagagtgggcgccaccgaccacggcagccccgccctgagcagcgaggccctggtgagagtgctggtgctggacgccaacgacaacagccccttcgtgctgtaccccctgcagaacggcagcgccccctgcaccgagctggtgccctgggccgccgagcccggctacctggtgaccaaggtggtggccgtggacggcgacagcggccagaacgcctggctgagctaccagctgctgaaggccaccgagcccggcctgttcggcgtgtgggcccacaacggcgaggtgagaaccgccagactgctgagcgagagagacgccgccaagcacagactggtggtgctggtgaaggacaacggcgagccccccagaagcgccaccgccaccctgcacgtgctgctggtggacggcttcagccagccctacctgcccctgcccgaggccgcccccgcccaggcccaggccgacagcctgaccgtgtacctggtggtggccctggccagcgtgagcagcctgttcctgttcagcgtgctgctgttcgtggccgtgagactgtgcagaagaagcagagccgcccccgtgggcagatgcagcgtgcccgagggccccttccccggccacctggtggacgtgagcggcaccggcaccctgagccagagctaccactacgaggtgtgcgtgaccggcggcagcagaagcaacaagttcaagttcctgaagcccatcatccccaacttcctgccccagagcaccggcagcgaggtggaggagaacccccccttccagaacaacctgggcttctag

SEQ ID NO: 95727 - DNA, 2397 bp, synthetic construct
  misc_feature 1..2397: note = Description of Artificial Sequence: Synthetic coding sequence
  source 1..2397: mol_type = other DNA
atggaggccagcggcaagctgatctgcagacagagacaggtgctgttcagcttcctgctgctgggcctgagcctggccggcgccgccgagcccagaagctacagcgtggtggaggagaccgagggcagcagcttcgtgaccaacctggccaaggacctgggcctggagcagagagagttcagcagaagaggcgtgagagtggtgagcagaggcaacaagctgcacctgcagctgaaccaggagaccgccgacctgctgctgaacgagaagctggacagagaggacctgtgcggccacaccgagccctgcgtgctgagattccaggtgctgctggagagccccttcgagttcttccaggccgagctgcaggtgatcgacatcaacgaccacagccccgtgttcctggacaagcagatgctggtgaaggtgagcgagagcagcccccccggcaccaccttccccctgaagaacgccgaggacctggacgtgggccagaacaacatcgagaactacatcatcagccccaacagctacttcagagtgctgaccagaaagagaagcgacggcagaaagtaccccgagctggtgctggacaaggccctggacagagaggaggaggccgagctgagactgaccctgaccgccctggacggcggcagcccccccagaagcggcaccgcccaggtgtacatcgaggtgctggacgtgaacgacaacgcccccgagttcgagcagcccttctacagagtgcagatcagcgaggacagccccgtgggcttcctggtggtgaaggtgagcgccaccgacgtggacaccggcgtgaacggcgagatcagctacagcctgttccaggccagcgaggagatcggcaagaccttcaagatcaaccccctgaccggcgagatcgagctgaagaagcagctggacttcgagaagctgcagagctacgaggtgaacatcgaggccagagacgccggcaccttcagcggcaagtgcaccgtgctgatccaggtgatcgacgtgaacgaccacgcccccgaggtgaccatgagcgccttcaccagccccatccccgagaacgcccccgagaccgtggtggccctgttcagcgtgagcgacctggacagcggcgagaacggcaagatcagctgcagcatccaggaggacctgcccttcctgctgaagagcgccgagaacttctacaccctgctgaccgagagacccctggacagagagagcagagccgagtacaacatcaccatcaccgtgaccgacctgggcacccccatgctgatcacccagctgaacatgaccgtgctgatcgccgacgtgaacgacaacgcccccgccttcacccagaccagctacaccctgttcgtgagagagaacaacagccccgccctgcacatcagaagcgtgagcgccaccgacagagacagcggcaccaacgcccaggtgacctacagcctgctgcccccccaggacccccacctgcccctgaccagcctggtgagcatcaacgccgacaacggccacctgttcgccctgagaagcctggactacgaggccctgcagggcttccagttcagagtgggcgccagcgaccacggcagccccgccctgagcagcgaggccctggtgagagtggtggtgctggacgccaacgacaacagccccttcgtgctgtaccccctgcagaacggcagcgccccctgcaccgagctggtgcccagagccgccgagcccggctacctggtgaccaaggtggtggccgtggacggcgacagcggccagaacgcctggctgagctaccagctgctgaaggccaccgagctgggcctgttcggcgtgtgggcccacaacggcgaggtgagaaccgccagactgctgagcgagagagacgccgccaagcacagactggtggtgctggtgaaggacaacggcgagccccccagaagcgccaccgccaccctgcacgtgctgctggtggacggcttcagccagccctacctgcccctgcccgaggccgcccccacccaggcccaggccgacctgctgaccgtgtacctggtggtggccctggccagcgtgagcagcctgttcctgttcagcgtgctgctgttcgtggccgtgagactgtgcagaagaagcagagccgccagcgtgggcagatgcctggtgcccgagggccccctgcccggccacctggtggacatgagcggcaccagaaccctgagccagagctaccagtacgaggtgtgcctggccggcggcagcggcaccaacgagttcaagttcctgaagcccatcatccccaacttccccccccagtgccccggcaaggagatccagggcaacagcaccttccccaacaacttcggcttcaacatccagtag

SEQ ID NO: 95728 - DNA, 2235 bp, synthetic construct
  misc_feature 1..2235: note = Description of Artificial Sequence: Synthetic coding sequence
  source 1..2235: mol_type = other DNA
atggaggccagcggcaagctgatctgcagacagagacaggtgctgttcagcttcctgctgctgggcctgagcctggccggcgccgccgagcccagaagctacagcgtggtggaggagaccgagggcagcagcttcgtgaccaacctggccaaggacctgggcctggagcagagagagttcagcagaagaggcgtgagagtggtgagcagaggcaacaagctgcacctgcagctgaaccaggagaccgccgacctgctgctgaacgagaagctggacagagaggacctgtgcggccacaccgagccctgcgtgctgagattccaggtgctgctggagagccccttcgagttcttccaggccgagctgcaggtgatcgacatcaacgaccacagccccgtgttcctggacaagcagatgctggtgaaggtgagcgagagcagcccccccggcaccaccttccccctgaagaacgccgaggacctggacgtgggccagaacaacatcgagaactacatcatcagccccaacagctacttcagagtgctgaccagaaagagaagcgacggcagaaagtaccccgagctggtgctggacaaggccctggacagagaggaggaggccgagctgagactgaccctgaccgccctggacggcggcagcccccccagaagcggcaccgcccaggtgtacatcgaggtgctggacgtgaacgacaacgcccccgagttcgagcagcccttctacagagtgcagatcagcgaggacagccccgtgggcttcctggtggtgaaggtgagcgccaccgacgtggacaccggcgtgaacggcgagatcagctacagcctgttccaggccagcgaggagatcggcaagaccttcaagatcaaccccctgaccggcgagatcgagctgaagaagcagctggacttcgagaagctgcagagctacgaggtgaacatcgaggccagagacgccggcaccttcagcggcaagtgcaccgtgctgatccaggtgatcgacgtgaacgaccacgcccccgaggtgaccatgagcgccttcaccagccccatccccgagaacgcccccgagaccgtggtggccctgttcagcgtgagcgacctggacagcggcgagaacggcaagatcagctgcagcatccaggaggacctgcccttcctgctgaagagcgccgagaacttctacaccctgctgaccgagagacccctggacagagagagcagagccgagtacaacatcaccatcaccgtgaccgacctgggcacccccatgctgatcacccagctgaacatgaccgtgctgatcgccgacgtgaacgacaacgcccccgccttcacccagaccagctacaccctgttcgtgagagagaacaacagccccgccctgcacatcagaagcgtgagcgccaccgacagagacagcggcaccaacgcccaggtgacctacagcctgctgccccccagagtggtggtgctggacgccaacgacaacagccccttcgtgctgtaccccctgcagaacggcagcgccccctgcaccgagctggtgcccagagccgccgagcccggctacctggtgaccaaggtggtggccgtggacggcgacagcggccagaacgcctggctgagctaccagctgctgaaggccaccgagctgggcctgttcggcgtgtgggcccacaacggcgaggtgagaaccgccagactgctgagcgagagagacgccgccaagcacagactggtggtgctggtgaaggacaacggcgagccccccagaagcgccaccgccaccctgcacgtgctgctggtggacggcttcagccagccctacctgcccctgcccgaggccgcccccacccaggcccaggccgacctgctgaccgtgtacctggtggtggccctggccagcgtgagcagcctgttcctgttcagcgtgctgctgttcgtggccgtgagactgtgcagaagaagcagagccgccagcgtgggcagatgcctggtgcccgagggccccctgcccggccacctggtggacatgagcggcaccagaaccctgagccagagctaccagtacgaggtgtgcctggccggcggcagcggcaccaacgagttcaagttcctgaagcccatcatccccaacttccccccccagtgccccggcaaggagatccagggcaacagcaccttccccaacaacttcggcttcaacatccagtag

SEQ ID NO: 95729 - DNA, 2409 bp, synthetic construct
  misc_feature 1..2409: note = Description of Artificial Sequence: Synthetic coding sequence
  source 1..2409: mol_type = other DNA
atggaggccagcggcaagctgatctgcagacagagacaggtgctgttcagcttcctgctgctgggcctgagcctggccggcgccgccgagcccagaagctacagcgtggtggaggagaccgagggcagcagcttcgtgaccaacctggccaaggacctgggcctggagcagagagagttcagcagaagaggcgtgagagtggtgagcagaggcaacaagctgcacctgcagctgaaccaggagaccgccgacctgctgctgaacgagaagctggacagagaggacctgtgcggccacaccgagccctgcgtgctgagattccaggtgctgctggagagccccttcgagttcttccaggccgagctgcaggtgatcgacatcaacgaccacagccccgtgttcctggacaagcagatgctggtgaaggtgagcgagagcagcccccccggcaccaccttccccctgaagaacgccgaggacctggacgtgggccagaacaacatcgagaactacatcatcagccccaacagctacttcagagtgctgaccagaaagagaagcgacggcagaaagtaccccgagctggtgctggacaaggccctggacagagaggaggaggccgagctgagactgaccctgaccgccctggacggcggcagcccccccagaagcggcaccgcccaggtgtacatcgaggtgctggacgtgaacgacaacgcccccgagttcgagcagcccttctacagagtgcagatcagcgaggacagccccgtgggcttcctggtggtgaaggtgagcgccaccgacgtggacaccggcgtgaacggcgagatcagctacagcctgttccaggccagcgaggagatcggcaagaccttcaagatcaaccccctgaccggcgagatcgagctgaagaagcagctggacttcgagaagctgcagagctacgaggtgaacatcgaggccagagacgccggcaccttcagcggcaagtgcaccgtgctgatccaggtgatcgacgtgaacgaccacgcccccgaggtgaccatgagcgccttcaccagccccatccccgagaacgcccccgagaccgtggtggccctgttcagcgtgagcgacctggacagcggcgagaacggcaagatcagctgcagcatccaggaggacctgcccttcctgctgaagagcgccgagaacttctacaccctgctgaccgagagacccctggacagagagagcagagccgagtacaacatcaccatcaccgtgaccgacctgggcacccccatgctgatcacccagctgaacatgaccgtgctgatcgccgacgtgaacgacaacgcccccgccttcacccagaccagctacaccctgttcgtgagagagaacaacagccccgccctgcacatcagaagcgtgagcgccaccgacagagacagcggcaccaacgcccaggtgacctacagcctgctgcccccccaggacccccacctgcccctgaccagcctggtgagcatcaacgccgacaacggccacctgttcgccctgagaagcctggactacgaggccctgcagggcttccagttcagagtgggcgccagcgaccacggcagccccgccctgagcagcgaggccctggtgagagtggtggtgctggacgccaacgacaacagccccttcgtgctgtaccccctgcagaacggcagcgccccctgcaccgagctggtgcccagagccgccgagcccggctacctggtgaccaaggtggtggccgtggacggcgacagcggccagaacgcctggctgagctaccagctgctgaaggccaccgagctgggcctgttcggcgtgtgggcccacaacggcgaggtgagaaccgccagactgctgagcgagagagacgccgccaagcacagactggtggtgctggtgaaggacaacggcgagccccccagaagcgccaccgccaccctgcacgtgctgctggtggacggcttcagccagccctacctgcccctgcccgaggccgcccccacccaggcccaggccgacctgctgaccgtgtacctggtggtggccctggccagcgtgagcagcctgttcctgttcagcgtgctgctgttcgtggccgtgagactgtgcagaagaagcagagccgccagcgtgggcagatgcctggtgcccgagggccccctgcccggccacctggtggacatgagcggcaccagaaccctgagccagagctaccagtacgaggtgtgcctggccggcggcagcggcaccaacgagttcaagttcctgaagcccatcatccccaacttccccccccagtgccccggcaaggagatccagggcaacagcaccttccccaacctgtgcgtgtgcaacatcgtgagaatctacagctag

SEQ ID NO: 95730 - DNA, 2397 bp, synthetic construct
  misc_feature 1..2397: note = Description of Artificial Sequence: Synthetic coding sequence
  source 1..2397: mol_type = other DNA
atggagatcagaggcgccctggacctgagaaagagacaggtgctgatcttcctggtgctgctgggcctgagcagagccggcaccgagagcgcccactacagcgtggccgaggagaccgagatcggcagcttcgtggccaacctggccagagacctgggcctgggcgtggaggagctgagcagcagagaggccagagtggtgagcgacgacaacaagaagtacctgcacctggacctgctgaccggcaacctgctgctgaacgagaagctggacagagacgagctgtgcggcagcaccgagccctgcgtgctgcacttccaggtggtgctggagaaccccctgcagttcttcagattcgagctgtgcgtgaaggacatcaacgaccacagccccaccttcctggacaaggagatcctgatcaagatcagcgagggcaccaccgtgggcgccaccttcctgatggagagcgcccaggacctggacgtgggcagcaacagcctgcagaactacaccatcagccccaacagccacttctacatcaagatccccgacagcagcgacagaaagatctaccccgagctggtgctggacagagccctggactacgagcaggaggccgagctgagactgaccctgaccgccgtggacggcggcagcccccccaagagcggcaccaccctggtgctgatcaaggtgctggacatcaacgacaacgcccccgagttcccccagagcctgtacgaggtgcaggtgcccgaggacagacccctgggcagctggatcgccaccatcagcgccaaggacctggacgccggcaactacggcaagatcagctacaccttcttccacgccagcgaggacatcagaaagaccttcgagatcaaccccatcagcggcgaggtgaacctgagaagccccctggacttcgaggtgatccagagctacaccatcaacatccaggccaccgacggcggcggcctgagcggcaagtgcaccctgctggtgaaggtgatggacatcaacgacaacccccccgaggtgaccatcagcagcatcaccaagagaatccccgagaacgccagcgagaccctggtggccctgttcagcatcctggaccaggacagcggcgacaacggcagaatgatctgcagcatccaggacaacctgcccttcttcctgaagcccaccttcaagaacttcttcaccctggtgagcgagaaggccctggacagagagagccaggccgagtacaacatcaccatcaccgtgaccgacctgggcacccccagactgaagaccgagtacaacatcaccgtgctgctgagcgacgtgaacgacaacgcccccaccttcacccagaccagctacaccctgttcgtgagagagaacaacagccccgccctgcacatcggcagcgtgagcgccaccgacagagacagcggcaccaacgcccaggtgaactacagcctgctgcccccccaggacagacacctgcccctggccagcctggtgagcatcaacgccgacaacggccacctgttcgccctgagaagcctggactacgaggccctgcaggagttcgagttcagagtgggcgccaccgacagaggcagccccgccctgagcagcgaggccctggtgagagtgctggtgctggacgccaacgacaacagccccttcgtgctgtaccccctgcagaacggcagcgccccctgcaccgagctggtgcccagagccgccgagcccggctacctggtgaccaaggtggtggccgtggacggcgacagcggccagaacgcctggctgagctaccagctgctgaaggccaccgagcccggcctgttcggcgtgtgggcccacaacggcgaggtgagaaccgccagactgctgagcgagagagacgccgccaagcacagactggtggtgctggtgaaggacaacggcgagccccccagaagcgccaccgccaccctgcacgtgctgctggtggacggcttcagccagccctacctgcccctgcccgaggccgcccccgcccaggcccaggccgacagcctgaccgtgtacctggtggtggccctggccagcgtgagcagcctgttcctgttcagcgtgctgctgttcgtggccgtgagactgtgcagaagaagcagagccgccagcgtgggcagatgcagcgtgcccgagggccccttccccggccacctggtggacgtgagcggcaccggcaccctgagccagagctaccagtacgaggtgtgcctgaccggcggcagcggcaccaacgagttcaagttcctgaagcccatcatccccaacttccaggtgcacgacaccggcagaaacatgggcgagatcgagaacttcagaaacagcttcggcctgaacatccagtag

SEQ ID NO: 95731 - DNA, 1938 bp, synthetic construct
  misc_feature 1..1938: note = Description of Artificial Sequence: Synthetic coding sequence
  source 1..1938: mol_type = other DNA
atggagagcgcccaggacctggacgtgggcagcaacagcctgcagaactacaccatcagccccaacagccacttctacatcaagatccccgacagcagcgacagaaagatctaccccgagctggtgctggacagagccctggactacgagcaggaggccgagctgagactgaccctgaccgccgtggacggcggcagcccccccaagagcggcaccaccctggtgctgatcaaggtgctggacatcaacgacaacgcccccgagttcccccagagcctgtacgaggtgcaggtgcccgaggacagacccctgggcagctggatcgccaccatcagcgccaaggacctggacgccggcaactacggcaagatcagctacaccttcttccacgccagcgaggacatcagaaagaccttcgagatcaaccccatcagcggcgaggtgaacctgagaagccccctggacttcgaggtgatccagagctacaccatcaacatccaggccaccgacggcggcggcctgagcggcaagtgcaccctgctggtgaaggtgatggacatcaacgacaacccccccgaggtgaccatcagcagcatcaccaagagaatccccgagaacgccagcgagaccctggtggccctgttcagcatcctggaccaggacagcggcgacaacggcagaatgatctgcagcatccaggacaacctgcccttcttcctgaagcccaccttcaagaacttcttcaccctggtgagcgagaaggccctggacagagagagccaggccgagtacaacatcaccatcaccgtgaccgacctgggcacccccagactgaagaccgagtacaacatcaccgtgctgctgagcgacgtgaacgacaacgcccccaccttcacccagaccagctacaccctgttcgtgagagagaacaacagccccgccctgcacatcggcagcgtgagcgccaccgacagagacagcggcaccaacgcccaggtgaactacagcctgctgcccccccaggacagacacctgcccctggccagcctggtgagcatcaacgccgacaacggccacctgttcgccctgagaagcctggactacgaggccctgcaggagttcgagttcagagtgggcgccaccgacagaggcagccccgccctgagcagcgaggccctggtgagagtgctggtgctggacgccaacgacaacagccccttcgtgctgtaccccctgcagaacggcagcgccccctgcaccgagctggtgcccagagccgccgagcccggctacctggtgaccaaggtggtggccgtggacggcgacagcggccagaacgcctggctgagctaccagctgctgaaggccaccgagcccggcctgttcggcgtgtgggcccacaacggcgaggtgagaaccgccagactgctgagcgagagagacgccgccaagcacagactggtggtgctggtgaaggacaacggcgagccccccagaagcgccaccgccaccctgcacgtgctgctggtggacggcttcagccagccctacctgcccctgcccgaggccgcccccgcccaggcccaggccgacagcctgaccgtgtacctggtggtggccctggccagcgtgagcagcctgttcctgttcagcgtgctgctgttcgtggccgtgagactgtgcagaagaagcagagccgccagcgtgggcagatgcagcgtgcccgagggccccttccccggccacctggtggacgtgagcggcaccggcaccctgagccagagctaccagtacgaggtgtgcctgaccggcggcagcggcaccaacgagttcaagttcctgaagcccatcatccccaacttccaggtgcacgacaccggcagaaacatgggcgagatcgagaacttcagaaacagcttcggcctgaacatccagtag

SEQ ID NO: 95732 - DNA, 2382 bp, synthetic construct
  misc_feature 1..2382: note = Description of Artificial Sequence: Synthetic coding sequence
  source 1..2382: mol_type = other DNA
atggaggccagagtggagagagccgtgcagaagagacaggtgctgttcctgtgcgtgttcctgggcatgagctgggccggcgccgagcccctgagatacttcgtggccgaggagaccgagagaggcaccttcctgaccaacctggccaaggacctgggcctgggcgtgggcgagctgagagccagaggcaccagaatcgtgagcgaccagaacatgcagatcctgctgctgagcagcctgaccggcgacctgctgctgaacgagaagctggacagagaggagctgtgcggccccagagagccctgcgtgctgcccttccagctgctgctggagaagcccttccagatcttcagagccgagctgtgggtgagagacatcaacgaccacgcccccgtgttcctggacagagagatcagcctgaagatcctggagagcaccacccccggcgccgccttcctgctggagagcgcccaggacagcgacgtgggcaccaacagcctgagcaactacaccatcagccccaacgcctacttccacatcaacgtgcacgacagcggcgagggcaacatctaccccgagctggtgctgaaccaggtgctggacagagaggagatccccgagttcagcctgaccctgaccgccctggacggcggcagcccccccagaagcggcaccgccctggtgagaatcctggtgctggacgtgaacgacaacgcccccgacttcgtgagaagcctgtacaaggtgcaggtgcccgagaacagccccgtgggcagcatggtggtgagcgtgagcgccagagacctggacaccggcagcaacggcgagatcgcctacgccttcagctacgccaccgagagaatcctgaagaccttccagatcaaccccaccagcggcagcctgcacctgaaggcccagctggactacgaggccatccagacctacaccctgaccatccaggccaaggacggcggcggcctgagcggcaagtgcaccgtggtggtggacgtgaccgacatcaacgacaacagacccgagctgctgctgagcagcctgaccagccccatcgccgagaacagccccgagaccgtggtggccgtgttcagaatcagagacagagacagcggcaacaacggcaagaccgtgtgcagcatccaggacgacgtgcccttcatcctgaagcccagcgtggagaacttctacaccctggtgaccgagaagcccctggacagagagagaaacaccgagtacaacatcaccatcaccgtgaccgacctgggcacccccagactgaagaccgagcacaacatcaccgtgctggtgagcgacgtgaacgacaacgcccccgccttcacccagaccagctacaccctgttcgtgagagagaacaacagccccgccctgcccatcggcagcgtgagcgccaccgacagagacagcggcaccaacgcccaggtgatctacagcctgctgcccagccaggacccccacctgcccctggccagcctggtgagcatcaacgccgacaacggccacctgttcgccctgagaagcctggactacgaggccctgcaggccttcgagttcagagtgggcgccaccgacagaggcagccccgccctgagcagcgaggccctggtgagagtgctggtgctggacgccaacgacaacagccccttcgtgctgtaccccctgcagaacagcagcgccccctgcaccgagcccctgcccagagccgccgagcccggctacctggtgaccaaggtggtggccgtggacggcgacagcggccagaacgcctggctgagctaccagctgctgaaggccaccgagcccggcctgttcggcgtgtgggcccacaacggcgaggtgagaaccgccagactgctgagcgagagagacgccgccaagcagagactggtggtgctggtgaaggacaacggcgagccccccagaagcgccaccgccaccctgcacgtgctgctggtggacggcttcagccagccctacctgagactgcccgaggccgcccccgaccaggccaacagcctgaccgtgtacctggtggtggccctggccagcgtgagcagcctgttcctgctgagcgtgctgctgttcgtggccgtgagactgtgcagaagaagcagagccgcccccgtgggcagatgcagcgtgcccgagggccccttccccagacacctggtggacctgagcggcaccggcaccctgagccagagctaccagtacgaggtgtgcctgaccggcggcagcggcaccaacgagttcaagttcctgaagcccatcatccccaacctgctgccccagagcaccggcagagaggtggaggagaacagacccttccagaacaacctgggcttctag

SEQ ID NO: 95733 - DNA, 2331 bp, synthetic construct
  misc_feature 1..2331: note = Description of Artificial Sequence: Synthetic coding sequence
  source 1..2331: mol_type = other DNA
atggagatcggctggatgcacaacagaagacagagacaggtgctggtgttcttcgtgctgctgagcctgagcggcgccggcgccgagctgggcagctacagcgtggtggaggagaccgagagaggcagcttcgtggccaacctgggcaaggacctgggcctgggcctgaccgagatgagcaccagaaaggccagaatcatcagccagggcaacaagcagcacctgcagctgaaggcccagaccggcgacctgctgatcaacgagaagctggacagagaggagctgtgcggccccaccgagccctgcatcctgcacttccaggtgctgatggagaaccccctggagatcttccaggccgagctgagagtgatcgacatcaacgaccacagccccatgttcaccgagaaggagatgatcctgaagatccccgagaacagccccctgggcaccgagttccccctgaaccacgccctggacctggacgtgggcagcaacaacgtgcagaactacaagatcagccccagcagccacttcagagtgctgatccacgagttcagagacggcagaaagtaccccgagctggtgctggacaaggagctggacagagaggaggagccccagctgagactgaccctgaccgccctggacggcggcagcccccccagaagcggcaccgcccaggtgagaatcgaggtggtggacatcaacgacaacgcccccgagttcgagcagcccatctacaaggtgcagatccccgagaacagccccctgggcagcctggtggccaccgtgagcgccagagacctggacggcggcgccaacggcaagatcagctacaccctgttccagcccagcgaggacatcagcaagaccctggaggtgaaccccatgaccggcgaggtgagactgagaaagcaggtggacttcgagatggtgaccagctacgaggtgagaatcaaggccaccgacggcggcggcctgagcggcaagtgcaccctgctgctgcaggtggtggacgtgaacgacaaccccccccaggtgaccatgagcgccctgaccagccccatccccgagaacagccccgagatcgtggtggccgtgttcagcgtgagcgaccccgacagcggcaacaacggcaagaccatcagcagcatccaggaggacctgcccttcctgctgaagcccagcgtgaagaacttctacaccctggtgaccgagagagccctggacagagaggccagagccgagtacaacatcaccctgaccgtgaccgacatgggcacccccagactgaagaccgagcacaacatcaccgtgcagatcagcgacgtgaacgacaacgcccccaccttcacccagaccagctacaccctgttcgtgagagagaacaacagccccgccctgcacatcggcagcgtgagcgccaccgacagagacagcggcaccaacgcccaggtgacctacagcctgctgcccccccaggacccccacctgcccctggccagcctggtgagcatcaacgccgacaacggccacctgttcgccctgagaagcctggactacgaggccctgagagagttcgagttcagagtgagcgccaccgacagaggcagccccgccctgagcagcgaggccctggtgagagtgctggtgctggacgccaacgacaacagccccttcgtgctgtaccccctgcagaacggcagcgccccctgcaccgagctggtgcccagagccgccgagcccggctacctggtgaccaaggtggtggccgtggacggcgacagcggccagaacgcctggctgagctaccagctgctgaaggccaccgagcccggcctgttcggcgtgtgggcccacaacggcgaggtgagaaccgccagactgctgagcgagagagacgccgccaagcagagactggtggtgctggtgaaggacaacggcgagccccccagaagcgccaccgccaccctgcacgtgctgctggtggacggcttcagccagcccttcctgcccctgcccgaggccgcccccggccagacccaggccaacagcctgaccgtgtacctggtggtggccctggccagcgtgagcagcctgttcctgttcagcgtgctgctgttcgtggccgtgagactgtgcagaagaagcagagccgccagcgtgggcagatgcagcatgcccgagggccccttccccggcagactggtggacgtgagcggcaccggcaccctgagccagagctaccagtacgaggtgtgcctgaccggcggcagcgagaccagcgagttcaagttcctgaagcccatcatccccaacttcagcccctag

SEQ ID NO: 95734 - DNA, 2397 bp, synthetic construct
  misc_feature 1..2397: note = Description of Artificial Sequence: Synthetic coding sequence
  source 1..2397: mol_type = other DNA
atggaggccggcgagggcaaggagagagtgcccaagcagagacaggtgctgatcttcttcgtgctgctgggcatcgcccaggccagctgccagcccagacactacagcgtggccgaggagaccgagagcggcagcttcgtggccaacctgctgaaggacctgggcctggagatcggcgagctggccgtgagaggcgccagagtggtgagcaagggcaagaagatgcacctgcagttcgacagacagaccggcgacctgctgctgaacgagaagctggacagagaggagctgtgcggccccaccgagccctgcgtgctgcccttccaggtgctgctggagaaccccctgcagttcttccaggccgagctgagaatcagagacgtgaacgaccacagccccgtgttcctggacaaggagatcctgctgaagatccccgagagcatcacccccggcaccaccttcctgatcgagagagcccaggacctggacgtgggcaccaacagcctgcagaactacaccatcagccccaacttccacttccacctgaacctgcaggacagcctggacggcatcatcctgccccagctggtgctgaacagagccctggacagagaggagcagcccgagatcagactgaccctgaccgccctggacggcggcagcccccccagaagcggcaccgccctggtgagaatcgaggtggtggacatcaacgacaacgtgcccgagttcgccaagctgctgtacgaggtgcagatccccgaggacagccccgtgggcagccaggtggccatcgtgagcgccagagacctggacatcggcaccaacggcgagatcagctacgccttcagccaggccagcgaggacatcagaaagaccttcagactgagcgccaagagcggcgagctgctgctgagacagaagctggacttcgagagcatccagacctacaccgtgaacatccaggccaccgacggcggcggcctgagcggcacctgcgtggtgttcgtgcaggtgatggacctgaacgacaacccccccgagctgaccatgagcaccctgatcaaccagatccccgagaacctgcaggacaccctgatcgccgtgttcagcgtgagcgaccccgacagcggcgacaacggcagaatggtgtgcagcatccaggacgacctgcccttcttcctgaagcccagcgtggagaacttctacaccctggtgatcagcaccgccctggacagagagaccagaagcgagtacaacatcaccatcaccgtgaccgacttcggcacccccagactgaagaccgagcacaacatcaccgtgctggtgagcgacgtgaacgacaacgcccccgccttcacccagaccagctacaccctgttcgtgagagagaacaacagccccgccctgcacatcggcagcgtgagcgccaccgacagagacagcggcaccaacgcccaggtgacctacagcctgctgcccccccaggacccccacctgcccctggccagcctggtgagcatcaacgccgacaacggccacctgttcgccctgcagagcctggactacgaggccctgcaggccttcgagttcagagtgggcgccgccgacagaggcagccccgccctgagcagcgaggccctggtgagagtgctggtgctggacgccaacgacaacagccccttcgtgctgtaccccctgcagaacggcagcgccccctgcaccgagctggtgcccagagccgccgagcccggctacctggtgaccaaggtggtggccgtggacggcgacagcggccagaacgcctggctgagctaccagctgctgaaggccaccgagcccggcctgttcggcgtgtgggcccacaacggcgaggtgagaaccgccagactgctgagagagagagacgccgccaagcagagactggtggtgctggtgaaggacaacggcgagccccccagaagcgccaccgccaccctgcacgtgctgctggtggacggcttcagccagccctacctgctgctgcccgaggccgcccccgcccaggcccaggccgacctgctgaccgtgtacctggtggtggccctggccagcgtgagcagcctgttcctgttcagcgtgctgctgttcgtggccgtgagactgtgcagaagaagcagagccgccagcgtgggcagatgcagcgtgcccgagggccccttccccggccagatggtggacgtgagcggcaccggcaccctgagccagagctaccagtacgaggtgtgcctgaccggcggcagcggcaccaacgagttcaagttcctgaagcccatcatccccaacttcgtggcccagggcgccgagagagtgagcgaggccaaccccagcttcagaaagagcttcgagttcacctag

SEQ ID NO: 95735 - DNA, 648 bp, synthetic construct
  misc_feature 1..648: note = Description of Artificial Sequence: Synthetic coding sequence
  source 1..648: mol_type = other DNA
atgaacctggtgggcagctacgcccaccaccaccaccaccaccacccccaccccgcccaccccatgctgcacgagcccttcctgttcggccccgccagcagatgccaccaggagagaccctacttccagagctggctgctgagccccgccgacgccgcccccgacttccccgccggcggccccccccccgccgccgccgccgccgccaccgcctacggccccgacgccagacccggccagagccccggcagactggaggccctgggcggcagactgggcagaagaaagggcagcggccccaagaaggagagaagaagaaccgagagcatcaacagcgccttcgccgagctgagagagtgcatccccaacgtgcccgccgacaccaagctgagcaagatcaagaccctgagactggccaccagctacatcgcctacctgatggacgtgctggccaaggacgcccagagcggcgaccccgaggccttcaaggccgagctgaagaaggccgacggcggcagagagagcaagagaaagagagagctgcagcagcacgagggcttcccccccgccctgggccccgtggagaagagaatcaagggcagaaccggctggccccagcaggtgtgggccctggagctgaaccagtag

SEQ ID NO: 95736 - DNA, 2388 bp, synthetic construct
  misc_feature 1..2388: note = Description of Artificial Sequence: Synthetic coding sequence
  source 1..2388: mol_type = other DNA
atgaagaagctgggcagaatccaccccaacagacaggtgctggccttcatcctgatggtgttcctgagccaggtgagactggagcccatcagatacagcgtgctggaggagaccgagagcggcagcttcgtggcccacctggccaaggacctgggcctgggcatcggcgagctggccagcagaagcgccagagtgctgagcgacgacgacaagcagagactgcagctggacagacagaccggcgacctgctgctgagagagaagctggacagagaggagctgtgcggccccatcgagccctgcgtgctgcacttccaggtgttcctggagatgcccgtgcagttcttccagggcgagctgctgatccaggacatcaacgaccacagccccatcttccccgagagagaggtgctgctgaagatcctggagaacagccagcccggcaccctgttccccctgctgatcgccgaggacctggacgtgggcagcaacggcctgcagaagtacaccatcagccccaacagccacttccacatcctgaccagaaaccacagcgagggcaagaagtaccccgacctggtgcaggacaagcccctggacagagaggagcagcccgagttcagcctgaccctggtggccctggacggcggcagcccccccagaagcggcaccgtgatggtgagaatcctgatcatggacatcaacgacaacgcccccgagttcgtgcacaccccctacggcgtgcaggtgctggagaacagccccctggacagccccatcgtgagagtgctggccagagacatcgacgccggcaacttcggcagcgtgagctacggcctgttccaggccagcgacgagatcaagcagaccttcagcatcaacgaggtgaccggcgagatcctgctgaagaagaagctggacttcgagaagatcaagagctaccacgtggagatcgaggccaccgacggcggcggcctgagcggcaagggcaccgtggtgatcgaggtggtggacgtgaacgacaacccccccgagctgatcatcagcagcctgaccagcagcatccccgagaacgcccccgagaccgtggtgagcatcttcagaatcagagacagagacagcggcgagaacggcaagatgatctgcagcatccccgacaacctgcccttcatcctgaagcccaccctgaagaacttctacaccctggtgaccgagagacccctggacagagagaccagcgccgagtacaacatcaccatcgccgtgaccgacctgggcacccccagactgaagacccagcagaacatcaccgtgcaggtgagcgacgtgaacgacaacgcccccgccttcacccagaccagctacaccctgttcgtgagagagaacaacagccccgccctgcacatcggcagcgtgagcgccaccgacagagacagcggcaccaacgcccaggtgacctacagcctgctgcccccccaggacccccacctgcccctggccagcctggtgagcatcaacgccgacaacggccacctgttcgccctgagaagcctggactacgaggccctgcaggccttcgagttcagagtgggcgccagcgacagaggcagccccgccctgagcagcgaggccctggtgagagtgctggtgctggacaccaacgacaacagccccttcgtgctgtaccccctgcagaacggcagcgccccctgcaccgagctggtgcccagagccgccgagcccggctacctggtgaccaaggtggtggccgtggacggcgacagcggccagaacgcctggctgagctaccagctgctgaaggccaccgagcccggcctgttcggcgtgtgggcccacaacggcgaggtgagaaccgccagactgctgagcgagagagacgccgccaagcacagactggtggtgctggtgaaggacaacggcgagccccccagaagcgccaccgccaccctgcacgtgctgctggtggacggcttcagccagccctacctgcccctgcccgaggccgcccccgcccaggcccaggccgacagcctgaccgtgtacctggtggtggccctggccagcgtgagcagcctgttcctgttcagcgtgctgctgttcgtggccgtgagactgtgcagaagaagcagagccgccagcgtgggcagatgcagcgtgcccgagggccccttccccggccacctggtggacgtgagcggcaccggcaccctgagccagagctaccagtacgaggtgtgcctgaccggcgacagcggcaccggcgagttcaagttcctgaagcccatcttccccaacctgctggtgcaggacaccggcagagaggtgaaggagaaccccaagttcagaaacagcctggtgttcagctag

SEQ ID NO: 95737 - DNA, 2391 bp, synthetic construct
  misc_feature 1..2391: note = Description of Artificial Sequence: Synthetic coding sequence
  source 1..2391: mol_type = other DNA
atggaggccggcggcgagagattcctgagacagagacaggtgctgctgctgttcgtgttcctgggcggcagcctggccggcagcgagagcagaagatacagcgtggccgaggagaaggagaagggcttcctgatcgccaacctggccaaggacctgggcctgagagtggaggagctggccgccagaggcgcccaggtggtgagcaagggcaacaagcagcacttccagctgagccaccagaccggcgacctgctgctgaacgagaagctggacagagaggagctgtgcggccccaccgagccctgcatcctgcacttccagatcctgctgcagaaccccctgcagttcgtgaccaacgagctgagaatcatcgacgtgaacgaccacagccccgtgttcttcgagaacgagatgcacctgaagatcctggagagcaccctgcccggcaccgtgatccccctgggcaacgccgaggacctggacgtgggcagaaacagcctgcagaactacaccatcacccccaacagccacttccacgtgctgaccagaagcagaagagacggcagaaagtaccccgagctggtgctggacaaggccctggacagagaggagcagcccgagctgagcctgaccctgaccgccctggacggcggcagcccccccagaagcggcaccgcccagatcaacatccaggtgctggacatcaacgacaacgcccccgagttcgcccagcccctgtacgaggtggccgtgctggagaacacccccgtgaacagcgtgatcgtgaccgtgagcgccagcgacctggacaccggcagcttcggcaccatcagctacgccttcttccacgccagcgaggagatcagaaagaccttccagctgaaccccatcaccggcgacatgcagctggtgaagtacctgaacttcgaggccatcaacagctacgaggtggacatcgaggccaaggacggcggcggcctgagcggcaagagcaccgtgatcgtgcaggtggtggacgtgaacgacaacccccccgagctgaccctgagcagcgtgaacagccccatccccgagaacagcggcgagaccgtgctggccgtgttcagcgtgagcgacctggacagcggcgacaacggcagagtgatgtgcagcatcgagaacaacctgcccttcttcctgaagcccagcgtggagaacttctacaccctggtgagcgagggcgccctggacagagagaccagaagcgagtacaacatcaccatcaccatcaccgacctgggcacccccagactgaagaccaagtacaacatcaccgtgctggtgagcgacgtgaacgacaacgcccccgccttcacccagatcagctacaccctgttcgtgagagagaacaacagccccgccctgcacatcggcagcgtgagcgccaccgacagagacagcggcaccaacgcccaggtgacctacagcctgctgcccccccaggacccccacctgcccctgagcagcctggtgagcatcaacgccgacaacggccacctgttcgccctgagaagcctggactacgaggccctgcaggccttcgagttcagagtgggcgccaccgacagaggcagccccgccctgagcagcgaggccctggtgagagtgctggtgctggacgccaacgacaacagccccttcgtgctgtaccccctgcagaacggcagcgccccctgcaccgagctggtgcccagagccgccgagcccggctacctggtgaccaaggtggtggccgtggacggcgacagcggccagaacgcctggctgagctaccagctgctgaaggccaccgagcccggcctgttcggcgtgtgggcccacaacggcgaggtgagaaccgccagactgctgagcgagagagacgccgccaagcacagactggtggtgctggtgaaggacaacggcgagccccccagaagcgccaccgccaccctgcacgtgctgctggtggacggcttcagccagccctacctgcccctgcccgaggccgcccccgcccaggcccaggccgacctgctgaccgtgtacctggtggtggccctggccagcgtgagcagcctgttcctgttcagcgtgctgctgttcgtggccgtgagactgtgcagaagaagcagagccgccagcgtgggcagatgcagcgtgcccgagggccccttccccggccagatggtggacgtgagcggcaccggcaccctgagccagagctaccagtacgaggtgtgcctgaccggcggcagcggcaccaacgagttcaagttcctgaagcccatcatccccaacttcgtggcccagggcgccgagagagtgagcgaggccaaccccagcttcagaaagagcttcgagttcagctag

SEQ ID NO: 95738 - DNA, 1107 bp, synthetic construct
  misc_feature 1..1107: note = Description of Artificial Sequence: Synthetic coding sequence
  source 1..1107: mol_type = other DNA
ggcggcgccccccccagaagcggcaccaccaccatcagaatcgtggtgctggacaacaacgacaacgcccccgagttcctgcagagcttctacgaggtgcaggtgcccgagaacagccccctgaacagcctggtggtggtggtgagcgccagagacctggacgccggcgcctacggcagcgtggcctacgccctgttccagggcgacgaggtgacccagcccttcgtgatcgacgagaagaccgccgagatcagactgaagagagccctggacttcgaggccaccccctactacaacgtggagatcgtggccaccgacggcggcggcctgagcggcaagtgcaccgtggccatcgaggtggtggacgtgaacgacaacgcccccgagctgaccatgagcaccctgagcagccccacccccgagaacgcccccgagaccgtggtggccgtgttcagcgtgagcgaccccgacagcggcgacaacggcagaatgatctgcagcatccagaacgacctgcccttcctgctgaagcccaccctgaagaacttctacaccctggtgacccagagaaccctggacagagagagccaggccgagtacaacatcaccatcaccgtgaccgacatgggcacccccagactgaagaccgagcacaacatcaccgtgctggtgagcgacgtgaacgacaacgcccccgccttcacccagaccagctacaccctgttcgtgagagagaacaacagccccgccctgcacatcggcagcgtgagcgccaccgacagagacagcggcaccaacgcccaggtgacctacagcctgctgcccccccagaacccccacctgagactggccagcctggtgagcatcaacgccgacaacggccacctgttcgccctgagaagcctggactacgaggccctgcaggccttcgagttcagagtgggcgccaccgacagaggcagccccgccctgagcagcgaggccctggtgagagtgctgtgctggacccccaccaccaccagacccagctgctgcatcagatgcagaaccgccagaagactggcccccagctggtgccccggcagacccagcagagccacctggtag

SEQ ID NO: 95739 - DNA, 2388 bp, synthetic construct
  misc_feature 1..2388: note = Description of Artificial Sequence: Synthetic coding sequence
  source 1..2388: mol_type = other DNA
atggagaccgccctggccaagaccccccagaagagacaggtgatgttcctggccatcctgctgctgctgtgggaggccggcagcgaggccgtgagatacagcatccccgaggagaccgagagcggctacagcgtggccaacctggccaaggacctgggcctgggcgtgggcgagctggccaccagaggcgccagaatgcactacaagggcaacaaggagctgctgcagctggacatcaagaccggcaacctgctgctgtacgagaagctggacagagaggtgatgtgcggcgccaccgagccctgcatcctgcacttccagctgctgctggagaaccccgtgcagttcttccagaccgacctgcagctgaccgacatcaacgaccacgcccccgagttccccgagaaggagatgctgctgaagatccccgagagcacccagcccggcaccgtgttccccctgaagatcgcccaggacttcgacatcggcagcaacaccgtgcagaactacaccatcagccccaacagccacttccacgtggccacccacaacagaggcgacggcagaaagtaccccgagctggtgctggacaaggccctggacagagaggagagacccgagctgagcctgaccctgaccgccctggacggcggcgccccccccagaagcggcaccaccaccatcagaatcgtggtgctggacaacaacgacaacgcccccgagttcctgcagagcttctacgaggtgcaggtgcccgagaacagccccctgaacagcctggtggtggtggtgagcgccagagacctggacgccggcgcctacggcagcgtggcctacgccctgttccagggcgacgaggtgacccagcccttcgtgatcgacgagaagaccgccgagatcagactgaagagagccctggacttcgaggccaccccctactacaacgtggagatcgtggccaccgacggcggcggcctgagcggcaagtgcaccgtggccatcgaggtggtggacgtgaacgacaacgcccccgagctgaccatgagcaccctgagcagccccacccccgagaacgcccccgagaccgtggtggccgtgttcagcgtgagcgaccccgacagcggcgacaacggcagaatgatctgcagcatccagaacgacctgcccttcctgctgaagcccaccctgaagaacttctacaccctggtgacccagagaaccctggacagagagagccaggccgagtacaacatcaccatcaccgtgaccgacatgggcacccccagactgaagaccgagcacaacatcaccgtgctggtgagcgacgtgaacgacaacgcccccgccttcacccagaccagctacaccctgttcgtgagagagaacaacagccccgccctgcacatcggcagcgtgagcgccaccgacagagacagcggcaccaacgcccaggtgacctacagcctgctgcccccccagaacccccacctgagactggccagcctggtgagcatcaacgccgacaacggccacctgttcgccctgagaagcctggactacgaggccctgcaggccttcgagttcagagtgggcgccaccgacagaggcagccccgccctgagcagcgaggccctggtgagagtgctggtgctggacgccaacgacaacagccccttcgtgctgtaccccctgcagaacggcagcgccccctgcaccgagctggtgcccagagccgccgagcccggctacctggtgaccaaggtggtggccgtggacggcgacagcggccagaacgcctggctgagctaccagctgctgaaggccaccgagcccggcctgttcagcatgtgggcccacaacggcgaggtgagaaccgccagactgctgagcgagagagacgccgccaagcacagactggtggtgctggtgaaggacaacggcgagccccccagaagcgccaccgccaccctgcacgtgctgctggtggacggcttcagccagccctacctgcccctgcccgaggccgcccccgcccaggcccaggccgacagcctgaccgtgtacctggtggtggccctggccagcgtgagcagcctgttcctgttcagcgtgctgctgttcgtggccgtgagactgtgcagaagaagcagagccgccagcgtgggcagatgcagcgtgcccgagggccccttccccggccacctggtggacgtgagcggcaccggcaccctgagccagagctaccactacgaggtgtgcctgaccggcgacagcggcgccggcgagttcaagttcctgaagcccatcatccccaacctgctgccccagggcgccggcgaggagatcggcaagaccgccgccttcagaaacagcttcggcctgaactag

SEQ ID NO: 95740 - DNA, 1107 bp, synthetic construct
  misc_feature 1..1107: note = Description of Artificial Sequence: Synthetic coding sequence
  source 1..1107: mol_type = other DNA
ggcggcagcccccccagaagcggcaccagcgagatccagatccaggtgctggacatcaacgacaacgtgcccgagttcgcccaggagctgtacgaggcccaggtgcccgagaacaaccccctgggcagcctggtgatcaccgtgagcgccagagacctggacgccggcagcttcggcaaggtgagctacgccctgttccaggtggacgacgtgaaccagcccttcgagatcaacgccatcaccggcgagatcagactgagaaaggccctggacttcgaggagatccagagctacgacgtggacgtggaggccaccgacggcggcggcctgagcggcaagtgcagcctggtggtgagagtgctggacgtgaacgacaacgcccccgagctgaccatgagcttcttcatcagcctgatccccgagaacctgcccgagatcaccgtggccgtgttcagcgtgagcgacgccgacagcggccacaaccagcaggtgatctgcagcatcgagaacaacctgcccttcctgctgagacccagcgtggagaacttctacaccctggtgaccgagggcgccctggacagagagagcagagccgagtacaacatcaccatcaccgtgaccgacctgggcacccccagactgaagacccagcagagcatcaccgtgcaggtgagcgacgtgaacgacaacgtgcccgccttcacccagaccagctacaccctgttcgtgagagagaacaacagccccgccctgcacatcggcagcgtgagcgccaccgacagagacagcggcatcaacgcccaggtgacctacagcctgctgcccccccaggacccccacctgcccctgagcagcctggtgagcatcaacgccgacaacggccacctgttcgccctgagaagcctggactacgaggccctgcagagcttcgagttcagagtgggcgccaccgacagaggcagccccgccctgagcagcgaggccctggtgagactgctgtgctggacccccaccaccaccagacccagctgctgcaccagatgcagaaccgcccccagacccgcccccagctggtgccccggcagacccagcagagccacctggtag

SEQ ID NO: 95741 - DNA, 1977 bp, synthetic construct
  misc_feature 1..1977: note = Description of Artificial Sequence: Synthetic coding sequence
  source 1..1977: mol_type = other DNA
atgctgctgaagatcagcgagatcaccatgcccggcaagatcttccccctgaagatggcccacgacctggacaccggcagcaacggcctgcagagatacaccatcagcagcaacccccacttccacgtgctgaccagaaacagaagcgagggcagaaagttccccgagctggtgctggacaagcccctggacagagaggagcagccccagctgagactgaccctgatcgccctggacggcggcagcccccccagaagcggcaccagcgagatccagatccaggtgctggacatcaacgacaacgtgcccgagttcgcccaggagctgtacgaggcccaggtgcccgagaacaaccccctgggcagcctggtgatcaccgtgagcgccagagacctggacgccggcagcttcggcaaggtgagctacgccctgttccaggtggacgacgtgaaccagcccttcgagatcaacgccatcaccggcgagatcagactgagaaaggccctggacttcgaggagatccagagctacgacgtggacgtggaggccaccgacggcggcggcctgagcggcaagtgcagcctggtggtgagagtgctggacgtgaacgacaacgcccccgagctgaccatgagcttcttcatcagcctgatccccgagaacctgcccgagatcaccgtggccgtgttcagcgtgagcgacgccgacagcggccacaaccagcaggtgatctgcagcatcgagaacaacctgcccttcctgctgagacccagcgtggagaacttctacaccctggtgaccgagggcgccctggacagagagagcagagccgagtacaacatcaccatcaccgtgaccgacctgggcacccccagactgaagacccagcagagcatcaccgtgcaggtgagcgacgtgaacgacaacgtgcccgccttcacccagaccagctacaccctgttcgtgagagagaacaacagccccgccctgcacatcggcagcgtgagcgccaccgacagagacagcggcatcaacgcccaggtgacctacagcctgctgcccccccaggacccccacctgcccctgagcagcctggtgagcatcaacgccgacaacggccacctgttcgccctgagaagcctggactacgaggccctgcagagcttcgagttcagagtgggcgccaccgacagaggcagccccgccctgagcagcgaggccctggtgagactgctggtgctggacgccaacgacaacagccccttcgtgctgtaccccctgcagaacggcagcgccccctgcaccgagctggtgcccagagccgccgagcccggctacctggtgaccaaggtggtggccgtggacggcgacagcggccagaacgcctggctgagctaccagctgctgaaggccaccgagctgggcctgttcggcgtgtgggcccacaacggcgaggtgagaaccgccagactgctgagcgagagagacgccgccaagcacagactggtggtgctggtgaaggacaacggcgagccccccagaagcgccaccgccaccctgcacgtgctgctggtggacggcttcagccagccctacctgcccctgcccgaggccgcccccgcccaggcccaggccgacagcctgaccgtgtacctggtggtggccctggccagcgtgagcagcctgttcctgttcagcgtgctgctgttcgtggccgtgagactgtgcagaagaagcagagccgccagcgtgggcagatacagcgtgcccgagggccccttccccggccacctggtggacgtgagcggcaccggcaccctgagccagagctaccagtacaaggtgtgcctgaccggcggcagcgagaccaacgagttcaagttcctgaagcccatcatgcccaacttccccccccagggcaccgagagagagatggaggagacccccaccagcagaaacagcttccccttcagctag

SEQ ID NO: 95742 - DNA, 2385 bp, synthetic construct
  misc_feature 1..2385: note = Description of Artificial Sequence: Synthetic coding sequence
  source 1..2385: mol_type = other DNA
atgatgcagaccaaggtgcagaacaagaagagacaggtggccttcttcatcctgctgatgctgtggggcgaggtgggcagcgagagcatccagtacagcgtgctggaggagaccgagagcggcaccttcgtggccaacctgaccaaggacctgggcctgagagtgggcgagctggccagcagaggcgccagagtggtgttcaagggcaacagacagcacctgcagttcgacccccagacccacgacctgctgctgaacgagaagctggacagagaggagctgtgcggcagcaccgagccctgcgtgctgcccttccaggtgctgctggagaaccccctgcagttcttccaggccagcctgagagtgagagacatcaacgaccacgcccccgagttccccgccagagagatgctgctgaagatcagcgagatcaccatgcccggcaagatcttccccctgaagatggcccacgacctggacaccggcagcaacggcctgcagagatacaccatcagcagcaacccccacttccacgtgctgaccagaaacagaagcgagggcagaaagttccccgagctggtgctggacaagcccctggacagagaggagcagccccagctgagactgaccctgatcgccctggacggcggcagcccccccagaagcggcaccagcgagatccagatccaggtgctggacatcaacgacaacgtgcccgagttcgcccaggagctgtacgaggcccaggtgcccgagaacaaccccctgggcagcctggtgatcaccgtgagcgccagagacctggacgccggcagcttcggcaaggtgagctacgccctgttccaggtggacgacgtgaaccagcccttcgagatcaacgccatcaccggcgagatcagactgagaaaggccctggacttcgaggagatccagagctacgacgtggacgtggaggccaccgacggcggcggcctgagcggcaagtgcagcctggtggtgagagtgctggacgtgaacgacaacgcccccgagctgaccatgagcttcttcatcagcctgatccccgagaacctgcccgagatcaccgtggccgtgttcagcgtgagcgacgccgacagcggccacaaccagcaggtgatctgcagcatcgagaacaacctgcccttcctgctgagacccagcgtggagaacttctacaccctggtgaccgagggcgccctggacagagagagcagagccgagtacaacatcaccatcaccgtgaccgacctgggcacccccagactgaagacccagcagagcatcaccgtgcaggtgagcgacgtgaacgacaacgtgcccgccttcacccagaccagctacaccctgttcgtgagagagaacaacagccccgccctgcacatcggcagcgtgagcgccaccgacagagacagcggcatcaacgcccaggtgacctacagcctgctgcccccccaggacccccacctgcccctgagcagcctggtgagcatcaacgccgacaacggccacctgttcgccctgagaagcctggactacgaggccctgcagagcttcgagttcagagtgggcgccaccgacagaggcagccccgccctgagcagcgaggccctggtgagactgctggtgctggacgccaacgacaacagccccttcgtgctgtaccccctgcagaacggcagcgccccctgcaccgagctggtgcccagagccgccgagcccggctacctggtgaccaaggtggtggccgtggacggcgacagcggccagaacgcctggctgagctaccagctgctgaaggccaccgagctgggcctgttcggcgtgtgggcccacaacggcgaggtgagaaccgccagactgctgagcgagagagacgccgccaagcacagactggtggtgctggtgaaggacaacggcgagccccccagaagcgccaccgccaccctgcacgtgctgctggtggacggcttcagccagccctacctgcccctgcccgaggccgcccccgcccaggcccaggccgacagcctgaccgtgtacctggtggtggccctggccagcgtgagcagcctgttcctgttcagcgtgctgctgttcgtggccgtgagactgtgcagaagaagcagagccgccagcgtgggcagatacagcgtgcccgagggccccttccccggccacctggtggacgtgagcggcaccggcaccctgagccagagctaccagtacaaggtgtgcctgaccggcggcagcgagaccaacgagttcaagttcctgaagcccatcatgcccaacttccccccccagggcaccgagagagagatggaggagacccccaccagcagaaacagcttccccttcagctag

SEQ ID NO: 95743 - DNA, 1107 bp, synthetic construct
  misc_feature 1..1107: note = Description of Artificial Sequence: Synthetic coding sequence
  source 1..1107: mol_type = other DNA
ggcagcccccccagaagcggcaccgccctggtgagaatcctggtgctggacgtgaacgacaacgcccccgacttcgtgagaagcctgtacaaggtgcaggtgcccgagaacagccccgtgggcagcatggtggtgagcgtgagcgccagagacctggacaccggcagcaacggcgagatcgcctacgccttcagctacgccaccgagagaatcctgaagaccttccagatcaaccccaccagcggcagcctgcacctgaaggcccagctggactacgaggccatccagacctacaccctgaccatccaggccaaggacggcggcggcctgagcggcaagtgcaccgtggtggtggacgtgaccgacatcaacgacaacagacccgagctgctgctgagcagcctgaccagccccatcgccgagaacagccccgagaccgtggtggccgtgttcagaatcagagacagagacagcggcaacaacggcaagaccgtgtgcagcatccaggacgacgtgcccttcatcctgaagcccagcgtggagaacttctacaccctggtgaccgagaagcccctggacagagagagaaacaccgagtacaacatcaccatcaccgtgaccgacctgggcacccccagactgaagaccgagcacaacatcaccgtgctggtgagcgacgtgaacgacaacgcccccgccttcacccagaccagctacaccctgttcgtgagagagaacaacagccccgccctgcccatcggcagcgtgagcgccaccgacagagacagcggcaccaacgcccaggtgatctacagcctgctgcccagccaggacccccacctgcccctggccagcctggtgagcatcaacgccgacaacggccacctgttcgccctgagaagcctggactacgaggccctgcaggccttcgagttcagagtgggcgccaccgacagaggcagccccgccctgagcagcgaggccctggtgagagtgctgtgctggacccccaccaccaccagacccagctgctgcaccagatgcagaaccgcccccagacccgcccccagcagatgccccggcagacccagcagagccacctggtag

SEQ ID NO: 95744 - DNA, 2406 bp, synthetic construct
  misc_feature 1..2406: note = Description of Artificial Sequence: Synthetic coding sequence
  source 1..2406: mol_type = other DNA
atggaggccagcggcaagctgatctgcagacagagacaggtgctgttcagcttcctgctgctgggcctgagcctggccggcgccgccgagcccagaagctacagcgtggtggaggagaccgagggcagcagcttcgtgaccaacctggccaaggacctgggcctggagcagagagagttcagcagaagaggcgtgagagtggtgagcagaggcaacaagctgcacctgcagctgaaccaggagaccgccgacctgctgctgaacgagaagctggacagagaggacctgtgcggccacaccgagccctgcgtgctgagattccaggtgctgctggagagccccttcgagttcttccaggccgagctgcaggtgatcgacatcaacgaccacagccccgtgttcctggacaagcagatgctggtgaaggtgagcgagagcagcccccccggcaccgccttccccctgaagaacgccgaggacctggacatcggccagaacaacatcgagaactacatcatcagccccaacagctacttcagagtgctgaccagaaagagaagcgacggcagaaagtaccccgagctggtgctggacaaggccctggacagagaggaggaggccgagctgagactgaccctgaccgccctggacggcggcagcccccccagaagcggcaccgcccaggtgtacatcgaggtggtggacgtgaacgacaacgcccccgagttcgagcagcccttctacagagtgcagatcagcgaggacagccccatcagcttcctggtggtgaaggtgagcgccaccgacgtggacaccggcgtgaacggcgagatcagctacagcctgttccaggccagcgacgagatcagcaagaccttcaaggtggacttcctgaccggcgagatcagactgaagaagcagctggacttcgagaagttccagagctacgaggtgaacatcgaggccagagacgccggcggcttcagcggcaagtgcaccgtgctgatccaggtgatcgacgtgaacgaccacgcccccgaggtgaccatgagcgccttcaccagccccatccccgagaacgcccccgagaccgtggtggccctgttcagcgtgagcgacctggacagcggcgagaacggcaagatcagctgcagcatccaggaggacctgcccttcctgctgaagagcagcgtgggcaacttctacaccctgctgaccgagacccccctggacagagagagcagagccgagtacaacgtgaccatcaccgtgaccgacctgggcacccccagactgaccacccacctgaacatgaccgtgctggtgagcgacgtgaacgacaacgcccccgccttcacccagaccagctacaccctgttcgtgagagagaacaacagccccgccctgcacatcggcagcgtgagcgccaccgacagagacagcggcaccaacgcccaggtgacctacagcctgctgcccccccaggacccccacctgcccctggccagcctggtgagcatcaacaccgacaacggccacctgttcgccctgagaagcctggactacgaggccctgcaggccttcgagttcagagtgggcgccagcgacagaggcagccccgccctgagcagcgaggccctggtgagagtgctggtgctggacgccaacgacaacagccccttcgtgctgtaccccctgcagaacggcagcgccccctgcaccgagctggtgcccagagccgccgagcccggctacctggtgaccaaggtggtggccgtggacggcgacagcggccagaacgcctggctgagctaccagctgctgaaggccaccgagcccggcctgttcggcgtgtgggcccacaacggcgaggtgagaaccgccagactgctgagcgagagagacgccgccaagcagagactggtggtgctggtgaaggacaacggcgagcccccctgcagcgccaccgccaccctgcacctgctgctggtggacggcttcagccagccctacctgcccctgcccgaggccgcccccgcccagggccaggccgacagcctgaccgtgtacctggtggtggccctggccagcgtgagcagcctgttcctgttcagcgtgctgctgttcgtggccgtgctgctgtgcagaagaagcagagccgccagcgtgggcagatgcagcgtgcccgagggccccttccccggccacctggtggacgtgagaggcaccggcagcctgagccagaactaccagtacgaggtgtgcctggccggcggcagcggcaccaacgagttccagttcctgaagcccgtgctgcccaacatccagggccacagcttcggccccgagatggagcagaacagcaacttcagaaacggcttcggcttcagcctgcagctgaagtag

SEQ ID NO: 95745 - DNA, 2472 bp, synthetic construct
  misc_feature 1..2472: note = Description of Artificial Sequence: Synthetic coding sequence
  source 1..2472: mol_type = other DNA
atgaagatccagaagaagctgaccggctgcagcagactgatgctgctgtgcctgagcctggagctgctgctggaggccggcgccggcaacatccactacagcgtgcccgaggagaccgacaagggcagcttcgtgggcaacatcgccaaggacctgggcctgcagccccaggagctggccgacggcggcgtgagaatcgtgagcagaggcagaatgcccctgttcgccctgaaccccagaagcggcagcctgatcaccgccagaagaatcgacagagaggagctgtgcgcccagagcatgccctgcctggtgagcttcaacatcctggtggaggacaagatgaagctgttccccgtggaggtggagatcatcgacatcaacgacaacaccccccagttccagctggaggagctggagttcaagatgaacgagatcaccacccccggcaccagagtgagcctgcccttcggccaggacctggacgtgggcatgaacagcctgcagagctaccagctgagcagcaacccccacttcagcctggacgtgcagcagggcgccgacggcccccagcaccccgagatggtgctgcagagccccctggacagagaggaggaggccgtgcaccacctgatcctgaccgccagcgacggcggcgagcccgtgagaagcggcaccctgagaatctacatccaggtggtggacgccaacgacaacccccccgccttcacccaggcccagtaccacatcaacgtgcccgagaacgtgcccctgggcacccagctgctgatggtgaacgccaccgaccccgacgagggcgccaacggcgaggtgacctacagcttccacaacgtggaccacagagtggcccagatcttcagactggacagctacaccggcgagatcagcaacaaggagcccctggacttcgaggagtacaagatgtacagcatggaggtgcaggcccaggacggcgccggcctgatggccaaggtgaaggtgctgatcaaggtgctggacgtgaacgacaacgcccccgaggtgaccatcaccagcgtgaccaccgccgtgcccgagaacttcccccccggcaccatcatcgccctgatcagcgtgcacgaccaggacagcggcgacaacggctacaccacctgcttcatccccggcaacctgcccttcaagctggagaagctggtggacaactactacagactggtgaccgagagaaccctggacagagagctgatcagcggctacaacatcaccatcaccgccatcgaccagggcacccccgccctgagcaccgagacccacatcagcctgctggtgaccgacatcaacgacaacagccccgtgttccaccaggacagctacagcgcctacatccccgagaacaaccccagaggcgccagcatcttcagcgtgagagcccacgacctggacagcaacgagaacgcccagatcacctacagcctgatcgaggacaccatccagggcgcccccctgagcgcctacctgagcatcaacagcgacaccggcgtgctgtacgccctgagaagcttcgactacgagcagttcagagacatgcagctgaaggtgatggccagagacagcggcgacccccccctgagcagcaacgtgagcctgagcctgttcctgctggaccagaacgacaacgcccccgagatcctgtaccccgccctgcccaccgacggcagcaccggcgtggagctggcccccctgagcgccgagcccggctacctggtgaccaaggtggtggccgtggacagagacagcggccagaacgcctggctgagctacagactgctgaaggccagcgagcccggcctgttcagcgtgggcctgcacaccggcgaggtgagaaccgccagagccctgctggacagagacgccctgaagcagagcctggtggtggccgtgcaggaccacggccagccccccctgagcgccaccgtgaccctgaccgtggccgtggccgacagaatcagcgacatcctggccgacctgggcagcctggagcccagcgccaagcccaacgacagcgacctgaccctgtacctggtggtggccgccgccgccgtgagctgcgtgttcctggccttcgtgatcgtgctgctggcccacagactgagaagatggcacaagagcagactgctgcaggccagcggcggcggcctggccagcatgcccggcagccacttcgtgggcgtggacggcgtgagagccttcctgcagacctacagccacgaggtgagcctgaccgccgacagcagaaagagccacctgatcttcccccagcccaactacgccgacaccctgatcagccaggagagctgcgagaagaagggcttcctgagcgccccccagagcctgctggaggacaagaaggagcccttcagccaggtgaacttctgcgacgagtgcatcagctacctggagaagaacaacagctag

SEQ ID NO: 95746 - DNA, 2796 bp, synthetic construct
  misc_feature 1..2796: note = Description of Artificial Sequence: Synthetic coding sequence
  source 1..2796: mol_type = other DNA
atgaagatccagaagaagctgaccggctgcagcagactgatgctgctgtgcctgagcctggagctgctgctggaggccggcgccggcaacatccactacagcgtgcccgaggagaccgacaagggcagcttcgtgggcaacatcgccaaggacctgggcctgcagccccaggagctggccgacggcggcgtgagaatcgtgagcagaggcagaatgcccctgttcgccctgaaccccagaagcggcagcctgatcaccgccagaagaatcgacagagaggagctgtgcgcccagagcatgccctgcctggtgagcttcaacatcctggtggaggacaagatgaagctgttccccgtggaggtggagatcatcgacatcaacgacaacaccccccagttccagctggaggagctggagttcaagatgaacgagatcaccacccccggcaccagagtgagcctgcccttcggccaggacctggacgtgggcatgaacagcctgcagagctaccagctgagcagcaacccccacttcagcctggacgtgcagcagggcgccgacggcccccagcaccccgagatggtgctgcagagccccctggacagagaggaggaggccgtgcaccacctgatcctgaccgccagcgacggcggcgagcccgtgagaagcggcaccctgagaatctacatccaggtggtggacgccaacgacaacccccccgccttcacccaggcccagtaccacatcaacgtgcccgagaacgtgcccctgggcacccagctgctgatggtgaacgccaccgaccccgacgagggcgccaacggcgaggtgacctacagcttccacaacgtggaccacagagtggcccagatcttcagactggacagctacaccggcgagatcagcaacaaggagcccctggacttcgaggagtacaagatgtacagcatggaggtgcaggcccaggacggcgccggcctgatggccaaggtgaaggtgctgatcaaggtgctggacgtgaacgacaacgcccccgaggtgaccatcaccagcgtgaccaccgccgtgcccgagaacttcccccccggcaccatcatcgccctgatcagcgtgcacgaccaggacagcggcgacaacggctacaccacctgcttcatccccggcaacctgcccttcaagctggagaagctggtggacaactactacagactggtgaccgagagaaccctggacagagagctgatcagcggctacaacatcaccatcaccgccatcgaccagggcacccccgccctgagcaccgagacccacatcagcctgctggtgaccgacatcaacgacaacagccccgtgttccaccaggacagctacagcgcctacatccccgagaacaaccccagaggcgccagcatcttcagcgtgagagcccacgacctggacagcaacgagaacgcccagatcacctacagcctgatcgaggacaccatccagggcgcccccctgagcgcctacctgagcatcaacagcgacaccggcgtgctgtacgccctgagaagcttcgactacgagcagttcagagacatgcagctgaaggtgatggccagagacagcggcgacccccccctgagcagcaacgtgagcctgagcctgttcctgctggaccagaacgacaacgcccccgagatcctgtaccccgccctgcccaccgacggcagcaccggcgtggagctggcccccctgagcgccgagcccggctacctggtgaccaaggtggtggccgtggacagagacagcggccagaacgcctggctgagctacagactgctgaaggccagcgagcccggcctgttcagcgtgggcctgcacaccggcgaggtgagaaccgccagagccctgctggacagagacgccctgaagcagagcctggtggtggccgtgcaggaccacggccagccccccctgagcgccaccgtgaccctgaccgtggccgtggccgacagaatcagcgacatcctggccgacctgggcagcctggagcccagcgccaagcccaacgacagcgacctgaccctgtacctggtggtggccgccgccgccgtgagctgcgtgttcctggccttcgtgatcgtgctgctggcccacagactgagaagatggcacaagagcagactgctgcaggccagcggcggcggcctggccagcatgcccggcagccacttcgtgggcgtggacggcgtgagagccttcctgcagacctacagccacgaggtgagcctgaccgccgacagcagaaagagccacctgatcttcccccagcccaactacgccgacaccctgatcagccaggagagctgcgagaagaagggcttcctgagcgccccccagagcctgctggaggacaagaaggagcccttcagccagcaggccccccccaacaccgactggagattcagccaggcccagagacccggcaccagcggcagccagaacggcgacgacaccggcacctggcccaacaaccagttcgacaccgagatgctgcaggccatgatcctggccagcgccagcgaggccgccgacggcagcagcaccctgggcggcggcgccggcaccatgggcctgagcgccagatacggcccccagttcaccctgcagcacgtgcccgactacagacagaacgtgtacatccccggcagcaacgccaccctgaccaacgccgccggcaagagagacggcaaggcccccgccggcggcaacggcaacaagaagaagagcggcaagaaggagaagaagtag

SEQ ID NO: 95747 - DNA, 2811 bp, synthetic construct
  misc_feature 1..2811: note = Description of Artificial Sequence: Synthetic coding sequence
  source 1..2811: mol_type = other DNA
atggccgcccagagaaacagaagcaaggagagcaaggactgcagcggcctggtgctgctgtgcctgttcttcggcatcccctgggaggccggcgccagacagatcagctacagcatccccgaggagctggagaagggcagcttcgtgggcaacatcagcaaggacctgggcctggcccccagagagctggccgagagaggcgtgagaatcgtgagcagaggcagaacccagctgttcagcctgaaccccagaagcggcagcctgatcaccgccggcagaatcgacagagaggagctgtgcgcccagagcgccagatgcgtggtgagcttcaacatcctggtggaggacagagtgaagctgttcggcatcgagatcgaggtgaccgacatcaacgacaacgcccccaagttccaggccgagaacctggacgtgaagatcaacgagaacgtggccgccggcatgagattccccctgcccgaggccatcgaccccgacgtgggcgtgaacagcctgcagagctaccagctgagccccaacaagcacttcagcctgagagtgcagagcagagccaacggcgtgaagtaccccgagctggtgctggagcacagcctggacagagaggaggaggccatccaccacctggtgctgaccgccagcgacggcggcgaccccctgagaagcggcaccgtgctggtgagcgtgaccgtgttcgacgccaacgacaacgcccccgtgttcaccctgcccgagtacagagtgagcgtgcccgagaacctgcccgtgggcacccagctgctgaccgtgaccgccaccgacagagacgagggcgccaacggcgaggtgacctacagcttcagaaagctgcccgacacccagctgctgaagttccagctgaacaagtacaccggcgagatcaagatcagcgagaacctggactacgaggagaccggcttctacgagatcgagatccaggccgaggacggcggcgcctacctggccaccgccaaggtgctgatcaccgtggaggacgtgaacgacaacagccccgagctgaccatcaccagcctgttcagccccgtgaccgaggacagccccctgggcaccgtggtggccctgctgaacgtgcacgacctggacagcgagcagaacggccaggtgacctgcagcatcctggcctacctgcccttcaagctggagaagagcatcgacagctactacagactggtgatccacagagccctggacagagagcaggtgagcagctacaacatcaccgtgaccgccaccgacggcggcagcccccccctgagcaccgaggcccacttcatgctgcaggtggccgacatcaacgacaacccccccaccttcagccaggtgagctacttcacctacatccccgagaacaacgccagaggcgccagcatcttcagcgtgaccgccctggaccccgacagcaaggagaacgcccagatcatctacagcctggccgaggacaccatccagggcgtgcccctgagcagctacatcagcatcaacagcgacaccggcgtgctgtacgccctgagaagcttcgactacgagcagttccacgagctgcagatgcaggtgaccgccagcgacagcggcgacccccccctgagcagcaacgtgagcctgagcctgttcgtgctggaccagaacgacaacgcccccgagatcctgtaccccgccctgcccaccgacggcagcaccggcgtggagctggcccccagaagcgccgagcccggctacctggtgaccaaggtggtggccgtggacagagacagcggccagaacgcctggctgagctacagactgctgaaggccagcgagcccggcctgttcgccgtgggcgagcacaccggcgaggtgagaaccgccagagccctgctggacagagacgccctgaagcagagcctggtggtggccgtgcaggaccacggccagccccccctgagcgccaccgtgaccctgaccgtggccgtggccgacagcatcccccaggtgctggccgacctgggcagcttcgagagccccgccaacagcgagaccagcgacctgaccctgtacctggtggtggccgtggccgccgtgagctgcgtgttcctggccttcgtgatcgtgctgctggcccacagactgagaagatggcacaagagcagactgctgcaggccagcggcggcggcctgaccggcgtgagcggcagccacttcgtgggcgtggacggcgtgagagccttcctgcagacctacagccacgaggtgagcctgaccgccgacagcagaaagagccacctgatcttcccccagcccaactacgccgacaccctgatcagccaggagagctgcgagaagaacgaccccctgagcctgctggacgacagcaagttccccatcgaggacacccccctggtgccccaggccccccccaacaccgactggagattcagccaggcccagagacccggcaccagcggcagccagaacggcgacgacaccggcacctggcccaacaaccagttcgacaccgagatgctgcaggccatgatcctggccagcgccagcgaggccgccgacggcagcagcaccctgggcggcggcgccggcaccatgggcctgagcgccagatacggcccccagttcaccctgcagcacgtgcccgactacagacagaacgtgtacatccccggcagcaacgccaccctgaccaacgccgccggcaagagagacggcaaggcccccgccggcggcaacggcaacaagaagaagagcggcaagaaggagaagaagtag

SEQ ID NO: 95748 - DNA, 2808 bp, synthetic construct
  misc_feature 1..2808: note = Description of Artificial Sequence: Synthetic coding sequence
  source 1..2808: mol_type = other DNA
atggccaacagactgcagagaggcgacagaagcagactgctgctgctgctgtgcatcttcctgggcaccctgagaggcttcagagccagacagatcagatacagcgtgcccgaggagaccgagaagggcagcttcgtgggcaacatcagcaaggacctgggcctggagcccagagagctggccaagagaggcgtgagaatcgtgagcagaggcaagacccagctgttcgccgtgaaccccagaagcggcagcctgatcaccgccggcagaatcgacagagaggagctgtgcgagaccgtgagcagctgcttcctgaacatggagctgctggtggaggacaccctgaagatctacggcgtggaggtggagatcatcgacatcaacgacaacgcccccagcttccaggaggacgaggtggagatcaaggtgagcgagcacgccatccccggcgccagattcgccctgcccaacgccagagaccccgacgtgggcgtgaacagcctgcagagctaccagctgagccccaacaactacttcagcctgcagctgagaggcagaaccgacggcgccaagaaccccgagctggtgctggagggcagcctggacagagagaaggaggccgcccacctgctgctgctgaccgccctggacggcggcgaccccatcagaaagggcgccgtgcccatcagagtggtggtgctggacgtgaacgaccacatccccatgttcacccagagcgtgtacagagtgagcgtgcccgagaacatcagcagcggcaccagagtgctgatggtgaacgccaccgaccccgacgagggcatcaacggcgaggtgatgtacagcttcagaaacatggagagcaaggccagcgagatcttccagctggacagccagaccggcgaggtgcaggtgagaggcagcctggacttcgagaagtacagattctacgagatggagatccagggccaggacggcggcggcctgttcaccaccaccaccatgctgatcaccgtggtggacgtgaacgacaacgcccccgagatcaccatcaccagcagcatcaacagcatcctggagaacagcccccccggcaccgtgatcgccctgctgaacgtgcaggaccaggacagcggcgagaacggccaggtgagctgcttcatccccaaccacctgcccttcaagctggagaagacctacggcaactactacaagctgatcaccagcagagtgctggacagagagctggtgcagagctacaacatcaccctgaccgccaccgaccagggcagcccccccctgagcgccgagacccacgtgtggctgaacgtggccgacgacaacgacaacccccccgtgttcccccacagcagctacagcgcctacatccccgagaacaaccccagaggcgccagcatcttcagcgtgaccgccctggaccccgacagcaagcagaacgccctggtgacctacagcctgaccgacgacaccgtgcagggcgtgcccctgagcagctacgtgagcatcaacagcaacaccggcgtgctgtacgccctgcagagcttcgactacgagcagttcagagacctggagctgagagtgatcgccagagacagcggcgacccccccctgagcagcaacgtgagcctgagcctgttcgtgctggaccagaacgacaacgcccccgagatcctgtaccccgccctgcccaccgacggcagcaccggcgtggagctggcccccagaagcgccgagcccggctacctggtgaccaaggtggtggccgtggacaaggacagcggccagaacgcctggctgagctacagactgctgaaggccagcgagcccggcctgttcgccgtgggcgagcacaccggcgaggtgagaaccgccagagccctgctggacagagacgccctgaagcagagcctggtggtggccgtgcaggaccacggccagccccccctgagcgccaccgtgaccctgaccgtggccgtggccgacagcatccccgaggtgctggccgacctgggcagcctggagagcctggccaacagcgagaccagcgacctgagcctgtacctggtggtggccgtggccgccgtgagctgcatcttcctggtgttcgtgatcgtgctgctggccctgagactgtggagatggcacaagagcagactgctgcaggccagcgagggcggcctggccggcatgcccaccagccacttcgtgggcgtggacggcgtgcaggccttcctgcagacctacagccacgaggtgagcctgatcgccgacagccagaagagccacctgatcttcccccagcccaactacggcgacaccctgatcagccaggagagctgcgagaagagcgagcccctgctgatcgccgaggacagcgccatcatcctgggcaagtgcgaccccaccagcaaccagcaggccccccccaacaccgactggagattcagccaggcccagagacccggcaccagcggcagccagaacggcgacgacaccggcacctggcccaacaaccagttcgacaccgagatgctgcaggccatgatcctggccagcgccagcgaggccgccgacggcagcagcaccctgggcggcggcgccggcaccatgggcctgagcgccagatacggcccccagttcaccctgcagcacgtgcccgactacagacagaacgtgtacatccccggcagcaacgccaccctgaccaacgccgccggcaagagagacggcaaggcccccgccggcggcaacggcaacaagaagaagagcggcaagaaggagaagaagtag

SEQ ID NO: 95749 - DNA, 2253 bp, synthetic construct
  misc_feature 1..2253: note = Description of Artificial Sequence: Synthetic coding sequence
  source 1..2253: mol_type = other DNA
atggccaacagactgcagagaggcgacagaagcagactgctgctgctgctgtgcatcttcctgggcaccctgagaggcttcagagccagacagatcagatacagcgtgcccgaggagaccgagaagggcagcttcgtgggcaacatcagcaaggacctgggcctggagcccagagagctggccaagagaggcgtgagaatcgtgagcagaggcaagacccagctgttcgccgtgaaccccagaagcggcagcctgatcaccgccggcagaatcgacagagaggagctgtgcgagaccgtgagcagctgcttcctgaacatggagctgctggtggaggacaccctgaagatctacggcgtggaggtggagatcatcgacatcaacgacaacgcccccagcttccaggaggacgaggtggagatcaaggtgagcgagcacgccatccccggcgccagattcgccctgcccaacgccagagaccccgacgtgggcgtgaacagcctgcagagctaccagctgagccccaacaactacttcagcctgcagctgagaggcagaaccgacggcgccaagaaccccgagctggtgctggagggcagcctggacagagagaaggaggccgcccacctgctgctgctgaccgccctggacggcggcgaccccatcagaaagggcgccgtgcccatcagagtggtggtgctggacgtgaacgaccacatccccatgttcacccagagcgtgtacagagtgagcgtgcccgagaacatcagcagcggcaccagagtgctgatggtgaacgccaccgaccccgacgagggcatcaacggcgaggtgatgtacagcttcagaaacatggagagcaaggccagcgagatcttccagctggacagccagaccggcgaggtgcaggtgagaggcagcctggacttcgagaagtacagattctacgagatggagatccagggccaggacggcggcggcctgttcaccaccaccaccatgctgatcaccgtggtggacgtgaacgacaacgcccccgagatcaccatcaccagcagcatcaacagcatcctggagaacagcccccccggcaccgtgatcgccctgctgaacgtgcaggaccaggacagcggcgagaacggccaggtgagctgcttcatccccaaccacctgcccttcaagctggagaagacctacggcaactactacaagctgatcaccagcagagtgctggacagagagctggtgcagagctacaacatcaccctgaccgccaccgaccagggcagcccccccctgagcgccgagacccacgtgtggctgaacgtggccgacgacaacgacaacccccccgtgttcccccacagcagctacagcgcctacatccccgagaacaaccccagaggcgccagcatcttcagcgtgaccgccctggaccccgacagcaagcagaacgccctggtgacctacagcctgaccgacgacaccgtgcagggcgtgcccctgagcagctacgtgagcatcaacagcaacaccggcgtgctgtacgccctgcagagcttcgactacgagcagttcagagacctggagctgagagtgatcgccagagacagcggcgacccccccctgagcagcaacgtgagcctgagcctgttcgtgctggaccagaacgacaacgcccccgagatcctgtaccccgccctgcccaccgacggcagcaccggcgtggagctggcccccagaagcgccgagcccggctacctggtgaccaaggtggtggccgtggacaaggacagcggccagaacgcctggctgagctacagactgctgaaggccagcgagcccggcctgttcgccgtgggcgagcacaccggcgagcaggccccccccaacaccgactggagattcagccaggcccagagacccggcaccagcggcagccagaacggcgacgacaccggcacctggcccaacaaccagttcgacaccgagatgctgcaggccatgatcctggccagcgccagcgaggccgccgacggcagcagcaccctgggcggcggcgccggcaccatgggcctgagcgccagatacggcccccagttcaccctgcagcacgtgcccgactacagacagaacgtgtacatccccggcagcaacgccaccctgaccaacgccgccggcaagagagacggcaaggcccccgccggcggcaacggcaacaagaagaagagcggcaagaaggagaagaagtag

SEQ ID NO: 95750 - DNA, 2799 bp, synthetic construct
  misc_feature 1..2799: note = Description of Artificial Sequence: Synthetic coding sequence
  source 1..2799: mol_type = other DNA
atgatccccgccagactgcacagagactacaagggcctggtgctgctgggcatcctgctgggcaccctgtgggagaccggctgcacccagatcagatacagcgtgcccgaggagctggagaagggcagcagagtgggcgacatcagcagagacctgggcctggagcccagagagctggccgagagaggcgtgagaatcatccccagaggcagaacccagctgttcgccctgaaccccagaagcggcagcctggtgaccgccggcagaatcgacagagaggagctgtgcatgggcgccatcaagtgccagctgaacctggacatcctgatggaggacaaggtgaagatctacggcgtggaggtggaggtgagagacatcaacgacaacgccccctacttcagagagagcgagctggagatcaagatcagcgagaacgccgccaccgagatgagattccccctgccccacgcctgggaccccgacatcggcaagaacagcctgcagagctacgagctgagccccaacacccacttcagcctgatcgtgcagaacggcgccgacggcagcaagtaccccgagctggtgctgaagagagccctggacagagaggagaaggccgcccaccacctggtgctgaccgccagcgacggcggcgaccccgtgagaaccggcaccgccagaatcagagtgatggtgctggacgccaacgacaacgcccccgccttcgcccagcccgagtacagagccagcgtgcccgagaacctggccctgggcacccagctgctggtggtgaacgccaccgaccccgacgagggcgtgaacgccgaggtgagatacagcttcagatacgtggacgacaaggccgcccaggtgttcaagctggactgcaacagcggcaccatcagcaccatcggcgagctggaccacgaggagagcggcttctaccagatggaggtgcaggccatggacaacgccggctacagcgccagagccaaggtgctgatcaccgtgctggacgtgaacgacaacgcccccgaggtggtgctgaccagcctggccagcagcgtgcccgagaacagccccagaggcaccctgatcgccctgctgaacgtgaacgaccaggacagcgaggagaacggccaggtgatctgcttcatccagggcaacctgcccttcaagctggagaagagctacggcaactactacagcctggtgaccgacatcgtgctggacagagagcaggtgcccagctacaacatcaccgtgaccgccaccgacagaggcaccccccccctgagcaccgagacccacatcagcctgaacgtggccgacaccaacgacaacccccccgtgttcccccaggccagctacagcgcctacatccccgagaacaaccccagaggcgtgagcctggtgagcgtgaccgcccacgaccccgactgcgaggagaacgcccagatcacctacagcctggccgagaacaccatccagggcgccagcctgagcagctacgtgagcatcaacagcgacaccggcgtgctgtacgccctgagcagcttcgactacgagcagttcagagacctgcaggtgaaggtgatggccagagacaacggccacccccccctgagcagcaacgtgagcctgagcctgttcgtgctggaccagaacgacaacgcccccgagatcctgtaccccgccctgcccaccgacggcagcaccggcgtggagctggcccccagaagcgccgagcccggctacctggtgaccaaggtggtggccgtggacagagacagcggccagaacgcctggctgagctacagactgctgaaggccagcgagcccggcctgttcagcgtgggcctgcacaccggcgaggtgagaaccgccagagccctgctggacagagacgccctgaagcagagcctggtggtggccgtgcaggaccacggccagccccccctgagcgccaccgtgaccctgaccgtggccgtggccgacagcatcccccaggtgctggccgacctgggcagcctggagagccccgccaacagcgagaccagcgacctgaccctgtacctggtggtggccgtggccgccgtgagctgcgtgttcctggccttcgtgatcctgctgctggccctgagactgagaagatggcacaagagcagactgctgcaggccagcggcggcggcctgaccggcgcccccgccagccacttcgtgggcgtggacggcgtgcaggccttcctgcagacctacagccacgaggtgagcctgaccaccgacagcagaaagagccacctgatcttcccccagcccaactacgccgacatgctggtgagccaggagagcttcgagaagagcgagcccctgctgctgagcggcgacagcgtgttcagcaaggacagccacggcctgatcgagcaggccccccccaacaccgactggagattcagccaggcccagagacccggcaccagcggcagccagaacggcgacgacaccggcacctggcccaacaaccagttcgacaccgagatgctgcaggccatgatcctggccagcgccagcgaggccgccgacggcagcagcaccctgggcggcggcgccggcaccatgggcctgagcgccagatacggcccccagttcaccctgcagcacgtgcccgactacagacagaacgtgtacatccccggcagcaacgccaccctgaccaacgccgccggcaagagagacggcaaggcccccgccggcggcaacggcaacaagaagaagagcggcaagaaggagaagaagtag

SEQ ID NO: 95751 - DNA, 2799 bp, synthetic construct
  misc_feature 1..2799: note = Description of Artificial Sequence: Synthetic coding sequence
  source 1..2799: mol_type = other DNA
atggccgccctgcagaagctgccccactgcagaaagctggtgctgctgtgcttcctgctggccaccctgtgggaggccagagccggccagatcagatacagcgtgagagaggagatcgacagaggcagcttcgtgggcaacatcgccaaggacctgggcctggagcccctggccctggccgagcagggcgtgagaatcgtgagcagaggcagaagccagctgttcgccctgaaccccagaagcggcagcctggtgaccgccaacagaatcgacagagaggagctgtgcgcccagagcgccccctgcctgctgaacttcaacatcctgctggaggacaagctgaccatctacagcgtggaggtggagatcaccgacatcaacgacaacgcccccagattcggcgtggaggagctggagctgaagatcagcgagaccaccacccccggcttcagaatccccctgaagaacgcccacgacgccgacgtgggcgagaacgccctgcagaagtacgccctgaaccccaacgaccacttcagcctggacgtgagaagaggcgccgacggcaacaagtaccccgagctggtgctggagagaagcctggacagagaggaggaggccgtgcaccacctggtgctggtggccagcgacggcggcgaccccgtgctgagcggcaccagcagaatctgcgtgaaggtgctggacgccaacgacaacgcccccgtgttcacccagcccgagtacagaatcagcatccccgagaacaccctggtgggcaccagaatcctgaccgtgaccgccaccgacgccgacgagggctactacgcccaggtggtgtacttcctggagaagagccccggcgagaccagcgaggtgttcgagctgaagagcaccagcggcgagctgaccatcatcaaggacctggactacgaggacgccaccttccacgagatcgacatcgaggcccaggacggccccggcctgctgaccagagccaaggtgatcgtgaccgtgctggacgtgaacgacaacgcccccgagttctacatgaccagcgccaccagcagcgtgagcgaggacagcctgcccggcaccatcatcggcctgttcaacgtgcacgacagagacagcggccagaacgccttcaccacctgcagcctgcccgaggacctgcccttcaagctggagaagagcgtggacaactactacagactggtgaccaccagagccctggacagagagcagttcagcttctacaacatcaccctgaccgccaaggacggcggcaaccccagcctgagcaccgacgcccacatcctgctgcaggtggccgacatcaacgacaacgcccccgccttcagcagaaccagctacagcacctacatccccgagaacaaccccagaggcgccagcgtgttcagcgtgaccgcccacgaccccgacagcaacgacaacgcccacgtgacctacagcttcgccgaggacaccgtgcagggcgcccccctgagcagctacatcagcatcaacagcgacaccggcgtgctgtacgccctgagaagcttcgactacgagcagctgagagacctgcaggtgtgggtgatcgccagagacagcggcaacccccccctgagcagcaacgtgagcctgagcctgttcgtgctggaccagaacgacaacgcccccgagatcctgtaccccgccttccccaccgacggcagcaccggcgtggagctggcccccagaagcgccgagcccggctacctggtgaccaaggtggtggccgtggacagagacagcggccagaacgcctggctgagctaccacctgctgaaggccagcgagcccggcctgttcagcgtgggcctgcacaccggcgaggtgagaaccgccagagccctgctggacagagacgccctgaagcagagcctggtggtggccatccaggaccacggccagccccccctgagcgccaccgtgaccctgaccgtggccgtggccgacagaatccccgacatcctggccgacctgggcagcctggagcccagcgccatccccaacgacagcgacctgaccctgtacctggtggtggccgtggccgccgtgagctgcgtgttcctggccttcgtgatcgtgctgctggcccacagactgagaagatggcacaagagcagactgctgcaggccagcggcggcagcctgaccggcatgcagagcagccacttcgtgggcgtggacggcgtgagagccttcctgcagacctacagccacgaggtgagcctgaccgccgacagcagaaagagccacctgatcttcccccagcccaactacgccgacaccctgatcagccaggagagctgcgagaagaaggacttcctgagcgccccccagagcctgctggaggaggagagagaggagaccttcagccagcaggccccccccaacaccgactggagattcagccaggcccagagacccggcaccagcggcagccagaacggcgacgacaccggcacctggcccaacaaccagttcgacaccgagatgctgcaggccatgatcctggccagcgccagcgaggccgccgacggcagcagcaccctgggcggcggcgccggcaccatgggcctgagcgccagatacggcccccagttcaccctgcagcacgtgcccgactacagacagaacgtgtacatccccggcagcaacgccaccctgaccaacgccgccggcaagagagacggcaaggcccccgccggcggcaacggcaacaagaagaagagcggcaagaaggagaagaagtag

SEQ ID NO: 95752 - DNA, 2799 bp, synthetic construct
  misc_feature 1..2799: note = Description of Artificial Sequence: Synthetic coding sequence
  source 1..2799: mol_type = other DNA
atgaccaactgcctgagcttcagaaacggcagaggcctggccctgctgtgcgccctgctgggcaccctgtgcgagaccggcagcggccagatcagatacagcgtgagcgaggagctggacaagggcagcttcgtgggcaacatcgccaacgacctgggcctggagcccagagagctggccgagagaggcgtgagaatcgtgagcagaggcagaacccagctgttcagcctgaacccccagagcggcagcctggtgaccgccgagagaatcgacagagaggagctgtgcgcccagatccccctgtgcctggtgaagatcaacatcctggtggaggacaagctgaagatcttcgaggtggagatcgagatcaaggacatcaacgacaacgcccccaacttccccaccgaggagctggagatcaagatcggcgagctgaccgtgcccggcaccagattccccatcaagaccgccttcgaccccgacgtgggcatcaacagcctgcagaactacaagctgagccccaacgactacttcagcctggccgtgaacagcgtgagcgagggcgccaagtaccccgagctggtgctggagagagccctggacagagagaagaaggagatccaccagctggtgctggtggccagcgacggcggcgaccccgtgcacagcggcaacctgcacatccaggtgatcgtgctggacgccaacgacaacccccccatgttcacccagcccgagtacagagtgagcgtgtgggagaacgtgcccgtgggcaccagactgctgaccgtgaacgccaccgaccccgacgagggcttcaacgcccaggtgagctacatcctggacaagatgcccggcaagatcgccgagatcttccacctgaacagcgtgagcggcgaggtgagcatcctgaagagcctggactacgaggacgccatgttctacgagatcaagatcgaggcccaggacggccccggcctgctgagcagagccaagatcctggtgaccgtgctggacgtgaacgacaacgcccccgagatcaccatcaccagcctgaccagcagcgtgcccgaggagggcaccgtgggcagagagatcgccctgatcgacgtgcacgacagagacagcggccagaacggccaggtggaggtgttcgtgctgggcaacctgcccttcaagctggagaagagcatcgaccagtactacagactggtgaccgccaccagcctggacagagagcagatcagcgagtacaacatcagcctgagagccagcgacggcggcagcccccccctgagcaccgagacccacatcaccctgcacgtgatcgacatcaacgacaacccccccaccttcccccacctgagctacagcgcctacatccccgagaacaaccccagaggcgccagcatcttcagcgtgaccgcccaggaccccgacagcaacaacaacgccagaatcacctacgccctgaccgaggacaccctgcagggcgcccccctgagcagcttcgtgagcatcaacagcaacaccggcgtgctgtacgccctgagaagcttcgactacgagcagttcagagacctgaagctgctggtgaccgccagcgacagcggcaacccccccctgagcagcaacgtgagcctgaacctgttcgtgctggaccagaacgacaacgcccccgagatcctgtaccccgccctgcccaccgacggcagcaccggcgtggagctggcccccagaagcgccgagcccggctacctggtgaccaaggtggtggccgtggacagagacagcggccagaacgcctggctgagctacagactgctgaaggccagcgagcccggcctgttcagcgtgggcctgcacaccggcgaggtgagaaccgccagagccctgctggacagagacgccctgaagcagagcctggtggtggccgtgcaggaccacggccagccccccctgagcgccaccgtgaccctgaccgtggccgtggccgacagaatccccgacatcctggccgacctgggcagcctggagcccagcgccaagcccaacgacagcgacctgaccctgtacctggtggtggccgtggccgccgtgagctgcgtgttcctggccttcgtgatcgtgctgctggccctgagactgagaagatggcacaagagcagactgctgcaggccagcggcggcggcctggccagcacccccggcagccacttcgtgggcgccgacggcgtgagagccttcctgcagacctacagccacgaggtgagcctgaccgccgacagcagaaagagccacctgatcttcccccagcccaactacgccgacaccctgatcagccaggagagctgcgagaagagcgagcccctgctgatcacccaggacctgctggagatgaagggcgacagcaacctgctgcagcaggccccccccaacaccgactggagattcagccaggcccagagacccggcaccagcggcagccagaacggcgacgacaccggcacctggcccaacaaccagttcgacaccgagatgctgcaggccatgatcctggccagcgccagcgaggccgccgacggcagcagcaccctgggcggcggcgccggcaccatgggcctgagcgccagatacggcccccagttcaccctgcagcacgtgcccgactacagacagaacgtgtacatccccggcagcaacgccaccctgaccaacgccgccggcaagagagacggcaaggcccccgccggcggcaacggcaacaagaagaagagcggcaagaaggagaagaagtag

SEQ ID NO: 95753 - DNA, 2796 bp, synthetic construct
  misc_feature 1..2796: note = Description of Artificial Sequence: Synthetic coding sequence
  source 1..2796: mol_type = other DNA
atggccagcccccccagaggctggggctgcggcgagctgctgctgcccttcatgctgctgggcaccctgtgcgagcccggcagcggccagatcagatacagcatgcccgaggagctggacaagggcagcttcgtgggcaacatcgccaaggacctgggcctggagccccaggagctggccgagagaggcgtgagaatcgtgagcagaggcagaacccagctgttcgccctgaaccccagaagcggcagcctggtgaccgccggcagaatcgacagagaggagctgtgcgcccagagccccctgtgcgtggtgaacttcaacatcctggtggagaacaagatgaagatctacggcgtggaggtggagatcatcgacatcaacgacaacttccccagattcagagacgaggagctgaaggtgaaggtgaacgagaacgccgccgccggcaccagactggtgctgcccttcgccagagacgccgacgtgggcgtgaacagcctgagaagctaccagctgagcagcaacctgcacttcagcctggacgtggtgagcggcaccgacggccagaagtaccccgagctggtgctggagcagcccctggacagagagaaggagaccgtgcacgacctgctgctgaccgccctggacggcggcgaccccgtgctgagcggcaccacccacatcagagtgaccgtgctggacgccaacgacaacgcccccctgttcacccccagcgagtacagcgtgagcgtgcccgagaacatccccgtgggcaccagactgctgatgctgaccgccaccgaccccgacgagggcatcaacggcaagctgacctacagcttcagaaacgaggaggagaagatcagcgagaccttccagctggacagcaacctgggcgagatcagcaccctgcagagcctggactacgaggagagcagattctacctgatggaggtggtggcccaggacggcggcgccctggtggccagcgccaaggtggtggtgaccgtgcaggacgtgaacgacaacgcccccgaggtgatcctgaccagcctgaccagcagcatcagcgaggactgcctgcccggcaccgtgatcgccctgttcagcgtgcacgacggcgacagcggcgagaacggcgagatcgcctgcagcatccccagaaacctgcccttcaagctggagaagagcgtggacaactactaccacctgctgaccaccagagacctggacagagaggagaccagcgactacaacatcaccctgaccgtgatggaccacggcaccccccccctgagcaccgagagccacatccccctgaaggtggccgacgtgaacgacaacccccccaacttcccccaggccagctacagcaccagcgtgaccgagaacaaccccagaggcgtgagcatcttcagcgtgaccgcccacgaccccgacagcggcgacaacgccagagtgacctacagcctggccgaggacaccttccagggcgcccccctgagcagctacgtgagcatcaacagcgacaccggcgtgctgtacgccctgagaagcttcgactacgagcagctgagagacctgcagctgtgggtgaccgccagcgacagcggcaacccccccctgagcagcaacgtgagcctgagcctgttcgtgctggaccagaacgacaacacccccgagatcctgtaccccgccctgcccaccgacggcagcaccggcgtggagctggcccccagaagcgccgagcccggctacctggtgaccaaggtggtggccgtggacaaggacagcggccagaacgcctggctgagctacagactgctgaaggccagcgagcccggcctgttcgccgtgggcctgcacaccggcgaggtgagaaccgccagagccctgctggacagagacgccctgaagcagagcctggtggtggccgtggaggaccacggccagccccccctgagcgccaccttcaccgtgaccgtggccgtggccgacagaatccccgacatcctggccgacctgggcagcatcaagacccccatcgaccccgaggacctggacctgaccctgtacctggtggtggccgtggccgccgtgagctgcgtgttcctggccttcgtgatcgtgctgctggtgctgagactgagaagatggcacaagagcagactgctgcaggccgagggcagcagactggccggcgtgcccgccagccacttcgtgggcgtggacggcgtgagagccttcctgcagacctacagccacgaggtgagcctgaccgccgacagcagaaagagccacctgatcttcccccagcccaactacgccgacaccctgctgagcgaggagagctgcgagaagagcgagcccctgctgatgagcgacaaggtggacgccaacaaggaggagagaagagtgcagcaggccccccccaacaccgactggagattcagccaggcccagagacccggcaccagcggcagccagaacggcgacgacaccggcacctggcccaacaaccagttcgacaccgagatgctgcaggccatgatcctggccagcgccagcgaggccgccgacggcagcagcaccctgggcggcggcgccggcaccatgggcctgagcgccagatacggcccccagttcaccctgcagcacgtgcccgactacagacagaacgtgtacatccccggcagcaacgccaccctgaccaacgccgccggcaagagagacggcaaggcccccgccggcggcaacggcaacaagaagaagagcggcaagaaggagaagaagtag

SEQ ID NO: 95754 - DNA, 2799 bp, synthetic construct
  misc_feature 1..2799: note = Description of Artificial Sequence: Synthetic coding sequence
  source 1..2799: mol_type = other DNA
atggcccccccccagagacacccccagagaagcgagcaggtgctgctgctgaccctgctgggcaccctgtggggcgccgccgccgcccagatcagatacagcatccccgaggagctggagaagggcagcttcgtgggcaacatcgtgaaggacctgggcctggagccccaggagctggccgagcacggcgtgagaatcgtgagcagaggcagaatgcagctgttcagcctgaaccccagaaacggcagcctggtgaccgccggcagaatcgacagagaggagctgtgcgcccagagccccagatgcctggtgagcttcaacatcctggtggaggacaagctgaacctgtaccccgtggaggtggagatcgtggacatcaacgacaacacccccagattcctgaaggaggagctggaggtgaagatcctggagaacgccgcccccagcagcagattccccctgatggaggtgtacgaccccgacgtgggcatgaacagcctgcagggcttcaagctgagcggcaacagccacttcagcgtggacgtgcagagcgaggcccacggccccaagtaccccgagctggtgctggagggcaccctggacagagagggcgaggccgtgtacagactggtgctgaccgccatggacggcggcgaccccgtgagaagcagcgtggcccagatcctggtgaccgtgctggacgtgaacgacaacacccccatgttcacccagcccgtgtacagagtgagcgtgcccgagaacctgcccgtgggcacccccgtgctggccgtgaccgccaccgaccaggacgagggcgtgcacggcgaggtgacctacagcttcgtgaagatcaccgagaagatcagccagatcttctgcctgaacgtgctgaccggcgagatcagcaccagcgccaacctggactacgaggacagcagcttctacgagctgggcgtggaggccagagacggccccggcctgagagacagagccaaggtgctgatcaccatcctggacgtgaacgacaacgtgcccgaggtggtggtgaccagcggcagcagaaccatcgccgagagcgccccccccggcaccgtgatcgccctgttccaggtgttcgacagagacagcggcctgaacggcctggtgacctgcagcatccccagaagcctgcccttcgagctggagaagagcgtgggcaactactacagactggtgaccaacgccgccctggacagagaggaggtgttcctgtacaacatcaccgtgaccgccaccgacaagggcaccccccccctgagcaccgagaccatcatcagcctgaacgtggccgacaccaacgacaacccccccaccttcccccacagcagctacagcgtgtacgtgctggagaacaaccccagaggcgccagcatcttcagcgtgaacgccctggaccccgacgtggaccagaacgcccaggtgagctacagcctggccgaggacaccctgcagggcgcccccctgagcagctacgtgagcatcaacagcgacaccggcatcctgtacgccctgagaagcttcgactacgagcagctgagagacctgcagctgtgggtgaccgccagcgacagcggcgacccccccctgagcagcaacgtgagcctgagcctgttcgtgctggaccagaacgacaacgcccccgagatcctgtaccccgccctgcccaccgacggcagcaccggcgtggagctggcccccagaagcgccgagcccggctacctggtgaccaaggtggtggccgtggacagagacagcggccagaacgcctggctgagctacagactgctgaaggccagcgagcccggcctgttcagcgtgggcctgcacaccggcgaggtgagaaccgccagagccctgctggacagagacgccctgaagcagagcctggtggtggccgtgcaggaccacggccagccccccctgagcgccaccgtgaccctgaccgtggccgtggccgacagaatccccgacatcctggccgacctgggcagcctggagcccagcgccaagcccaacgacagcgacctgaccctgtacctggtggtggccgtggccgccgtgagctgcgtgttcctggccttcgtgatcgtgctgctggccctgagactgcagagatggcacaagagcagactgctgcaggccagcggcggcggcctggccagcatgcccggcagccacttcgtgggcgtggagggcgtgagagccttcctgcagacctacagccacgaggtgagcctgaccgccgacagcagaaagagccacctgatcttcccccagcccaactacgccgacaccctgatcaaccaggagagctacgagaagagcgagcccctgctgatcacccaggacctgctggagaccaagggcgagcccagacagctgcagcaggccccccccaacaccgactggagattcagccaggcccagagacccggcaccagcggcagccagaacggcgacgacaccggcacctggcccaacaaccagttcgacaccgagatgctgcaggccatgatcctggccagcgccagcgaggccgccgacggcagcagcaccctgggcggcggcgccggcaccatgggcctgagcgccagatacggcccccagttcaccctgcagcacgtgcccgactacagacagaacgtgtacatccccggcagcaacgccaccctgaccaacgccgccggcaagagagacggcaaggcccccgccggcggcaacggcaacaagaagaagagcggcaagaaggagaagaagtag

SEQ ID NO: 95755 - DNA, 2799 bp, synthetic construct
  misc_feature 1..2799: note = Description of Artificial Sequence: Synthetic coding sequence
  source 1..2799: mol_type = other DNA
atggccgcccagcccagaggcggcgactacagaggcttcttcctgctgagcatcctgctgggcaccccctgggaggcctgggccggcagaatcctgtacagcgtgagcgaggagaccgacaagggcagcttcgtgggcgacatcgccaaggacctgggcctggagcccagagagctggccgagagaggcgtgagaatcatcagcagaggcagaacccagctgttcgccctgaaccagagaagcggcagcctggtgaccgccggcagaatcgacagagaggagatctgcgcccagagcgccagatgcctggtgaacttcaacatcctgatggaggacaagatgaacctgtaccccatcgacgtggagatcatcgacatcaacgacaacgtgcccagattcctgaccgaggagatcaacgtgaagatcatggagaacaccgcccccggcgtgagattccccctgagcgaggccggcgaccccgacgtgggcaccaacagcctgcagagctaccagctgagccccaacagacacttcagcctggccgtgcagagcggcgacgacgagaccaagtaccccgagctggtgctggagagagtgctggacagagaggaggagagagtgcaccacctggtgctgaccgccagcgacggcggcgacccccccagaagcagcaccgcccacatccaggtgaccgtggtggacgtgaacgaccacacccccgtgttcagcctgccccagtaccaggtgaccgtgcccgagaacgtgcccgtgggcaccagactgctgaccgtgcacgccatcgacctggacgagggcgtgaacggcgaggtgacctacagcttcagaaagatcacccccaagctgcccaagatgttccacctgaacagcctgaccggcgagatcagcaccctggagggcctggactacgaggagaccgccttctacgagatggaggtgcaggcccaggacggccccggcagcctgaccaaggccaaggtgctgatcaccgtgctggacgtgaacgacaacgcccccgaggtgaccatgaccagcctgagcagcagcatccccgaggacacccccctgggcaccgtgatcgccctgttctacctgcaggacagagacagcggcaagaacggcgaggtgacctgcaccatccccgagaacctgcccttcaagctggagaagagcatcgacaactactacagactggtgaccaccaagaacctggacagagagaccctgagcctgtacaacatcaccctgaaggccaccgacggcggcaccccccccctgagcagagagacccacatcttcatgcaggtggccgacaccaacgacaacccccccaccttcccccacagcagctacagcgtgtacatcgccgagaacaaccccagaggcgccagcatcttcctggtgaccgcccaggaccacgacagcgaggacaacgcccagatcacctacagcctggccgaggacaccatccagggcgcccccgtgagcagctacgtgagcatcaacagcgacaccggcgtgctgtacgccctgcagagcttcgactacgagcagctgagagagctgcagctgagagtgaccgcccacgacagcggcgacccccccctgagcagcaacatgagcctgagcctgttcgtgctggaccagaacgacaacccccccgagatcctgtaccccgccctgcccaccgacggcagcaccggcatggagctggcccccagaagcgccgagcccggctacctggtgaccaaggtggtggccgtggacaaggacagcggccagaacgcctggctgagctacctgctgctgaaggccagcgagcccggcctgttcgccgtgggcctgtacaccggcgaggtgagaaccgccagagccctgctggacagagacgccctgaagcagagcctggtggtggccgtgcaggaccacggccagccccccctgagcgccaccgtgaccctgaccgtggccgtggccgacagcatccccgaggtgctggccgacctgggcagcctggagcccagcgacggcccctacaactacgacctgaccctgtacctggtggtggccgtggccaccgtgagctgcgtgttcctggccttcgtgctggtgctgctggccctgagactgagaagatggcacaagagcagactgctgcaggccagcgagggcggcctggccaacgtgcccaccagccacttcgtgggcatggacggcgtgcaggccttcctgcagacctacagccacgaggtgagcctgaccgccgacagcagaaagagccacctgatcttcccccagcccaactacgtggacatgctgatcagccaggagagctgcgagaagaacgacagcctgctgaccagcgtggacttccaggagtgcaaggagaacctgcccagcatccagcaggccccccccaacaccgactggagattcagccaggcccagagacccggcaccagcggcagccagaacggcgacgacaccggcacctggcccaacaaccagttcgacaccgagatgctgcaggccatgatcctggccagcgccagcgaggccgccgacggcagcagcaccctgggcggcggcgccggcaccatgggcctgagcgccagatacggcccccagttcaccctgcagcacgtgcccgactacagacagaacgtgtacatccccggcagcaacgccaccctgaccaacgccgccggcaagagagacggcaaggcccccgccggcggcaacggcaacaagaagaagagcggcaagaaggagaagaagtag

SEQ ID NO: 95756 - DNA, 2799 bp, synthetic construct
  misc_feature 1..2799: note = Description of Artificial Sequence: Synthetic coding sequence
  source 1..2799: mol_type = other DNA
atggccgccccccagagcagacccagaagaggcgagctgatcctgctgtgcgccctgctgggcaccctgtgggagatcggcagaggccagatcagatacagcgtgcccgaggagaccgacaagggcagcttcgtgggcaacatcagcaaggacctgggcctggaccccagaaagctggccaagcacggcgtgagaatcgtgagcagaggcagaacccagctgttcgccctgaaccccagaagcggcagcctgatcaccgccggcagaatcgacagagaggagctgtgcgcccagagccccagatgcctgatcaacatcaacaccctggtggaggacaagggcaagctgttcggcgtggagatcgagatcatcgacatcaacgacaacaaccccaagttccaggtggaggacctggaggtgaagatcaacgagatcgccgtgcccggcgccagataccccctgcccgaggccgtggaccccgacgtgggcgtgaacagcctgcagagctaccagctgagccccaaccaccacttcagcctggacgtgcagaccggcgacaacggcgccatcaaccccgagctggtgctggagagagccctggacagagaggaggaggccgcccaccacctggtgctgaccgccagcgacggcggcaagccccccagaagcagcaccgtgagaatccacgtgaccgtgctggacaccaacgacaacgcccccgtgttcccccaccccatctacagagtgaaggtgctggagaacatgccccccggcaccagactgctgaccgtgaccgccagcgaccccgacgagggcatcaacggcaaggtggcctacaagttcagaaagatcaacgagaagcagacccccctgttccagctgaacgagaacaccggcgagatcagcatcgccaagagcctggactacgaggagtgcagcttctacgagatggagatccaggccgaggacgtgggcgccctgctgggcagaaccaagctgctgatcagcgtggaggacgtgaacgacaacagacccgaggtgatcatcaccagcctgttcagccccgtgctggagaacagcctgcccggcaccgtgatcgccttcctgagcgtgcacgaccaggacagcggcaagaacggccaggtggtgtgctacaccagagacaacctgcccttcaagctggagaagagcatcggcaactactacagactggtgaccagaaagtacctggacagagagaacgtgagcatctacaacatcaccgtgatggccagcgacctgggcaccccccccctgagcaccgagacccagatcgccctgcacgtggccgacatcaacgacaacccccccaccttcccccacgccagctacagcgcctacatcctggagaacaacctgagaggcgccagcatcttcagcctgaccgcccacgaccccgacagccaggagaacgcccaggtgacctacagcgtgaccgaggacaccctgcagggcgcccccctgagcagctacatcagcatcaacagcgacaccggcgtgctgtacgccctgcagagcttcgactacgagcagatcagagacctgcagctgctggtgaccgccagcgacagcggcgacccccccctgagcagcaacatgagcctgagcctgttcgtgctggaccagaacgacaacgcccccgagatcctgtaccccgccctgcccaccgacggcagcaccggcgtggagctggcccccagaagcgccgagagaggctacctggtgaccaaggtggtggccgtggacagagacagcggccagaacgcctggctgagctacagactgctgaaggccagcgagcccggcctgttcagcgtgggcctgcacaccggcgaggtgagaaccgccagagccctgctggacagagacgccctgaagcagagcctggtggtggccgtgcaggaccacggccagccccccctgagcgccaccgtgaccctgaccgtggccgtggccgacagcatccccgaggtgctgaccgagctgggcagcctgaagcccagcgtggaccccaacgacagcagcctgaccctgtacctggtggtggccgtggccgccatcagctgcgtgttcctggccttcgtggccgtgctgctgggcctgagactgagaagatggcacaagagcagactgctgcaggacagcggcggcagactggtgggcgtgcccgccagccacttcgtgggcgtggaggaggtgcaggccttcctgcagacctacagccaggaggtgagcctgaccgccgacagcagaaagagccacctgatcttcccccagcccaactacgccgacatgctgatcagccaggagggctgcgagaagaacgacagcctgctgaccagcgtggacttccacgagtacaagaacgaggccgaccacggccagcaggccccccccaacaccgactggagattcagccaggcccagagacccggcaccagcggcagccagaacggcgacgacaccggcacctggcccaacaaccagttcgacaccgagatgctgcaggccatgatcctggccagcgccagcgaggccgccgacggcagcagcaccctgggcggcggcgccggcaccatgggcctgagcgccagatacggcccccagttcaccctgcagcacgtgcccgactacagacagaacgtgtacatccccggcagcaacgccaccctgaccaacgccgccggcaagagagacggcaaggcccccgccggcggcaacggcaacaagaagaagagcggcaagaaggagaagaagtag

SEQ ID NO: 95757 - DNA, 2784 bp, synthetic construct
  misc_feature 1..2784: note = Description of Artificial Sequence: Synthetic coding sequence
  source 1..2784: mol_type = other DNA
atgcagagagccagagaggccgagatgatgaagagccaggtgctgttccccttcctgctgagcctgttctgcggcgccatcagccagcagatcagatacaccatccccgaggagctggccaacggcagcagagtgggcaagctggccaaggacctgggcctgagcgtgagagagctgcccaccagaaagctgagagtgagcgccgaggactacttcaacgtgagcctggagagcggcgacctgctggtgaacggcagaatcgacagagagaagatctgcggcagaaagctggagtgcgccctggagttcgagaccgtggccgagaaccccatgaacgtgttccacgtggtggtggtgatccaggacatcaacgacaacgcccccagattcgtggccaagggcatcgacctggagatctgcgagagcgccctgcccggcgtgaagttcagcctggacagcgcccaggacgccgacgtggagggcaacagcctgaagctgtacaccatcaaccccaaccagtacttcagcctgagcaccaaggagagccccgacggcagcaagtaccccgtgctgctgctggagaagcccctggacagagagcaccagagcagccacagactgatcctgaccgccatggacggcggcgacccccccctgagcggcaccacccacatctggatcagagtgaccgacgccaacgacaacgcccccgtgttcagccaggaggtgtacagagtgagcctgcaggagaacgtgccctggggcaccagcgtgctgagagtgatggccaccgaccaggacgagggcatcaacgccgagatcacctacgccttcctgaacagccccatcagcaccagcctgttcaacctgaaccccaacaccggcgacatcaccaccaacggcaccctggacttcgaggagaccagcagatacgtgctgagcgtggaggccaaggacggcggcgtgcacaccgcccactgcaacgtgcagatcgagatcgtggacgagaacgacaacgcccccgaggtgaccttcatgagcttcagcaaccagatccccgaggacagcgacctgggcaccgtgatcgccctgatcaaggtgagagacaaggacagcggccagaacggcatggtgacctgctacacccaggaggaggtgcccttcaagctggagagcaccagcaagaactactacaagctggtgatcgccggcgccctgaacagagagcagaccgccgactacaacgtgaccatcatcgccaccgacaagggcaagcccgccctgagcagcagaaccagcatcaccctgcacatcagcgacatcaacgacaacgcccccgtgttccaccaggccagctacgtggtgcacgtgagcgagaacaacccccccggcgccagcatcgcccaggtgagcgccagcgaccccgacctgggccccaacggcagagtgagctacagcatcctggccagcgacctggagcccagagagctgctgagctacgtgagcgtgagcccccagagcggcgtggtgttcgcccagagagccttcgaccacgagcagctgagagccttcgagctgaccctgcaggccagagaccagggcagccccgccctgagcgccaacgtgagcctgagagtgctggtgggcgacctgaacgacaacgcccccagagtgctgtaccccgccctgggccccgacggcagcgccctgttcgacatggtgcccagagccgccgagcccggctacctggtgaccaaggtggtggccgtggacgccgacagcggccacaacgcctggctgagctaccacgtgctgcaggccagcgagcccggcctgttcagcctgggcctgagaaccggcgaggtgagaaccgccagagccctgggcgacagagacgccgccagacagagactgctggtggccgtgagagacggcggccagccccccctgagcgccaccgccaccctgcacctgatcttcgccgacagcctgcaggaggtgctgcccgacctgagcgacagacccgagcccagcgacccccagaccgagctgcagttctacctggtggtggccctggccctgatcagcgtgctgttcctgctggccgtgatcctggccatcgccctgagactgagaagaagcagcagcctggacaccgagggctgcttccagaccggcctgtgcagcaagagcggccccggcgtgccccccaaccacagcgagggcaccctgccctacagctacaacctgtgcatcgccagccacagcgccaagaccgagttcaacagcctgaacctgacccccgagatggcccccccccaggacctgctgtgcgacgaccccagcatggtggtgtgcgccagcaacgaggaccacaagatcgcctacgaccccagcctgagcagccaccaggccccccccaacaccgactggagattcagccaggcccagagacccggcaccagcggcagccagaacggcgacgacaccggcacctggcccaacaaccagttcgacaccgagatgctgcaggccatgatcctggccagcgccagcgaggccgccgacggcagcagcaccctgggcggcggcgccggcaccatgggcctgagcgccagatacggcccccagttcaccctgcagcacgtgcccgactacagacagaacgtgtacatccccggcagcaacgccaccctgaccaacgccgccggcaagagagacggcaaggcccccgccggcggcaacggcaacaagaagaagagcggcaagaaggagaagaagtag

SEQ ID NO: 95758 - DNA, 2796 bp, synthetic construct
  misc_feature 1..2796: note = Description of Artificial Sequence: Synthetic coding sequence
  source 1..2796: mol_type = other DNA
atgaaggccagcagcggcagatgcggcctggtgagatggctgcaggtgctgctgcccttcctgctgagcctgttccccggcgccctgcccgtgcagatcagatacagcatccccgaggagctggccaagaacagcgtggtgggcaacctggccaaggacctgggcctgagcgtgagagacctgcccgccagaaagctgagagtgagcgccgagaaggagtacttcaccgtgaaccccgagagcggcgacctgctggtgagcgacagaatcgacagagagcagatctgcggcaagcagcccctgtgcgtgctggacttcgacaccgtggccgagaaccccctgaacatcttctacatcgccgtgatcgtgcaggacatcaacgacaacacccccctgttcaagcagaccaagatcaacctgaagatcggcgagagcaccaagcccggcaccaccttccccctggaccccgccctggacagcgacgtgggccccaacagcctgcagagataccacctgaacgacaacgagtacttcgacctggccgagaagcagacccccgacggcagaaagtaccccgagctgatcctgaagcacagcctggacagagaggagcacagcctgcaccagctggtgctgaccgccgtggacggcggcgaccccccccagagcggcaccacccagatcagaatcaaggtgaccgacgccaacgacaacccccccgtgttcagccaggacgtgtacagagtgaccctgagagaggacgtgccccccggcttcttcgtgctgcaggtgaccgccaccgacagagacgagggcatcaacgccgagatcacctacagcttccacaacgtggacgagcaggtgaagcacttcttcaacctgaacgagaagaccggcgagatcaccaccaaggacgacctggacttcgagatcgccagcagctacaccctgagcatcgaggccaaggaccccggcgacctggccgcccactgcagcatccaggtggagatcctggacgacaacgactgcgcccccgaggtgatcgtgaccagcgtgagcacccccctgcccgaggacagcccccccggcaccgtgatcgccctgatcaagaccagagacagagacagcggcgagaacggcgaggtgtactgccaggtgctgggcaacgccaagttcatcctgaagagcagcagcaagaactactacaagctggtgaccgacggcgccctggacagagaggagatccccgagtacaacctgaccatcaccgccaccgacggcggcaagccccccctgagcagcagcatcatcgtgaccctgcacatcagcgacgtgaacgacaacgcccccgtgttccagcagaccagctacatggtgcacgtggccgagaacaacccccccggcgccagcatcgcccagatcagcgccagcgaccccgacctgggccccagcggccaggtgagctacagcatcgtggccagcgacctgaagcccagagagatcctgagctacgtgagcgtgagcgcccagagcggcgtggtgttcgcccagagagccttcgaccacgagcagctgagagccttcgagctgaccctgcaggccagagaccagggcagccccgccctgagcgccaacgtgagcctgagagtgctggtgggcgacctgaacgacaacgcccccagagtgctgtaccccgccctgggccccgacggcagcgccctgttcgacatggtgcccagagccgccgagcccggctacctggtgaccaaggtggtggccgtggacgccgacagcggccacaacgcctggctgagctaccacgtgctgcaggccagcgagcccggcctgttcagcctgggcctgagaaccggcgaggtgagaaccgccagagccctgggcgacagagacgccgccagacagagactgctggtggccgtgagagacggcggccagccccccctgagcgccaccgccaccctgcacctgatcttcgccgacagcctgcaggaggtgctgcccgacctgagcgacagaagagagcccagcgacccccaggccaagctgcagttctacctggtggtggccctggccctgatcagcgtgctgttcttcctggccgtgatcctggccatcagcctgagactgagactgagcagcagaagcgacgcctgggactgcttccagcccggcctgagcagcaagcccggccccggcgtgctgcccaactacagcgagggcaccctgccctacagctacaacctgtgcgtggccagccagagcgccaagaccgagttcaacttcctgaacatcacccccgagctggtgcccgcccaggacctggtgtgcgacaacgccagctgggagcagaacaccaaccacggcgccgccggcgtgcccttcgccagcgacaccatcctgaagcaggccccccccaacaccgactggagattcagccaggcccagagacccggcaccagcggcagccagaacggcgacgacaccggcacctggcccaacaaccagttcgacaccgagatgctgcaggccatgatcctggccagcgccagcgaggccgccgacggcagcagcaccctgggcggcggcgccggcaccatgggcctgagcgccagatacggcccccagttcaccctgcagcacgtgcccgactacagacagaacgtgtacatccccggcagcaacgccaccctgaccaacgccgccggcaagagagacggcaaggcccccgccggcggcaacggcaacaagaagaagagcggcaagaaggagaagaagtag

SEQ ID NO: 95759 - DNA, 2772 bp, synthetic construct
  misc_feature 1..2772: note = Description of Artificial Sequence: Synthetic coding sequence
  source 1..2772: mol_type = other DNA
atgggcagcggcgccggcgagctgggcagagccgagagactgcccgtgctgttcctgttcctgctgagcctgttctgccccgccctgtgcgagcagatcagatacagaatccccgaggagatgcccaagggcagcgtggtgggcaacctggccaccgacctgggcttcagcgtgcaggagctgcccaccagaaagctgagagtgagcagcgagaagccctacttcaccgtgagcgccgagagcggcgagctgctggtgagcagcagactggacagagaggagatctgcggcaagaagcccgcctgcgccctggagttcgaggccgtggccgagaaccccctgaacttctaccacgtgaacgtggagatcgaggacatcaacgaccacacccccaagttcacccagaacagcttcgagctgcagatcagcgagagcgcccagcccggcaccagattcatcctgggcagcgcccacgacgccgacatcggcagcaacaccctgcagaactaccagctgagccccagcgaccacttcagcctgatcaacaaggagaagagcgacggcagcaagtaccccgagatggtgctgaagacccccctggacagagagaagcagaagagctaccacctgaccctgaccgccctggacttcggcgccccccccctgagcagcaccgcccagatccacgtgctggtgaccgacgccaacgacaacgcccccgtgttcagccaggacgtgtacagagtgagcctgagcgagaacgtgtaccccggcaccaccgtgctgcaggtgaccgccaccgaccaggacgagggcgtgaacgccgagatcaccttcagcttcagcgaggccagccagatcacccagttcgacctgaacagcaacaccggcgagatcaccgtgctgaacaccctggacttcgaggaggtgaaggagtacagcatcgtgctggaggccagagacggcggcggcatgatcgcccagtgcaccgtggaggtggaggtgatcgacgagaacgacaacgcccccgaggtgatcttccagagcctgcccaacctgatcatggaggacgccgagctgggcacccacatcgccctgctgaaggtgagagacaaggacagcagacacaacggcgaggtgacctgcaagctggagggcgacgtgcccttcaagatcctgaccagcagcagaaacacctacaagctggtgaccgacgccgtgctggacagagagcagaaccccgagtacaacatcaccgtgaccgccaccgacagaggcaagccccccctgagcagcagcagcagcatcaccctgcacatcggcgacgtgaacgacaacgcccccgtgttcagccagagcagctacatcgtgcacgtggccgagaacaacccccccggcgccagcatcagccaggtgagagccagcgaccccgacctgggccccaacggccaggtgagctactgcatcatggccagcgacctggagcagagagagctgagcagctacgtgagcatcagcgccgagagcggcgtggtgttcgcccagagagccttcgaccacgagcagctgagagccttcgagctgaccctgcaggccagagaccagggcagccccgccctgagcgccaacgtgagcctgagagtgctggtggacgacagaaacgacaacgcccccagagtgctgtaccccgccctgggccccgacggcagcgccctgttcgacatggtgccccacgccgccgagcccggctacctggtgaccaaggtggtggccgtggacgccgacagcggccacaacgcctggctgagctaccacgtgctgcaggccagcgagcccggcctgttcagcctgggcctgagaaccggcgaggtgagaaccgccagagccctgggcgacagagacgccgtgagacagagactgctggtggccgtgagagacggcggccagccccccctgagcgccaccgccaccctgcacctggtgttcgccgacagcctgcaggaggtgctgcccgacatcaccgacagacccgaccccagcgacctgcaggccgagctgcagttctacctggtggtggccctggccctgatcagcgtgctgttcctggtggccatgatcctggccatcgccctgagactgagaagaagcagcagccccgccagctggagctgcttccagcccggcctgtgcgtgaagagcgagagcgtggtgccccccaactacagcgagggcaccctgccctacagctacaacctgtgcgtggcccacaccggcaagaccgagttcaacttcctgaagtgcagcgagcagctgagcagcggccaggacatcctgtgcggcgacagcagcggcgccctgttccccctgtgcaacagcagcgagctgaccagccaccagcaggccccccccaacaccgactggagattcagccaggcccagagacccggcaccagcggcagccagaacggcgacgacaccggcacctggcccaacaaccagttcgacaccgagatgctgcaggccatgatcctggccagcgccagcgaggccgccgacggcagcagcaccctgggcggcggcgccggcaccatgggcctgagcgccagatacggcccccagttcaccctgcagcacgtgcccgactacagacagaacgtgtacatccccggcagcaacgccaccctgaccaacgccgccggcaagagagacggcaaggcccccgccggcggcaacggcaacaagaagaagagcggcaagaaggagaagaagtag

SEQ ID NO: 95760 - DNA, 2793 bp, synthetic construct
  misc_feature 1..2793: note = Description of Artificial Sequence: Synthetic coding sequence
  source 1..2793: mol_type = other DNA
atgggcggcagctgcgcccagagaagaagagccggccccagacaggtgctgttccccctgctgctgcccctgttctaccccaccctgagcgagcccatcagatacagcatccccgaggagctggccaagggcagcgtggtgggcaacctggccaaggacctgggcctgagcgtgctggacgtgagcgccagaaagctgagagtgagcgccgagaagctgcacttcagcgtggacgccgagagcggcgacctgctggtgaagaacagaatcgacagagagcagatctgcaaggagagaagaagatgcgagctgcagctggaggccgtggtggagaaccccctgaacatcttccacgtgatcgtggtgatcgaggacgtgaacgaccacgccccccagttcgacaagaaggagatccacctggagatcttcgagagcgccagcgccggcaccagactgagcctggaccccgccaccgaccccgacatcaacatcaacagcatcaaggactacaagatcaacagcaacccctacttcagcctgatggtgagagtgaacagcgacggcggcaagtaccccgagctgagcctggagaagctgctggacagagaggagcagagaagccacagcctgatcctgaccgccctggacggcggcgacccccccagaagcgccaccgcccacatcgagatcagcgtgaaggacaccaacgacaacccccccgtgttcagcagagacgagtacagaatcagcctgagcgagaacctgccccccggcagccccgtgctgcaggtgaccgccaccgaccaggacgagggcgtgaacgccgagatcaactactacttcagaagcaccgcccagagcaccaagcacatgttcagcctggacgagaagaccggcatgatcaagaacaaccagagcttcgacttcgaggacgtggagagatacaccatggaggtggaggccaaggacggcggcggcctgagcacccagtgcaaggtgatcatcgagatcctggacgagaacgacaacagccccgagatcatcatcaccagcctgagcgaccagatcctggagaacagcccccccggcatggtggtggccctgttcaagaccagagacctggacttcggcggcaacggcgaggtgagatgcaacatcgagaccgacatccccttcaagatctacagcagcagcaacaactactacaagctggtgaccgacggcgccctggacagagagcagacccccgagtacaacgtgaccatcgtggccaccgacagaggcaagccccccctgagcagcagcagaagcatcaccctgtacgtggccgacatcaacgacaacgcccccgtgttcgaccagaccagctacgtggtgcacgtggccgagaacaacccccccggcgccagcatcgcccaggtgagcgccagcgaccccgacctgggcctgaacggccacatcagctacagcatcgtggccagcgacctggagcccctggccgtgagcagctacgtgagcgtgagcgcccagagcggcgtggtgttcgcccagagagccttcgaccacgagcagctgagagccttcgccctgaccctgcaggccagagaccacggcagccccaccctgagcgccaacgtgagcctgagagtgctggtgggcgacagaaacgacaacgcccccagagtgctgtaccccgccctgggccccgacggcagcgccttcttcgacatggtgcccagaagcgccgagcccggctacctggtgaccaaggtggtggccgtggacgccgacagcggccacaacgcctggctgagctaccacgtgctgcaggccagcgagcccggcctgttcagcctgggcctgagaaccggcgaggtgagaaccgccagagccctgggcgacagagacgccgccagacagagactgctggtggccgtgagagacggcggccagccccccctgagcgccaccgccaccctgcacctggtgttcgccgacaacctgcaggagatcctgcccgacctgagcgacagacccgtgctgagcgacccccaggccgagctgcagttctacctggtggtggccctggccctgatcagcgtgctgttcctgctggccgtgatcctggccatcgccctgagactgagaagaagcctgagccccgccacctgggactgcttccaccccggcctgtgcgtgaagagcggccccgtggtgccccccaactacagcgagggcaccctgccctacagctacaacctgtgcatcgcccacaccggcaccaaggagttcaacttcctgaagtgcagcgtgcccctgcacagcaacgaggacatggtgtgcagcgtgagccccggcgccctgatccccccccacggcggcgaggacctgaccagccaccccgagaccctgaccagccaggccccccccaacaccgactggagattcagccaggcccagagacccggcaccagcggcagccagaacggcgacgacaccggcacctggcccaacaaccagttcgacaccgagatgctgcaggccatgatcctggccagcgccagcgaggccgccgacggcagcagcaccctgggcggcggcgccggcaccatgggcctgagcgccagatacggcccccagttcaccctgcagcacgtgcccgactacagacagaacgtgtacatccccggcagcaacgccaccctgaccaacgccgccggcaagagagacggcaaggcccccgccggcggcaacggcaacaagaagaagagcggcaagaaggagaagaagtag

SEQ ID NO: 95761 - DNA, 2790 bp, synthetic construct
  misc_feature 1..2790: note = Description of Artificial Sequence: Synthetic coding sequence
  source 1..2790: mol_type = other DNA
atgggcggcagctgcgcccagagaagaagagccggccccagacaggtgctgttccccctgctgctgcccctgttctaccccaccctgtgcgagcccatcagatacagcatccccgaggagctggccaagggcagcgtggtgggcaacctggccaaggacctgggcctgagcgtgctggacgtgagcgccagagagctgagagtgagcgccgagaagctgcacttcagcgtggacgcccagagcggcgacctgctggtgaaggacagaatcgacagagagcagatctgcaaggagagaagaagatgcgagctgcagctggaggccgtggtggagaaccccctgaacatcttccacgtgatcgtggtgatcgaggacgtgaacgaccacgccccccagttcagaaaggacgagatcaacctggagatcagcgagagcgtgagcctgggcatgggcaccatcctggagagcgccgaggaccccgacatcagcatgaacagcctgagcaagtaccagctgagccccaacgagtacttcagcctggtggagaaggacaaccccgacggcggcaagtaccccgagctggtgctgcagaagaccctggacagagagacccagagcgcccaccacctggtgctgaccgccctggacggcggcgacccccccagaagcggcaccgcccagatcagaatcctggtgatcgacgccaacgacaacccccccgtgttcagccaggacgtgtacagagtgagcctgagagaggacgtgccccccggcaccagcatcctgagagtgaaggccaccgaccaggacgagggcatcaacagcgagatcacctacagcttcttcggcgtggccgacaaggcccagcacgtgttcagcctggactacaccaccggcaacatcctgacccagcagcccctggacttcgaggaggtggagagatacaccatcaacatcgaggccaaggacagaggcagcctgagcaccagatgcaaggtgatcgtggaggtggtggacgagaacgacaacagccccgagatcatcatcaccagcctgagcgaccagatcatggaggacagcccccccggcgtggtggtggccctgttcaagaccagagaccaggacagcggcgagaacggcgaggtgagatgcagcctgagcagaggcgtgcccttcaagatccacagcagcagcaacaactactacaagctggtgaccgacgaggccctggacagagagcagacccccgagtacaacgtgaccatcgccgccaccgacagaggcaagccccccctgagcagcagcaagaccatcaccctgcacatcaccgacgtgaacgacaacgcccccgtgttcggccagagcgcctacctggtgcacgtgcccgagaacaaccagcccggcgccagcatcgcccaggtgagcgccagcgaccccgacttcggcctgaacggcagagtgagctacagcctgatcgccagcgacctggagagcagaaccctgagcagctacgtgagcgtgagcgcccagagcggcgtggtgttcgcccagagagccttcgaccacgagcagctgagaaccttcgagctgaccctgcaggccagagaccagggcagccccgccctgagcgccaacgtgagcctgagagtgctggtgggcgacagaaacgacaacgcccccagagtgctgtaccccgccctgggccccgacggcagcgccctgttcgacaccgtgcccagagccgcccagcccggctacctggtgaccaaggtggtggccgtggacgccgacagcggccacaacgcctggctgagctaccacgtggtgcaggccagcgagcccggcctgttcagcctgggcctgagaaccggcgaggtgagaatggtgagagccctgggcgacaaggacagcgtgagacagagactgctggtggccgtgagagacggcggccagccccccctgagcgccaccgccaccctgcacctggtgttcgccgacagcctgcaggaggtgctgcccgacttcagcgaccaccccacccccagcgacagccaggccgagatgcagttctacctggtggtggccctggccctgatcagcgtgctgttcctgctggccgtgatcctggccatcgccctgagactgagacagagcttcagccccaccgccggcgactgcttcgagagcgtgctgtgcagcaagagcggccccgtgggcccccccaactacagcgagggcaccctgccctacgcctacaacttctgcgtgcccggcgaccagatgaaccccgagttcaacttcttcaccagcgtggaccactgccccgccacccaggacaacctgaacaaggacagcatgctgctggccagcatcctgacccccagcgtggaggccgacaagaagatcctgaagcagcaggccccccccaacaccgactggagattcagccaggcccagagacccggcaccagcggcagccagaacggcgacgacaccggcacctggcccaacaaccagttcgacaccgagatgctgcaggccatgatcctggccagcgccagcgaggccgccgacggcagcagcaccctgggcggcggcgccggcaccatgggcctgagcgccagatacggcccccagttcaccctgcagcacgtgcccgactacagacagaacgtgtacatccccggcagcaacgccaccctgaccaacgccgccggcaagagagacggcaaggcccccgccggcggcaacggcaacaagaagaagagcggcaagaaggagaagaagtag

SEQ ID NO: 95762 - DNA, 2805 bp, synthetic construct
  misc_feature 1..2805: note = Description of Artificial Sequence: Synthetic coding sequence
  source 1..2805: mol_type = other DNA
atggtgcccgaggcctggagaagcggcctggtgagcaccggcagagtggtgggcgtgctgctgctgctgggcgccctgaacaaggccagcaccgtgatccactacgagatccccgaggagagagagaagggcttcgccgtgggcaacgtggtggccaacctgggcctggacctgggcagcctgagcgccagaagattcagagtggtgagcggcgccagcagaagattcttcgaggtgaacagagagaccggcgagatgttcgtgaacgacagactggacagagaggagctgtgcggcaccctgcccagctgcaccgtgaccctggagctggtggtggagaaccccctggagctgttcagcgtggaggtggtgatccaggacatcaacgacaacaaccccgccttccccacccaggagatgaagctggagatcagcgaggccgtggcccccggcaccagattccccctggagagcgcccacgaccccgacgtgggcagcaacagcctgcagacctacgagctgagcagaaacgagtacttcgccctgagagtgcagaccagagaggacagcaccaagtacgccgagctggtgctggagagagccctggacagagagagagagcccagcctgcagctggtgctgaccgccctggacggcggcacccccgccctgagcgccagcctgcccatccacatcaaggtgctggacgccaacgacaacgcccccgtgttcaaccagagcctgtacagagccagagtgctggaggacgcccccagcggcaccagagtggtgcaggtgctggccaccgacctggacgagggccccaacggcgagatcatctacagcttcggcagccacaacagagccggcgtgagacagctgttcgccctggacctggtgaccggcatgctgaccatcaagggcagactggacttcgaggacaccaagctgcacgagatctacatccaggccaaggacaagggcgccaaccccgagggcgcccactgcaaggtgctggtggaggtggtggacgtgaacgacaacgcccccgagatcaccgtgaccagcgtgtacagccccgtgcccgaggacgcccccctgggcaccgtgatcgccctgctgagcgtgaccgacctggacgccggcgagaacggcctggtgacctgcgaggtgccccccggcctgcccttcagcctgaccagcagcctgaagaactacttcaccctgaagaccagcgccgacctggacagagagaccgtgcccgagtacaacctgagcatcaccgccagagacgccggcacccccagcctgagcgccctgaccatcgtgagagtgcaggtgagcgacatcaacgacaaccccccccagagcagccagagcagctacgacgtgtacatcgaggagaacaacctgcccggcgcccccatcctgaacctgagcgtgtgggaccccgacgccccccagaacgccagactgagcttcttcctgctggagcagggcgccgagaccggcctggtgggcagatacttcaccatcaacagagacaacggcatcgtgagcagcctggtgcccctggactacgaggacagaagagagttcgagctgaccgcccacatcagcgacggcggcacccccgtgctggccaccaacatcagcgtgaacatcttcgtgaccgacagaaacgacaacgccccccaggtgctgtaccccagacccggcggcagcagcgtggagatgctgcccagaggcaccagcgccggccacctggtgagcagagtggtgggctgggacgccgacgccggccacaacgcctggctgagctacagcctgctgggcagccccaaccagagcctgttcgccatcggcctgcacaccggccagatcagcaccgccagacccgtgcaggacaccgacagccccagacagaccctgaccgtgctgatcaaggacaacggcgagcccagcctgagcaccaccgccaccctgaccgtgagcgtgaccgaggacagccccgaggccagagccgagttccccagcggcagcgcccccagagagcagaagaagaacctgaccttctacctgctgctgagcctgatcctggtgagcgtgggcttcgtggtgaccgtgttcggcgtgatcatcttcaaggtgtacaagtggaagcagagcagagacctgtacagagcccccgtgagcagcctgtacagaacccccggccccagcctgcacgccgacgccgtgagaggcggcctgatgagcccccacctgtaccaccaggtgtacctgaccaccgacagcagaagaagcgaccccctgctgaagaagcccggcgccgccagccccctggccagcagacagaacaccctgagaagctgcgaccccgtgttctacagacaggtgctgggcgccgagagcgccccccccggccagcaggccccccccaacaccgactggagattcagccaggcccagagacccggcaccagcggcagccagaacggcgacgacaccggcacctggcccaacaaccagttcgacaccgagatgctgcaggccatgatcctggccagcgccagcgaggccgccgacggcagcagcaccctgggcggcggcgccggcaccatgggcctgagcgccagatacggcccccagttcaccctgcagcacgtgcccgactacagacagaacgtgtacatccccggcagcaacgccaccctgaccaacgccgccggcaagagagacggcaaggcccccgccggcggcaacggcaacaagaagaagagcggcaagaaggagaagaagtag

SEQ ID NO: 95763 - DNA, 2817 bp, synthetic construct
  misc_feature 1..2817: note = Description of Artificial Sequence: Synthetic coding sequence
  source 1..2817: mol_type = other DNA
atgctgagaaaggtgagaagctggaccgagatctggagatgggccaccctgctgttcctgttctaccacctgggctacgtgtgcggccagatcagataccccgtgcccgaggagagccaggagggcaccttcgtgggcaacgtggcccaggacttcctgctggacaccgacagcctgagcgccagaagactgcaggtggccggcgaggtgaaccagagacacttcagagtggacctggacagcggcgccctgctgatcaagaaccccatcgacagagaggccctgtgcggcctgagcgccagctgcatcgtgcccctggagttcgtgaccgagggccccctggagatgtacagagccgaggtggagatcgtggacgtgaacgaccacgcccccagattccccagacagcagctggacctggagatcggcgaggccgccccccccggccagagattccccctggagaaggcccaggacgccgacgtgggcagcaacagcatcagcagctacagactgagcagcaacgagcacttcgccctggacgtgaagaagagaagcgacggcagcctggtgcccgagctgctgctggagaagcccctggacagagagaagcagagcgactacagactggtgctgaccgccgtggacggcggcaacccccccagaagcggcaccgccgagctgagagtgagcgtgctggacgtgaacgacaacgcccccgccttccagcagagcagctacagaatcagcgtgctggagagcgcccccgccggcatggtgctgatccagctgaacgccagcgaccccgacctgggccccagcggcaacgtgaccttctacttcagcggccacacccccgacagagtgagaaacctgttcagcctgcaccccaccaccggcaagctgaccctgctgggccccctggacttcgagagcgagaactactacgagttcgacgtgagagccagagacggcggcagccccgccatggagcagcactgcagcctgagagtggacctgctggacgtgaacgacaacgccccctacatcaccgtgaccagcgagctgggcaccctgcccgagagcgccgagcccggcaccgtggtggccctgatcagcgtgcaggaccccgacagcggcagcaacggcgacgtgagcctgagaatccccgaccacctgcccttcgccctgaagagcgccttcagaaaccagttcagcctggtgaccgccggccccctggacagagaggccaagagcagctacgacatcatggtgaccgccagcgacgccggcaacccccccctgagcacccacagaaccatcttcctgaacatcagcgacgtgaacgacaacccccccagcttcttccagagaagccacgaggtgttcgtgcccgagaacaacagacccggcgacctgctgtgcagcctggccgccagcgaccccgacagcggcctgaacgccctgatcagctacagcctgctggagcccagaaacagagacgtgagcgccagcagcttcatcagcctgaacccccagaccggcgccgtgcacgccaccagaagcttcgactacgagcagacccagaccctgcagttcgaggtgcaggccagagacagaggcaacccccccctgagcagcaccgtgaccgtgagactgttcgtgctggacctgaacgacaacgcccccgccgtgctgagacccagagccagacccggcagcctgtgcccccaggccctgccccccagcgtgggcgccggccacctgatcaccaaggtgaccgccgtggacctggacagcggctacaacgcctgggtgagctaccagctgctggaggcccccgaccccagcctgttcgccgtgagcagatacgccggcgaggtgagaaccgccgtgcccatccccgccgacctgcccccccagaagctggtgatcgtggtgaaggacagcggcagcccccccctgagcaccagcgtgaccctgctggtgagcctggaggaggacacccaccccgtggtgcccgacctgagagagagcagcgcccccagagagggcgagagcagactgaccctgtacctggccgtgagcctggtggccatctgcttcgtgagcttcggcagcttcgtggccctgctgagcaagtgcctgagaggcgccgcctgcggcgtgacctgcttccccgccggcacctgcgcctgcctgaccagaagcagaagaagagagggcctgccccccagcaacggcatcctgagaatccagctgggcagcgacgaccccatcaagttcgtggacgtgggcggccacagccacggctgcacccccctggccagcgcccccaccagaagcgacagcttcatgatggtgaagagccccagcgcccccatggccggcgagcccgtgagacccagctgcccccccagcgacctgctgtacggcctggagcaggccccccccaacaccgactggagattcagccaggcccagagacccggcaccagcggcagccagaacggcgacgacaccggcacctggcccaacaaccagttcgacaccgagatgctgcaggccatgatcctggccagcgccagcgaggccgccgacggcagcagcaccctgggcggcggcgccggcaccatgggcctgagcgccagatacggcccccagttcaccctgcagcacgtgcccgactacagacagaacgtgtacatccccggcagcaacgccaccctgaccaacgccgccggcaagagagacggcaaggcccccgccggcggcaacggcaacaagaagaagagcggcaagaaggagaagaagtag

SEQ ID NO: 95764 - DNA, 2835 bp, synthetic construct
  misc_feature 1..2835: note = Description of Artificial Sequence: Synthetic coding sequence
  source 1..2835: mol_type = other DNA
atgggccccaagaccctgccccagctggccggcaagtggcaggtgctgtgcatgctgagcctgtgctgctggggctgggtgagcggccagctgagatacagcgtggtggaggagagcgagcccggcaccctggtgggcaacgtggcccaggacctgggcctgaagatgaccgacctgctgagcagaagactgcagctgggcagcgaggagaacggcagatacttcagcctgagcctgatgagcggcgccctggccgtgaaccagaagatcgacagagagagcctgtgcggcgccagcaccagctgcctgctgcccgtgcaggtggtgaccgagcaccccctggagctgatcagagtggaggtggagatcctggacctgaacgacaacagccccagcttcgccacccccgagagagagatgagaatcagcgagagcgccgccagcggcgccagattccccctggacagcgcccaggaccccgacgtgggcaccaacaccgtgagcttctacaccctgagccccaacagccacttcagcctgaacgtgaagaccctgaaggacggcaagcccttccccgagctggtgctggagcagcagctggacagagaggcccaggccagacaccagctggtgctgaccgccgtggacggcggcacccccgccagaagcggcaccaccctgatcagcgtgatcgtgctggacatcaacgacaacgcccccaccttccagagcagcgtgctgagagtgggcatccccgagaacgcccccatcggcaccctgctgctgagactgaacgccaccgaccccgacgagggcaccaacggccagctggactacagcttcggcgaccacaccagcgaggccgtgagaaacctgttcggcctggaccccagcagcggcgccatccacgtgctgggccccatcgacttcgaggagagcagattctacgagatccacgccagagccagagaccagggccagcccgccatggagggccactgcgtgatccaggtggacgtgggcgacgtgaacgacaacgcccccgaggtgctgctggccagcctggccaaccccgtgctggagagcacccccgtgggcaccgtggtgggcctgttcaacgtgagagacagagacagcggcagaaacggcgaggtgagcctggacatcagccccgacctgcccttccagatcaagcccagcgagaaccactacagcctgctgaccagccagcccctggacagagaggccaccagccactacatcatcgagctgctggccagcgacgccggcagccccagcctgcacaagcacctgaccatcagactgaacatcagcgacgtgaacgacaacgcccccagattcaaccagcagctgtacaccgcctacatcctggagaacagaccccccggcagcctgctgtgcaccgtggccgccagcgaccccgacaccggcgacaacgccagactgacctacagcatcgtgggcaaccaggtgcagggcgcccccgccagcagcttcgtgtacgtgaaccccgaggacggcagaatcttcgcccagagaaccttcgactacgagctgctgcagatgctgcagatcgtggtgggcgtgagagacagcggcagcccccccctgcacgccaacaccagcctgcacgtgttcgtgctggacgagaacgacaacgcccccgccgtgctgcaccccagacccgactgggagcacagcgccccccagagactgcccagaagcgccccccccggcagcctggtgaccaaggtgaccgccgtggacgccgacgccggccacaacgcctggctgagctacagcctgctgccccagagcaccgcccccggcctgttcctggtgagcacccacaccggcgaggtgagaaccgccagagccctgctggaggacgacagcgacacccagcaggtggtggtgctggtgagagacaacggcgaccccagcctgagcagcaccgccaccgtgctgctggtgctggaggacgaggaccccgaggagatgcccaagagcagcgacttcctgatccacccccccgagagaagcgacctgaccctgtacctgatcgtggccctggccaccgtgagcctgctgagcctggtgaccttcaccttcctgagcgccaagtgcctgcagggcaacgccgacggcgacggcggcggcggccagtgctgcagaagacaggacagccccagccccgacttctacaagcagagcagccccaacctgcaggtgagcagcgacggcaccctgaagtacatggaggtgaccctgagacccaccgacagccagagccactgctacagaacctgcttcagccccgccagcgacggcagcgacttcaccttcctgagacccctgagcgtgcagcagcccaccgccctggccctggagcccgacgccatcagaagcagaagcaacaccctgagagagagaagccagcaggccccccccaacaccgactggagattcagccaggcccagagacccggcaccagcggcagccagaacggcgacgacaccggcacctggcccaacaaccagttcgacaccgagatgctgcaggccatgatcctggccagcgccagcgaggccgccgacggcagcagcaccctgggcggcggcgccggcaccatgggcctgagcgccagatacggcccccagttcaccctgcagcacgtgcccgactacagacagaacgtgtacatccccggcagcaacgccaccctgaccaacgccgccggcaagagagacggcaaggcccccgccggcggcaacggcaacaagaagaagagcggcaagaaggagaagaagtag

SEQ ID NO: 95765 - DNA, 5868 bp, synthetic construct
  misc_feature 1..5868: note = Description of Artificial Sequence: Synthetic coding sequence
  source 1..5868: mol_type = other DNA
atgttcagacagttctacctgtggacctgcctggccagcggcatcatcctgggcagcctgttcgagatctgcctgggccagtacgacgacgactgcaagctggccagaggcggcccccccgccaccatcgtggccatcgacgaggagagcagaaacggcaccatcctggtggacaacatgctgatcaagggcaccgccggcggccccgaccccaccatcgagctgagcctgaaggacaacgtggactactgggtgctgatggaccccgtgaagcagatgctgttcctgaacagcaccggcagagtgctggacagagacccccccatgaacatccacagcatcgtggtgcaggtgcagtgcatcaacaagaaggtgggcaccatcatctaccacgaggtgagaatcgtggtgagagacagaaacgacaacagccccaccttcaagcacgagagctactacgccaccgtgaacgagctgacccccgtgggcaccaccatcttcaccggcttcagcggcgacaacggcgccaccgacatcgacgacggccccaacggccagatcgagtacgtgatccagtacaaccccgacgaccccaccagcaacgacaccttcgagatccccctgatgctgaccggcaacatcgtgctgagaaagagactgaactacgaggacaagaccagatacttcgtgatcatccaggccaacgacagagcccagaacctgaacgagagaagaaccaccaccaccaccctgaccgtggacgtgctggacggcgacgacctgggccccatgttcctgccctgcgtgctggtgcccaacaccagagactgcagacccctgacctaccaggccgccatccccgagctgagaacccccgaggagctgaaccccatcatcgtgaccccccccatccaggccatcgaccaggacagaaacatccagccccccagcgacagacccggcatcctgtacagcatcctggtgggcacccccgaggactaccccagattcttccacatgcaccccagaaccgccgagctgagcctgctggagcccgtgaacagagacttccaccagaagttcgacctggtgatcaaggccgagcaggacaacggccaccccctgcccgccttcgccggcctgcacatcgagatcctggacgagaacaaccagagcccctacttcaccatgcccagctaccagggctacatcctggagagcgcccccgtgggcgccaccatcagcgacagcctgaacctgaccagccccctgagaatcgtggccctggacaaggacatcgaggacaccaaggaccccgagctgcacctgttcctgaacgactacaccagcgtgttcaccgtgacccagaccggcatcaccagatacctgaccctgctgcagcccgtggacagagaggagcagcagacctacaccttcagcatcaccgccttcgacggcgtgcaggagagcgagcccgtgatcgtgaacatccaggtgatggacgccaacgacaacacccccaccttccccgagatcagctacgacgtgtacgtgtacaccgacatgagacccggcgacagcgtgatccagctgaccgccgtggacgccgacgagggcagcaacggcgagatcacctacgagatcctggtgggcgcccagggcgacttcatcatcaacaagaccaccggcctgatcaccatcgcccccggcgtggagatgatcgtgggcagaacctacgccctgaccgtgcaggccgccgacaacgccccccccgccgagagaagaaacagcatctgcaccgtgtacatcgaggtgctgccccccaacaaccagagcccccccagattcccccagctgatgtacagcctggagatcagcgaggccatgagagtgggcgccgtgctgctgaacctgcaggccaccgacagagagggcgacagcatcacctacgccatcgagaacggcgacccccagagagtgttcaacctgagcgagaccaccggcatcctgaccctgggcaaggccctggacagagagagcaccgacagatacatcctgatcatcaccgccagcgacggcagacccgacggcaccagcaccgccaccgtgaacatcgtggtgaccgacgtgaacgacaacgcccccgtgttcgacccctacctgcccagaaacctgagcgtggtggaggaggaggccaacgccttcgtgggccaggtgaaggccaccgaccccgacgccggcatcaacggccaggtgcactacagcctgggcaacttcaacaacctgttcagaatcaccagcaacggcagcatctacaccgccgtgaagctgaacagagaggtgagagactactacgagctggtggtggtggccaccgacggcgccgtgcaccccagacacagcaccctgaccctggccatcaaggtgctggacatcgacgacaacagccccgtgttcaccaacagcacctacaccgtgctggtggaggagaacctgcccgccggcaccaccatcctgcagatcgaggccaaggacgtggacctgggcgccaacgtgagctacagaatcagaagccccgaggtgaagcacttcttcgccctgcaccccttcaccggcgagctgagcctgctgagaagcctggactacgaggccttccccgaccaggaggccagcatcaccttcctggtggaggccttcgacatctacggcaccatgccccccggcatcgccaccgtgaccgtgatcgtgaaggacatgaacgactacccccccgtgttcagcaagagaatctacaagggcatggtggcccccgacgccgtgaagggcacccccatcaccaccgtgtacgccgaggacgccgacccccccggcctgcccgccagcagagtgagatacagagtggacgacgtgcagttcccctaccccgccagcatcttcgaggtggaggaggacagcggcagagtgatcaccagagtgaacctgaacgaggagcccaccaccatcttcaagctggtggtggtggccttcgacgacggcgagcccgtgatgagcagcagcgccaccgtgaagatcctggtgctgcaccccggcgagatccccagattcacccaggaggagtacagacccccccccgtgagcgagctggccaccaagggcaccatggtgggcgtgatcagcgccgccgccatcaaccagagcatcgtgtacagcatcgtgagcggcaacgaggaggacaccttcggcatcaacaacatcaccggcgtgatctacgtgaacggccccctggactacgagaccagaaccagctacgtgctgagagtgcaggccgacagcctggaggtggtgctggccaacctgagagtgcccagcaagagcaacaccgccaaggtgtacatcgagatccaggacgagaacaaccacccccccgtgttccagaagaagttctacatcggcggcgtgagcgaggacgccagaatgttcaccagcgtgctgagagtgaaggccaccgacaaggacaccggcaactacagcgtgatggcctacagactgatcatcccccccatcaaggagggcaaggagggcttcgtggtggagacctacaccggcctgatcaagaccgccatgctgttccacaacatgagaagaagctacttcaagttccaggtgatcgccaccgacgactacggcaagggcctgagcggcaaggccgacgtgctggtgagcgtggtgaaccagctggacatgcaggtgatcgtgagcaacgtgccccccaccctggtggagaagaagatcgaggacctgaccgagatcctggacagatacgtgcaggagcagatccccggcgccaaggtggtggtggagagcatcggcgccagaagacacggcgacgccttcagcctggaggactacaccaagtgcgacctgaccgtgtacgccatcgacccccagaccaacagagccatcgacagaaacgagctgttcaagttcctggacggcaagctgctggacatcaacaaggacttccagccctactacggcgagggcggcagaatcctggagatcagaacccccgaggccgtgaccagcatcaagaagagaggcgagagcctgggctacaccgagggcgccctgctggccctggccttcatcatcatcctgtgctgcatccccgccatcctggtggtgctggtgagctacagacagttcaaggtgagacaggccgagtgcaccaagaccgccagaatccaggccgccctgcccgccgccaagcccgccgtgcccgcccccgcccccgtggccgcccccccccccccccccccccccccccccggcgcccacctgtacgaggagctgggcgacagcagcatcctgttcctgctgtaccacttccagcagagcagaggcaacaacagcgtgagcgaggacagaaagcaccagcaggtggtgatgcccttcagcagcaacaccatcgaggcccacaagagcgcccacgtggacggcagcctgaagagcaacaagctgaagagcgccagaaagttcaccttcctgagcgacgaggacgacctgagcgcccacaaccccctgtacaaggagaacatcagccaggtgagcaccaacagcgacatcagccagagaaccgacttcgtggaccccttcagccccaagatccaggccaagagcaagagcctgagaggccccagagagaagatccagagactgtggagccagagcgtgagcctgcccagaagactgatgagaaaggtgcccaacagacccgagatcatcgacctgcagcagtggcagggcaccagacagaaggccgagaacgagaacaccggcatctgcaccaacaagagaggcagcagcaaccccctgctgaccaccgaggaggccaacctgaccgagaaggaggagatcagacagggcgagaccctgatgatcgagggcaccgagcagctgaagagcctgagcagcgacagcagcttctgcttccccagaccccacttcagcttcagcaccctgcccaccgtgagcagaaccgtggagctgaagagcgagcccaacgtgatcagcagccccgccgagtgcagcctggagctgagccccagcagaccctgcgtgctgcacagcagcctgagcagaagagagacccccatctgcatgctgcccatcgagaccgagagaaacatcttcgagaacttcgcccacccccccaacatcagccccagcgcctgccccctgcccccccccccccccatcagcccccccagccccccccccgcccccgcccccctggcccccccccccgacatcagccccttcagcctgttctgccccccccccagcccccccagcatccccctgcccctgcccccccccaccttcttccccctgagcgtgagcaccagcggcccccccaccccccccctgctgccccccttccccacccccctgcccccccccccccccagcatcccctgcccccccccccccagcgccagcttcctgagcaccgagtgcgtgtgcatcaccggcgtgaagtgcaccaccaacctgatgcccgccgagaagatcaagagcagcatgacccagctgagcaccaccaccgtgtgcaagaccgacccccagagagagcccaagggcatcctgagacacgtgaagaacctggccgagctggagaagagcgtggccaacatgtacagccagatcgagaagaactacctgagaaccaacgtgagcgagctgcagaccatgtgccccagcgaggtgaccaacatggagatcaccagcgagcagaacaagggcagcctgaacaacatcgtggagggcaccgagaagcagagccacagccagagcaccagcctgtag

SEQ ID NO: 95766 - DNA, 5874 bp, synthetic construct
  misc_feature 1..5874: note = Description of Artificial Sequence: Synthetic coding sequence
  source 1..5874: mol_type = other DNA
atgttcagacagttctacctgtggacctgcctggccagcggcatcatcctgggcagcctgttcgagatctgcctgggccagtacgacgacgactgcaagctggccagaggcggcccccccgccaccatcgtggccatcgacgaggagagcagaaacggcaccatcctggtggacaacatgctgatcaagggcaccgccggcggccccgaccccaccatcgagctgagcctgaaggacaacgtggactactgggtgctgatggaccccgtgaagcagatgctgttcctgaacagcaccggcagagtgctggacagagacccccccatgaacatccacagcatcgtggtgcaggtgcagtgcatcaacaagaaggtgggcaccatcatctaccacgaggtgagaatcgtggtgagagacagaaacgacaacagccccaccttcaagcacgagagctactacgccaccgtgaacgagctgacccccgtgggcaccaccatcttcaccggcttcagcggcgacaacggcgccaccgacatcgacgacggccccaacggccagatcgagtacgtgatccagtacaaccccgacgaccccaccagcaacgacaccttcgagatccccctgatgctgaccggcaacatcgtgctgagaaagagactgaactacgaggacaagaccagatacttcgtgatcatccaggccaacgacagagcccagaacctgaacgagagaagaaccaccaccaccaccctgaccgtggacgtgctggacggcgacgacctgggccccatgttcctgccctgcgtgctggtgcccaacaccagagactgcagacccctgacctaccaggccgccatccccgagctgagaacccccgaggagctgaaccccatcatcgtgaccccccccatccaggccatcgaccaggacagaaacatccagccccccagcgacagacccggcatcctgtacagcatcctggtgggcacccccgaggactaccccagattcttccacatgcaccccagaaccgccgagctgagcctgctggagcccgtgaacagagacttccaccagaagttcgacctggtgatcaaggccgagcaggacaacggccaccccctgcccgccttcgccggcctgcacatcgagatcctggacgagaacaaccagagcccctacttcaccatgcccagctaccagggctacatcctggagagcgcccccgtgggcgccaccatcagcgacagcctgaacctgaccagccccctgagaatcgtggccctggacaaggacatcgaggacaccaaggaccccgagctgcacctgttcctgaacgactacaccagcgtgttcaccgtgacccagaccggcatcaccagatacctgaccctgctgcagcccgtggacagagaggagcagcagacctacaccttcagcatcaccgccttcgacggcgtgcaggagagcgagcccgtgatcgtgaacatccaggtgatggacgccaacgacaacacccccaccttccccgagatcagctacgacgtgtacgtgtacaccgacatgagacccggcgacagcgtgatccagctgaccgccgtggacgccgacgagggcagcaacggcgagatcacctacgagatcctggtgggcgcccagggcgacttcatcatcaacaagaccaccggcctgatcaccatcgcccccggcgtggagatgatcgtgggcagaacctacgccctgaccgtgcaggccgccgacaacgccccccccgccgagagaagaaacagcatctgcaccgtgtacatcgaggtgctgccccccaacaaccagagcccccccagattcccccagctgatgtacagcctggagatcagcgaggccatgagagtgggcgccgtgctgctgaacctgcaggccaccgacagagagggcgacagcatcacctacgccatcgagaacggcgacccccagagagtgttcaacctgagcgagaccaccggcatcctgaccctgggcaaggccctggacagagagagcaccgacagatacatcctgatcatcaccgccagcgacggcagacccgacggcaccagcaccgccaccgtgaacatcgtggtgaccgacgtgaacgacaacgcccccgtgttcgacccctacctgcccagaaacctgagcgtggtggaggaggaggccaacgccttcgtgggccaggtgaaggccaccgaccccgacgccggcatcaacggccaggtgcactacagcctgggcaacttcaacaacctgttcagaatcaccagcaacggcagcatctacaccgccgtgaagctgaacagagaggtgagagactactacgagctggtggtggtggccaccgacggcgccgtgcaccccagacacagcaccctgaccctggccatcaaggtgctggacatcgacgacaacagccccgtgttcaccaacagcacctacaccgtgctggtggaggagaacctgcccgccggcaccaccatcctgcagatcgaggccaaggacgtggacctgggcgccaacgtgagctacagaatcagaagccccgaggtgaagcacttcttcgccctgcaccccttcaccggcgagctgagcctgctgagaagcctggactacgaggccttccccgaccaggaggccagcatcaccttcctggtggaggccttcgacatctacggcaccatgccccccggcatcgccaccgtgaccgtgatcgtgaaggacatgaacgactacccccccgtgttcagcaagagaatctacaagggcatggtggcccccgacgccgtgaagggcacccccatcaccaccgtgtacgccgaggacgccgacccccccggcctgcccgccagcagagtgagatacagagtggacgacgtgcagttcccctaccccgccagcatcttcgaggtggaggaggacagcggcagagtgatcaccagagtgaacctgaacgaggagcccaccaccatcttcaagctggtggtggtggccttcgacgacggcgagcccgtgatgagcagcagcgccaccgtgaagatcctggtgctgcaccccggcgagatccccagattcacccaggaggagtacagacccccccccgtgagcgagctggccaccaagggcaccatggtgggcgtgatcagcgccgccgccatcaaccagagcatcgtgtacagcatcgtgagcggcaacgaggaggacaccttcggcatcaacaacatcaccggcgtgatctacgtgaacggccccctggactacgagaccagaaccagctacgtgctgagagtgcaggccgacagcctggaggtggtgctggccaacctgagagtgcccagcaagagcaacaccgccaaggtgtacatcgagatccaggacgagaacaaccacccccccgtgttccagaagaagttctacatcggcggcgtgagcgaggacgccagaatgttcaccagcgtgctgagagtgaaggccaccgacaaggacaccggcaactacagcgtgatggcctacagactgatcatcccccccatcaaggagggcaaggagggcttcgtggtggagacctacaccggcctgatcaagaccgccatgctgttccacaacatgagaagaagctacttcaagttccaggtgatcgccaccgacgactacggcaagggcctgagcggcaaggccgacgtgctggtgagcgtggtgaaccagctggacatgcaggtgatcgtgagcaacgtgccccccaccctggtggagaagaagatcgaggacctgaccgagatcctggacagatacgtgcaggagcagatccccggcgccaaggtggtggtggagagcatcggcgccagaagacacggcgacgccttcagcctggaggactacaccaagtgcgacctgaccgtgtacgccatcgacccccagaccaacagagccatcgacagaaacgagctgttcaagttcctggacggcaagctgctggacatcaacaaggacttccagccctactacggcgagggcggcagaatcctggagatcagaacccccgaggccgtgaccagcatcaagaagagaggcgagagcctgggctacaccgagggcgccctgctggccctggccttcatcatcatcctgtgctgcatccccgccatcctggtggtgctggtgagctacagacagttcaaggtgagacaggccgagtgcaccaagaccgccagaatccaggccgccctgcccgccgccaagcccgccgtgcccgcccccgcccccgtggccgcccccccccccccccccccccccccccccggcgcccacctgtacgaggagctgggcgacagcagcatgcacaacctgttcctgctgtaccacttccagcagagcagaggcaacaacagcgtgagcgaggacagaaagcaccagcaggtggtgatgcccttcagcagcaacaccatcgaggcccacaagagcgcccacgtggacggcagcctgaagagcaacaagctgaagagcgccagaaagttcaccttcctgagcgacgaggacgacctgagcgcccacaaccccctgtacaaggagaacatcagccaggtgagcaccaacagcgacatcagccagagaaccgacttcgtggaccccttcagccccaagatccaggccaagagcaagagcctgagaggccccagagagaagatccagagactgtggagccagagcgtgagcctgcccagaagactgatgagaaaggtgcccaacagacccgagatcatcgacctgcagcagtggcagggcaccagacagaaggccgagaacgagaacaccggcatctgcaccaacaagagaggcagcagcaaccccctgctgaccaccgaggaggccaacctgaccgagaaggaggagatcagacagggcgagaccctgatgatcgagggcaccgagcagctgaagagcctgagcagcgacagcagcttctgcttccccagaccccacttcagcttcagcaccctgcccaccgtgagcagaaccgtggagctgaagagcgagcccaacgtgatcagcagccccgccgagtgcagcctggagctgagccccagcagaccctgcgtgctgcacagcagcctgagcagaagagagacccccatctgcatgctgcccatcgagaccgagagaaacatcttcgagaacttcgcccacccccccaacatcagccccagcgcctgccccctgcccccccccccccccatcagcccccccagccccccccccgcccccgcccccctggcccccccccccgacatcagccccttcagcctgttctgccccccccccagcccccccagcatccccctgcccctgcccccccccaccttcttccccctgagcgtgagcaccagcggcccccccaccccccccctgctgccccccttccccacccccctgcccccccccccccccagcatcccctgcccccccccccccagcgccagcttcctgagcaccgagtgcgtgtgcatcaccggcgtgaagtgcaccaccaacctgatgcccgccgagaagatcaagagcagcatgacccagctgagcaccaccaccgtgtgcaagaccgacccccagagagagcccaagggcatcctgagacacgtgaagaacctggccgagctggagaagagcgtggccaacatgtacagccagatcgagaagaactacctgagaaccaacgtgagcgagctgcagaccatgtgccccagcgaggtgaccaacatggagatcaccagcgagcagaacaagggcagcctgaacaacatcgtggagggcaccgagaagcagagccacagccagagcaccagcctgtag

SEQ ID NO: 95767 - DNA, 2886 bp, synthetic construct
  misc_feature 1..2886: note = Description of Artificial Sequence: Synthetic coding sequence
  source 1..2886: mol_type = other DNA
atgttcagacagttctacctgtggacctgcctggccagcggcatcatcctgggcagcctgttcgagatctgcctgggccagtacgacgacgactgcaagctggccagaggcggcccccccgccaccatcgtggccatcgacgaggagagcagaaacggcaccatcctggtggacaacatgctgatcaagggcaccgccggcggccccgaccccaccatcgagctgagcctgaaggacaacgtggactactgggtgctgatggaccccgtgaagcagatgctgttcctgaacagcaccggcagagtgctggacagagacccccccatgaacatccacagcatcgtggtgcaggtgcagtgcatcaacaagaaggtgggcaccatcatctaccacgaggtgagaatcgtggtgagagacagaaacgacaacagccccaccttcaagcacgagagctactacgccaccgtgaacgagctgacccccgtgggcaccaccatcttcaccggcttcagcggcgacaacggcgccaccgacatcgacgacggccccaacggccagatcgagtacgtgatccagtacaaccccgacgaccccaccagcaacgacaccttcgagatccccctgatgctgaccggcaacatcgtgctgagaaagagactgaactacgaggacaagaccagatacttcgtgatcatccaggccaacgacagagcccagaacctgaacgagagaagaaccaccaccaccaccctgaccgtggacgtgctggacggcgacgacctgggccccatgttcctgccctgcgtgctggtgcccaacaccagagactgcagacccctgacctaccaggccgccatccccgagctgagaacccccgaggagctgaaccccatcatcgtgaccccccccatccaggccatcgaccaggacagaaacatccagccccccagcgacagacccggcatcctgtacagcatcctggtgggcacccccgaggactaccccagattcttccacatgcaccccagaaccgccgagctgagcctgctggagcccgtgaacagagacttccaccagaagttcgacctggtgatcaaggccgagcaggacaacggccaccccctgcccgccttcgccggcctgcacatcgagatcctggacgagaacaaccagagcccctacttcaccatgcccagctaccagggctacatcctggagagcgcccccgtgggcgccaccatcagcgacagcctgaacctgaccagccccctgagaatcgtggccctggacaaggacatcgaggacaccaaggaccccgagctgcacctgttcctgaacgactacaccagcgtgttcaccgtgacccagaccggcatcaccagatacctgaccctgctgcagcccgtggacagagaggagcagcagacctacaccttcagcatcaccgccttcgacggcgtgcaggagagcgagcccgtgatcgtgaacatccaggtgatggacgccaacgacaacacccccaccttccccgagatcagctacgacgtgtacgtgtacaccgacatgagacccggcgacagcgtgatccagctgaccgccgtggacgccgacgagggcagcaacggcgagatcacctacgagatcctggtgggcgcccagggcgacttcatcatcaacaagaccaccggcctgatcaccatcgcccccggcgtggagatgatcgtgggcagaacctacgccctgaccgtgcaggccgccgacaacgccccccccgccgagagaagaaacagcatctgcaccgtgtacatcgaggtgctgccccccaacaaccagagcccccccagattcccccagctgatgtacagcctggagatcagcgaggccatgagagtgggcgccgtgctgctgaacctgcaggccaccgacagagagggcgacagcatcacctacgccatcgagaacggcgacccccagagagtgttcaacctgagcgagaccaccggcatcctgaccctgggcaaggccctggacagagagagcaccgacagatacatcctgatcatcaccgccagcgacggcagacccgacggcaccagcaccgccaccgtgaacatcgtggtgaccgacgtgaacgacaacgcccccgtgttcgacccctacctgcccagaaacctgagcgtggtggaggaggaggccaacgccttcgtgggccaggtgaaggccaccgaccccgacgccggcatcaacggccaggtgcactacagcctgggcaacttcaacaacctgttcagaatcaccagcaacggcagcatctacaccgccgtgaagctgaacagagaggtgagagactactacgagctggtggtggtggccaccgacggcgccgtgcaccccagacacagcaccctgaccctggccatcaaggtgctggacatcgacgacaacagccccgtgttcaccaacagcacctacaccgtgctggtggaggagaacctgcccgccggcaccaccatcctgcagatcgaggccaaggacgtggacctgggcgccaacgtgagctacagaatcagaagccccgaggtgaagcacttcttcgccctgcaccccttcaccggcgagctgagcctgctgagaagcctggactacgaggccttccccgaccaggaggccagcatcaccttcctggtggaggccttcgacatctacggcaccatgccccccggcatcgccaccgtgaccgtgatcgtgaaggacatgaacgactacccccccgtgttcagcaagagaatctacaagggcatggtggcccccgacgccgtgaagggcacccccatcaccaccgtgtacgccgaggacgccgacccccccgtgagcagaagacactag

SEQ ID NO: 95768 - DNA, 2430 bp, synthetic construct
  misc_feature 1..2430: note = Description of Artificial Sequence: Synthetic coding sequence
  source 1..2430: mol_type = other DNA
atgttcagacagttctacctgtggacctgcctggccagcggcatcatcctgggcagcctgttcgagatctgcctgggccagtacgacgacggcaccatcctggtggacaacatgctgatcaagggcaccgccggcggccccgaccccaccatcgagctgagcctgaaggacaacgtggactactgggtgctgatggaccccgtgaagcagatgctgttcctgaacagcaccggcagagtgctggacagagacccccccatgaacatccacagcatcgtggtgcaggtgcagtgcatcaacaagaaggtgggcaccatcatctaccacgaggtgagaatcgtggtgagagacagaaacgacaacagccccaccttcaagcacgagagctactacgccaccgtgaacgagctgacccccgtgggcaccaccatcttcaccggcttcagcggcgacaacggcgccaccgacatcgacgacggccccaacggccagatcgagtacgtgatccagtacaaccccgacgaccccaccagcaacgacaccttcgagatccccctgatgctgaccggcaacatcgtgctgagaaagagactgaactacgaggacaagaccagatacttcgtgatcatccaggccaacgacagagcccagaacctgaacgagagaagaaccaccaccaccaccctgaccgtggacgtgctggacggcgacgacctgggccccatgttcctgccctgcgtgctggtgcccaacaccagagactgcagacccctgacctaccaggccgccatccccgagctgagaacccccgaggagctgaaccccatcatcgtgaccccccccatccaggccatcgaccaggacagaaacatccagccccccagcgacagacccggcatcctgtacagcatcctggtgggcacccccgaggactaccccagattcttccacatgcaccccagaaccgccgagctgagcctgctggagcccgtgaacagagacttccaccagaagttcgacctggtgatcaaggccgagcaggacaacggccaccccctgcccgccttcgccggcctgcacatcgagatcctggacgagaacaaccagagcccctacttcaccatgcccagctaccagggctacatcctggagagcgcccccgtgggcgccaccatcagcgacagcctgaacctgaccagccccctgagaatcgtggccctggacaaggacatcgaggacaccaaggaccccgagctgcacctgttcctgaacgactacaccagcgtgttcaccgtgacccagaccggcatcaccagatacctgaccctgctgcagcccgtggacagagaggagcagcagacctacaccttcagcatcaccgccttcgacggcgtgcaggagagcgagcccgtgatcgtgaacatccaggtgatggacgccaacgacaacacccccaccttccccgagatcagctacgacgtgtacgtgtacaccgacatgagacccggcgacagcgtgatccagctgaccgccgtggacgccgacgagggcagcaacggcgagatcacctacgagatcctggtgggcgcccagggcgacttcatcatcaacaagaccaccggcctgatcaccatcgcccccggcgtggagatgatcgtgggcagaacctacgccctgaccgtgcaggccgccgacaacgccccccccgccgagagaagaaacagcatctgcaccgtgtacatcgaggtgctgccccccaacaaccagagcccccccagattcccccagctgatgtacagcctggagatcagcgaggccatgagagtgggcgccgtgctgctgaacctgcaggccaccgacagagagggcgacagcatcacctacgccatcgagaacggcgacccccagagagtgttcaacctgagcgagaccaccggcatcctgaccctgggcaaggccctggacagagagagcaccgacagatacatcctgatcatcaccgccagcgacggcagacccgacggcaccagcaccgccaccgtgaacatcgtggtgaccgacgtgaacgacaacgcccccgtgttcgacccctacctgcccagaaacctgagcgtggtggaggaggaggccaacgccttcgtgggccaggtgaagctgagcaccaccaccgtgtgcaagaccgacccccagagagagcccaagggcatcctgagacacgtgaagaacctggccgagctggagaagagcgtggccaacatgtacagccagatcgagaagaactacctgagaaccaacgtgagcgagctgcagaccatgtgccccagcgaggtgaccaacatggagatcaccagcgagcagaacaagggcagcctgaacaacatcgtggagggcaccgagaagcagagccacagccagagcaccagcctgtag

SEQ ID NO: 95769 - DNA, 5055 bp, synthetic construct
  misc_feature 1..5055: note = Description of Artificial Sequence: Synthetic coding sequence
  source 1..5055: mol_type = other DNA
atgttcagacagttctacctgtggacctgcctggccagcggcatcatcctgggcagcctgttcgagatctgcctgggccagtacgacgacgactgcaagctggccagaggcggcccccccgccaccatcgtggccatcgacgaggagagcagaaacggcaccatcctggtggacaacatgctgatcaagggcaccgccggcggccccgaccccaccatcgagctgagcctgaaggacaacgtggactactgggtgctgatggaccccgtgaagcagatgctgttcctgaacagcaccggcagagtgctggacagagacccccccatgaacatccacagcatcgtggtgcaggtgcagtgcatcaacaagaaggtgggcaccatcatctaccacgaggtgagaatcgtggtgagagacagaaacgacaacagccccaccttcaagcacgagagctactacgccaccgtgaacgagctgacccccgtgggcaccaccatcttcaccggcttcagcggcgacaacggcgccaccgacatcgacgacggccccaacggccagatcgagtacgtgatccagtacaaccccgacgaccccaccagcaacgacaccttcgagatccccctgatgctgaccggcaacatcgtgctgagaaagagactgaactacgaggacaagaccagatacttcgtgatcatccaggccaacgacagagcccagaacctgaacgagagaagaaccaccaccaccaccctgaccgtggacgtgctggacggcgacgacctgggccccatgttcctgccctgcgtgctggtgcccaacaccagagactgcagacccctgacctaccaggccgccatccccgagctgagaacccccgaggagctgaaccccatcatcgtgaccccccccatccaggccatcgaccaggacagaaacatccagccccccagcgacagacccggcatcctgtacagcatcctggtgggcacccccgaggactaccccagattcttccacatgcaccccagaaccgccgagctgagcctgctggagcccgtgaacagagacttccaccagaagttcgacctggtgatcaaggccgagcaggacaacggccaccccctgcccgccttcgccggcctgcacatcgagatcctggacgagaacaaccagagcccctacttcaccatgcccagctaccagggctacatcctggagagcgcccccgtgggcgccaccatcagcgacagcctgaacctgaccagccccctgagaatcgtggccctggacaaggacatcgaggacgtgccccccagcggcgtgcccaccaaggaccccgagctgcacctgttcctgaacgactacaccagcgtgttcaccgtgacccagaccggcatcaccagatacctgaccctgctgcagcccgtggacagagaggagcagcagacctacaccttcagcatcaccgccttcgacggcgtgcaggagagcgagcccgtgatcgtgaacatccaggtgatggacgccaacgacaacacccccaccttccccgagatcagctacgacgtgtacgtgtacaccgacatgagacccggcgacagcgtgatccagctgaccgccgtggacgccgacgagggcagcaacggcgagatcacctacgagatcctggtgggcgcccagggcgacttcatcatcaacaagaccaccggcctgatcaccatcgcccccggcgtggagatgatcgtgggcagaacctacgccctgaccgtgcaggccgccgacaacgccccccccgccgagagaagaaacagcatctgcaccgtgtacatcgaggtgctgccccccaacaaccagagcccccccagattcccccagctgatgtacagcctggagatcagcgaggccatgagagtgggcgccgtgctgctgaacctgcaggccaccgacagagagggcgacagcatcacctacgccatcgagaacggcgacccccagagagtgttcaacctgagcgagaccaccggcatcctgaccctgggcaaggccctggacagagagagcaccgacagatacatcctgatcatcaccgccagcgacggcagacccgacggcaccagcaccgccaccgtgaacatcgtggtgaccgacgtgaacgacaacgcccccgtgttcgacccctacctgcccagaaacctgagcgtggtggaggaggaggccaacgccttcgtgggccaggtgaaggccaccgaccccgacgccggcatcaacggccaggtgcactacagcctgggcaacttcaacaacctgttcagaatcaccagcaacggcagcatctacaccgccgtgaagctgaacagagaggtgagagactactacgagctggtggtggtggccaccgacggcgccgtgcaccccagacacagcaccctgaccctggccatcaaggtgctggacatcgacgacaacagccccgtgttcaccaacagcacctacaccgtgctggtggaggagaacctgcccgccggcaccaccatcctgcagatcgaggccaaggacgtggacctgggcgccaacgtgagctacagaatcagaagccccgaggtgaagcacttcttcgccctgcaccccttcaccggcgagctgagcctgctgagaagcctggactacgaggccttccccgaccaggaggccagcatcaccttcctggtggaggccttcgacatctacggcaccatgccccccggcatcgccaccgtgaccgtgatcgtgaaggacatgaacgactacccccccgtgttcagcaagagaatctacaagggcatggtggcccccgacgccgtgaagggcacccccatcaccaccgtgtacgccgaggacgccgacccccccggcctgcccgccagcagagtgagatacagagtggacgacgtgcagttcccctaccccgccagcatcttcgaggtggaggaggacagcggcagagtgatcaccagagtgaacctgaacgaggagcccaccaccatcttcaagctggtggtggtggccttcgacgacggcgagcccgtgatgagcagcagcgccaccgtgaagatcctggtgctgcaccccggcgagatccccagattcacccaggaggagtacagacccccccccgtgagcgagctggccaccaagggcaccatggtgggcgtgatcagcgccgccgccatcaaccagagcatcgtgtacagcatcgtgagcggcaacgaggaggacaccttcggcatcaacaacatcaccggcgtgatctacgtgaacggccccctggactacgagaccagaaccagctacgtgctgagagtgcaggccgacagcctggaggtggtgctggccaacctgagagtgcccagcaagagcaacaccgccaaggtgtacatcgagatccaggacgagaacaaccacccccccgtgttccagaagaagttctacatcggcggcgtgagcgaggacgccagaatgttcaccagcgtgctgagagtgaaggccaccgacaaggacaccggcaactacagcgtgatggcctacagactgatcatcccccccatcaaggagggcaaggagggcttcgtggtggagacctacaccggcctgatcaagaccgccatgctgttccacaacatgagaagaagctacttcaagttccaggtgatcgccaccgacgactacggcaagggcctgagcggcaaggccgacgtgctggtgagcgtggtgaaccagctggacatgcaggtgatcgtgagcaacgtgccccccaccctggtggagaagaagatcgaggacctgaccgagatcctggacagatacgtgcaggagcagatccccggcgccaaggtggtggtggagagcatcggcgccagaagacacggcgacgccttcagcctggaggactacaccaagtgcgacctgaccgtgtacgccatcgacccccagaccaacagagccatcgacagaaacgagctgttcaagttcctggacggcaagctgctggacatcaacaaggacttccagccctactacggcgagggcggcagaatcctggagatcagaacccccgaggccgtgaccagcatcaagaagagaggcgagagcctgggctacaccgagggcgccctgctggccctggccttcatcatcatcctgtgctgcatccccgccatcctggtggtgctggtgagctacagacagttcaaggtgagacaggccgagtgcaccaagaccgccagaatccaggccgccctgcccgccgccaagcccgccgtgcccgcccccgcccccgtggccgcccccccccccccccccccccccccccccggcgcccacctgtacgaggagctgggcgacagcagcatgcacaagtacgagatgccccagtacggcagcagaagaagactgctgccccccgccggccaggaggagtacggcgaggtggtgggcgaggccgaggaggagtacgaggaggaggagtgggccagaaagagaatgatcaagctggtggtggacagagagtacgagaccagcagcaccggcgaggacagcgcccccgagtgccagagaaacagactgcaccaccccagcatccacagcaacatcaacggcaacatctacatcgcccagaacggcagcgtggtgagaaccagaagagcctgcctgaccgacaacctgaaggtggccagccccgtgagactgggcggccccttcaagaagctggacaagctggccgtgacccacgaggagaacgtgcccctgaacaccctgagcaagggccccttcagcaccgagaagatgaacgccagacccaccctggtgaccttcgccccctgccccgtgggcaccgacaacaccgccgtgaagcccctgagaaacagactgaagagcaccgtggagcaggagagcatgatcgacagcaagaacatcaaggaggccctggagttccacagcgaccacacccagagcgacgacgaggagctgtggatgggcccctggaacaacctgcacatccccatgaccaagctgtag

SEQ ID NO: 95770 - DNA, 5859 bp, synthetic construct
  misc_feature 1..5859: note = Description of Artificial Sequence: Synthetic coding sequence
  source 1..5859: mol_type = other DNA
atgttcagacagttctacctgtggacctgcctggccagcggcatcatcctgggcagcctgttcgagatctgcctgggccagtacgacgacgactgcaagctggccagaggcggcccccccgccaccatcgtggccatcgacgaggagagcagaaacggcaccatcctggtggacaacatgctgatcaagggcaccgccggcggccccgaccccaccatcgagctgagcctgaaggacaacgtggactactgggtgctgatggaccccgtgaagcagatgctgttcctgaacagcaccggcagagtgctggacagagacccccccatgaacatccacagcatcgtggtgcaggtgcagtgcatcaacaagaaggtgggcaccatcatctaccacgaggtgagaatcgtggtgagagacagaaacgacaacagccccaccttcaagcacgagagctactacgccaccgtgaacgagctgacccccgtgggcaccaccatcttcaccggcttcagcggcgacaacggcgccaccgacatcgacgacggccccaacggccagatcgagtacgtgatccagtacaaccccgacgaccccaccagcaacgacaccttcgagatccccctgatgctgaccggcaacatcgtgctgagaaagagactgaactacgaggacaagaccagatacttcgtgatcatccaggccaacgacagagcccagaacctgaacgagagaagaaccaccaccaccaccctgaccgtggacgtgctggacggcgacgacctgggccccatgttcctgccctgcgtgctggtgcccaacaccagagactgcagacccctgacctaccaggccgccatccccgagctgagaacccccgaggagctgaaccccatcatcgtgaccccccccatccaggccatcgaccaggacagaaacatccagccccccagcgacagacccggcatcctgtacagcatcctggtgggcacccccgaggactaccccagattcttccacatgcaccccagaaccgccgagctgagcctgctggagcccgtgaacagagacttccaccagaagttcgacctggtgatcaaggccgagcaggacaacggccaccccctgcccgccttcgccggcctgcacatcgagatcctggacgagaacaaccagagcccctacttcaccatgcccagctaccagggctacatcctggagagcgcccccgtgggcgccaccatcagcgacagcctgaacctgaccagccccctgagaatcgtggccctggacaaggacatcgaggacaccaaggaccccgagctgcacctgttcctgaacgactacaccagcgtgttcaccgtgacccagaccggcatcaccagatacctgaccctgctgcagcccgtggacagagaggagcagcagacctacaccttcagcatcaccgccttcgacggcgtgcaggagagcgagcccgtgatcgtgaacatccaggtgatggacgccaacgacaacacccccaccttccccgagatcagctacgacgtgtacgtgtacaccgacatgagacccggcgacagcgtgatccagctgaccgccgtggacgccgacgagggcagcaacggcgagatcacctacgagatcctggtgggcgcccagggcgacttcatcatcaacaagaccaccggcctgatcaccatcgcccccggcgtggagatgatcgtgggcagaacctacgccctgaccgtgcaggccgccgacaacgccccccccgccgagagaagaaacagcatctgcaccgtgtacatcgaggtgctgccccccaacaaccagagcccccccagattcccccagctgatgtacagcctggagatcagcgaggccatgagagtgggcgccgtgctgctgaacctgcaggccaccgacagagagggcgacagcatcacctacgccatcgagaacggcgacccccagagagtgttcaacctgagcgagaccaccggcatcctgaccctgggcaaggccctggacagagagagcaccgacagatacatcctgatcatcaccgccagcgacggcagacccgacggcaccagcaccgccaccgtgaacatcgtggtgaccgacgtgaacgacaacgcccccgtgttcgacccctacctgcccagaaacctgagcgtggtggaggaggaggccaacgccttcgtgggccaggtgaaggccaccgaccccgacgccggcatcaacggccaggtgcactacagcctgggcaacttcaacaacctgttcagaatcaccagcaacggcagcatctacaccgccgtgaagctgaacagagaggtgagagactactacgagctggtggtggtggccaccgacggcgccgtgcaccccagacacagcaccctgaccctggccatcaaggtgctggacatcgacgacaacagccccgtgttcaccaacagcacctacaccgtgctggtggaggagaacctgcccgccggcaccaccatcctgcagatcgaggccaaggacgtggacctgggcgccaacgtgagctacagaatcagaagccccgaggtgaagcacttcttcgccctgcaccccttcaccggcgagctgagcctgctgagaagcctggactacgaggccttccccgaccaggaggccagcatcaccttcctggtggaggccttcgacatctacggcaccatgccccccggcatcgccaccgtgaccgtgatcgtgaaggacatgaacgactacccccccgtgttcagcaagagaatctacaagggcatggtggcccccgacgccgtgaagggcacccccatcaccaccgtgtacgccgaggacgccgacccccccggcctgcccgccagcagagtgagatacagagtggacgacgtgcagttcccctaccccgccagcatcttcgaggtggaggaggacagcggcagagtgatcaccagagtgaacctgaacgaggagcccaccaccatcttcaagctggtggtggtggccttcgacgacggcgagcccgtgatgagcagcagcgccaccgtgaagatcctggtgctgcaccccggcgagatccccagattcacccaggaggagtacagacccccccccgtgagcgagctggccaccaagggcaccatggtgggcgtgatcagcgccgccgccatcaaccagagcatcgtgtacagcatcgtgagcggcaacgaggaggacaccttcggcatcaacaacatcaccggcgtgatctacgtgaacggccccctggactacgagaccagaaccagctacgtgctgagagtgcaggccgacagcctggaggtggtgctggccaacctgagagtgcccagcaagagcaacaccgccaaggtgtacatcgagatccaggacgagaacaaccacccccccgtgttccagaagaagttctacatcggcggcgtgagcgaggacgccagaatgttcaccagcgtgctgagagtgaaggccaccgacaaggacaccggcaactacagcgtgatggcctacagactgatcatcccccccatcaaggagggcaaggagggcttcgtggtggagacctacaccggcctgatcaagaccgccatgctgttccacaacatgagaagaagctacttcaagttccaggtgatcgccaccgacgactacggcaagggcctgagcggcaaggccgacgtgctggtgagcgtggtgaaccagctggacatgcaggtgatcgtgagcaacgtgccccccaccctggtggagaagaagatcgaggacctgaccgagatcctggacagatacgtgcaggagcagatccccggcgccaaggtggtggtggagagcatcggcgccagaagacacggcgacgccttcagcctggaggactacaccaagtgcgacctgaccgtgtacgccatcgacccccagaccaacagagccatcgacagaaacgagctgttcaagttcctggacggcaagctgctggacatcaacaaggacttccagccctactacggcgagggcggcagaatcctggagatcagaacccccgaggccgtgaccagcatcaagaagagaggcgagagcctgggctacaccgagggcgccctgctggccctggccttcatcatcatcctgtgctgcatccccgccatcctggtggtgctggtgagctacagacagagacaggccgagtgcaccaagaccgccagaatccaggccgccctgcccgccgccaagcccgccgtgcccgcccccgcccccgtggccgcccccccccccccccccccccccccccccggcgcccacctgtacgaggagctgggcgacagcagcatcctgttcctgctgtaccacttccagcagagcagaggcaacaacagcgtgagcgaggacagaaagcaccagcaggtggtgatgcccttcagcagcaacaccatcgaggcccacaagagcgcccacgtggacggcagcctgaagagcaacaagctgaagagcgccagaaagttcaccttcctgagcgacgaggacgacctgagcgcccacaaccccctgtacaaggagaacatcagccaggtgagcaccaacagcgacatcagccagagaaccgacttcgtggaccccttcagccccaagatccaggccaagagcaagagcctgagaggccccagagagaagatccagagactgtggagccagagcgtgagcctgcccagaagactgatgagaaaggtgcccaacagacccgagatcatcgacctgcagcagtggcagggcaccagacagaaggccgagaacgagaacaccggcatctgcaccaacaagagaggcagcagcaaccccctgctgaccaccgaggaggccaacctgaccgagaaggaggagatcagacagggcgagaccctgatgatcgagggcaccgagcagctgaagagcctgagcagcgacagcagcttctgcttccccagaccccacttcagcttcagcaccctgcccaccgtgagcagaaccgtggagctgaagagcgagcccaacgtgatcagcagccccgccgagtgcagcctggagctgagccccagcagaccctgcgtgctgcacagcagcctgagcagaagagagacccccatctgcatgctgcccatcgagaccgagagaaacatcttcgagaacttcgcccacccccccaacatcagccccagcgcctgccccctgcccccccccccccccatcagcccccccagccccccccccgcccccgcccccctggcccccccccccgacatcagccccttcagcctgttctgccccccccccagcccccccagcatccccctgcccctgcccccccccaccttcttccccctgagcgtgagcaccagcggcccccccaccccccccctgctgccccccttccccacccccctgcccccccccccccccagcatcccctgcccccccccccccagcgccagcttcctgagcaccgagtgcgtgtgcatcaccggcgtgaagtgcaccaccaacctgatgcccgccgagaagatcaagagcagcatgacccagctgagcaccaccaccgtgtgcaagaccgacccccagagagagcccaagggcatcctgagacacgtgaagaacctggccgagctggagaagagcgtggccaacatgtacagccagatcgagaagaactacctgagaaccaacgtgagcgagctgcagaccatgtgccccagcgaggtgaccaacatggagatcaccagcgagcagaacaagggcagcctgaacaacatcgtggagggcaccgagaagcagagccacagccagagcaccagcctgtag

SEQ ID NO: 95771 - DNA, 5748 bp, synthetic construct
  misc_feature 1..5748: note = Description of Artificial Sequence: Synthetic coding sequence
  source 1..5748: mol_type = other DNA
atgttcagacagttctacctgtggacctgcctggccagcggcatcatcctgggcagcctgttcgagatctgcctgggccagtacgacgacgactgcaagctggccagaggcggcccccccgccaccatcgtggccatcgacgaggagagcagaaacggcaccatcctggtggacaacatgctgatcaagggcaccgccggcggccccgaccccaccatcgagctgagcctgaaggacaacgtggactactgggtgctgatggaccccgtgaagcagatgctgttcctgaacagcaccggcagagtgctggacagagacccccccatgaacatccacagcatcgtggtgcaggtgcagtgcatcaacaagaaggtgggcaccatcatctaccacgaggtgagaatcgtggtgagagacagaaacgacaacagccccaccttcaagcacgagagctactacgccaccgtgaacgagctgacccccgtgggcaccaccatcttcaccggcttcagcggcgacaacggcgccaccgacatcgacgacggccccaacggccagatcgagtacgtgatccagtacaaccccgacgaccccgacagagcccagaacctgaacgagagaagaaccaccaccaccaccctgaccgtggacgtgctggacggcgacgacctgggccccatgttcctgccctgcgtgctggtgcccaacaccagagactgcagacccctgacctaccaggccgccatccccgagctgagaacccccgaggagctgaaccccatcatcgtgaccccccccatccaggccatcgaccaggacagaaacatccagccccccagcgacagacccggcatcctgtacagcatcctggtgggcacccccgaggactaccccagattcttccacatgcaccccagaaccgccgagctgagcctgctggagcccgtgaacagagacttccaccagaagttcgacctggtgatcaaggccgagcaggacaacggccaccccctgcccgccttcgccggcctgcacatcgagatcctggacgagaacaaccagagcccctacttcaccatgcccagctaccagggctacatcctggagagcgcccccgtgggcgccaccatcagcgacagcctgaacctgaccagccccctgagaatcgtggccctggacaaggacatcgaggacaccaaggaccccgagctgcacctgttcctgaacgactacaccagcgtgttcaccgtgacccagaccggcatcaccagatacctgaccctgctgcagcccgtggacagagaggagcagcagacctacaccttcagcatcaccgccttcgacggcgtgcaggagagcgagcccgtgatcgtgaacatccaggtgatggacgccaacgacaacacccccaccttccccgagatcagctacgacgtgtacgtgtacaccgacatgagacccggcgacagcgtgatccagctgaccgccgtggacgccgacgagggcagcaacggcgagatcacctacgagatcctggtgggcgcccagggcgacttcatcatcaacaagaccaccggcctgatcaccatcgcccccggcgtggagatgatcgtgggcagaacctacgccctgaccgtgcaggccgccgacaacgccccccccgccgagagaagaaacagcatctgcaccgtgtacatcgaggtgctgccccccaacaaccagagcccccccagattcccccagctgatgtacagcctggagatcagcgaggccatgagagtgggcgccgtgctgctgaacctgcaggccaccgacagagagggcgacagcatcacctacgccatcgagaacggcgacccccagagagtgttcaacctgagcgagaccaccggcatcctgaccctgggcaaggccctggacagagagagcaccgacagatacatcctgatcatcaccgccagcgacggcagacccgacggcaccagcaccgccaccgtgaacatcgtggtgaccgacgtgaacgacaacgcccccgtgttcgacccctacctgcccagaaacctgagcgtggtggaggaggaggccaacgccttcgtgggccaggtgaaggccaccgaccccgacgccggcatcaacggccaggtgcactacagcctgggcaacttcaacaacctgttcagaatcaccagcaacggcagcatctacaccgccgtgaagctgaacagagaggtgagagactactacgagctggtggtggtggccaccgacggcgccgtgcaccccagacacagcaccctgaccctggccatcaaggtgctggacatcgacgacaacagccccgtgttcaccaacagcacctacaccgtgctggtggaggagaacctgcccgccggcaccaccatcctgcagatcgaggccaaggacgtggacctgggcgccaacgtgagctacagaatcagaagccccgaggtgaagcacttcttcgccctgcaccccttcaccggcgagctgagcctgctgagaagcctggactacgaggccttccccgaccaggaggccagcatcaccttcctggtggaggccttcgacatctacggcaccatgccccccggcatcgccaccgtgaccgtgatcgtgaaggacatgaacgactacccccccgtgttcagcaagagaatctacaagggcatggtggcccccgacgccgtgaagggcacccccatcaccaccgtgtacgccgaggacgccgacccccccggcctgcccgccagcagagtgagatacagagtggacgacgtgcagttcccctaccccgccagcatcttcgaggtggaggaggacagcggcagagtgatcaccagagtgaacctgaacgaggagcccaccaccatcttcaagctggtggtggtggccttcgacgacggcgagcccgtgatgagcagcagcgccaccgtgaagatcctggtgctgcaccccggcgagatccccagattcacccaggaggagtacagacccccccccgtgagcgagctggccaccaagggcaccatggtgggcgtgatcagcgccgccgccatcaaccagagcatcgtgtacagcatcgtgagcggcaacgaggaggacaccttcggcatcaacaacatcaccggcgtgatctacgtgaacggccccctggactacgagaccagaaccagctacgtgctgagagtgcaggccgacagcctggaggtggtgctggccaacctgagagtgcccagcaagagcaacaccgccaaggtgtacatcgagatccaggacgagaacaaccacccccccgtgttccagaagaagttctacatcggcggcgtgagcgaggacgccagaatgttcaccagcgtgctgagagtgaaggccaccgacaaggacaccggcaactacagcgtgatggcctacagactgatcatcccccccatcaaggagggcaaggagggcttcgtggtggagacctacaccggcctgatcaagaccgccatgctgttccacaacatgagaagaagctacttcaagttccaggtgatcgccaccgacgactacggcaagggcctgagcggcaaggccgacgtgctggtgagcgtggtgaaccagctggacatgcaggtgatcgtgagcaacgtgccccccaccctggtggagaagaagatcgaggacctgaccgagatcctggacagatacgtgcaggagcagatccccggcgccaaggtggtggtggagagcatcggcgccagaagacacggcgacgccttcagcctggaggactacaccaagtgcgacctgaccgtgtacgccatcgacccccagaccaacagagccatcgacagaaacgagctgttcaagttcctggacggcaagctgctggacatcaacaaggacttccagccctactacggcgagggcggcagaatcctggagatcagaacccccgaggccgtgaccagcatcaagaagagaggcgagagcctgggctacaccgagggcgccctgctggccctggccttcatcatcatcctgtgctgcatccccgccatcctggtggtgctggtgagctacagacagagacaggccgagtgcaccaagaccgccagaatccaggccgccctgcccgccgccaagcccgccgtgcccgcccccgcccccgtggccgcccccccccccccccccccccccccccccggcgcccacctgtacgaggagctgggcgacagcagcatcctgttcctgctgtaccacttccagcagagcagaggcaacaacagcgtgagcgaggacagaaagcaccagcaggtggtgatgcccttcagcagcaacaccatcgaggcccacaagagcgcccacgtggacggcagcctgaagagcaacaagctgaagagcgccagaaagttcaccttcctgagcgacgaggacgacctgagcgcccacaaccccctgtacaaggagaacatcagccaggtgagcaccaacagcgacatcagccagagaaccgacttcgtggaccccttcagccccaagatccaggccaagagcaagagcctgagaggccccagagagaagatccagagactgtggagccagagcgtgagcctgcccagaagactgatgagaaaggtgcccaacagacccgagatcatcgacctgcagcagtggcagggcaccagacagaaggccgagaacgagaacaccggcatctgcaccaacaagagaggcagcagcaaccccctgctgaccaccgaggaggccaacctgaccgagaaggaggagatcagacagggcgagaccctgatgatcgagggcaccgagcagctgaagagcctgagcagcgacagcagcttctgcttccccagaccccacttcagcttcagcaccctgcccaccgtgagcagaaccgtggagctgaagagcgagcccaacgtgatcagcagccccgccgagtgcagcctggagctgagccccagcagaccctgcgtgctgcacagcagcctgagcagaagagagacccccatctgcatgctgcccatcgagaccgagagaaacatcttcgagaacttcgcccacccccccaacatcagccccagcgcctgccccctgcccccccccccccccatcagcccccccagccccccccccgcccccgcccccctggcccccccccccgacatcagccccttcagcctgttctgccccccccccagcccccccagcatccccctgcccctgcccccccccaccttcttccccctgagcgtgagcaccagcggcccccccaccccccccctgctgccccccttccccacccccctgcccccccccccccccagcatcccctgcccccccccccccagcgccagcttcctgagcaccgagtgcgtgtgcatcaccggcgtgaagtgcaccaccaacctgatgcccgccgagaagatcaagagcagcatgacccagctgagcaccaccaccgtgtgcaagaccgacccccagagagagcccaagggcatcctgagacacgtgaagaacctggccgagctggagaagagcgtggccaacatgtacagccagatcgagaagaactacctgagaaccaacgtgagcgagctgcagaccatgtgccccagcgaggtgaccaacatggagatcaccagcgagcagaacaagggcagcctgaacaacatcgtggagggcaccgagaagcagagccacagccagagcaccagcctgtag

SEQ ID NO: 95772 - DNA, 5799 bp, synthetic construct
  misc_feature 1..5799: note = Description of Artificial Sequence: Synthetic coding sequence
  source 1..5799: mol_type = other DNA
atgttcagacagttctacctgtggacctgcctggccagcggcatcatcctgggcagcctgttcgagatctgcctgggccagtacgacgacggcaccatcctggtggacaacatgctgatcaagggcaccgccggcggccccgaccccaccatcgagctgagcctgaaggacaacgtggactactgggtgctgatggaccccgtgaagcagatgctgttcctgaacagcaccggcagagtgctggacagagacccccccatgaacatccacagcatcgtggtgcaggtgcagtgcatcaacaagaaggtgggcaccatcatctaccacgaggtgagaatcgtggtgagagacagaaacgacaacagccccaccttcaagcacgagagctactacgccaccgtgaacgagctgacccccgtgggcaccaccatcttcaccggcttcagcggcgacaacggcgccaccgacatcgacgacggccccaacggccagatcgagtacgtgatccagtacaaccccgacgaccccaccagcaacgacaccttcgagatccccctgatgctgaccggcaacatcgtgctgagaaagagactgaactacgaggacaagaccagatacttcgtgatcatccaggccaacgacagagcccagaacctgaacgagagaagaaccaccaccaccaccctgaccgtggacgtgctggacggcgacgacctgggccccatgttcctgccctgcgtgctggtgcccaacaccagagactgcagacccctgacctaccaggccgccatccccgagctgagaacccccgaggagctgaaccccatcatcgtgaccccccccatccaggccatcgaccaggacagaaacatccagccccccagcgacagacccggcatcctgtacagcatcctggtgggcacccccgaggactaccccagattcttccacatgcaccccagaaccgccgagctgagcctgctggagcccgtgaacagagacttccaccagaagttcgacctggtgatcaaggccgagcaggacaacggccaccccctgcccgccttcgccggcctgcacatcgagatcctggacgagaacaaccagagcccctacttcaccatgcccagctaccagggctacatcctggagagcgcccccgtgggcgccaccatcagcgacagcctgaacctgaccagccccctgagaatcgtggccctggacaaggacatcgaggacaccaaggaccccgagctgcacctgttcctgaacgactacaccagcgtgttcaccgtgacccagaccggcatcaccagatacctgaccctgctgcagcccgtggacagagaggagcagcagacctacaccttcagcatcaccgccttcgacggcgtgcaggagagcgagcccgtgatcgtgaacatccaggtgatggacgccaacgacaacacccccaccttccccgagatcagctacgacgtgtacgtgtacaccgacatgagacccggcgacagcgtgatccagctgaccgccgtggacgccgacgagggcagcaacggcgagatcacctacgagatcctggtgggcgcccagggcgacttcatcatcaacaagaccaccggcctgatcaccatcgcccccggcgtggagatgatcgtgggcagaacctacgccctgaccgtgcaggccgccgacaacgccccccccgccgagagaagaaacagcatctgcaccgtgtacatcgaggtgctgccccccaacaaccagagcccccccagattcccccagctgatgtacagcctggagatcagcgaggccatgagagtgggcgccgtgctgctgaacctgcaggccaccgacagagagggcgacagcatcacctacgccatcgagaacggcgacccccagagagtgttcaacctgagcgagaccaccggcatcctgaccctgggcaaggccctggacagagagagcaccgacagatacatcctgatcatcaccgccagcgacggcagacccgacggcaccagcaccgccaccgtgaacatcgtggtgaccgacgtgaacgacaacgcccccgtgttcgacccctacctgcccagaaacctgagcgtggtggaggaggaggccaacgccttcgtgggccaggtgaaggccaccgaccccgacgccggcatcaacggccaggtgcactacagcctgggcaacttcaacaacctgttcagaatcaccagcaacggcagcatctacaccgccgtgaagctgaacagagaggtgagagactactacgagctggtggtggtggccaccgacggcgccgtgcaccccagacacagcaccctgaccctggccatcaaggtgctggacatcgacgacaacagccccgtgttcaccaacagcacctacaccgtgctggtggaggagaacctgcccgccggcaccaccatcctgcagatcgaggccaaggacgtggacctgggcgccaacgtgagctacagaatcagaagccccgaggtgaagcacttcttcgccctgcaccccttcaccggcgagctgagcctgctgagaagcctggactacgaggccttccccgaccaggaggccagcatcaccttcctggtggaggccttcgacatctacggcaccatgccccccggcatcgccaccgtgaccgtgatcgtgaaggacatgaacgactacccccccgtgttcagcaagagaatctacaagggcatggtggcccccgacgccgtgaagggcacccccatcaccaccgtgtacgccgaggacgccgacccccccggcctgcccgccagcagagtgagatacagagtggacgacgtgcagttcccctaccccgccagcatcttcgaggtggaggaggacagcggcagagtgatcaccagagtgaacctgaacgaggagcccaccaccatcttcaagctggtggtggtggccttcgacgacggcgagcccgtgatgagcagcagcgccaccgtgaagatcctggtgctgcaccccggcgagatccccagattcacccaggaggagtacagacccccccccgtgagcgagctggccaccaagggcaccatggtgggcgtgatcagcgccgccgccatcaaccagagcatcgtgtacagcatcgtgagcggcaacgaggaggacaccttcggcatcaacaacatcaccggcgtgatctacgtgaacggccccctggactacgagaccagaaccagctacgtgctgagagtgcaggccgacagcctggaggtggtgctggccaacctgagagtgcccagcaagagcaacaccgccaaggtgtacatcgagatccaggacgagaacaaccacccccccgtgttccagaagaagttctacatcggcggcgtgagcgaggacgccagaatgttcaccagcgtgctgagagtgaaggccaccgacaaggacaccggcaactacagcgtgatggcctacagactgatcatcccccccatcaaggagggcaaggagggcttcgtggtggagacctacaccggcctgatcaagaccgccatgctgttccacaacatgagaagaagctacttcaagttccaggtgatcgccaccgacgactacggcaagggcctgagcggcaaggccgacgtgctggtgagcgtggtgaaccagctggacatgcaggtgatcgtgagcaacgtgccccccaccctggtggagaagaagatcgaggacctgaccgagatcctggacagatacgtgcaggagcagatccccggcgccaaggtggtggtggagagcatcggcgccagaagacacggcgacgccttcagcctggaggactacaccaagtgcgacctgaccgtgtacgccatcgacccccagaccaacagagccatcgacagaaacgagctgttcaagttcctggacggcaagctgctggacatcaacaaggacttccagccctactacggcgagggcggcagaatcctggagatcagaacccccgaggccgtgaccagcatcaagaagagaggcgagagcctgggctacaccgagggcgccctgctggccctggccttcatcatcatcctgtgctgcatccccgccatcctggtggtgctggtgagctacagacagagacaggccgagtgcaccaagaccgccagaatccaggccgccctgcccgccgccaagcccgccgtgcccgcccccgcccccgtggccgcccccccccccccccccccccccccccccggcgcccacctgtacgaggagctgggcgacagcagcatgcacaacctgttcctgctgtaccacttccagcagagcagaggcaacaacagcgtgagcgaggacagaaagcaccagcaggtggtgatgcccttcagcagcaacaccatcgaggcccacaagagcgcccacgtggacggcagcctgaagagcaacaagctgaagagcgccagaaagttcaccttcctgagcgacgaggacgacctgagcgcccacaaccccctgtacaaggagaacatcagccaggtgagcaccaacagcgacatcagccagagaaccgacttcgtggaccccttcagccccaagatccaggccaagagcaagagcctgagaggccccagagagaagatccagagactgtggagccagagcgtgagcctgcccagaagactgatgagaaaggtgcccaacagacccgagatcatcgacctgcagcagtggcagggcaccagacagaaggccgagaacgagaacaccggcatctgcaccaacaagagaggcagcagcaaccccctgctgaccaccgaggaggccaacctgaccgagaaggaggagatcagacagggcgagaccctgatgatcgagggcaccgagcagctgaagagcctgagcagcgacagcagcttctgcttccccagaccccacttcagcttcagcaccctgcccaccgtgagcagaaccgtggagctgaagagcgagcccaacgtgatcagcagccccgccgagtgcagcctggagctgagccccagcagaccctgcgtgctgcacagcagcctgagcagaagagagacccccatctgcatgctgcccatcgagaccgagagaaacatcttcgagaacttcgcccacccccccaacatcagccccagcgcctgccccctgcccccccccccccccatcagcccccccagccccccccccgcccccgcccccctggcccccccccccgacatcagccccttcagcctgttctgccccccccccagcccccccagcatccccctgcccctgcccccccccaccttcttccccctgagcgtgagcaccagcggcccccccaccccccccctgctgccccccttccccacccccctgcccccccccccccccagcatcccctgcccccccccccccagcgccagcttcctgagcaccgagtgcgtgtgcatcaccggcgtgaagtgcaccaccaacctgatgcccgccgagaagatcaagagcagcatgacccagctgagcaccaccaccgtgtgcaagaccgacccccagagagagcccaagggcatcctgagacacgtgaagaacctggccgagctggagaagagcgtggccaacatgtacagccagatcgagaagaactacctgagaaccaacgtgagcgagctgcagaccatgtgccccagcgaggtgaccaacatggagatcaccagcgagcagaacaagggcagcctgaacaacatcgtggagggcaccgagaagcagagccacagccagagcaccagcctgtag

SEQ ID NO: 95773 - DNA, 4620 bp, synthetic construct
  misc_feature 1..4620: note = Description of Artificial Sequence: Synthetic coding sequence
  source 1..4620: mol_type = other DNA
atgttcagacagttctacctgtggacctgcctggccagcggcatcatcctgggcagcctgttcgagatctgcctgggccagtacgacgacgactgcaagctggccagaggcggcccccccgccaccatcgtggccatcgacgaggagagcagaaacggcaccatcctggtggacaacatgctgatcaagggcaccgccggcggccccgaccccaccatcgagctgagcctgaaggacaacgtggactactgggtgctgatggaccccgtgaagcagatgctgttcctgaacagcaccggcagagtgctggacagagacccccccatgaacatccacagcatcgtggtgcaggtgcagtgcatcaacaagaaggtgggcaccatcatctaccacgaggtgagaatcgtggtgagagacagaaacgacaacagccccaccttcaagcacgagagctactacgccaccgtgaacgagctgacccccgtgggcaccaccatcttcaccggcttcagcggcgacaacggcgccaccgacatcgacgacggccccaacggccagatcgagtacgtgatccagtacaaccccgacgaccccaccagcaacgacaccttcgagatccccctgatgctgaccggcaacatcgtgctgagaaagagactgaactacgaggacaagaccagatacttcgtgatcatccaggccaacgacagagcccagaacctgaacgagagaagaaccaccaccaccaccctgaccgtggacgtgctggacggcgacgacctgggccccatgttcctgccctgcgtgctggtgcccaacaccagagactgcagacccctgacctaccaggccgccatccccgagctgagaacccccgaggagctgaaccccatcatcgtgaccccccccatccaggccatcgaccaggacagaaacatccagccccccagcgacagacccggcatcctgtacagcatcctggtgggcacccccgaggactaccccagattcttccacatgcaccccagaaccgccgagctgagcctgctggagcccgtgaacagagacttccaccagaagttcgacctggtgatcaaggccgagcaggacaacggccaccccctgcccgccttcgccggcctgcacatcgagatcctggacgagaacaaccagagcccctacttcaccatgcccagctaccagggctacatcctggagagcgcccccgtgggcgccaccatcagcgacagcctgaacctgaccagccccctgagaatcgtggccctggacaaggacatcgaggacaccaaggaccccgagctgcacctgttcctgaacgactacaccagcgtgttcaccgtgacccagaccggcatcaccagatacctgaccctgctgcagcccgtggacagagaggagcagcagacctacaccttcagcatcaccgccttcgacggcgtgcaggagagcgagcccgtgatcgtgaacatccaggtgatggacgccaacgacaacacccccaccttccccgagatcagctacgacgtgtacgtgtacaccgacatgagacccggcgacagcgtgatccagctgaccgccgtggacgccgacgagggcagcaacggcgagatcacctacgagatcctggtgggcgcccagggcgacttcatcatcaacaagaccaccggcctgatcaccatcgcccccggcgtggagatgatcgtgggcagaacctacgccctgaccgtgcaggccgccgacaacgccccccccgccgagagaagaaacagcatctgcaccgtgtacatcgaggtgctgccccccaacaaccagagcccccccagattcccccagctgatgtacagcctggagatcagcgaggccatgagagtgggcgccgtgctgctgaacctgcaggccaccgacagagagggcgacagcatcacctacgccatcgagaacggcgacccccagagagtgttcaacctgagcgagaccaccggcatcctgaccctgggcaaggccctggacagagagagcaccgacagatacatcctgatcatcaccgccagcgacggcagacccgacggcaccagcaccgccaccgtgaacatcgtggtgaccgacgtgaacgacaacgcccccgtgttcgacccctacctgcccagaaacctgagcgtggtggaggaggaggccaacgccttcgtgggccaggtgaaggccaccgaccccgacgccggcatcaacggccaggtgcactacagcctgggcaacttcaacaacctgttcagaatcaccagcaacggcagcatctacaccgccgtgaagctgaacagagaggtgagagactactacgagctggtggtggtggccaccgacggcgccgtgcaccccagacacagcaccctgaccctggccatcaaggtgctggacatcgacgacaacagccccgtgttcaccaacagcacctacaccgtgctggtggaggagaacctgcccgccggcaccaccatcctgcagatcgaggccaaggacgtggacctgggcgccaacgtgagctacagaatcagaagccccgaggtgaagcacttcttcgccctgcaccccttcaccggcgagctgagcctgctgagaagcctggactacgaggccttccccgaccaggaggccagcatcaccttcctggtggaggccttcgacatctacggcaccatgccccccggcatcgccaccgtgaccgtgatcgtgaaggacatgaacgactacccccccgtgttcagcaagagaatctacaagggcatggtggcccccgacgccgtgaagggcacccccatcaccaccgtgtacgccgaggacgccgacccccccggcctgcccgccagcagagtgagatacagagtggacgacgtgcagttcccctaccccgccagcatcttcgaggtggaggaggacagcggcagagtgatcaccagagtgaacctgaacgaggagcccaccaccatcttcaagctggtggtggtggccttcgacgacggcgagcccgtgatgagcagcagcgccaccgtgaagatcctggtgctgcaccccggcgagatccccagattcacccaggaggagtacagacccccccccgtgagcgagctggccaccaagggcaccatggtgggcgtgatcagcgccgccgccatcaaccagagcatcgtgtacagcatcgtgagcggcaacgaggaggacaccttcggcatcaacaacatcaccggcgtgatctacgtgaacggccccctggactacgagaccagaaccagctacgtgctgagagtgcaggccgacagcctggaggtggtgctggccaacctgagagtgcccagcaagagcaacaccgccaaggtgtacatcgagatccaggacgagaacaaccacccccccgtgttccagaagaagttctacatcggcggcgtgagcgaggacgccagaatgttcaccagcgtgctgagagtgaaggccaccgacaaggacaccggcaactacagcgtgatggcctacagactgatcatcccccccatcaaggagggcaaggagggcttcgtggtggagacctacaccggcctgatcaagaccgccatgctgttccacaacatgagaagaagctacttcaagttccaggtgatcgccaccgacgactacggcaagggcctgagcggcaaggccgacgtgctggtgagcgtggtgaaccagctggacatgcaggtgatcgtgagcaacgtgccccccaccctggtggagaagaagatcgaggacctgaccgagatcctggacagatacgtgcaggagcagatccccggcgccaaggtggtggtggagagcatcggcgccagaagacacggcgacgccttcagcctggaggactacaccaagtgcgacctgaccgtgtacgccatcgacccccagaccaacagagccatcgacagaaacgagctgttcaagttcctggacggcaagctgctggacatcaacaaggacttccagccctactacggcgagggcggcagaatcctggagatcagaacccccgaggccgtgaccagcatcaagaagagaggcgagagcctgggctacaccgagggcgccctgctggccctggccttcatcatcatcctgtgctgcatccccgccatcctggtggtgctggtgagctacagacagttcaaggtgagacaggccgagtgcaccaagaccgccagaatccaggccgccctgcccgccgccaagcccgccgtgcccgcccccgcccccgtggccgcccccccccccccccccccccccccccccggcgcccacctgtacgaggagctgggcgacagcagcatgcacaagaactacccctggagcctggagctgatcctggccagaaacatggacaagatcatcaccgtgatgagcatgggcatgaagtgcctgaacatgggcgtggccgtggactgctaccaccagctggacagaagaaacatggtgagatggctggtgaagctgagaaagaacatgagaagaaagagaaagagccagagaaagctgaagaaccagagactgaagctggagagcctggtgagaagaaagaagtag

SEQ ID NO: 95774 - DNA, 2160 bp, synthetic construct
  misc_feature 1..2160: note = Description of Artificial Sequence: Synthetic coding sequence
  source 1..2160: mol_type = other DNA
atgttcagacagttctacctgtggacctgcctggccagcggcatcatcctgggcagcctgttcgagatctgcctgggccagtacgacgacgactgcaagctggccagaggcggcccccccgccaccatcgtggccatcgacgaggagagcagaaacggcaccatcctggtggacaacatgctgatcaagggcaccgccggcggccccgaccccaccatcgagctgagcctgaaggacaacgtggactactgggtgctgatggaccccgtgaagcagatgctgttcctgaacagcaccggcagagtgctggacagagacccccccatgaacatccacagcatcgtggtgcaggtgcagtgcatcaacaagaaggtgggcaccatcatctaccacgaggtgagaatcgtggtgagagacagaaacgacaacagccccaccttcaagcacgagagctactacgccaccgtgaacgagctgacccccgtgggcaccaccatcttcaccggcttcagcggcgacaacggcgccaccgacatcgacgacggccccaacggccagatcgagtacgtgatccagtacaaccccgacgaccccaccagcaacgacaccttcgagatccccctgatgctgaccggcaacatcgtgctgagaaagagactgaactacgaggacaagaccagatacttcgtgatcatccaggccaacgacagagcccagaacctgaacgagagaagaaccaccaccaccaccctgaccgtggacgtgctggacggcgacgacctgggccccatgttcctgccctgcgtgctggtgcccaacaccagagactgcagacccctgacctaccaggccgccatccccgagctgagaacccccgaggagctgaaccccatcatcgtgaccccccccatccaggccatcgaccaggacagaaacatccagccccccagcgacagacccggcatcctgtacagcatcctggtgggcacccccgaggactaccccagattcttccacatgcaccccagaaccgccgagctgagcctgctggagcccgtgaacagagacttccaccagaagttcgacctggtgatcaaggccgagcaggacaacggccaccccctgcccgccttcgccggcctgcacatcgagatcctggacgagaacaaccagagcccctacttcaccatgcccagctaccagggctacatcctggagagcgcccccgtgggcgccaccatcagcgacagcctgaacctgaccagccccctgagaatcgtggccctggacaaggacatcgaggacgaggagcccaagaagatcaagaagcccaaggtggagatcagagagcccagcgaggaggaggaggtggtggtgaccatcgagaagccccccgccgccgagcccacctacaccacctggaagagagccagaatcttccccatgatcttcaagaaggtgagaggcctggccgacaagagaggcatcgtggacctggagggcgaggagtggcagagaagactggaggaggaggacaaggactacctgaagctgaccctggaccaggaggaggccaccgagagcaccgtggagagcgaggaggagagcagcagcgactacaccgagtacagcgaggaggagagcgagttcagcgagagcgagaccaccgaggaggagagcgagagcgagacccccagcgaggaggaggagagcagcacccccgagagcgaggagagcgagagcaccgagagcgagggcgagaaggccagaaagaacatcgtgctggccagaagaagacccatggtggaggaggtgaaggaggtgaagggcagaaaggaggagccccaggaggagcagaaggagcccaagatggaggaggaggagcacagcgaggaggaggagagcggccccgcccccgtggaggagagcaccgaccccgaggcccaggacatccccgaggagggcagcgccgagagcgccagcgtggagggcggcgtggagagcgaggaggagagcgagagcggcagcagcagcagcagcagcgagagccagagcggcggcccctggggctaccaggtgcccgcctacgacagaagcaagaacgccaaccagaagaagagccccggcgccaacagcgagggctacaacaccgccctgtag

SEQ ID NO: 95775 - DNA, 1953 bp, synthetic construct
  misc_feature 1..1953: note = Description of Artificial Sequence: Synthetic coding sequence
  source 1..1953: mol_type = other DNA
atgttcagacagttctacctgtggacctgcctggccagcggcatcatcctgggcagcctgttcgagatctgcctgggccagtacgacgacgactgcaagctggccagaggcggcccccccgccaccatcgtggccatcgacgaggagagcagaaacggcaccatcctggtggacaacatgctgatcaagggcaccgccggcggccccgaccccaccatcgagctgagcctgaaggacaacgtggactactgggtgctgatggaccccgtgaagcagatgctgttcctgaacagcaccggcagagtgctggacagagacccccccatgaacatccacagcatcgtggtgcaggtgcagtgcatcaacaagaaggtgggcaccatcatctaccacgaggtgagaatcgtggtgagagacagaaacgacaacagccccaccttcaagcacgagagctactacgccaccgtgaacgagctgacccccgtgggcaccaccatcttcaccggcttcagcggcgacaacggcgccaccgacatcgacgacggccccaacggccagatcgagtacgtgatccagtacaaccccgacgaccccaccagcaacgacaccttcgagatccccctgatgctgaccggcaacatcgtgctgagaaagagactgaactacgaggacaagaccagatacttcgtgatcatccaggccaacgacagagcccagaacctgaacgagagaagaaccaccaccaccaccctgaccgtggacgtgctggacggcgacgacctgggccccatgttcctgccctgcgtgctggtgcccaacaccagagactgcagacccctgacctaccaggccgccatccccgagctgagaacccccgaggagctgaaccccatcatcgtgaccccccccatccaggccatcgaccaggacagaaacatccagccccccagcgacagacccggcatcctgtacagcatcctggtgggcacccccgaggactaccccagattcttccacatgcaccccagaaccgccgagctgagcctgctggagcccgtgaacagagacttccaccagaagttcgacctggtgatcaaggaggagcccaagaagatcaagaagcccaaggtggagatcagagagcccagcgaggaggaggaggtggtggtgaccatcgagaagccccccgccgccgagcccacctacaccacctggaagagagccagaatcttccccatgatcttcaagaaggtgagaggcctggccgacaagagaggcatcgtggacctggagggcgaggagtggcagagaagactggaggaggaggacaaggactacctgaagctgaccctggaccaggaggaggccaccgagagcaccgtggagagcgaggaggagagcagcagcgactacaccgagtacagcgaggaggagagcgagttcagcgagagcgagaccaccgaggaggagagcgagagcgagacccccagcgaggaggaggagagcagcacccccgagagcgaggagagcgagagcaccgagagcgagggcgagaaggccagaaagaacatcgtgctggccagaagaagacccatggtggaggaggtgaaggaggtgaagggcagaaaggaggagccccaggaggagcagaaggagcccaagatggaggaggaggagcacagcgaggaggaggagagcggccccgcccccgtggaggagagcaccgaccccgaggcccaggacatccccgaggagggcagcgccgagagcgccagcgtggagggcggcgtggagagcgaggaggagagcgagagcggcagcagcagcagcagcagcgagagccagagcggcggcccctggggctaccaggtgcccgcctacgacagaagcaagaacgccaaccagaagaagagccccggcgccaacagcgagggctacaacaccgccctgtag

SEQ ID NO: 95776 - DNA, 5358 bp, synthetic construct
  misc_feature 1..5358: note = Description of Artificial Sequence: Synthetic coding sequence
  source 1..5358: mol_type = other DNA
atgttcagacagttctacctgtggacctgcctggccagcggcatcatcctgggcagcctgttcgagatctgcctgggccagtacgacgacgactgcaagctggccagaggcggcccccccgccaccatcgtggccatcgacgaggagagcagaaacggcaccatcctggtggacaacatgctgatcaagggcaccgccggcggccccgaccccaccatcgagctgagcctgaaggacaacgtggactactgggtgctgatggaccccgtgaagcagatgctgttcctgaacagcaccggcagagtgctggacagagacccccccatgaacatccacagcatcgtggtgcaggtgcagtgcatcaacaagaaggtgggcaccatcatctaccacgaggtgagaatcgtggtgagagacagaaacgacaacagccccaccttcaagcacgagagctactacgccaccgtgaacgagctgacccccgtgggcaccaccatcttcaccggcttcagcggcgacaacggcgccaccgacatcgacgacggccccaacggccagatcgagtacgtgatccagtacaaccccgacgaccccaccagcaacgacaccttcgagatccccctgatgctgaccggcaacatcgtgctgagaaagagactgaactacgaggacaagaccagatacttcgtgatcatccaggccaacgacagagcccagaacctgaacgagagaagaaccaccaccaccaccctgaccgtggacgtgctggacggcgacgacctgggccccatgttcctgccctgcgtgctggtgcccaacaccagagactgcagacccctgacctaccaggccgccatccccgagctgagaacccccgaggagctgaaccccatcatcgtgaccccccccatccaggccatcgaccaggacagaaacatccagccccccagcgacagacccggcatcctgtacagcatcctggtgggcacccccgaggactaccccagattcttccacatgcaccccagaaccgccgagctgagcctgctggagcccgtgaacagagacttccaccagaagttcgacctggtgatcaaggccgagcaggacaacggccaccccctgcccgccttcgccggcctgcacatcgagatcctggacgagaacaaccagagcccctacttcaccatgcccagctaccagggctacatcctggagagcgcccccgtgggcgccaccatcagcgacagcctgaacctgaccagccccctgagaatcgtggccctggacaaggacatcgaggacgtgccccccagcggcgtgcccaccaaggaccccgagctgcacctgttcctgaacgactacaccagcgtgttcaccgtgacccagaccggcatcaccagatacctgaccctgctgcagcccgtggacagagaggagcagcagacctacaccttcagcatcaccgccttcgacggcgtgcaggagagcgagcccgtgatcgtgaacatccaggtgatggacgccaacgacaacacccccaccttccccgagatcagctacgacgtgtacgtgtacaccgacatgagacccggcgacagcgtgatccagctgaccgccgtggacgccgacgagggcagcaacggcgagatcacctacgagatcctggtgggcgcccagggcgacttcatcatcaacaagaccaccggcctgatcaccatcgcccccggcgtggagatgatcgtgggcagaacctacgccctgaccgtgcaggccgccgacaacgccccccccgccgagagaagaaacagcatctgcaccgtgtacatcgaggtgctgccccccaacaaccagagcccccccagattcccccagctgatgtacagcctggagatcagcgaggccatgagagtgggcgccgtgctgctgaacctgcaggccaccgacagagagggcgacagcatcacctacgccatcgagaacggcgacccccagagagtgttcaacctgagcgagaccaccggcatcctgaccctgggcaaggccctggacagagagagcaccgacagatacatcctgatcatcaccgccagcgacggcagacccgacggcaccagcaccgccaccgtgaacatcgtggtgaccgacgtgaacgacaacgcccccgtgttcgacccctacctgcccagaaacctgagcgtggtggaggaggaggccaacgccttcgtgggccaggtgaaggccaccgaccccgacgccggcatcaacggccaggtgcactacagcctgggcaacttcaacaacctgttcagaatcaccagcaacggcagcatctacaccgccgtgaagctgaacagagaggtgagagactactacgagctggtggtggtggccaccgacggcgccgtgcaccccagacacagcaccctgaccctggccatcaaggtgctggacatcgacgacaacagccccgtgttcaccaacagcacctacaccgtgctggtggaggagaacctgcccgccggcaccaccatcctgcagatcgaggccaaggacgtggacctgggcgccaacgtgagctacagaatcagaagccccgaggtgaagcacttcttcgccctgcaccccttcaccggcgagctgagcctgctgagaagcctggactacgaggccttccccgaccaggaggccagcatcaccttcctggtggaggccttcgacatctacggcaccatgccccccggcatcgccaccgtgaccgtgatcgtgaaggacatgaacgactacccccccgtgttcagcaagagaatctacaagggcatggtggcccccgacgccgtgaagggcacccccatcaccaccgtgtacgccgaggacgccgacccccccggcctgcccgccagcagagtgagatacagagtggacgacgtgcagttcccctaccccgccagcatcttcgaggtggaggaggacagcggcagagtgatcaccagagtgaacctgaacgaggagcccaccaccatcttcaagctggtggtggtggccttcgacgacggcgagcccgtgatgagcagcagcgccaccgtgaagatcctggtgctgcaccccggcgagatccccagattcacccaggaggagtacagacccccccccgtgagcgagctggccaccaagggcaccatggtgggcgtgatcagcgccgccgccatcaaccagagcatcgtgtacagcatcgtgagcggcaacgaggaggacaccttcggcatcaacaacatcaccggcgtgatctacgtgaacggccccctggactacgagaccagaaccagctacgtgctgagagtgcaggccgacagcctggaggtggtgctggccaacctgagagtgcccagcaagagcaacaccgccaaggtgtacatcgagatccaggacgagaacaaccacccccccgtgttccagaagaagttctacatcggcggcgtgagcgaggacgccagaatgttcaccagcgtgctgagagtgaaggccaccgacaaggacaccggcaactacagcgtgatggcctacagactgatcatcccccccatcaaggagggcaaggagggcttcgtggtggagacctacaccggcctgatcaagaccgccatgctgttccacaacatgagaagaagctacttcaagttccaggtgatcgccaccgacgactacggcaagggcctgagcggcaaggccgacgtgctggtgagcgtggtgaaccagctggacatgcaggtgatcgtgagcaacgtgccccccaccctggtggagaagaagatcgaggacctgaccgagatcctggacagatacgtgcaggagcagatccccggcgccaaggtggtggtggagagcatcggcgccagaagacacggcgacgccttcagcctggaggactacaccaagtgcgacctgaccgtgtacgccatcgacccccagaccaacagagccatcgacagaaacgagctgttcaagttcctggacggcaagctgctggacatcaacaaggacttccagccctactacggcgagggcggcagaatcctggagatcagaacccccgaggccgtgaccagcatcaagaagagaggcgagagcctgggctacaccgagggcgccctgctggccctggccttcatcatcatcctgtgctgcatccccgccatcctggtggtgctggtgagctacagacagttcaaggtgagacaggccgagtgcaccaagaccgccagaatccaggccgccctgcccgccgccaagcccgccgtgcccgcccccgcccccgtggccgcccccccccccccccccccccccccccccggcgcccacctgtacgaggagctgggcgacagcagcatgcacaagtacgagatgccccagtacggcagcagaagaagactgctgccccccgccggccaggaggagtacggcgaggtggtgggcgaggccgaggaggagtacgaggaggaggaggaggagcccaagaagatcaagaagcccaaggtggagatcagagagcccagcgaggaggaggaggtggtggtgaccatcgagaagccccccgccgccgagcccacctacaccacctggaagagagccagaatcttccccatgatcttcaagaaggtgagaggcctggccgacaagagaggcatcgtggacctggagggcgaggagtggcagagaagactggaggaggaggacaaggactacctgaagctgaccctggaccaggaggaggccaccgagagcaccgtggagagcgaggaggagagcagcagcgactacaccgagtacagcgaggaggagagcgagttcagcgagagcgagaccaccgaggaggagagcgagagcgagacccccagcgaggaggaggagagcagcacccccgagagcgaggagagcgagagcaccgagagcgagggcgagaaggccagaaagaacatcgtgctggccagaagaagacccatggtggaggaggtgaaggaggtgaagggcagaaaggaggagccccaggaggagcagaaggagcccaagatggaggaggaggagcacagcgaggaggaggagagcggccccgcccccgtggaggagagcaccgaccccgaggcccaggacatccccgaggagggcagcgccgagagcgccagcgtggagggcggcgtggagagcgaggaggagagcgagagcggcagcagcagcagcagcagcgagagccagagcggcggcccctggggctaccaggtgcccgcctacgacagaagcaagaacgccaaccagaagaagagccccggcgccaacagcgagggctacaacaccgccctgtag
